United States Patent Application Publication US 2026/0103690 A1 - sequence listing, part 58

SEQ ID NO: 280834 - protein, 418 aa, unidentified
MTSSKTEKIKTINEKTLIVALDIGKKVHYGYFRTPKNQDIKPFSFYNTGQSFNKFWEKLCRFKDKHMLDKVVVGFESTGPYAEPISNYLRKKPVNLVQVNPMHTKRIKELTGNSPNKTDKKDPRVIADVISLGHSLTVVVPEGAAAQLRRLTQARERAIERRTAMNNQLQDLIFVIFPELGDIIKPSTKTGMYLIKNYPDPKSIVSIGIETLCNIVRKISRGKFGIDRVEELYNTAKESVGITEGKESILLETSHLVSNIEAENRYIESLEEQMIVYLEQIPYSHSILSVKGIGNITVAGLIGEVGDFRKFKTISEVTKLAGLDLFEVSSGKHKGKHRISKRGRALIRKLLFFAAMNAVRSHGIMHARYQKMLNNGRPKIKALIAVSRKLLRIIFALVRDSAEYDENYNRKHEYKLAA

SEQ ID NO: 280835 - protein, 323 aa, unidentified
MFQITVGVDIAKNKFDAALLAENKYKHKHFTNDNAGFGAFVTWLSGFGLSAQPLVCMEATGAYGLPLADFLAAKGYPVSIVNPAKIHAFARSELSRAKTDKADAKLIARYALSMQPGLWTPPPPEIRRLQALTRRLEHLLEIRQMERNRLDTADGCVKDSIDTLLKTVEDEIKSVRQAISDLIGNDPDLDRRRGLLESIPGIGEATVAHLLIALSPHQGFTHAKQVVAFAGLAPALRESGQWTGKTRISKNGDPVLRKVLYMPALVAWQHNPVIRAFCGRLKANGKNGKAVACAAMRKLIHIAFGVLKSGEPFDTLWANANKA

SEQ ID NO: 280836 - protein, 307 aa, unidentified
MKAKEINFIQVVKVGCGIDVHRDIIVATIRKSNDEYETREFSSYTGSLISLRDWCKAEGVTHVAMESTGVYWKPVFNILEENFEIILVNARHVKNVPGHKTDKKDSIWISKLLLSGLLKGSFIPPKEIRELRDLVRYKRKIVAQVASEKNRIIKILEDANIKLSSVLSNVDGAVGTKIIHCLIEGQTDVNELAKFYHGKMKVSKDELKKALDGRITKHHRFMLQLLKDSIAEKEHQIERIEAQIDEATKACQIEIDLLQTIPGVGKDSAISIISEIGTDMSRFPDEHHLSSWAGMSPGNNESGGKKK

SEQ ID NO: 280837 - protein, 454 aa, unidentified
MAKLRKNKKAHGLVAAPVMEPNAAGVDIGATEIYIAVPPDRDTQPVRRFAAFTEDLKAAADWLERCRIETVAMESTGVYWIPLFQILETRGMKVCLVNARHVKNVPGRKTDVSDCQWLQYLHAVGLLRASFRPSGQVCAVRSLMRYRESLVGMAAVHLQHMQKALDQMNLQLHHVLSDLSGTTGMAILDAILCGERNPLKLAQLRDPRIKASPETIAKSLVGDYRREHLFTLRQSVTAYRSYQQLLACCDVEIEQMLGEFPDGAGPDTPVLADPKDRHRPRRNEMKFDLRGHLYRIFGVDLTEVPGLNALTAHTLLTEVGPDLSAFPNVGAFASWMGLCPDNRISGGKVLSSHTRKVNNRAARALRMAAQSLFRSQSWMGQYYRRMRAKLGAPKAITASAHKLARIVFHMLTNRHAYDETVFAQQEIQNQHRLQQRLMQQAKKHGFQLIPIAQN

SEQ ID NO: 280838 - protein, 354 aa, unidentified
MEQADSQAEVILGVDTHLDVHVGVVIDAVGRLKGTLSIETNPSGYAKLLVWAQSFGRLNRAGIEGTSSYGAGLTRFLEMSGVAIVEINRPNRSRRRHRGKSDPTDAESAARSVLAGDATGTPKSQGGIAEALRTLSVARRSAVKAKTQAVNQLRALLVSAPSVVRDALLKAKPEHCVAACAALPENDEKNLVLASLKKTLRLLAKRWKALHEELRELDKQLIRLTKLAAPRLLGRFGVGPQTAATLLVTAGDNPTRLRNEAALAALCGVSPLEASSGKTNRHRLNRGGQRQANNALWTIAMVRMRSDARTREYVVRRTGEGLSKKEIHRCLKRYIVRELYPLILADLADSSRSA

SEQ ID NO: 280839 - protein, 392 aa, unidentified
MVVSVGIDVSKDKHDCFILNSEGEILSDVFTIPNSLDGFTILLQRIRDCSSSQDNIKVGLEATGHYSYNILGFLLDNGLPTYVLNPLRTNLYRKSLSLRKTKTDRVDARTIAAMLLSDAGLKPYTDTVYHNEELKSLTRYRFDKVKERAKLKSSVSRLVCILFPELEKLTPTLHMPSVYALLDEFPGAKQIAEANLTHLKAILHNASKGRYNRDKAIDIRESARASIGAVMSAKSLELRHTIRLIRERDAEIEDIEAAIQSIMNEMHSPITTIPGIGTRMGAMILAEVGDFSRFDSPDKLLAYAGMSPSTYQSGQLKNCYPHMEKRGSRYLRYALYNATKYVCLWAPTFAAYLAKKRAEGKHYNIALSHAAKKLVRLIFAMEKSRQPYCSAT

SEQ ID NO: 280840 - protein, 407 aa, unidentified
MSKTCGIDWSERHHDVAIVDDQARVVGRGRVSDDAAGFTRLLELLAEHRDGEDGPVEIAIETDKGLFVAGLVAAGFTVFAINPRAVARYRERYGQAGGKSDPGDAGVLANILRTDRHVHRPLPADSDLVRAVKACARQHQEAVWARQQAMSRLRSLLRDYYPQALQAFPNLAHRAAANVLRAVPTPQAAQRLTPARVVALLKKAGRRNDPGLAEAISTTLRAPALRQPAPVEHALGVAAVGLIEVITAMSDAIAALEAELATVFDEHQQAAVITSQPGLGPVLGARVLGELGDDPRRFADTAGLRSFAGTAPITRASGRSLIVTSRRICNRRLGDACHWWAFAAITKSPGARAHYDRRRAAGDTHNAALRNLANKLLAKLWHCLQTGTLYNEATAWPASPTPKQAAA

SEQ ID NO: 280841 - protein, 341 aa, unidentified
MGQASTIGLDIAKWVFQAHGADATGRVVFRKRLVRAKVLEFFAGQPPCLVALEACGGAHYWARELGKLGHTVRLIPPAYVKPFVKRQKNDVADAEAICEAAQRPGMRFVPVKDEAQQANTVVFRARDLLVRQRTQCINALRGHLAEYSHVVPQGPAHVDSLVALVEDPKSSVPESARGILQVLIRTLNALEEQLKELDGEIARRAKADPVARRLMTIPGIGPIAATAITALVPAPEGFRAGRDFAAWLGLTPLQKSTGGKHKLGAISKMGERTIRRLLILGASAVVRWASRRGAAAGSWLARMLARKPRMLVTTALANKMARIVWALLVKGGTYRAPAVAA

SEQ ID NO: 280842 - protein, 345 aa, unidentified
MYRTRVGVDLAKEVIQVCTYRNKKVQSNIEMTPDEFLCWLIKSKPATVIFEACSTSNYWKQRAIEAGHDARLISAKLVATVRQNQKTDKNDALAIVQTASLPDVTFIGGKTVEQQQLQSIKRLRELAVKQQGASQKQLISLLLELNIRISNRKGGIICAIERVLEDAENGLSAECRAAIHTAKEQLSVLIKSVHRYDDCLDKSVAAHLDCKKLLKLEGVGTTNAINLYLALGCAEIGTFKRGRDASACIGVTPIQYSSGGTVKLGSIGKYTKNSLLRSQLICGAMASIQHIVKREAKTQKEVWLKALVERRGKKCAAVALANKTIRTAFAMLTQGTEYKAELLAA

SEQ ID NO: 280843 - protein, 342 aa, unidentified
MTEVSTVGLDVAKKVFQVHGVDAAGVVKVRRSLRRSQVVRWFAKQAPCLIGLEACATSHYWARELRKLGHEVRLIPPAYAKAYVRRNKNDAADAADAAAICEAVSRPGMRFVAIKTAAQQAIGGVHKVRALLLKQRIMLINHLRGLMAEFGLVVATGPQHVGELLAILTDPEEEGLVEPLRGALLGMTEVLHGLERRIEAIDRQIVAWGRSNTTYRHLITIPGYGPILASAVAALVTDPTTFRSGRDFSAALGLVPRQEGTGGKVKLGPISKRGNGYLRRLLVNGAMSVLGSKRARQDPWIAKLLASKPRKLAAVAVANKLARIGWAIMMRQEDFHTQPAAA

SEQ ID NO: 280844 - protein, 404 aa, unidentified
MRHIELDVHRDFCEVAISEAGEVRSPGRIKTTPEVLELFARSLDRKDEVALEVTGNAWEIARIIEPHVKRVVVVSPSDTGIRQARAKTDRLDARTLAKLLAAGSLESLWMPDERTRALRRRLSRRSQLVRARTRAKNEVHAVLVRRLIAKPKVSDLFGVAGRRWLKRLELPVEERETVDGCLRQIEFLDQEIAEVERVIALDALARGDVKRLMSVPGVNVITATTFLAAIGKANRFPSQRKLVGYLGLDPRVRQSGSVPATHGRISRQGSAPARHALVEASWSAVRQPGPLRAFYERLRVRRGHQVAIVAAARKLACLFWCLLTREEDYAFAQPSLTKKKLRRLELTAGAERGQVKPGIWSTNKALGKAERELAEQAEVAYRRLVADWQSQRKKKGAGVPVGRD

SEQ ID NO: 280845 - protein, 420 aa, unidentified
MPSQPSDFAAVIGLDWADRKHDICLMPAGQQNPEFTVLEHDPVAIDSWANQLKKRFAGRPIAVCLEIARGPIVSALLEYDFFVIFPINPAALAKYRQTFTPSHAKDDPTDAFFAFDFFRCHFDRLAPLRRERPAMRALQHLVQDRRTLVHDRSRLINRVTYALKEYFPQVLRWFRDKHTDVFVDFITRWPTLLAAQRAHRDTLVDFFHLHNVRRGYVIERRIAAIKAARPLTSDPAVIEPNRLVAETLLAQISVLSKAVERFDAEIATQCAALPDFKIFNALPGAGTAMAPRLLAAFGEQRERFPNAAAIQKYAGIAPVVERSGNKSWTHWRYICPKFLRQTFVEWVGETVPRSFWAKAFYESRRAKGVDHNAIIRALAFKWLRILWRCWVDRQPYDESRYLLALQKRHSPVLAFAVHSS

SEQ ID NO: 280846 - protein, 348 aa, unidentified
MNHYAGIDVSLKCSSVCVVDASGQIVREGKVASEPAALIAWFGSLGFEVIRIGLEAGPTSQWLSAAMRDAGLAVELLETRHVHDAFKAMPVKTDRKDARGIAQLIRLGWFRPVHCKSMEAQETRAMLTARKLVQSKLHDIEMSLRGILRGFGLKVGPTTPKRFEGRIKELVSGHPSLQVIADALLAVRAVLLHEFNGFEKRVRIMARANRQAKLLMSTPAVGPIVALTYAAAIDDPARFKSSKTVGAHFGLTPKKYQSGETDYTGRISKIGDAAVREALYQAAHIMLTKPLKGCSELKSWAMRIARRAGMSKAKVALARKLAVIMHRMLADQKVFNPTVRAKPVAAAA

SEQ ID NO: 280847 - protein, 346 aa, unidentified
MCKMKDLLVGIDLHSNNHVVGIQDCNDRRITHKKLSNRLPLLLDSLKPYKDRIREIAVESTFNWYWIVDGLLDSGYKVNLVHPPKVIQYSGLKHTDDKHDAFFLAHLMRLGILPTGYIYPRELRKVRDLNRKCRRFIEERTSHILSLKSFVNRQLGNQLSGYKVKTLKEEEIAKMFSDTNLQTIGLVDVHTIQYLSHVIKKLEKKVLDQVKLRDYFERLLTITGVGKTLAVTILLEVGDIKRFPSPGDYVSYCRQVKSKRESNKKKKKKGSNNKKNGNTYLSWVYMEAACKAVRYSTRARAYFNRKMKSGHIMLAYKSVAAKIARASYYMMRDNVDYNEDLIFPKP

SEQ ID NO: 280848 - protein, 370 aa, unidentified
MLYFAIDQHSKQITVCVRNQEGDTVLSRQVSTRPEKIEAFLQQLTEMDPDFMAILEVCGFNDWLIERLRNWKCQEVVLIHPEKPSKRKTDRRDARKLADLLWLNRERLAANEPVHGLRRVYMVRQREREDRQLTALRKTLGQRRTRTLNKIHRIINCHNLIWDYPTKSFQTQAGRRWLEKVELPEFDRLEMDMLLKEWTTWDEQIAQVGEKIVERANHREPGEIFSAAQILMTAPGVSHYSALTLSSRIGPIERFPRPRSLANYFGLTPGCRNSGKATDRLGSITKEGSKIARFILGQLVLHFLKHDPQMRSWYRRIKKRRGSKIARVAVMRRITTVFWHMLTYKEAYSIGGPPARLHQPNPSATRSDAA

SEQ ID NO: 280849 - protein, 345 aa, unidentified
MPIVGGLDIHRKQITFDYLDTVTGQVQRGQISPADREHLRAWLARFAGCGDAAFAVEGCTGWRYVAEELAAAGIAPHLAEPADTAFARGRKRHAKTDKTDSRHLRMLLAEGRLPECWIPPGRILECRALLELYHDLRAEHTAWVQRIHAVLFHHGAPALGSGTLRTRQGAAALQAVAASSLSPAGQLQVATALEVLEALETRMHAVRHQLLAAARHLTGAKVLAARLYGVGPVTALAITCWLAGADRFSSSRQAVRFAGLDVTVWSSDRKGPPGRLSRQGPPVLRWAVYEAGKAHARSSAPDYRYYAQVKDRCNGKRATLSEARKILRQAHHILAELGDDALTAA

SEQ ID NO: 280850 - protein, 340 aa, unidentified
MTMVTLGLDLGKNWIHMVGLDEDGRIVLRRRVGRDRLLAQTGNMASCLIGVEACCGAHHLGRSLEAQGHTVRLMPPHYVKPYVKSNKNDYRDAEATAEAVQRPTMRFVPLKTEAQLDLQTIHRVRQRLVGRRTALINQLRAILLERGITVAQRRRVLETRLPAILADERSGLSPRIRYLIEDLRAEWRDLDGRIDAFDAEFTATARREDACRRLCEIPGIGALNATALVAAIGNGAAFDKGRDLAAWLGLVPREHSTGGKQRLLGISKRGNKYLRTLLIHGARAALPHVAARDDALGVWLRSLLARVHRNVAVVVLANKLARFAWAVLTGERRYTETVGA

SEQ ID NO: 280851 - protein, 356 aa, unidentified
MTIVAHSHSFVVGVDTHAKSHTYAVIDAANGELLGCQLFPTTAKGMARAIAWAGRLSSGEATTLWSIECIATYGAKLARAVSDAGYEVVEAPRISTKSRRGIGKSDPIDAQAIATATRSLDDDQLRRPRADDGIRQALRVLVAAREQMAQEKTMNTNALTALLRVNDLGIDARKPLTLTQIGEISRWRSREEPIARVVARDEAIRLARQILAFQETLTTNQKRMIELIAQSPAAPLLEEPGVGAYTAAILITAWSHPGRVRSEAAFAALAGVSPIPASSGNTIRHRLNRGGDRRLNRALHVIAMSRMQHHDNTKTYVEKRLTEGRSKREIRRCLKRYLGRHFYRTLNALHSAGSTT

SEQ ID NO: 280852 - protein, 349 aa, unidentified
MEQHEVILGVDTHLDTHVGAVISETGKLLGTLSVPAETAGYLKLLTWANSLGHLRRAGIEGTGTYGAGLARVLRDHEIEVLEVNRPDRAARRSRGKSDPTDAENAARAVLAGKATAIPKEQSGAAEAMRAVSVARRSAVKAKTQAINQLRALLVSAPQDIRERLLKTKTAECVANCARLRSLGNTPMLQTLTTTLRLLAKRYLALAEELTTLDAMLEQLTLKHARRLRERFGVGPQTAAVLVAVAGDNPERLKSDAALAALCGTSPLQASSGKTVRHRLNRGGDRAANNALWTIAMVRMRSDPRTRAYVERRTKEGMSNKEIHRCLKRYIVRELYPLILADLADSARTT

SEQ ID NO: 280853 - protein, 340 aa, unidentified
MGNVTTIGLDIAKNVFQVHGVDADGAAVVRQRLTRGRMLKFFAKLPRCLIGIEACATSHFWARELVALGHDVKLMPAQYVKPYVKRGKNDAADAEAICEAVTRPTMRFVGIKSPEQQSAMMLHRVRLILNRQRTQLSNAMRAHLAEFGIAAPIGRNGIEQLLDVIADPTDERVPADARFCLEMLAAQLRTVKEQILENDRRILASARETELGRRLMEIPGVGPLLASAIVATVPNPAIFRSGRNLAAWIGLVPRQNSSGGKERLGGITKAGHQYLRQMLIVGAMAVVRYAERNGAKRPWLVQLLARRKAKVAAVALANKNARMIWAMMASGERYREPLAV

SEQ ID NO: 280854 - protein, 412 aa, unidentified
MEVLHPHCAGLDIHKDTVVACVRHMVDGAVKREVRTFKTTTKDLMALSEWLSAEGCTDVAMEATGIYWKPVWHILADGDFKLMLANAAHVKNVPGRKTDVNDATWLADLMAHGLIRGSFVPDEPTQEMRNFLRTRKQFVRERTSHVQRIQKTLEDANIKLDSVITDIMGLSGRRMIEALIAGETDPFALAALAHRRIKASQAELEAALRGRVSDHHRFMLRLLLQHIDAIDAAIGQIDQEVDAHVEPFRTAIQMLSSIPGISDLSAEVIVSEIGIDMNRFPTEGHLISWAGLCPRNDESAGKRRSTRMRKGAPWLKTTLIQCAWAAARTKGSYLQAQFQRVRSRRGAKKAIGAVAASVLTAAYHMLKNGTLYEDLGSDHFDRRAKGKQILRLVSRIQNLGFAVQITPIGAAT

SEQ ID NO: 280855 - protein, 400 aa, unidentified
MMTPDDIDVWVGLDVGKSAHHAHALDHDGNTLYDKPLKQDEKAIRTMLGKLSKHGRVLLVVDQPNTIGSLPLTVAGSMGIAVAYLPGGAMRRTAQLLPGDAKTDRRDAHVIAWAALKLPETLRDAGPDDETLAALKLLAGHDEDLAHESTRHVNRLRSLLLQTHPAFERALKGERITRDATLALLERYGGPMGVKRAGIEDVKDWAKSNGLRAGRIIDDMFKAIGEQTVTVPGTLMAETIIPSIAHDIKTIRDRRREVGRQVEKLLEDHPLLTVLTSMPGIGVRTASNILLGIGGDIANFKSSAHLAAYAGISPVTGQSGTSIKGERPSRRGNKRLKNALWQTAFVASTKHPPSVAYYKRKREQGKHHNAAIICLARRRCDVIYSMLKNGTLYQEPALVA

SEQ ID NO: 280856 - protein, 444 aa, unidentified
MKVEKVSALRSKRGLHRVNGAEPQVVGLASVTTEERKTDTMKTYILRNPKPVQPQKASRPGVPRPVAPATPKGPVLCIGLDVHNDSIAVSLAPSDSTEVRRYGIIGGEHEDVLKLAKKLADAHPGMTLKFCYEAGPRGFALCRCLQTHGWDCILVCPSKVPRKPGERVKTDRRDADDLARLYRAGELTGIYVPEAEDEAMRDLIRARFQVGRQQHRARQQLKMYLLRHNLRYGGQTSWSPAHLRYLAKLKMPFPVQQIVFQEMLEVISEATARLERYDQEIERAVPGWRWAPAVWALMSLRGMALLHAATLVAELGDFNRFEHPGQLMGYLGLVPSEHTTGNDRQQGGITKMGNAPARRALVEAAWQYRIPARLSPHLKKRQEGLPKAITDIAWEAQRRLHHRYTHLTRVGRKKSQVAVTAVARELAGFVWAIARQVKPVAATP

SEQ ID NO: 280857 - protein, 342 aa, unidentified
MHITSIGVDLGKTTFHLVTLGEQSKVLARKKFSRKQLLTYTANLPASLIGMEACSGAHFIAAAIRGQGHDVRLIPGQFVKPFLKSNKNDFLDAEAIAEAVARQNMRFVPIKTDEQLDLQALHRVRDRLVQHRTAVINQIRGFLLERGITFPKRPANLRNNMAALLEDAEANLSPRMRRLLEGVWQEWKQLEADIDQADDEIERIASADASCQRLRQIPGIGPLASTATVAAIGNGAAFRKGRDFAAWLGLVPKQRSTGGKARLCGISKRGNEYLRRMFIHGARAVLYRVKYDTGGFGRWVHQLEARAPRNKVIVAIANKLARIAWAVLSSGEVYQHQPVGTT

SEQ ID NO: 280858 - protein, 311 aa, unidentified
MNKDTIGIDISKDMLDTHRLSTGAAARFANSAAGLRALRRWIGAQMPDLVVYEATGAYHSALERGFAGILPLVKVNPLQARRFAQARGTRAKTDAVDARVLAVLGSALDLAPDVPAGKNQHDLKELQIARMALIKERTRLLNRSKTQSLALLKRQSKARLEQIKRQLTELEAALLDLTRQCPKRARAFDILCSIPGLGRVTAVAILVECPEIGTLTRKQIASLAGLAPMTRQSGQWRGTAFIQGGRKFLRDALYMPALVAARYNPDLRQKYQTMIQAGKPAKVALTALMRKMIELANALVQQNRKWTPKTA

SEQ ID NO: 280859 - protein, 408 aa, unidentified
MDRIYSRCAGLDVHKDTVWACVRADGRVVLLERFGTTTRELLRLGDRLAEHGVTIVAMESTGVYWKPVWNLLEDRFQLLLANAQHMKNVPGRKTDVKDCQWVAELLEHGLLKASFVPPRPQRELRDLTRQRTQVLADRARVVNRVQKTLEDANIKLAGVATDITGKSGRAILDALVAGELTPAQMAELVHRRMEAKKPALREALAGRVTPHHRFMLGQLLAQIDHLDGMVEQFDARVEAVMSPLEKGAVERLDDIPGIDTRSGQILVAEVGTEAARQFPSAHHLASWAGVCPGNHESAGKRRGGRTRPGNGWLKAALMQAGWAAARTRRSYYSAQHRRLAGRRGAKRATMAVAHSLLVTAYCVLSRGSQYVDLGADHLEKRRTPQEQAQQMVKKLQKLGYAVEIRPAA

SEQ ID NO: 280860 - protein, 407 aa, unidentified
MDVVHPKCAGLDVHQQTVVACARVGSGKAVTHAVRTFGTTTPELLALSDWLATHGCTHVAMESTGVYWKPVWHVLDGHFELVLANAMHIRNIPGRKSDVNDATWIADLLAHGLIRSSFVPPEPIQELRDLTRTRKQLVREIAQHILRIQKTLETANIKLTAVLADITGVSGRAILQALVAGERDPERLATLANERVKASRADLVAALHGRVTDHHRFMLHLHLTQIAALEAAVREVEARLGDALAPFRAALDRLITMPGVSETVARVIVAEIGFNMTRFPTAGHLVSWAGLCPRLHESAGKRLSNRTRSSNPWLKTTLVQAAWAATRKKDGYFRAQFLRLKSRRGPKKAIIAVAASMLTAAYHMLKHGVDYRDLGADHFDRRDKAKLAKRLIARLQDLGVTVEVRAA

SEQ ID NO: 280861 - protein, 347 aa, unidentified
MRFYTQQHQFYCGIDLHARTMYLCILNRDGEILVHRNMKTRPDTFLTAIAPYREDLVVCVECIFTWYWLADLCAREGIPFVLGHALYMKAIHGGKAKNDKIDAQKIAVLLRGGMLPQAYVYPAEMRATRDLLRRRMHLMRKRAELLAHVQNTNSQYNLPEIGKKIAYKANRDGIAERFPDPAVQKSIEVDLALIGYYDPLLTDLELHIVKTAKQHDAQTLYLLQSVPGIGKILSLVLLYEIHDIQRFPRVQDFVSYCRLVKCAKESAGKRYGTSGAKIGNAYLKWAFSEAAVLFLRNHPAGQKYLARLEKKHGTGKALTILAQKLARAVYYMLRRDTVFDMDRFLHS

SEQ ID NO: 280862 - protein, 347 aa, unidentified
MIVVGIDPHSRLHAAAAVDEQGRLLEGIQVGSGPGELARLQAWIERLPRPRLVAIENARGYGLAIVRLLLAQGEELVDVPATLTSNGRRGSGQRGKTDRGDALVVARIGLRDQDRLPRLDATLLDDELKLLADTRDQLIVEAGRWRNRAHALLRVSSPGYQSKTGALASAGSVRRARTIAKRSVAEDPVRGRLAVQALDRLASLERDAGKLEREIRELLRVRGCTRLLAIRGVGPIVAATILGETRGIGRFRSAAAFAAHSGTAPVPASSGRTQRHRLNRGGNRQLNRALYTIAMVQARWDPAARAYLDRKLAEGKSAAEARRCLKRHLANVIYRALTADTEAATLT

SEQ ID NO: 280863 - protein, 435 aa, unidentified
MDIVHPRVAGIDVHKKVIWVAVRLPGEAPGGRTVAAKSFKTFWRSLQKMAGWLAELGVTDAAMESTGVYWWPVYHALAGAGVEVCVCNAAHMRNVPGRKTDLKDCQWIAELHEYGLLRPSFIPVAEVAALRARTRYRKRLIEARTAEGQRLAKVLEDAGIKIDSVASSLNTASARDMIEALIAGERDPAVLARLARGVMRKKIPELEMACDGRFTGSHAQMCRLHLDAWDHLTAQIATLDELVAVAAAPFARVIARLVTIPGIGQRTAEVIVAETGGDMSRFASSARLAAWAGLAPGDNESAGKRKKAATRQGSRHLRSAMVESAWSVARTATRPGARFRRLARRFGRGNEKKAAVAIAHTLLCIAWAVMKHDSDYTEAGADYYDHRDRRNHEHLVRHHQQALTRLGYQVTLLPPGDGRPPPGPGTPAPGQDQAA

SEQ ID NO: 280864 - protein, 393 aa, unidentified
MINTVRVAVDVGSRFHQVAIGDGSGRLLDEFQIDHGSTGFEQFFARIDRYATTDVRVAMEGYNGWARPLDQQVLARGWRLYNVNNLKLARYKEIFPAPAKSDAIDTRRMLELFAFDGQRPLGRDVLQEVTSSTATQRELKYLTRRRRQHVADRATRLTRLRVDLSAVCPDLLALTKAVENLWFLRLLTCRDRLTALPRLHAKTIASIRGIGAKTWPRIQAWQKTATFGSTIDLADTDIVADAAAILALNEQIKALDARIEAAACTCPMTGRLRTLPGFGVTGTAELSGEIGSLRRFETEASLALYLGMAPLVHSSGLQQRGKRPKCVNSRCQAALMTCIVRHMACVPESRVYYDRKRAQGKRHNQAVRALGRHLVRVIWRMLHDDRDYELRGE

SEQ ID NO: 280865 - protein, 434 aa, unidentified
MSKLQKIYQDVAGVDVGACKFFVGTDEGEVQSFDTFTCGCHQLTEYLQQQNIKSVAMEATGVYWVTLYDMLSAAGIEVYVVNGRHVKHVPGRKTDVKDCMWIKELHSHGLLRNSFIAPAEVRELRSYVRIREKHIECKVSAVQRMDKALVMMNIRLSSVLTNMQGGSAMSIIKAILGGEYKPEVLVELCAPQVYKKKKEEVIKSLQGFYKTEQLFALQQAFDEYVFYSKKMDECDKKIGEVLKALTKDKEEPTAEPTGKRICHNPPKVDDLDKMMMQLYEGKDLTILPGMTSYSLLKLYAQTGNEWSSWNSEKHYTAWLGLAPSKYQSGKTRKYKKIKVNTTAGQILKECVQPLLRSKNNALGAFGRRISTRRGPSVAIKAMARKLACWIYRIMTKGLAFVENGIKQYQQKQEAKTLKWLEQQAAKLNLKLTPA

SEQ ID NO: 280866 - protein, 357 aa, unidentified
MNRHKYVGMDVDQSTCVIEIEDKAGNFVMETYLPTRASELRAFFKGLDGRIHVAFEEGTQAAWLYELIEPLVEDVVVCDRRGEKVRGNKGDRLDARMLARQLRQGELRRVYQGERGHRELKELIRGYDYLVEDVVRTKSRLKAAFRSRGLKCSGRAVYRKGDREDWLKKIDVDALRARVSSLYEQLDCLMRLHKEAKDAMITGAKKHPSYKLLVKQPGLGPVRSAQILGIVGTPHRFRTKRQFWPYCGLAVVVHESSEYEIVDGQRRRRKRPLRTRGLNKNFNRTLKMVFKGAAKTVIAREPFKQYYQRLIDKQIRPEMAKLTVARKISAITLSILKTGEEFDPNRVNQAVSDSGDQ

SEQ ID NO: 280867 - protein, 332 aa, unidentified
MLAALDIHKEVFQAAVLDDDTGEWHESRFKASRDDLAAWANQWRGQVTDVTVEATTGWRWVCQELQSLGFRMHLADPAQARALRGRTRQAKTDRLDARWLVLLLAKRMLPEAWIPPAEIQQLRDQTRLRLALSQDRRRWAQRLHALLLHEGWPCQRARLLTDQGRRWIAALELVPAARAQVDRLLHVMDAIASEQEEVEVELRRFAKGDTRCQTLMTIFGIGSLLAAHILAEVGDVARFQRAGQLVRAAGLDPTVVESAETRRRGVLAKQGSPELRWALVEAAQHGRSHNSPDHRLYTLTSKRVGTQRAVLTVARKVARRAYYKLRVLQMAA

SEQ ID NO: 280868 - protein, 422 aa, unidentified
MQNTAARKRKQVPEGYLIVGIDPHKKKHAAVAITQDLAIRDRFKLDNTREGLEFLVRRVRTEMVKSGCRGVMFAIETGGHYWRNIAYFLEEQGIPFRFINQYTLKRRREGKDLNHRKNDYRDSEVAAQLLCTGEFTESIIPQGVYAELRTAHNAYRRLVKEKTRITNLMKGLMDGLFPEFVQVFKDPCAVTALCVLSCCAIPSKIAGMTESEFAATIESNYHGRRLMRRKLVALHEIAISSIGIAAGARSVAAEIAFLVEKIELIKVQICSIEHTLVKLVDETEEGKYLLSITGISYISAAGLLAELGCFKLYRTSKQMIKMAGSNPTESESGGKRGTHTPMSKQGRPVLRYCLWTSVIPILRFNTDFRAWAKQRRERPVHANPLCGNEIVGAALNRLLRISFALVKNQTRYRLPELAPVTI

SEQ ID NO: 280869 - protein, 336 aa, unidentified
MTQHKIIGIDLAKNIFFLFEINHKGKNLCRKKLQRSKLLSYIANKAPCTIAMEACSGAHYWARELSQFGHEVILYAPQHVKTQRRKQKNDYNDTEVALYKRPHPVPHKSVEQQDIQSLIRMRRLLVTERTRIVNQVRGLISEYGIIMPKGAAAFRKAIPEILENDENQLSCILRELLSHQYERYLYIDEQVKWFDDKLNQTIKQFENAKRLMSIPGFGPLTSQAVAVWLGSGQQFKTGRDASAAMDLVPKQDTSGDKVILLGITKRGNTYIRSLLVHGARAALRRAKFKSDNLSKWMLELQERRGPNRAAVALANKLMRIAWAVITKNEEYRPTQS

SEQ ID NO: 280870 - protein, 350 aa, unidentified
MTMIGDFDVHRQQITFDYVDDDGLVHWGQIRPATRKTLRGWLAEHFRDGDADFALEGCTGWRYVSEELAAAGLGVHLGDPAETAALRGRKKRAKTDRADARLLRTLLVEGRFPESWIPPAHVVEVRTLGRLYCTLMDERRAWQQRIHAQVFHQGCPPIRALLTRAGREALAGAELSAAGRQYVDTALRRTDELSAEIDPLRTQLISFARRQPGCRALQRHYGVGWLCAVIIWAEIGDARRFSSSDQLVRFAGLDVTVYSSDAKRAPGHLSRQGSPELRWAAFEAAKSAARRGSPDHGYYHKLAAKHDGHNGKNPTLAVERKILRRCYHTLRELGDAALALPDIRPQEVAA

SEQ ID NO: 280871 - protein, 387 aa, unidentified
MPQPNDLSRSLVALDQDSTIIAVVEMSQSSWLVAGMLPGIERQPRKKLEPSPERLLGLLHRWRDEAVKAGRKITRIALAFEAGRDGFWLARWLEAHGVEAHVIHPSSVAVSREHRRAKTDRLDTELLKRGFLGWLRGERGHCTMARVPTIAEEDAKRPNRERECLVGERTRIVNRMKGTLARLGIRNFKPTLRKAAERLATLHTPEGSVLPPNVSAELQRNMARLGFVVSQIKEIEAARQKRLEQEPATGPHAMVRHLARVVGIGVETADILVNEVLSRPMRDRKAVARYAGLTGSPDESGAKRREQGLAKAGNARVRRSMIQLAWRFLRFQQNSALARWYQARTADSRIGTRKTMIVALARKLIIALWRFVTTGETLEGVVLRPAG

SEQ ID NO: 280872 - protein, 414 aa, unidentified
MESSYKIAGIDVHKKMLAVVISDVAQAGEFRFERRKFATGAMELQALAKWLAEQEVREAVMESTAQYWKPVWQALEGQCRLQLAQAHSNRAPKGRKRDFADAERLVRRQVAGELILSFVPDPEQRLWRTLTRTKQQLTRDRVRLQNQLEGLLEEARIKLSSQVSDLLGLSGRTMLQALADGENDPVQIAKLAAPGLRASQKQLADARSAAATLSPLHRQILKLFLQRLKLIETQMDALESMVAEQLHPFQDAVKRLAEVPGLGADSAQQIIAEVGPRAATFPSPGQMASWVGCCPGREESAEVSTSDSSPKGNKHMRRLLSQAANAAVKAKGSVFEIFYRRLAPRRGHFKAIWAVAHRLCRIIWKILHEGVDYEERGYRTNPHAVQKRTNRLVRELRRLGYQVQLTSSKAGAPA

SEQ ID NO: 280873 - protein, 309 aa, unidentified
MLTAEADKCKTKVVVNTAAGVQALLAWCAKHGAQPAQLHAILEPTGLYHEQAATALPQVRVSLVNPAQARDFAKALALRSKNDALDSYVLARYGQTLSPALWHPAPLHARQLRALLTRREALSKDLLRELNRKEKSQFSPSAPVVDGSIDKAIAFLREQIKQIERAIDQHIDNHPDLKQDCELLNSIPAIGPQAGNAILAVMHNRHIDSAQSLAAYLGVVPVQRQSGSSLNSCARLSKAGPSQVRATLYMAALVGTRHNPHIRALYQRLLKAGKSKKAALGAAMRKQVHLCFGVLKNRIPYQPNYAMNG

SEQ ID NO: 280874 - protein, 373 aa, unidentified
MMQYTTKYVGLDVSKDTIAVAIAEAGRERARYWGTIQNEPAAVRKLIRQLGKKEELEVCYEAGPTGYGLYRLLKDMGVSCVVVAPSLIPARPGERVKTDRRDALRLAELHRAGELTGVYVPTAEDEALRDLVRARDDAREDVHRAKQRLIKFLLRHGIRKPEHLKNRWTKRYRAWLGTLKFELAAQETTFRKYLHAIYEAEERVRRIETSLLEVASEGAHAKVVEALQGLKGVAFLTAVCLVAEIGRFHRFRNPRQLMAYLGLVPREYSSGQTVRRGKMTKAGNGHARRLMVEAAWSYRHQPGVKGALAKRLEGMDADIQMISWKAQTRLYGKYRRLVARGKQKNVAIAAVAREFVGFVWAVACLAESGQQSA

SEQ ID NO: 280875 - protein, 345 aa, unidentified
MKIVGCDLHTRYQQVAMLDAETGELVEHRLEHESGEARAFYAGLAAPVRVGIEATGHTRWFERMLGELGHELWIGDAAQIRASMVRKQKTDARDAAHLLDLLLSDRFPRIWRPSLEERDLRQLVWHRQKLVWMRNAVGNQLHALAMGEGVCRKKKLFTKKGRVELEGLKLGRWASHRRQELLTMLDQLDASMKELDQAVAEQAEQNQSAVLLMTHPGVGPVTSLAFVLTLGPVERFERSKQVVSYLGLNPREHSSGGRQRLGAISKQGNPMMRSLLVEAGHTAARLDSELRQDYQRLKLRRGSGVAKVAIARKLAVRMYWMLRSPASYAQLVRMQGSPRATLVKQ

SEQ ID NO: 280876 - protein, 341 aa, unidentified
MFYPTGASNLANLGITWNSHVEYRASNTFCTNVPYYIELILQTLAPFRDQIKGFVVESTYNWYWLVDGLMDAGYSSAHLANPAAIKHYEGLKYSDDQHDAFFLAQLLILGILPQGYIYPKKDRPVRDLARKRMFLVQHKTAHILSLQSLIQRCCAIKIRTNNMRHLTVKELEEWLEEEYLVLSAQANLDSINFLKQNIKRLEKAIRKKIKLKKAFHYLKTVPGIGDILALTIMLEVVDIKRFPKVGNFTSYCRCAPSQRLSNGKSKGQGNRKNGNRYLSWAFTEAAHLGRRYNERFRRYYNRKNAQANTSLATKALGNKLARICYYIMRDQIPFREELFCH

SEQ ID NO: 280877 - protein, 432 aa, unidentified
MKAVVERCAGIDVAQKELNVCALCGRADVEPEAELRLFGTYNAELGKLRQWLQETGCTHVVMESTGSYWKPVYAALEGSGMQILLANGEDVKGRRGHKTDWQDCQFLANLLRHGMIRPSFIPPQAIRDLRDLTRRRRQLIGESASERNRVQKVLEEANIKLGSVLSDVFGVSGQLMLEKLLQGEPDMELIANLAQRRARARIPEIRQSLEGHRLRDHHRTMLHLSLDHLAFLEQQINKIDSEALLLIEREGLQPAFELLQSIPGIQELSAAALLAETGPDMTVFPSAAQLSSWIGVAPGNRISAGRNQSGAIARGNRWARTALVECAWAAAAKKNCHLKERFRKLCVKGRKPALIAVAHSLAIIIHRTLASGIPYREPDQTIQDDRKRQRLIRHYVRRLGRLGVTVHSLRPESAGHYKSPSGTRTQHIHRRP

SEQ ID NO: 280878 - protein, 352 aa, unidentified
MQHFIGCDVHTRDQVVAWIEEETGEIKKRRLEHEGEEVRKFYAQFPRGTVVGIEATFPVHWFERLLAELGHELWVGDAARIRASEVRYQKTDLRDAGDILDLLRTGRFPRIWVPSLEERDLRQLLVHRMKQVRARTQVKNQLHALAISQGVCRGRKLWSAKGRKELESLALLPWAARRRNELLVGLDRLDEQVRELDRAVEEAGRARAEVALLRTHPGVGTVVSLAFVLTVGPIERFPNSRKLVSYWGLNPREHSSGGHQRLGSISKQGNTMMRWLLVEAAQTAARLDPQLRRIYQRLKKQKVSGVAKVAVARRLAVRLFWMLRTRHNYTQLVHMSGSPSSTVVPPTAGSNA

SEQ ID NO: 280879 - protein, 316 aa, unidentified
MNSKTQEEINIGIDTSQSQLDIYVRPTGEYFSVENSPKGARKAARKLRGYQPTRVLIEATGRLEMHFVCAAHEVGLPVVVCNAGQVRQFARSTGRLAKTDRLDAEDIAHFGEALHPALTLLKPEKLREISDLITVRRQCLDMSTMQKNRLSRMPKSVHRPIQRILKAIQKEIERIDLKLDKLVDAIPQWRDQRDLLMSAKGVGKVVAYTLMSELPELGKLNRKEIASLVGVAPMNRDSGTYRGKRRITGGRSQVRTVLYISMWSAIQYDPKIKAMYERLVGAGKPKKVALVACMRKQLTILNTMMKNGTHWDEKLA

SEQ ID NO: 280880 - protein, 332 aa, unidentified
MKDITAVGIDTAKTTFYVVGFSITGHVVGRKKFSRQSLKKWLVNQVPLTVYMEACGGSHEWGRLLTAMGHTVRLIAPHFVSPFRQGDKNDWNDALAIGIAGAQPTMRFVAIKSVDQQTIQSLHRVRSRLQRDRVAVANQLRGLLAEFDVVLPRSIAALRKRVPEILDSDKFIGVQAELFQGLLEELKQRDDQVKQYTKWIEQLAKADPVAVSLMKLNGVGVLTASALSAEVADARVFRNGRQLSAYLGLVPRQFSTGGKNRLGSITKRGDRYLRQLLVHGARSVIRHLGDKQDRISCWIRALIARRGMNKAVVALANKQARWAWAVMAKAQA

SEQ ID NO: 280881 - protein, 272 aa, unidentified
MGTSTPYVGIDIAKKSFVAAVFCPKKQKYKPQEWDYTSPEAIYSFLDSLPSEAHCVMEATSVYPLRLADALLKRGWKCSVVNPLSVKRYAQMCLSITKNDAQDAITIARFAGVQPPADFELPSETFAQLEQRRMLLQQLQKQVQALDNPLEALAFNPQKDGITVDILQKSKASNLEYIALILREIKSLLPQEFPADIDLLKTIPGVGEVVAQIFIETARSFHGFENEDSTKAFTKFVGLAPLVTAQGRLSSEPPILIARASPICVANYTCPL

SEQ ID NO: 280882 - protein, 461 aa, unidentified
MTFSPCRTHGLGGGVTSSGGIDRPLIRGMTTGFFAGREALRNVDVAIGAVGRPGGNDRRKHVIDVSDIGAFLGLDVGKGEHHATAVTPAGKKAFDKRLPNSEPKLREVFAKLQAKHQTVLVVVDQPASIGALPLAVARDMGCPVAYLPGLTMRRIADLYPGEAKTDARDAFVIADAARSMPHTLRTIELADEAVAELEMIVGFDDDLAGEATRVSNRLRGLLTQIHPSLERVLGPRVQHPAVLKLLDQFGSPAQIRKAGRRRLVSLMRPKAPRMAERLVEDIFTALDEQTVVVPGTDAAALIVPSLTRSLQAVLDQRKLLATRIEELLETHPLSKVLTSMPGIGVRTGARILIDVGDGSRFPSAAHLAAYAGLAPATRSSGSSIRGEQPSRRGNKQLKRAFFLSAFAALADPASRTYYDKKIAQGKHHTQALLCLARRRADVLFAMLRDGTFYQPQPAPIG

SEQ ID NO: 280883 - protein, 368 aa, unidentified
MIKRFHGIDRHKSLSKVSILNREGIEEKLLTVIGNLKHYIQNLGPEDAFAIETGIGCFYWATIIESRGAKCFIVDPYRFRIIKDSWKKTDKNDCRNIAKALWVYLITGEFGLPEVYKPAKEIIELRKLFSQYRNINKYLNMLKNNIQSVLLDDGIALTSKDKKLLLSKETGEKFLKLLDISDASRISIKVSLDILCNVSEQKEIITREIMRAGVPFEDKVKLLISIKGITPLSALAFLADVGDIKRFKSVRKMNSYLGLVPKVKESANKGKNCHINKASRYLTRTILTQSLIQAIDASPYFRNSYEDTKYRRGAGRARIGLIRKICDIMRKMLLDNELFKYVKMPLYIKKVKYFDKLIKEFEEERKSA

SEQ ID NO: 280884 - protein, 348 aa, unidentified
MLDVGVDLHKRFSQVGLLDEYGEIQQRRVEHVGKEMEDFLRQLQPGSRIAVEATRSWWWFVDLAEGLGHQVVMSHPKATKAIAHARLKNDKVDAAMLACLLRANLLPTVWIPPAPLRHAKELLRHRFLLMRFRTALRNQIGALLSKRNLQPPTRSTFTRAGRTYLEGLTLKPEAMHIRENGLSLLHQLDRMIGQLDRDLEQQIKKNPLAIRLMTAPGVGAQTAFAFITFVGEIERFRSAKHLASYFGLAPRVRSSGGHKWSGAITKEGERMMRWLLIEAAGQAARQPGPLREYYRRMVYRKGKSKARVALAHKLIGVLFHLWKEELTYHEFLCLGAAKRVSPATSVVN

SEQ ID NO: 280885 - protein, 335 aa, unidentified
MSLYCGIDLHSNNHFICVIDEKDNRIFEAKLDNDASLALKSLSRYRRRLKGIAVELTYNWYWLVDALMESGYHVDLVNTAKVVQYEGLKHTNDKYDAFHLAHLMRLGILPTGHIYQKETRGLRDLLRKRMQLVQTRSAALIRFKSMIQLHSGKTLRADSIKTKKFVIPIVGDSNVQLALQSEHQLIRALMAQIKLLEASILGQLEPLVEYQLLKSIPGIGEILASTIWLEIGDINRFKSPGNFASYCRCVNSRRESNGKKKGENNRKNGNKYLAWAFIEAANFCVRRCEPAKRFCEKKTAQRNNIVARKALAHKLSRACYWVIKNREPFEIAKLF

SEQ ID NO: 280886 - protein, 476 aa, unidentified
MSPFINLEVDFERRFALRPLRDDDLRPALVQLRDDPICVKSLVGDQAAELSVLDERGHADRVVALSWQQGEPDEFTQRVGQRENFGRQAATGFANGLALSPPCILPLPAPKLSASLSVDGSPQPPRVSKPEKKQGAPSIGSAANPNSRLGRTPSPHSQGRVMEQSPIAPSFVGIDVSKDRLDVHVCPSGHAFAVMRDGRGLEQLVNDLRRLAPTLIMLEATGGFEITVAAALANAGLPLAVVNPRQIRDFARATGRLAKTDALDAQIIALFAERIRPEPRPLADADSQSLAELIARRRQVVEMLGMETNRLHQARNPRVQRMLKATLKTLKAQLAELDRDIDDTIKRSPIWRAADDLLTSVPGVGDVTAHTLIADLPELGQLDRRRVAALVGVAPINRDSGQMRGRRTIAGGRIEVRNALYMATLSAIRWNPVISKHYQSLVERGRPKKVALVACMRRLLGILNAIIRTNTPWRCA

SEQ ID NO: 280887 - protein, 260 aa, unidentified
MRLAQSASIWPSRFFRFTAQIGAARVVLRKKLRRDQVLSFFSTLPRCVVAMEACASAHHWAREIAALGHDTRLIPPAYVKPFVKRQKNEMADAEAICEAAQRPKMRFVQGKSAEAQASAVVFRTRDLLVRQRTQLINALRGHLTEFGYIVRKGVGHVGKLAEIVRDPASDIPPQARPILMVIAQGLDALQAQIAVLDREIASRAKADPVAKRLMTIPGVGPVIATALVALAPAASTFRRGRDFAAWLGLVPRQHSSDGRA

SEQ ID NO: 280888 - protein, 418 aa, unidentified
MEIDKDLDVVHERAAGLDISKRDAKLCVRVPGARPGTYTSKVTTWAATTGQVLELREYLEQARVDMVVMEATSDYWKPFYYLLEETVPVMLVNAKSAKNLPGHKTDVKDAAWLARMGAYGLLRASFVPPEPIRDLRDLTRARAIAARDRVREIQRLEKFLEGSGIKLSSVVSDLTGVSSRDMLEALIRGERNPEVLAGMARGTLRSKIPALVDALTGRFRPHHAFMARLHLDQIDAHTRTIEALTQHIEEAMKPFRDAREALATIPGVSQRVAEVIIAETGANMTVFDTPARLASWAGVCPGANESAGHIKSAHILPGNKYLKAALGTAAMSATRSKNTYLAAKYRRITARAGRNKALVAVEHSILNAAWHMLRNGEIYNDPGADHYNRISPTRAKNKAIKQLNNLGYDVTITPVTAA

SEQ ID NO: 280889 - protein, 455 aa, unidentified
MGQSKSKKRSRSKRLSMLNPNAAGIDVGSQFHVVAVPEDRDDEPVRSFRSFTGDLHRLADWLLACRIDTVAMESTGIYWVPLYEILVDQGIAVILANARDVKHVPGRKTDVNDAQWLQQLHGYGLLRGSFHPPADIAALRAYLRQRERLLDYAASHIQHMQKALMQMNLQLHHVVSDITGKTGMRIIRAILDETREPTVLAEFRDVRCKASAETIAQALEGNYRPEHLFALRQAVALYDTYQSHVAACDRQLEVLLARLNALEPPDSPLPAPRDKMPRQPNALNFDVRAALYAMIGVDLTRIHSIGPYLALKLVGECGTDLSKWPSAKHFTSWLCLAPGNKISGGKVLSSHTRRSKNRATAMLRLAAVNVGKTDSALGAFYRRLAARIGKAKAVTATARKVAVLFYNTLHYGVDYSDPGASYYEERHRERVLHNLSRRAKQFGYTLEPAPAPGVS

SEQ ID NO: 280890 - protein, 344 aa, unidentified
MVILGIDAHKRTHTVVVIDMNGKQLATKTIGTTTADHFELVRWAVQHGTDRSWAVEDCRHLSRRLERDLLAAGEAIVRVPPKLMANVRDSARTYGKSDPIDALAVARAALRERDLPVARLDGPDREVRLLLDHREDLVAERTRIISRLRWHLHELDPSWEPKRRSLNRPSTLARVEERLVGVDGLVARLALNLTRRCRELTVEINELESEITLLVEQLAPSLLAICGCGPLTAAKILGETAGIGRFRNKDAFARHNGTAPLPVWSSNKARHRLSRTGNRQLNAALHRIAITQAHWHPEARALLARRKAGGDSNLEAIRVLKRRLSDVVFRALVNDADAALPIAA

SEQ ID NO: 280891 - protein, 375 aa, unidentified
MEHHSEAFVAFDTAKLRNAVAIADAGRNGEVRYLGEFDNTEAATRKLVAKLASKHARLTFCYEAGPTGYGLYRLIKSIGHDCIVVAPSLIPSKPGDRVKTNRRDAVSLVKLLRAGELTAVWVPDERHEAMRDLVRARDTAVKDYRIKRQNVSSLLLRLGRHYPGKKTWGRAHINWLTGLKLEHCEQRIAFEEMLLAVRQVRERIERLEQAIREAVADWTLAPVIEAVQAMRGIDMVGAVAFLAELGDLSRFENPRQLMAYLGLTPSERSTGESVKRGGITKAGNTRARRLLIEAAWSYRFPPRVSKDMQTRIGAAPRTAREIAWKAQMRLCGRFRTLTRKGKRPTIVVTAISRELSAFIWAINREVVGSHATANQ

SEQ ID NO: 280892 - protein, 343 aa, unidentified
MPQQLSVVGIDLAKRVFHVAGMDERGKIVLRKRLTREAILPFLAQLAPVLIGMEACGGAHYWARRLREHGHTVKLIAPQFVKPYVKSNKNDPADAEAICEAVTRPTMRFVPIKEVEQQDLQALHRARERVVKARTALVNEIRGLLGEYGIVLPQSVTKFRHGFLATLEAERAKLTALGQELFGQLYEAFGALEKRLAYYTAKLEAISAAHPVCQRLETIPGIGPLTSTAMVAAVSDVTHFQNGRQFAAWIGLVPRQHSTGGKPRLLGISKRGDVYLRTLLIHGARATLRWIGLKTDRRSQWVRGLIDRRGKNKAAVALANKNARIARVLLKTDAVYIAEDAAA

SEQ ID NO: 280893 - protein, 420 aa, unidentified
MDVVHERCAGLDVHKRTVVACVLVPGEAGTAQPETETFSTMLGELERLAGWLAERGVTHVALEATGVYWKAVYNVLEGEDRWTVLVVNPEHVKAITGRKTDRADARRLAFLLRHDLLSGSFIPDRAQRELRELTRARTSLVRERARVVQRLEKTLEGTNIKLGAVVTELLGVSGQAMLDAALQGVTDPEELAGLAHRKLRPKRELLIEALAGRLTRPLRFLAQQHLDHWRELDARVAAFDAEIADLLRPFDAVIDRLDAIPGVGRRTAEVILAELGSDVAAFPSERHLAAWAGLSPGNRQSAGRRKPARTRHGNPWLKAALTEAAWAASRCKDGYLQAQYRRLAGRRGRKRAIVAVAHSLSTAIYFMLLHDVPFEDLGGDYFDQRDRDRRQQRALATLRTLGYDVTLVQRPTPDPATEAA

SEQ ID NO: 280894 - protein, 410 aa, unidentified
MEVLYPHCAGLDVHKDTVVACVRHMANGTVKREVRTFKTTTTGLLALSEWLASEGCTQVAMEATGVYWKPVWHILSDGDFTLTLANAAHVKNVPDRKTDTNDATWLADLLAHGLIRASFVPDAATQEQRGLLRTRKQLVRERASHVQRLQRTLEDANIKLDSAVSDVMGLSGRAMIEALIAGETDPARLADLAHKRIKTSPETLREALRGRVTSHHRFLLALHLKQISALDEAIAGIDAEVDAHVEPFRAAIAQLKTIPGIGDLGACVILAEIGHDMSRFPTQGHLISWAGLCPRNDESAGKRRSTRMRKGAPWLKTVLIQCAWAGARKKGSYLQAQFHRLRARRGAKKAIGAVAASMLTAAYHMLKDGTFYQDLGPDHFDRRAAQTKANALLAKLRSLGYEAHLTPIQA

SEQ ID NO: 280895 - protein, 428 aa, unidentified
MNDSNVIRLQDFCQFKKEIRGSTEYLIVGLDIAKERHNAFFGTATGKTLHKGMFFDNTYEGFQKLLIQTDALKVQYSLRKVVFGLEPTANYHKPLGEYLIKGGHLVVLVSAAATVKNRELMDGRWDKHDAKDSANVADLIAQGKCLYYDCPGEDLRSLRGLLSLKKRLKKEEHGLRVRIRNQLLAQYFPEMDQHFGSVASLNVVQRCLDPSDISLMGYDEFCRTVSPGKVNMAQQRRLTQIWRIAKQSIGCCVGEAVSVEAHIMVMGLHRVRETIKTVEDKIEDICLKFPEYSFLLMIPGFGPDVSAKVLAAIGDPERFTSGKQVLKMAGFDLCASRSGKTSNSATPVISKHGKSDLRYALYQAAIISSLNYKEFIIYHTNKIRGREREKGIGTKMRVKLAAKLLIIAWTLMKKKEPFDPRYLNMGSS

SEQ ID NO: 280896 - protein, 457 aa, unidentified
MSQTKRPRKSRDFSTVNPAAAAIDIGATIHVAAVGPNRDKEPVRTFRTFTDDLYRLADWFAGCGIRTVAMESTGVYWIPVFEILQQRGFEVMVVNARDAKHVPGRKTDVSDAQWLQRLHEYGLLRASFRPQAEIAGLRAYLRQRERLLDYAAAHIQHMQKALMQMNLQLHHVVTDITGVTGISIIRAIVAGERDPNVLAAHRDRRCHASLETVCQALVGNYREEHVFALTQALELYDVYQTKVTACDKQIEAILQRLKKNATPPVSKLLPVRQRTRQPNAPAFDARAALHAILGVDLTQITGIGPSLALKLVGECGTNLAAWPSAKHFTSWLALAPHNKISGGKVLSSKTRRTSNRAASLLRLAAGTVGRTDTALGAFYRRLSARIGKAKAITATARKIAVLFYNTLRHGMTYADPGTTYYEERYRQRVLHNLQRRAKSLGFTLIAKPSDPIQAVVS

SEQ ID NO: 280897 - protein, 435 aa, unidentified
MSNSIKYDLFISVGIDVGADFSFMSIALPNQTFVGKPFKIIHSDFNSLSMAVSKIKEAEEMYSLESRIFLESTGIYHYPLFCYLSDKGFLVSIINPIISKNSTNINIRKVHNDKIDSKKLALIGLKPDLKVSIMPSVLALDLRNLSREYYDLVDNRSAYINKLQGELRIAFPQYLKIFSKVTVNTSLTLLEKFTSPDGFLEASKDQIIASIRSTSRFSIAYAEKKYKAIIQAAKAAKTFSYSVNSNFKRILLYIRFIRQYNDEIEAILSDMRELVESNEDTDFVKQIRLIESIKGAGFLSAVTLMCEIGDFSAFKSPKQLFAYFGLDPAVKQSGNFKGTDVNISKRGSRIARRVIHTIALVSIALNRNGTANNPVLREYYLKKCQSKPKMVALGAIMHKVCNIVFAILRDEKEFKIITPEEHQANYLKAKYGIAA

SEQ ID NO: 280898 - protein, 419 aa, unidentified
MKIIYPRVCGIDVHKKFIVAVICISESVEPVYLKKRFSTFHNDLIRFRDWLIQNDCQNVCMESTGKYYIPVYNILESHISNIVVANPKWVRAVKGEKDDDKDAQWIADLFKLGIVKSSFIPQKDFRILRELTRYKYKLVNMRSSEKNRYQNALTSGNCKLDMVFTDIFGKSASNIIDLILSNNPYTDEDILSKVHKNCKASPDMILNSINGTDLTSIQKSRIELVNDHIKQLSSNIQRLDKLIDLMIEPYEDYISFLCQIPGVSRNSAIIILSEIGVDMNQFTSTRRLTSWAGLTPSSNQSAGKKKSVRISRAGVYLKPCLVEVAHAAVKDTNHPYYANKFNKISKRRGKKRAYIAIARKILVAAYHMLLTGEIWNPADLAEVETPVEQRIKYVKNNLKSDIKQLLDIGLTVEELTLMI

SEQ ID NO: 280899 - protein, 361 aa, unidentified
MKSYNKSMADGERNLIKVIEKSEKIFFGVDLHKKMWHVTIRTADVELWRGSIEGNWRALQLQLDRYRGHQVEVVYEAGYFGYWLHDHIIEWGADCIVTPPSLIPEVQGNRVKTDKRDSRKLAQLLAKGMLKRVYVPTPEERFHRQVIRRRRQLIEDRVRTQNRIKAELRFYGIDLGETNRKWSKSYVENLHRWRFEDRWMQESFNRLLAEYQFLSKELDKQTRLLKELSETELYKERVAILMSIPGVGLIAAMELLLELQDVARFRRADQLAAYVGLTPSQYSSADKVRMGRITAIGKNQLRATLIESAWRLISKDGAMKIKYERLKLRAGSKRAIVAIARVLLLRARRMLLDGQPFKLAA

SEQ ID NO: 280900 - protein, 317 aa, unidentified
MAMQVDRLIVGADVAKAELVIHYDDRDEIVRLKNSKLEIRRWLKQQPLNTAIAVEATNVYHLDLVELAHSLGFEVYVIDGFQLSNYRKSVGGRVKTDPSDARLLSRFLRNEGEDLRPWNPPPAVYGKLQSLLRRRAALVNARTAMTQSWANEGLLKAAFNTFVKSIDRLDQLIQKKIKEVLREAGLHEQVARCQAVEGIGFLTATALVMAFIRGEFKSSDSYIAFLGMDLRVSDSGQKNGQRRLTKRGCSEIRRLLHNAAMAASRSAAWKEIYERYRNNGKATTQALVILARKLARVAFALMKNQDEYTSKGGKPAC

SEQ ID NO: 280901 - protein, 412 aa, unidentified
MDVLYPCCAGLDVHKKSVVACILRSDPAGVPTQEIRTFGTMLDDLESLRDWLVAARCTHAVMEATGVYWKPVYNVLEEALSPVVVNAEHVKRVPGRKTDVSDAEWLATLLRHGLVRPSFIPERSQREVRELTRLRTALIQDRARAVNRLQKTLEGANIKLASVLTDVTGASGQRILDALLRGESDPEQMADLAHWRVLQSKRDALERALGGRLSHTLRFVVAQELQQIRLLDEQITACDDQVAEELHPFDVEIGRLDGIPGVGRRTAETLIAEWGTDLSRFPTPGHLAAWAGMCPANKASGERAPAHTRKGNPWSRRALTEAGWAAGRTKDSYLGVQYRRFAARKGRKHAVVVVGHSILVIAYFLLTRGVDYQDLGIAHLDTRDRDAARQRAVRRLETLGYSVQLTSLQAAA

SEQ ID NO: 280902 - protein, 373 aa, unidentified
MTSVRHEGAVWLGLDVHKDSIAAGVLADREATPRIELIGPDPDAVRRLIKKISRNPRSIRACYEAGPTGYELHRLLSGMGVRCEVIAPSLIPKAAGDRVKTDRRDCARLVRLLRAGELTAIHIPTPAEEAVRDLCRARADVLQDQLRARQRLIKFLLRHGTVYPGRTMWTLSYYRWLDQIRFDERALTETFRHYRAVVTDRDSALSAIDADLAPWCGQDPFARQVRRLVCYRGIADLAGLTFAAEVGDWRRFPSAPSFMAFTGLIPSEHSSGGSQRRGHITHTGNEHIRTQLVESAWAYRYPAKIGLGLQRRQAGAPVDTLARSWAAQQRLCGRYRRLAARKHVRTVVITAIARELAGFLWAEMTANAIPAAA

SEQ ID NO: 280903 - protein, 423 aa, unidentified
MGGPSIGKRVVVMEVVHVRCAGLDVSKKDAKVCVRVAGAGRRKTVETVTTWGSMTSQVLALREHLIAEQVTCAVMEATGDYWKPFYYLLEDAGFEVMLVNARHVKNLPGRKTDVSDATWLAQLGAHGLVRGSFVPPEPIRHLRDLTRARTAITRERGREVQRLEKVLEDAGIKLSSVASDIVGVSGRLMLQALIDGQDDPAVLADLAKRRLRLKIPALTEALTGRFTDHHAFLAGVHLDLIDRHTVAIEEITARIEVVIEPFQGFRDLICTIPGIGLLTADVIVAETGADMTRFPTAGHLASWAGTTPGLNESAGKVKSTRTRPGNPYLQGALGAAAMACAQNPDTYLGARYRRIAARRGPMKANVAIQHSMLIAIWHMGTTGTLYDDPGADFFTRLHPERAKNRALHQLEAMGYHVTLGRTG

SEQ ID NO: 280904 - protein, 358 aa, unidentified
MNTHYFVGLDIAKNIFQIFLADQKGREISNKKMKRSAMTDYFVQLSPSTIGIEACATAHHWSRKLTELGHEVKIIQPQRVKAFLGQRNKTDAADAKAICEALMHPGTRFVRAKTIEQQDTDHLLARRERLVHNSTQIINQLRSFLAERGIVIPQGAHHFRKAMPLIIAEHWDEFSGDFEAVLTETFGEYEEVAERIAELDKLIKARASRTEDCKRLMVINGIGPLTATALTAHVGDGRQFENGRQMAAYLGITPREHSSGGKQRLLGISKRGSVRLRTLLILAARAAILGIERRKKGEDGAPLRLNNFDRWILTLKERIGIFKAAVALANKLTRIAWAVLAKGVAFDPAKACLLKVDA

SEQ ID NO: 280905 - protein, 343 aa, unidentified
MELYVGMDVSLKETSICVVDDDGEIQCEGTVISEPEALARFIKTNAVGAKRIGLETGPTSTWLWHELRTLGLPVICIDARHAKAALSMQINKSDRNDAVGLARIMQCGWYKEVQVKSLACHEIRAVLSSRAQLVKAKRDIDNQIRGLLKNVGLVVGAGKGNVFRRRVEALVDQQGLLWEAVRPLLEVREMLRREIAGLYRKLVSLARNDADTRRSMTVPGVGPITALTFHSAIDDPSRFRRSRSVGAYIGLTPRRYASGEVDWSGRISKRGDAMLRTYLFEAAGVLLTRVPQWCKLKAWGHRLWKRIGFKKAKIAVARKLAVILHRMWRDGTDFQWSDKEAKA

SEQ ID NO: 280906 - protein, 361 aa, unidentified
MGNYSTEFFAGMDVSDKSVEIFILRRDAEEGESMEIANSRKSLCAFADSFAKPSEVKVALETGTHSSWQADLLRSKGLDVTVANARKLRAIWDSDDKSDASDAEMLARLLRVDPKLLCGVRVKDRKVRDALVAVKARDCLCGCRTKLINTVRGLLKSEAVDSSALDADSFGAKAMGLIPKTLRKSLKPLVEQIARLGGEIKLYDKQIDALRKQFDGCEEVSQIKGVGPLTSLTFVLTVGDPMRFQSGGRLASYLGLVPKRDQSGETDRQCHITKAGSTLLRRYLAQAAHYVMGPFGDKDCDLRKFGERIAARGGRNAKRRAVVAVARKLAVIMLKLWKTREEYDPQYSKNRKLRAKARAAA

SEQ ID NO: 280907 - protein, 350 aa, unidentified
MNYVGVDIHKRYSFVSATDEQGHRLREARIEGNAPSAFAQFFAGLDGSSKVVLEACWNWGLLHDVLDELEPVEEIVLAHPFKTRLIADAQIKTDRLDARALATLLRGNLVARVHIPSPQTRQRKNLLRQRLYWARLRTMLRNRIHALLDRQRGLALPQCSDIFGVKGLNFLRSLQLPEPDGTLLAEQLALHDLIAQQMRAQEKRIVAETCADPIVQRLQSIPGVGKVLAVVLAAEIDVITRFPSAERLCAYAGVVPTTHASGGKIHHGRLLPWCNKWLQWALVEAAWIAVGCSGYFGGFYRQHRERGKPANKAITIVARRMCRIVWTLLREERDYEERAAMISPAAPAKD

SEQ ID NO: 280908 - protein, 399 aa, unidentified
MFYGLDIHKQFIQICEVAADGKRCGDYRIAASPEGIQAFARKLGPEDQVVLEATFHSWAIWSLLVPHAGKVVVADATQVKAIAYARIKTDKIDAHILAQLLRVGFIPEVAMPDTETWALRELVSHRRFLGKQRVALRNRIQSLVNSSLHDCPYNELFGVGGRRWLAALPFTATEQGIRDSMLRLHDAVEREIDQLDETLRQLASERLDARLLMTIPGVNVTGAMGLLAAIGEISRFDAPGKLASYFGLVPRVNQSADKCYHGHITKAGRSQGRWLAIEAAQSLANSVSPLAATYHRVHRKKGHNVAVTALARKLVVLAWHLLTKGEPYRYAPIARTRVKLKRVTPGAGPATIGQVPRTLEAVCAEFGLPVPREASLGERRVTARNRRVVTLARKQGAAN

SEQ ID NO: 280909 - protein, 334 aa, unidentified
MEQVTTVGIDLAKNVFSLHGVDSAGRTVLRRAVRRDRLLETVAGLSPCLIGMEACSGAHEWGRRFQQHGHTVRLMAPKFVAPYRKSDKNDGNDAEAVCEAVSRPSMRFVPVKSTEQQALLSLHRVRQGFVVERTALINRLRGLMSEFGVVLPLRSVTVRRQAAAMAEGLPELARSAIADLLEQLRGLDARIDAYDAQIHQQAKLSEPARRLMQIRGIGATTALAIVATVGNAREFKNGRQFAAWIGLVPGQYSTGGKPRLGHISKRGDAYLRNLLVQGARSVLQTASAHQDRLSRWALELQARRGYYRTLVAIANKNARIAWAVLAKDEALKMN

SEQ ID NO: 280910 - protein, 430 aa, unidentified
MKSNTQNAKIEAITEKTLVLGIDVGSETHYARAFDYRGIEYSKKPFKFSNTEVGFATFKEWILDLKERHEKDKVVPGMEPTGHYWFNLGKFLQDNEMKPVLVNPHHVKKSKELDDNNPTKNDRKDPKVIAGLVREGRYMIPYLPDGVYADLRTASNIRFQLQAELTRIQNRISRWFNIYFPEYKTVYGKPDAKSGMLILKAAPLPEDILTLGIDGVNQIWRDAKLRAVGKARAKTLIEAAEHSVGSKEGAVSARMEIRMLLEDYESKNMRLQEVMVLIEELVKEIPMAEKLLEIKGVGIRTVSGFLAEVGDISRFNNPKELQKLAGLALVENSSGKHKGETTISRRGRKRLRYLLFEVAMSLVAKNPEFRELHNYYTTRRLNPLKKMQSLMAIAAKLIRVFYAMLTKGVDYDPKKMVSDIKRPTVYLQAA

SEQ ID NO: 280911 - protein, 387 aa, unidentified
MARKRTLSTLDTSIAYEAVGLDLAKEDTAIAAFGPDHEGPYLIDRMPYDKLYELLADMAPTLVAMEPCSGAHQIAEQIQELGHEVMMISGRHVQAWVKDHCNGQKTDLNDAFAILNLAYDRWLTPIRGKTREECRLLALQSSYRQLKGQRTKTMVHVKATLHAWGFPIRTGSFNQKALHELIDANREAFGDEVVETLHLMINRVHDLDHDIATVLKLLTEATQRDPRASLLRSIPGFGVLTTSRWCAVVGDIARFDTPKQTMAFIGLVPNNRITGHHTETSSGREARGQGKMSKRGDKMLRSLCILGAGALCLMVRNDRLPDCPFVASIKERLASPRPWFKVLVYVAAKLVRIATALLKYGETFSFEKAGISKAVLKQWELEQAKAA

SEQ ID NO: 280912 - protein, 411 aa, unidentified
MNPQNTVAGIDVHKRILVVVLLHSSAPERDHATARFGATHMERQKLVEFLRFHQVSHVAMESTAQYWRPVWMDLEDEFPLTLAQARSTHAPRGRKQDLSDARRIARRLLSGDLTASYVPGPEQREWRLLSRTRVGMLESVVRLRNQIEVLLEQAQIKLSSVVSDVLGLSGRRILRALLEGVHDPVQLAALAHHRIRTSKEDLADALNGRLTPSQQLVLKLYLEQIEQIERHMAEVEKALAQAEAEHQDAIERLCEMPGVSVRSAQHVIAEIGPRAEAFASSGKLASWVGVCPGRNESAGVSTSNRSPKGNSMMRRILSQIAWASIASKGSEGQRRYRRWVGRLGPQKAAWAVAHYQLRVMWNILHQGVRFLQPDTANLDQKSLLHRAKRVLADLKRLGYAVTITPPANPAT

SEQ ID NO: 280913 - protein, 341 aa, unidentified
MSDYSYFCGIDLAKNHFSLHAVDQNGKVILHKSVTRSKLLTTIANMPLMRIGVEACGGAHYWARTLNKLGHDARIMAVKYVIPYRTKGKNDLNDAVAICEAVQRPSTRFVPIKSPEQQAILSVHRMREHWVRERTALMNRMRALLSEFGLIIPVGRSSLMKHVPLMLEDAENELPHLARTVIADAYHHLGELNQRIADTEQVFESFAKVSANVQRVMKVRGIGPQTATAILASIGNGSQFDKSRDFSAWLGLVPKQYSTGGKPRLGRITKHGDKYLRTLLVHGARTVIANLGDKQDKLSQWCRGVLERRGMNRAIVALAAKNARIIWSLLHNQTEYENYAA

SEQ ID NO: 280914 - protein, 340 aa, unidentified
MLHVGLDIHSTRITICALNERGQVVRRAQVRTIEEMLTTLKDLPDRFEVCYEASCGYGHYHDLLRPLAVRVLVAHPGQLRLIFRSKHKNDRNDAERLAKLLYLGETPAVHVPSPEVRAWRELINCRGQLVAKRTRAKNGARALLRSAGVVPPKKPGLWTKKGLAWLRRVELPTASQQLRRDLLLEEIEALTKQVRRVEQELNRQARKTPAVALLRTIPGVGARTAEAVVAFIDDAHRFRNAKAIGRYFGLVPSQDQSGDRNRLGHITREGPPVVRQLVAEAAWQAIRRSPTVRAFFERTHRDDPQRQKIALVATAHYLVRVMWAMLRHATTWHESRAKAA

SEQ ID NO: 280915 - protein, 375 aa, unidentified
MKEKIRFVGLDVHAETIAVAIAEPDGAVRSLGTIANRAESIRKLVKKLGSVEQLRACYEAGPTGYVLYWQLAELGVKCEVIAPTLVPVKAGDRVKTDRRDAEKLARSYRSDDLTAVWVPDEGSEALRDLVRAREAAKQDQLRARHRLGKFLLRSGQRPAPGVKAWTQTHLTWVRQIRFSQMAQESTRLDYLHEVEHMGERVVRLEQAIAEAIKLASPQVQEVIRGLQALRGIAQISAVTIASELGEVSRFEGARQLMAYSGTIPSENSSGKRTRRGSITKTGNAHLRRIAVEAAWCYRLRPGVGPALRKRQEGVAEEIKEIAWKAQHRLHKRYSRLAAAGKDQRKIVTAVGRELLGFIWAIGVKAEAATKKRIAA

SEQ ID NO: 280916 - protein, 364 aa, unidentified
MKRKVYVGMDVHKETIQIAYLTSNSKEILKEQQIKHNEVQIKKFIKKLKTEWNEIYCCYEAGVTGYPLYRYLKSLGVNCILVAPGKIPRQNTDKIKTDKRDAIKLARLMRSGELESIHVPSEEDEAVRDYLRSRDSLRLDLGRNRQRLMKFLLRKDIKYSTTKYWTVSHYKWLNNLHFNNEILQETFNDYYSRVRVQEENLKAMDKKIQEIAESEPYREKVGILRCFRGVDYLTAMFLLCEVNDFKRFKTAGSFMSFLGLVPGEYSSGSKRKQTGITKTGSPRLRRILTEAAWQHRFPGTGSKIITARRSGQPALVVALAEKASLRLHKKFRNLQLRGKTPQVMITAVSRELSGFFWGAMNLVA

SEQ ID NO: 280917 - protein, 343 aa, unidentified
MQAITTIGLDIAKSVFQVHGVDAAGQVIIRRQLKRRAVLAFFQKLPPCLVGIEACASSHHWSRELQALGHTVRLMPPAYVKPYVKRQKNDMADAEAICEAVTRANMRFVPTKTPEQQSCLMLHRTRHLFIRQQTSVINSIRAHLAEFGIVAPVGRKGVTELLHVVADPSDKRLPEVARACLAALGGQLLSLKEQILEFDRMIMAWHRSNEPSKRLRYIPGVGPMLATALVASVADPRTFRSGRNFSAWIGLVPKQHSSGGKDRLGSISKQGDRYLRSLFVAGALSVIRYAKIHGTKHRPWLTTLLARKPTKVAAIALANKLARMAWAMMAKGERYRNPVALAA

SEQ ID NO: 280918 - protein, 338 aa, unidentified
MNKITTIGLDLAKNVFHAVGCDQHGKQVSRKMLRRNQVLTYFAQMEACLVGMESCASAHYWARELQKFSHQVKLIPPQYVKPFVRGNKNDYNDALAIAEAVTRPEMRFATIKTQSQQDIQALHRLRERRVQERTALCNQVRGLLAEYGIIITMGVRSLQCKLPELLEDAENGLSDVFRQYLVQIQQQLQELDVHIGFYTDILKEQNRQNEVCQRLQTIPGFGPIVASVFYSLVGNGESYHRGRDVSAALGLVPKQHSSGGKDRLLGISKRGDRYLRSLLVHGARSVIIHAVNKDDKLSRWVNKIKAERGYNKAAVALANKMARIGWAVIAHKTIYQTA

SEQ ID NO: 280919 - protein, 333 aa, unidentified
MNEYIGIDFHRQSSYITRMDKEGNILEQLKVRNREEELGAFLAKHIEESKIAIEATGNWYYFYELIEEKQPDVVLAHPLKTRAIASARIKTDKIDSATIAHLLRSNLLPTAYIPPREIRDVKEILRYRASLVSLRVAIKNKVRAILSKNGIVLNYTDIFGKKAMIYLKDLEIRSCYRREMDGYIMLAETLNFLIDETSRTIREMVEDNPKAMLLTTMPGISYYSALLILAEIGDIKRFCDARHLCSYAGLVPSTYQSSDRTRHGKITKQGSRWFRWILVEVSTHAINSSKKFKSLYIRVAKKHGKNTARVAVAREMLKVIFYMLKYNEPFKNG

SEQ ID NO: 280920 - protein, 334 aa, unidentified
MNYAGIDVSYKHAVIVVSVKGKARKAKTFDNTPAGHKAIIQLLSKLKGESRVCLEATGIYHFDLAVALSRAEGVEVMVINPKASHHFAKVLMKRSKTDAVDAELLAIYSERMPFEAWQRPADEQIALRAISRRIAALSKQKTQTKNQLHALTATEESPALVIEHIKALIALLEKQIAAHRSSALELIRQHQPLAEALTWVTSIKGIAQASGIQILAELMILPQDMTARQWVAYAGLDPRVFESGSSVSKKPRISKAGNKFIRQALYMPALVATRFEPNIKGYYVHLIQDNGLKKVQAICAVMRKLLHAIHGMLNAKQAFDGTCFYKLPAEANSQ

SEQ ID NO: 280921 - protein, 316 aa, unidentified
MVLTPLFVGIDVAKATLDIAVRPTAETWSASNDATGIDALVTRLGTLAPTLIVLEATGGYQGPLVAALVAAALPVVVVNPRHIRAFAQAVGILAKTDRIDARVIAHFAEAVKPAPRSLPDAQTQELRALLVRRRQLVEMLSAERARLDTAPPGLQDAIQAHIAWLTDQIAGLDGALTRASQAHPEWQVKDDVLQSIPGVGPVLARTMLGHVPELGTLGSKPLAALIGVAPFNRDSGTLRGRRTVYGGRAEVRAVLYMGALVATRHNPVIKVFYERLLAAGKAKKVALTACMHKLLTIMNAMVRDLKPWQPQEVPIA

SEQ ID NO: 280922 - protein, 341 aa, unidentified
MRYIGLDVHKDNITACVLTSTGKPKFEKDFLKESGNWILDELLDFGDKEGFCVMMESGTYAYAPFRFFSDRGIEVHVVHAKALKVITDSDKKTDSKDALTIAKMLRLWKRDDIDLQMAYMPTREQCELKDICRYREEISRKIGDETRRIKSHMSRNCEYLPEEFDNFQTEKAREFVKKTYPEDRTLMRRMDCLIDLFRERDLVKEDVGSRLPGSREVGLLCGIPGIGRQTAVQIMSMIVDVNRFADAEKLCAYFGMVPRVRDSGGKEHHGRMTKNGDRMMRMIMERVTESHVRNCNSSLTQYYKRKRDEMGTKKALITASRKMLSVIYAVLKSGRDFRIVA

SEQ ID NO: 280923 - protein, 460 aa, unidentified
MAKQRGKRKKDAKADATEGLPPLNLHAAGIDVGSAEHYVAVPSDRDAEPVRKFGSFTADLHRMARWLKDCRITTVVMQSTGVYWIALHDVLESHGFEVNVANARHTKTLPGRKTDVQECQWLQKLHTFGLLNNSFRPPEEIRTLRGYLRQRENLVAAAATCIQHMQKALTEMNIQLANVISDISGTTGLAILSDIVRGERDPYKLAMHKHSRIRASRQEIARSLEGTWRQELLFVLEQSLDLYQTYQQKIQTCDERIDGQLRSMEPRIDPMSEPIPEPRRGKDARGHQSGFDLRGQLYRITGVDLTRIDGIEVQNAQTIVSEVGVDMSRWKTEKHFASWLGLCPDNRISGGKVLKRGTRHVVNRASTALRLAALTLLRSQSALGAKFRRLRSKLGAPKAITAMAHMLARLVYRMLKFGHDYVDRGVEFYEAKYQQHQLERIRKQAAALHMQLIPLTRVVS

SEQ ID NO: 280924 - protein, 369 aa, unidentified
MDKDTTYVALDDSKRKIVAGILRPADAQPELREIANDPRQIRRLFERLKREGPVTACYEAGVSGYDLHRQISALGVACAVIAPALTPRRPGQRIKTDRRDAAKLVRLFRAGELTAIHIPDEAEEAVRDLVRCRDDIRRDVLRWRHRVLKLLARHGRACLAGKNWSHAHWRWVREQRFDLPPLQRAFEATVFALEQALARQAELDKELEALAASAPYREPVGWLRCFRGIDTLSALILIAEVVDFQRFRRPRELMAYLGLVPTEYSSGETQRRGALTKAGNSHARRVLVEAAWHYRHRPTIGRALASRSQGQPDEIVSHAWRAQQRLHRRYRHLVGHGKRTPVAVAAIARELVGFIWAAMTRHESRRQAA

SEQ ID NO: 280925 - protein, 351 aa, unidentified
MDHIAIDLGGRESQICVMSAEGEVLSEERRPTRGLGAYLAKRPAGRVVVESCAEAFGVADEARKAGHEVAVVPATLVRSLGVGMRGIKTDVRDARNLAEASCRMKRLPMVHVPATASRERKAVCGLREVLVGTRTKLVNSVRGWLRTVGVGPMLRCRPEGFPTRLRKHVADRGGVVPPAVERVLVMVEAVNIQIASADEELKTVADQDSVCQRLMTVPGVGPVTAVRFAAALDDVSRFDSASSVQSYLGLVPGEDSSSDRRKITSITKAGAPHVRWTLVQAAWSAWRCRKTTRWSNGQRRWQNVVAAPSPSWPWLGRWPASCTRFGGTAASTTPNEEPWLRRRSQSLSILR

SEQ ID NO: 280926 - protein, 388 aa, unidentified
MYYVGIDIAKYKHDCFIFTSEGEIVLESFTFENTREGFSKLKLILDALDHSQKIKTGLEATGIYGKNLKLFLSSIGYDFDELNPLQVKRFTNALSNRKTKTDKIDASQIARFVSTGASRTYVYSSYHTEALKQLTRARNSLIDERSKHQTVLTGILDVEFPEFKGFFNNKFTDTALYLLNKYKTVKRISKLSHNDCVLLHNKSRVISTSRFEELRESAKNTCGHHFDYNDSLISANLQIIKCLNNEIDKIEKEINSIMSTINSPVVSIPGISAISATSIIGEFGDFSRFDNAKQLCAFCGVEPSIYQSGTSYHEGKMVKHGSSNLRRTLFNVVPYIIMHNETFKTFYDKKSSEGKAYRVAQSHVVKKLLRVIFTLEMTGSTFAPSKLY

SEQ ID NO: 280927 - protein, 420 aa, unidentified
MKVVYPVCCGVDVHKTFLIATIISSSSGLTPKYSKKRFSTFNSSLFNFKNWLIQNNCFDLCMESTGKYWVPVYNLLEDSIRITIANPKWVKAVKGNKGDIKDSKWIGDLFRLGLVPGSFIPAKPIRILREYTRYRSKLVSCKSSEKNRFQNAFTVCNVALDSIVSDMFGKSASLITDYLVSDEPFESQKCVSFLQRSLKKKADAVIDSINGYHMTSEQKDRIVLIRSHLDFINSSIADLDTKLGIMVEPYNSAISLLRTIPGIDRPSAITIISEIGTDMSQFSSSKRLCCWAGLTPGNNESAGKKKSVRITRAGVYLKPALVQVAHAAVKSNKSSYYKIKYDRICKRRGKKRAIIAIARMILTAIYHMFTTGELFNPCDLYRIDMPQEMQSKQKDKAIKQALKLLISQGIIDSSMLPQTS

SEQ ID NO: 280928 - protein, 371 aa, unidentified
MGHHSEAFIGIDTAKLRNAVAIAEAGRRGEVRYLGEVDSSEAATRKLVAKLAAKYERLSFCYEAGPTGYGLYRLITSLGHECQVAAPSLMPKKPGERVKTNRRDAEGLARLLRAGELTAVWVPDDRHEAMRELTRARDAARQDLTRKRQQVSSMLLRLGRHYPGLKTWNARHRSWLANLKLDHREQRFVLEELLQAERQAGERVERLEQAIREALADWSLEPIVPALMAMRGIDLVGAVTILAEIGDLSRFKNPRQLMAYLGLVPSERSTGESVKRGSITKAGNGRARRALVEAAWAYRHPPRVGYEKQPQVAAAPRRAREIAWKAQVRLCKRFRMLSRGGKKSTVVATAIARELAAFVWAIARESHPSRA

SEQ ID NO: 280929 - protein, 401 aa, unidentified
MSGLKGSFNGFVGIDVSKDKFDACGITGDETKIFQFSTTMDRKGFEKLKGHLAAVSVSSVLIGMESTASYHVNLFSYLVSEGYKVLLINPLLISNYVKMQLRKTKTDKKDAVVIAQFLLTNGDTLIQRVTSSLISDLRDLARQRESLVDEMTALKMEIKRLLNITFPELEHMAGIFTKSILKLLQRYPSAFALRDADLGQLSQTLIADSYGHKREAFATELIKAAHASIGSSSPAKEMILKQKIALLLHLEDALQEITDVLIEMSRKLMEEDINIMTSIKGIGDKTAVSFLIEMGCDINQYDRSGKIIAMAGLDPAVYQSGNHEGKGRITKRGNRHLRRVIWLMTTRVIHYSDIFKVYYLKRRKEGLPYKMAVLATAHKLIRVIYAMLTQRTSFCPQANSL

SEQ ID NO: 280930 - protein, 368 aa, unidentified
MIKTLVHHQGAAAPAEARHQDGRTPATIKLGVDVHARLYVVAAQYDHALPKPPQRFAPEEFLPWVEGLLVRGHTVHVVYEACGFGFGLYRQLVAAGAHCYVIAPRKLDEAHTGVKTDPRDALTLCQRLSRYLEGNTRELAVIRVPSEEEEQARHVSRQRAQLVRHRQKLEAAGRGLLVSHGLPAPAHWWKEQTWTYRLTPHFPAWILPHLETYRPILLALDAQIAALTATLEAAAPRDLPSGLGKLTSVVLSHEVCDWHRFQNRRQVSSYTGLCPGEHSSGGRRVQGSVTKHGNPRLRAALVECAWRLVRFQPQYPPVRKRLAILAKGAKATGAQRKKAIVAVARHLAVDLWRLQTGQCTAAQLGFTI

SEQ ID NO: 280931 - protein, 410 aa, unidentified
MELLHPHFAGLDLHKETVVACIRHMADGKVTTDVKSFQTTTQQLMDLSDWLSSQGVTHIAMEATGVYWKPVWHILSDGEFELVLANAAHVKNVPGRKTDVNDATWLADLMAHGLIRASFVPDEPTQQMRDLLRTRKQFVRERSSHTQRIQKTLEDANIKLDSVITDIVGLSGRRMIEALIGGETDPEALAALAHGRIRATKAELEAALRGRVTAHHRFMLRIHLNHLDALNTTIADIDKEVDANVEPFRAAVEMLTTIPGVSSLAAEVMVSEIGIDMSRFKTEGHLISWAGLCPKNDESAGKRRTNRMKKGAPWLKTTLIQCAWAASRTKGSYLQAQFLRIRSRRGPKKAIGAVAASMLTAAYHMLKDGTLYQDLGTNHFDNRDKAKQALRLVNRLQSLGFTVQITSMAA

SEQ ID NO: 280932 - protein, 358 aa, unidentified
MAHYSLSALKSFVATHHSEPFWVGIDVHKRSYHLALLRSDAKTFTLVTPACPEKLVEQLRHLDIIIAGVVYEAGPTGFSLARTLQTDDFQVIVAAPSKVPRSITAGAKTDRLDCIKLAHFASKGLIRPIAIPTEQEEAHRALSRRRHQLVDSIRRCKQRIKGFLLYHGFEETKSIKNWSSNYEEQIAALPLETEGCLTVESHLRELNFLQNELSSVTHQLNQINLKPKHRAVIRSLTSVPGVGKVVATTFCTEMFRPERFNRGEEVASYLGLAPTVRHSGEQTPRGHLVPVGQTRLRSLLIEAAWMWRAKDPYALELYNKLLNKTGIPQKAIAALARKLAIILWRLSIEQRVYRPIAI

SEQ ID NO: 280933 - protein, 331 aa, unidentified
MENCQFTLGVDVSKLTLDISCTQVSQHIRITNDSKGFKAFKKWCGQYGIACKSCLVVMEYTGGYEYRFIQFCEASSIPYCRVPGLAIKNSLGITRGKNDKVDSIRIANYAEEKIKKLEPSKPLNISILKLKQLMSFRKRLVRDNAGFAATVKEREYMYGQTSGDIILEVAKRMIDQYKKDIKELDKQLMELVKSDAAMLFNYTLITSIKGIGKVNGMMTIAYTENFTSFPSGRAYAVFAGVVPFDHSSGTSIKGRKRVSHIANKELKQELNQAAKTAILHDPEIRAYAEEKIMQKKNYSIVLNNVKFKLIQRMFALVKRGEMYVDNYKKAA

SEQ ID NO: 280934 - protein, 351 aa, unidentified
MTMLAEVVDAVVGGDTHRDTHALEMLAPNGTTIAALAISNDDDGFAGAIAWIAGNVPGPRVVAGLEGTRSYGIGLARAVAAAGLIVVEVQAPRRADRRHRGKSDPIDAHLAGLQVLRMPAGELPAPRADGDREALRILLSARRELTMARTRQINRLRALLPGGDDTDRDLSRGTLTGARLQAIARRRARASDTTEQSVRRAGARRLANAIRAAAAELAANKRHLAGLVRGLAPALLDKTGVGPVSAAQAIVSWSHRGRCRSDAAFAALAGASPLQASSGRTTRHRLNRGGDRQLNRALHDITLTRWRADPRTHDYIARRRAAGKNDTEIRRALKRYVARELHRALQASPAT

SEQ ID NO: 280935 - protein, 347 aa, unidentified
MFNRNVIAIDVAKSSFQVVVVDKKNEIISNRSRSRRGLENWLAKQEPSIVAMEACGSAHHWGRLAEKLGHTALLLPPKNVTPFRQGHKTDSTDTIAIATAVRQPKVKPTYVKSIEQQGLQSLERTRQHWLDLSKATSNMLRGLLYEFGLTIPKGRKALGRALPDILEDGENDLPDMLRQPLDALYQALEKQEAWLREVEKQLHQLTRQQPEVTRLMALEGIGPVNALGLYLVLGDNGKAFKNGREAAACIGTTPQQYSTGGKVSLGQISKRSGHKRLRANLIQGGVSVVETVLKRPPKNTKEKWLLGVIERRGKRRAATALANKNIRTAWAMLHQNEEYRKPLNIAA

SEQ ID NO: 280936 - protein, 366 aa, unidentified
MKKISTMQVFGNEVFKEQKLTIGLDLGDRWSFYCILDEAGKIILEQKLPTTPEAMKQTFGKIPRSLIAMETGTHSPWVSRLLTELGHEVLVAHAQKVELITKSNRKDDRHDARTLARLARIDPELLGPVRHRSAKAQIHLTVIRARAELVSARTALVNAARGLVKSFGQRLPKCGTQQVSGKLAEGLSAELREVLEPLLREVESLNERIQEYDARMEKIAKEVYPEASLLKQVKGVGTQIALTYVLTIEDPYRFPKSRAVGCFLGLRPGRRNSGESEPQKKISKEGDRYLRTMMVQGAHYILGPFGEDSDLRRWGMKLAERGGKNAKKRAVVAVARKLAVLLHRLWVSGEVYEPLRNSQKAMRAVA

SEQ ID NO: 280937 - protein, 419 aa, unidentified
MSFKIIKNNCCGLDVHKTWIFACIGITDSNNRTEYKQARFSSFTKGLNELCDWLAKYNCKDVCMESTGKYWIPVFNILEQHNLWVTLSHPKYTKPMKGNKTDRKDAKWICDLYMCGMVKPSFIPSADIRELRDLVRYRYKLTCMITGEKNRAQNCLTVSNLKLDEVFSDVVGKSSRSITEQILQHPGEAFDVAHFVHGRCKTPIEEIQAAVDGAISKEQAVKLRQCLDHIDELNKHISEIEQEILRLSDKYETALNLIRTVPGFDKNPLTAVQVLSEIGGDMSVFPTAKHLVSWAGCCPRNDQSNQKIKSTRISRAGSYFKPILVQVANALIKSKKHPEFTTRYKRIKARRGHKKAIIAICRMILTAIWHILSDLEPYTPEGFLESRPVKEEKVLSTSQALNLLKQRGYIIKDEPLAVS

SEQ ID NO: 280938 - protein, 341 aa, unidentified
MKNKSFIGIDISKNVIDVSIFCEETPIKDFSHDVFNNSRKGFGEMCTWLKKNHVVLSNSLFGMEFTGSYSMELEKFLNTRNYQFCMLSTHVVKHYPMGPKDKSDKIDSAKIADFLYRYNGTECVKPYNMPDKTMQRLKALMNERKFLVEQRTCFMNRRQLCITKEDAQLYDGYIKKFSRDIENIELEEQKLLATDDSLLSTYKNLLTIPGIGFVNAINVIVITRNFTAFETARQYASYVGVAPHFRTSGTSVKWRPRPSARCDGQAKADLSMAATVVVQYDAELQSFYNRKLGGKQDSDTKRKALNAVKFKLVLRMFAIGKQNRKWEPLDSKSSNEKLAIS

SEQ ID NO: 280939 - protein, 450 aa, unidentified
MMSEPQEIEDEEYEQVLERVAAIDVAKATGMVCTRMPHPSRPGRRQAKVWNVDATTNAILELGEYLAGLGIEKVTLESTSDYWRPFYYLLEAAGLSVQLVNSRDVKNVPGRPKTDKLDCVWQAKLTERGMLRPSFVPPAEIRQLRDYTRLRLDLTRDRSRHAQRIEKLLEDALIKLSSVATDIMGKSGRAMIGALIAGERDPQVMAGLARGRMRVKHAALVQALTGRFDAHHAELAVILLGQYDALTVQIDALTARIEALIAAIPAARGVDAGGTTGPGAGTGSDAAVLAAIDRLDQVPGIARHTAQVIIAEIGLDMSVFPTAGHLASWAKLSPRTIQSGPKNRSGKTGRGNPYLKGALGEAATAAAKTSTFLGERYRRIVKRRGKLKALVAVARSILVIIWHLLADPAARYCDLGSGYYASRTDKDRKTRSHIRQPEALGYTVTIAHAA

SEQ ID NO: 280940 - protein, 350 aa, unidentified
MTISHYIGFDVHKKSISYCVKTADGKIVEEGKLRATRQVLREWAQKRREPWHGAMEATLFSGWIYDVLKPFAAQLQMGNPSMMKAIGAAKKKSDRLDARKIADLVRCNLLPVCYVAPVEMRELRRLLRYRNTVVAHAVRMKNKMSGLLMEVGVEYNKQQLHGKKYFTELMGRLDEVPESVKDMLRLSRSALEMFETTQRQLLDRLQKEPLLIQRLEVLRSIDGVGEVTSLSWALETCDPQRFASIADAVSYCGLTSALVSSADKQQRGPISKQRNPHLQTVLIEAAKLAPRWNQPLAELHQRELKRGDRNRATLAVARKLVAYLLAVDKSGKPFQVRKPATGEREAVPMA

SEQ ID NO: 280941 - protein, 354 aa, unidentified
MKLITNDVKLVIGCDFHPSFQRIAILDRETGELSKKTLLHGNGEARRFYEGLRGQSVVVGIESCGNTLWFEQILAEMGHRLVIGDAARIRAHVVRRQKNDDRDALNILELLETERFPALWVPSPEERDLRALLLHRFKLVQMRTRIKNQLQHIALNYGFQKKRKLWSQEGRKFLQELELPTWTGRRRDDLLKMLESLDVTIAELSAPVEKAVEKDARSQLLKTHPGVGPITALGFVLIIGPVERFARSRQVASYLGLIPTEDSSGGRHRWGHISKQGNTFLRTMLVEAGQTAARKDPELRRAYQRLKHKKQFSGIAKVMVARKLAIRLYWMLRTNQPYLPARMQGSPSHSVVEV

SEQ ID NO: 280942 - protein, 312 aa, unidentified
METKFVGIDVSKLALDFDCLPVGSPQQFANDVEGIAALVDLLKDSGVERIVLEATGGYEAAVASALAVAKLPVAVVNPKQVRDFAKVTGHLAKTDRLDAKLLALFAERIMPPLRALPDEAQRALADLLGRRTQLIAMRAQEKARLTIATGAAHKNVRQHIAWLDKCIVKIDGDLEKRLRNSPVWCEKAELLSSAPGVGPVTTFALVAKLPELGTLNRQAIAALVGIAPFNDDSGTRRGKRYIRGGRADVRCTLYMATLSAIKHNPPIKAMYERLTAAGKPFKLAMTACMRKLLTILNAMLKKNQTWKIEPFS

SEQ ID NO: 280943 - protein, 387 aa, unidentified
MTVANDLKKSLVALEQDSTLIGVIELSESSWLIGGLVPGVAREPLKKQGAEPEAVLKVLHRWRDEAERAGRRITRVAVAFEAGRDGLWLARWLRARGVEAYAIHPTSVAVSREHRRAKTDRIDIRLLKRSFVGWLRGEPEHCRMVAIPTLQAEDARRPNREHERLVGARTALINQLKSTFARLGIRGFKPTLRKAPERLAALRTPEGEPIPTNSLDELQRTMARLRLVKDQIKQLETTRLERIDKAPTDGPHAMIRLLARVLGIGIETADTLVHEVLSRELRDGRAVARYAGLTGSPDESGKRRREKGLARAGNARVRCAMIQLAWRFLMHQKDSALACWYRSRTQAGARDARKTMIVALARKLLIALWRFVRTGVAPEGVVLRAVA

SEQ ID NO: 280944 - protein, 312 aa, unidentified
MEKTYVGIDVSKATFDVYCLPEESWQSFPNTPDGISACREKLSGFQETLVVLESTGGYERKLAETLEQAGHAVAVVNPRRTRRFAQACGLLAKTDKIDARVLGHYAATLQPPARGVLDAHRQQLKSLTARRQQLVTMHTAEANRMEHASDPYIASSLKSVLAFLEEEQGKIEREIAQHINNTPEFKQAKENLDSAPGVGGTTASMMVVEIPELGTLNRRQIASLIGTAPFNQDSGKFRGKRMTGGGRGHVRTKLYMPTVVATKHNPVIREFYQRLLAKGKSKMVAIIACMRKLLTILNQMVKDNTRWGENFA

SEQ ID NO: 280945 - protein, 429 aa, unidentified
MNSTQNKKIEQVKETTMIVGIDVGSEQHYFRAFNWRGIELTRKPVAFSNSMEGFNSFYNTIMELMQKSELEEALVGIEPTGHYWFDLGQFMGEKNIKFVMVNPHHVHKTKELDDNSPSKNDRKDPRIIAGLVRDGRYFYSYMPTGVYAELRNASNRRFVLVEEQTRAKNRLQKWIAVYFPEYKGIYTRIDAKGGLLVLKQAPTPEEITKLGEEGIIKIWKDAKLRGSGHKKAMKILNAAMRSIGLKAGLTEARMEMQDLIEDYELQTKRLERVNDLIKELCRQVRYADKLLEIKGIGITTVAGFIAEVGDITRFDSTKELQKLAGLELVADSSGKHNGRTKISKRGRKRLRYLLFEAAISVVGKNEEFKEIHRYYTTREKNPLKKMQSLIAVACKLIRVFHVILTKGVRYDASKMLEDIRHPKEQLKAA

SEQ ID NO: 280946 - protein, 426 aa, unidentified
MKVVYERVAGIDVHKDMIKVAIRSPGEKPWARTTEIVEYRTFYGVLQQMAAELRRRGVTHVVMEASGVYTEPVYYALAERDFTEIAVINPGHAKALRGHKTDAKDAARLAELFECGLLRGSYIPAPELKEVRDLTRYRIKTVQARTSEIQRLAKALESAGIKVGSVASEITGKSATAMIEALIDGERRGAVLADLAKGRMRTAGKLADLSMALAGRFTGHHALLCRLHLDRIAVFDTAVAGLEDQIAAKAARWQREQNLLKTVPGFGDAVAQAWLAEIGPVPHAHFPSHDKLASWVTLCPGNNISARKRKHGRTGDAGTYIKPMLVQAAWAAIRVRGRLQARYHRLVRRFGGENNPAAKKKAITAIAHTLLKIAYQVLKSGQPYQDLGADFYTRRESPEQRQAWLLRQLQKLNPGAAITITPPEAA

SEQ ID NO: 280947 - protein, 401 aa, unidentified
MHYVIGIDVSKATSQVAVAVDGKVTQHFKITHDVLGFNQLNTIIMQFNEFPDIVFEATGIYSRRLKSFLDWHNYPYTYLNPLAAKKQLDQLRPNKNDLNDAKNLAETQFILARAKSYVQNPIYIELQDMSRFYQQINHDIVSTKNRLHRILQLTFPEIEGLFSATDSPHYWELLTIVPHAIITRRSRQALMDTIQGGISWHIGHERLRKLVDQLMSMGQISAPAVAANSYNVAQVIYYAKRLIELHGTKGDILTAMVDKAKDLPEYSIYQSIPGFSDKTVVSLIAELGDLHRFRTANKLNAFVGIDLRFNDSGDYKSTGFITKRGNSTARKVLFRAISNIASTASYGHPSHINDWYQKKKQSSLSKGTKKIAIGAMSRLLRTMHYLVINHQLYDYKAASKH

SEQ ID NO: 280948 - protein, 446 aa, unidentified
MSKIPKAERNRLKRQQAIAHSYLLAVDPGSSHHSGVLYSPTRQPLTDVLTIHNNREGFEQLENLLKNLQAHHPDARVVFAIEASGEYWRPLHHYFKERGFETVFVPPLFVKRTREIDDYTPRASDPKDTICICNLAYEGRYFCDSQHAAVFQNLYQVVRAWDQVTQQLARTRLRLRSLLAKYFPEYPGIFSNLLGTTSLEVLKRWPFPQDLRQVPYEVLYHALRQISRKQLKVEKINLLWQKAHTSVGITTGLAGARIRLKLLLEEAEFYKQKAAIIMKQIAQILNQIHYVPKLRSIVGVGHITIAQLLAYTGDWLNFSHYNQIIDLAGLDLIFHDSGHYRSKKQISHRGRKHLRCILFLINRNYVRYPNTGRRKYLRLRLQGKSHREAIVATIPHLVRTIFAVVHGNTYYRPPFSDDPLCQEIAQLEKRWHERKKLKRKLRSKNK

SEQ ID NO: 280949 - protein, 278 aa, unidentified
MTKSSMVCAGIDTGKRKLDVALHGRAERLQVDNAGDGHTRLLRWLRQHRVKRVGIEASGGYEAGVVAWLRGNRFVVIVLQPGQVRAYAKFVLQRAKNDRIDAALIAECTALTSTIHAPPDLRLAPFAEHLTMIEQLRADIACDKTRRESCRDPRRRRYWNEEIARLKAVLRSELKALVAAIRQHADLAERLALLTSIDGIGLPTAVAILVRMPEIGRVTREEAAALAGLAPYDDDSGDRVGGRHIAGGRERLRKSLYSAALAAAFHWNDQLKALYTSA

SEQ ID NO: 280950 - protein, 342 aa, unidentified
MYYIGLDVHKKTISFCVKDAAGHVHREGKIGSTRRELDAWIGTLPQPRMIAMEATIFTGWIYDHLLPHASAIKVAHPLMLRAIALAKKLSDRIDASKIADCLRCDFLPECHMASTEIRNRRRVLRYRHLLVRQMVQTKNRVSGLLLETGVEHNKSRLHKVGYFRRLLATNSDIDDSIRPLLRLSRETIERCQKTEYALVSSLERDPFLKERIKRLRTVPGVGPITALNWALEMGDISRFRTIKQAVSYCGLCGDERRSADKVMRMPLSKQRNKHIQHVLVEAAKLAPRQSAELALIHHKAMEKGNRNRATLAVARKIVAWLLAVDRENREFIPAQQRETRAA

SEQ ID NO: 280951 - protein, 415 aa, unidentified
MEVIYKRCCGLDVHKKMVVACLIIRDGEEVKKEIRTFGTMTSDLILLHDWLLANRVTHVAMESTGIYWKPIYNLLEGNFEVLLVNAAHLKAVPGKKTDVKDCEWIADLLAHGLLKGSFIPPEPIRDLRDLTRYRKSLTEERNREVNRLQKLLESANLKLSSVATDVMGVSGRAMLEAILSGSTDPEVLAELARGKLRKKLSLLREALRGRFRPHHRFMLEQILSHLDFLDETIERVSKEVENRIVPFQKEIELLKTIPGVDQKTAEVIIAEIGVDMSRFPSHRHLASWAGLCPGNHESAGKRKSGKVQKGSQWLKRGLMESSWAASRTKETCLSALFHRMVRRKGKKKANVAVAHAILIIVYHILKKRIPYYELGADYFDRLNLKYITHHLVNRLNGLGYKVILEPLSLAACMET

SEQ ID NO: 280952 - protein, 367 aa, unidentified
MNNSSTVVGLDVHKDSIAAAVFPAGAAKVSEIINIGNSSLEIKRLVERITRRGTAEFVYEAGPCGYEIWRQITGMGVACSVIAPGLTPRKPGDKVKTDRRDAENLARYHRAGELTKVNVPTRQEESVRDLLRAREDLLQDRLRARHRTRNFLQRQARQYGKKLWGVNHEIWLKAQKFDYPALTQTFETYLRKLDEANAGLEEIDRLILGWAEGEEYRNAVKCLRCFKGIDTLGAITILSEAQDLTRFGNAREFMSYTGLVGSEYSSGERVIRGSITKAGNAHIRRVLVESAWAYRHRNVSSPALLERRKGCPAEVVKIARKAQDRLTGKFWRMLSKGKKQPVIVVAIARELAGFIWSMSKHFPAKAA

SEQ ID NO: 280953 - protein, 341 aa, unidentified
MGLDIHKRQWSVSIFTASAHHRTFSQPPYPKALESYLDKHFPEASIKCAYEASKFGYWISRELVSFGYECIVVNAADIPTSNKESSEKADPSDSRKIGKALRAGLLTGIHIPQQHTEGDRQLFRYRKRLWADLVRVKNRIKDKFLFAGIEIPHQHDNPNWTKAFLKWLKEATLPDAHTRLTLDMLLEQYHFLYRHFLKVSIEVRKLQRTSYYKTNAKLLRSIPGIGPLTTVQLLTEIEDINRFQTFKKLNGYVGFKPTTHSSGEHDWRGRITYRQNRALRSALIECAWTAVSLDPVMLQRYEDLKKRLTAKRAIVIIARKLLSRIYFVLKNQKPYELGIAK

SEQ ID NO: 280954 - protein, 374 aa, unidentified
MSKVISYVAMDTSKRSFWVAALYAGRAERVVEWEVVNEPAAVKRMVRKVQREAGGEVVFCYEAGPCGYALQRQIEAMGVRCVVVAPSLIPVKPGQRIKTDRRDARKLVELFRAGLLTEVRLPTVEEESVRDLVRCREDVLEDLARCRHRLGKMLLRRGYLFGPGRSPWTQSHRRWMVAVCWEREADRMVFSDYLLAVDAAQSRLENLTAQLEVFAQQEPYKMAVAALGCFRGISTVTAMTIVTELHGIERFTSPRQLMAYLGMVPSEYSSSEKVRRGSITKAGNAHVRRVLVEAAHQYRHSPSVGRILRKRREGKPASIIAIADKAQLRLHRRYRRLLFRGKPYGTMIVAVARELVGFLWAALQENAAIKRQAA

SEQ ID NO: 280955 - protein, 391 aa, unidentified
MIFVGIDVAKDKHDCFILNSEGTVLADVFTIANNRIGFETLLSRIQSCSQGESKIKVGLEATGHYSYNLLGFLLDSGLATYVINPLHTNLYRKSLSLRKTKTDRIDARTIAMMLMSDVDLKSYSNTAYHNEELKSLTRYRFDKVKERAKLKSSVARLVNILFPELEKLVSSLHIAVVYALLSNYPGASYIANANTEELAETLCTASKGRYTKSKTAEIQVAAGVSIGSKMPAKSMELKHTIALIRELDKEISEVESAIDKITSQMDSPIFTIPGIGRHMGAMILAEVGDFSNFASADKLLAYAGLSPSTYQSGQLQNCYAHMEKRGSRYLRYALFNAAKYVCLWCPTFSAYLEKKRSEGKHYNVAISHAAKKLVRLIFAIQRSGKAFLADY

SEQ ID NO: 280956 - protein, 372 aa, unidentified
MSRSFGSERLFPMKKTAQHLIAEVPCRRSRVETTIGIDLGDVWSHYCTINQDGEVVGRGRFRTSPKAVEKWFTDLPPARVAMEAGTHSIWISEQLQELGHEVIVANVRELRAISHSDRKSDQVDAEKLARYARLDPEILRPIAHRTVEQQEALTLIRARDLLVRLRTAAVNAVRGLTKSCGYRMPSSSTRCFAKRSLAVMPPGLTQALGPVLVQIAEMTAKIKQYDRQIQQVGQTEYPETQALLKVQGVGHITALTYVLTLGSKERFQQSRDVGCYLGLRPRRCQSGDRDPQLGITKAGNVYLRSLLIECANHILRPHGRDSSLRQWGLHLASRGGKQARNKAVVAVARKLAVLLHRIWTTQELYKPFYAAA

SEQ ID NO: 280957 - protein, 418 aa, unidentified
MSRDENTRDTRRYVALDIHKHYCVVAGVDREGRVLLQPVRVEHADLEEWLKKKLLSSDQVVIESTTNAWHVYDLLAPLAERVVVANPIKVKQIATARVKTDVRDTLILARLLAANLVPDVWVPPMHVRQMRQLLSQRRQLVETHTQILNRMHSVAHRHHLKHERGKRFNEKTIGWQKDERLSKMEQFQLSLEMENKVYIEKQIERISKEVRKLCHQKPWADDMTYLMQLPGSGVITAMTVLAAIGEIERFETSKHLASYSGLTPGLEQSGTKKRGKGITKEGRRELRWALVEAAQMAVKSDPLLKMKFQTLQKRMHRNQAIVAIARHLLELVWYVLTRHQPYRHFSHERIAYKYLTWAWQMDDEARDGLTRQQFTRYYLMRLGIGHDLTRIALDPKHPRRLASEAEVLAIHPELTQVE

SEQ ID NO: 280958 - protein, 343 aa, unidentified
MQTITTIGLDIAKSVFQVHGVDAAGEVVIRRQLKRRSVLAFFQKLPPCLVGIEACASSHYWSRELQALGHTVRLMPPAYVKPYVKRQKNDAADAEAICEAVTRANMRFVPTKTPEQQSCLMLHRTRHLFIRQQTAVINSIRAHLAEFGIVAPVGRRGVTELLHVVADPSDKRVPEVARACLAALGTQLLRLKQQIVKFDRMIMAWHRSNQTSKRLHYIPGVGPMLATALVASVADPRTFRSGRNFSAWIGLVPKQHSSGGKERLGSISKQGDRYLRSLFVAGALAVIRYAKIHGTGHRPWLTALLGRRPTKVAAIALANKIARMAWAMMAKGERYKQPAALAR

SEQ ID NO: 280959 - protein, 344 aa, unidentified
MTVYIGVDFHAQQQTISYLTTEGREIERLQLDHGKPDEVRRFYGQFAGQRVVVGFESSGRAAWFEELLEELGCEIWIGHATAIRLFARRRQKNDRRDADLILDLLVRGDFPRIHRYSAESRAVLQQLRYRQRLVKLRTMVTNSLVFMASSRGVVLRQLKSKRGLARLQQLVLPEALREQRDELCQFLLELKPKIDKVESSLAAKAESDIRVQRLRTQYGIGPLTGLCLAHTLESPERFANPRKVTAYVGFDPVEDSSGERRRIGSISKQGSRLLRFLLVEAGQMAVRRDAELARVYKRILVRRGHAKAKVAVGRRLLVRAFIMLRDEIDYAEFQRRGVAARSSR

SEQ ID NO: 280960 - protein, 416 aa, unidentified
MSFALPEALFFTGIDWAAETHAVCVMSAAGKIAAGFTIGHSADGIATLTRRLAKYGDPGEVPAAIERPDGRLVDLLLEAGHPVVPVKPDAIRTWRDGEVLPGAKSDAGDAAVIAGYLRLRARKLKAAAPYSDQTKALRTVVRTRGDLVEMRVAATGQLSALLDAHWPGAKAIFADVESPVSLEFLTRYPTPAAAAHLGEKRMAAFCVKHGYCGRRTAVELLTRLRSAPAGATGEALTEALRDAVLAAVSVLTALNASVKSLDRSIAAHLGEHPDSVIFTSLPRSGQVNAAQVLAEWGDARQAYEHPDSVAALAGVTPVTRESGKHRAVHFRWASGKRFRVAITTFADSSRHASPWAAEIYNHARASGKDHPHAVRILARAWIRVIWRCWLDGVPYDPALHGAAATLTKQTAEQIAA

SEQ ID NO: 280961 - protein, 425 aa, unidentified
MHTKQYSKQQEKRKRIGNQTLVIGMDIGSEFNAACFMDKEGNVLGRYPTIYNSRKGFDYFQTMVMKTTRKHKLTDVLIGMEPTGHYWRKIAFFAKEQGYEVRFVRTTAVKHQRGLDESSPAKSDSKDAFTIANIVREGKYIDTVIEESVFRQLRTLAHARERILRYIVGSTHGLQAHLNDYFPELRKLFWSMKAKGLWSLLETYPFPEDVRSAGVAAVVTLLAKGRGKKRHIREQAEQVVKAAAESAGLTAIGRADRARLAMYLDEIKRSDARRQLLEREMKELLKEIPCAQYILSLPGMGKVGCAVFLGELGNPEYFNNPRQIIKYAGYDPKENDSGLRVGRKIISKKGRWLLRKCLFFMVLRLVQRSSFFKTYYEHKKKGFDRPLEKTEALCAVILKLIRVLFALIRDRRMFTEELPRCEKAA

SEQ ID NO: 280962 - protein, 492 aa, unidentified
MSIRLKFFILLLSRKAASKKVCSPEPEVSFKPPAVCQATGSPFCSTGSQRPVPGWILIREGVDAPVSWVLPSRLTQNSSRKEGETVNPLFVGIDVGSRNNAVYIMLPDGSKHSSFSVQNNLGGAQTLSKRVVAALTEKNLPAAVIGMEATSVYGNNLLYFLREDGALGRFERKLHVLNPKQVKKFKDAYSDLPKNDLIDAFVIADNLRFGRITAPVYMDDYRYKALQNLTRARFFAVQNLTREKQRFMNYLFMKCSGLTQEKIFSDNFGATALALFEEFETPDDMANMDIDQLASFIAHKGKNRSPRPLEIAKALQAAARGSYRLPKTVTDSVNQVLALSISSMRAMQSQIKALDKEIQRQFDNIPNTLTSVPGIGPVFSAGIIAEIGDINRFNGQAALAKFAGLAWSQHQSGMFEAHNTRLIRSGNRFLKYYLCEAAHSLVRCDTEYKRYYDLKFKEVNKYQHKRALALTARKLVRLVFRLLKDNRLYKPA

SEQ ID NO: 280963 - protein, 480 aa, unidentified
MNVKARRTKKQVNVENQAIKLLSKEELGRKIKVIKKELRSYTWRDLETNGKFAKNDKLSFITDDMLIVGCDIGSENHYIRAIDVRGRELSRGAFEFSNTSEGFENAKAWVLALAAKHDKKQIVLGLEPTGHYWFALATWMISNGISVVQVNPYAVKQSKEIEDNSQLKDDRKDPKLIANLVKDGNYGMPYLPEKVYAGMRRLSMFRDQLTEDRIRNINRLHRELKIYFPEYMDAFGKIDGAFTLEVLKVSAIPADITALGVEGMKNIWHNAKLRGRGYSRANEIVSYAEKSVGLTDGTDAGREAVKWYAEQILKLDEQLAVIESTLHEKCMEIPYAEKILEIKGVGENILAGILAEMGDISRFDDVKEIQKLSGMGLVACSSGKHKGQTKISHRGRKRLRYWLFQAAKSAVSHADEFKQLHEYYTTRTNNSLKKMQSLVVIACKILRVIYTILKTGTTYDPQKLLKDIKHPAASQASMAA

SEQ ID NO: 280964 - protein, 358 aa, unidentified
MKAQVKKIDFTSQNIYVGFDAHLKSWKVTIMAEDFVYKTFTQPPKPDILHKYLIEHFPGGTYHSAYEAGFCGYWIHYALTSFGIKSIVVNPADIPTTDKERVNKEDKRDSRKIARSLSSGNLVPIYIPSLKNQRDRSLLRTRAMLVKDSTRYKNRIKSFLFFYGICIDDAFRDSKSHWSNRFMKWLESLDMKDESGKESLSVLISECKNLRASILNVTKQVRQLSQTETYRDKVALLKSVPGIGILTAMIILTELETINRFNNLDKMCGYIGLVPSTKSSGDKEKTGDMTPRGHSVLRTAIIESSWIAKSNDPSLMKSYISYCKRMDQNKAIIKIAKKLLSRIRYVLTNNKPYIYSIV

SEQ ID NO: 280965 - protein, 334 aa, unidentified
MSKQTEAGIDVSKDGLDVAVRRDGARMETARFANEATGHRKRVSWLTKRGHTARVVLEATGTYSLDVALALHRTRGIEVMVANPRAIKQFTGALRQRSKTDLTAAVALREYATRMPFVLWVPPTAPVLELRAMARRIAALVVERTRERNRLHALTATAEHLAVVANDIAVNIRHLERRIEMLTAQAVARIAAHAGLQRAFTQVTSVPGIAAHSAVQLLPELLVLPNDMTVRQWVAHAGLDPRACQSGTSVAKPARISKVGNAHIRRALYMPALVAVQHEPRVTAFFDHLVARGKKPLQAYVAVMRKLLHAIYGMLTTNTDFVAEKFYAVASELH

SEQ ID NO: 280966 - protein, 339 aa, unidentified
MESFVGVDLHKKVSQLAALREPKPASQLRFPNNTVTVEKVLKKLPQGSKIALEATGSWWWFVELAQKTGHEVVMSHPKQTKAIASARLKSDKVDALMLAKLLKADLLPTVWIPPATQRYVRELLTHRARLVRQRTAVINEIHALYAKRNIDPGMIFHRVRPPAFMAKELSGYGSRIVEEDAELLAFFNRQLRGLDNELQKIAEEDVESKQLMTIPGVGPLSAVAVNCWIGTIERFSKAKKLSSYFGLAPRVRQSGDRERHGHITKEGNRMVRSLLIQAALWHIRLGKGASRKHYLGVLKRRGKQIARVAAANKLLGIMFHMMKGRIDYQEFLRRGSSAQ

SEQ ID NO: 280967 - protein, 365 aa, unidentified
MSQETPKGTPQKPPTECLKYSIGTDISKDKFDACISTIDASQQVKVLATCSFKNNPAGYEAFISWQTRKCNLGLPSVFTMEATGIYYEKLAWFIHRQGLYVSVVLPNKAKKYMQCLGLKSKNDKIDAAGLARMGAEQKLFEWKPPRESVMRLRDITRQRESLQESRTVFNNQLQAYACGEFVSDAIVKNLKEVIALLQRQIKETEKMIREIIDSDQEMKERVDGILRIKGVSTITIATIIAETNCFEEFTNRRQLVSYTGYDVVENQSGKHVGKTKISKKGNAHIRRILHMPAFNVVAYGEPEFVNLYERVYARTKIKMKGYVAVQRELLCLIYALWKKNEAYSRSYRSEHPAMQSRDSSFRIAS

SEQ ID NO: 280968 - protein, 345 aa, unidentified
MPIVGGLDIHRKQITFDYLDTGTGQVRRGQITPADRVHLRAWLARFAGRDDVAFAVEACTGWRYIAEELAAAGVAVHLAEPADTAFARGRKRHAKTDKTDSRHLRMLLAEGRLPECWIPPGHILEARALLELYHDLRAGHTAWVQRIHAVLFHHGAPALGEGTLRTERGLAALQAAAAAHLSPAGQLQVATALEVIEALETRMHAVRHQLLAAARHLTGAKVLAARLYGVGPITALAMTCWLAGAGRFSSSRKAVRFAGLDITVRSPDRKGPPGRLSRQGPPVLRWAVYEAGKTHARAPAPDHGYYATVKDREGGKRAALSEARKILRQACHILTELGDDALSAA

SEQ ID NO: 280969 - protein, 369 aa, unidentified
MQRKEISFKGQKVFIGIDVHKDSWRVAIAPEVGVVKGHSQKPSARELLDFLKKYYPDGEYHAVYESGFSGFSTYYALQDVGIDCIVIHAADVPTTQYEETMKTDKVDAAKLVRSLKSGLLTGIYIHKRDDIDARSVVRLRKTIQKQLGSYKSRVKHLLHSNGVTFPERFSTPGSHWSKVFIRWLKEEVVLLSATRTSLDLLIVQVEAIRKTLLMATRNVRELSRSERYRHGCELLTSIPGVGVNVAMTLLTEIGDINRFHNEKEFASYLGLVPTSHSSGGKVAHGEKTFRGNKYLGPQIVEASWVSIYSDRGLGCAYFNYKKRMKPQEAIVRVARKLSNIIFSVLKTGKKYKPYEWNEKQKHTDLQATS

SEQ ID NO: 280970 - protein, 338 aa, unidentified
MTIIRIGLDTSKHVFQLHGVDENEQPVLRRQIRRSEVAKFFAKLAPTRIGMEACGASHHWARMLRGLGHEVVLLPPQYIKPYVQRGKNDKIDAEAICEAMSRPKVQTRLVPIKTVEQQAALTMLGVRDLLVKQRTMLINAIRGHAAEFGVTVAKGPKQITELLQRLATDEGVPELAREMINVLAGQLVPLDAKLKAIEARLMAWHRHNQTSQLLATIPGIGPIGGVSFALKIPDAKAFRSGRHFAAWLGITPRENSTAGRQQLGRISKQGDEDLRRLLVLGATAVIQQAKPGRASPWLLGLLGRKSKKVAALALANKMARIIWAMMISGETYRRPKAA

SEQ ID NO: 280971 - protein, 354 aa, unidentified
MTNSIHETPAVTVGIDVSDHLTSFCVLDRQGEILEEGRVRTSPEGFTRRFPGIEPCRMVMEVGTHSRWASKVLADLGHEVIVANPRKVRLIANSIKKTDRSDAETLARLGRVDPKLLSPVVHRGDEAQADLAIIHARESLIASRRLLINHVRGAVKSFGFRVPTCDADLFHKKAPASMPRELRPALEPLVTVIAQLTNEIHQADARIEGLCADRYPEIKLIRQVQGVGPLISLAYILTIDNPFRFKASRTVGPYLGLVPRQRDSGQRSPQLKISKAGDKYLRKLLVNGAPYILGFRGPDTNLRRWGLAHAVGGKAAQEEGCRRSSQETYRSPASTVGNGRSLSPSEARGGGSLA

SEQ ID NO: 280972 - protein, 340 aa, unidentified
MNSTQVAVDLAKSVFEVAVSRRPGKVDESHRLSRSRFQRFFAEREPLEVLMEACGTAHHWGRTLEAMGHRVTLLPPGDVSRYRDGNKTDRADAKALLEAARNDAIDAVPVKSLDQQAIAALHRVRSGYQQTRTARINAVRGHLREFGIVIPTGASRVVPLARAALEEGAVPAYLRDVLEEVLDEIETLSEKAKAVQRRLERLSEQMPEAQALMTIPGIGVLTATALVSFVGDVRRFRSGRQLSAYLGLTPREFSSGSSRRLGRITKRGNSYVRMLLIHGARSALRAGKLSDEPDDLRAWALDIERRKGFNVAAVALANKLARVAWRVWRDQRPFERRLPA

SEQ ID NO: 280973 - protein, 482 aa, unidentified
MVVPNEEPKKPTKPKKPAKPKKPAKPRKSRESSLPVPVPASAAGLHVINPDAAGIDIHSDMHMVCVPADRDANPVRQFGANTADLQEIVAWLKKCRIKTVALESTGVYWIPLFELLESEGFEVYLVEPGQLSRCGARPKTDVLDAQWIQRLHSYGLLRASFRPPDSVLALRAYWRQRQMQVRYAASHVQHMQKAVEQMNVKLPEVVSDITGVTGMSIIGAILGGERDPVKLAQLRDERCQHSEEQIALALQGTWRPEHLFELRQAYELYQFHHRQITECDQQIEAELANFPNRAGEKTHTVKPRKRGRKSNDVGFEATGPLFQALGVDLTLIEGIDVGTALVILAEIGVDVSRFPTEKHFASWLRLCPPQDESNKTNRRRGHRKATNRVTIALRMCAQSLGRTMTPLGLFYRRIRSRIGGLGAAKATAHKLACLVYRMLKYGQEYVTQSMEEYEAKVKANILKSLKRKAAALGFELSPLPTQ

SEQ ID NO: 280974 - protein, 341 aa, unidentified
MKPELSVVGIDLAKSIFHLVGMDERGTIILRKRLTRGEVMPFMAQLPRVLVGMEACGGAHYWARQLRAQGHEVKLMAPQYVKPYVKTNKNDLRDAEAIAEAVTRPNMRFVPIKNVAQQDLQALHRVRERLMGARTALVNEMRGLLAEYGIVLPTGVNAFRHALVEKLEVEHAKLTPLSQELFGKLCAEFKKLEIEVAYYDEKLQALATTHPESQRLLTIPGIGPITATALLAAVGDVGSFTNGRQFAAWLGLVPKQHSTGGQTRLLGISKRGDSYLRKLLIHGARATLRWARTKTDRRSQWIRGLLERRGWNRTAVAVANKNARIVWALLYRGGVYGESTH

SEQ ID NO: 280975 - protein, 362 aa, unidentified
MIIIGADYHPGFQQIAFVDTDTGELQERRLEHREEAETFYRGLAQPGRTVRVGMEASGHARWFERLLAELQFELWIGDAAEIRTKRVRKQKTDRQDAQLILQLLLEERFPRVWVPSGENRDLRQLLWHRHRMVQARTRIMNQLQAVALNEGLRCKKRLWRDSGRKQLESFLLAPWASRRRHDLLELLDRLSPTIAELTQAIEQEVEKCPEAQRLRTHPGVGALTALAFVLIIGRTDRFRCGKQIACYLGLVPVEESSGERRRLGHITKRGNSLLRFLLVEAAQVTVRSDQEWRSKFFHLALRRGRKIAKVAMARKLAVRLYWMWRKGWDYEQLKKFGSHAGPKRRRIAWPRAISESTAVVIR

SEQ ID NO: 280976 - protein, 352 aa, unidentified
MTKNIILCVDYHDQNCVIRSFDQATGREQLQTVPTCAERLLAVVGQAQRLAQPRGARVVWIQESTTGWARVQALLGRQVVFQLANVLQLPLPPKARRRKTDKLDTARLQREYRDGTLPLAHQPPPWWRQVRRLVGLRENLVSRRTALRNWLNRYLAHETWVDRDGLWCQRGRRRLQQLAEQAPRWDRLVWETKLAELDQLQQHLAQLEAALQGVYQQWPRARRLDQIAGIGVIAAVSIAARIGAIGRFARAEQLIAYAGLAPGVQQSDQTRREGRIGGGGTDRHLRHYLIEATVWARHIPRYRPAYERTSRRRGPKIGRLTVARLLLRSIWRMLRRGEEFQPVAATQAKENP

SEQ ID NO: 280977 - protein, 343 aa, unidentified
MQSISAIGLDIAKSVFQVHGVDATGQVVVRRQLRRRNVVAFFQKLPPCLVGIEACASSHHWSRELQALGHTVRLMPPAYVKPYVKRQKNDATDAEAICEAVTRPNMRFVPTKTVEQQSCLMLHRARHLFIRQQTAVINSIRAYFAEFGIVAPVGRRGVEQLLELVADKAEDRVPEVARMCLAALGSQLRALKAQILEFDRRIIAWHRSNATSKRLDAIPGVGPALATALVASIADPKAFRSGRDFSAWVGLVPKQSSSGGKDRLGSISKQGDRYLRSLFTAGALAVIRYAKIHGTDHRPWLTRLLARRPTKVAAIALANKLARMAWAMMARNERYQEPTALAA

SEQ ID NO: 280978 - protein, 397 aa, unidentified
MYIVGIDIAKRKHEAAVIDGEGTVIIKPFSFTNNCSGYNRLLAMLAKAKLPLDEVSFAMEATGHYWLALFTRLQKEGFRVQVINPVQTNSIRSFYIRQAKTDPRDALLIAEVIRFGHFSESTLHPENIYELRELCRGRHAIVSMQADVKRKVVALLDQVFPEYETAFTNMFSDTSMAILQTCPTPKELSEIPLEELCHLIEVSSHKRFRMAKARELQELARNSFGFAMAGDVFSTMIRLYAKHLDFLKQQVREMDRKIAEIMDTLDTPITTITGIGPTLGAYILSEIGDINRFSSSAKLAAYAGIDPTMRQSGEYNGVRNRMSKRGSPYLRHAIWLAASSAVLHDPALKLYFQKKRDEGKPYMASVGHACRKMVSIIYAVMRDNKAYTPYIPNEISA

SEQ ID NO: 280979 - protein, 384 aa, unidentified
MQAILYCCCGIDVHSEMIEACILNGIDPPKKVREQFPNSPAGLRQFTEWLDKNDCYNVAMESTGVYWKPIYEAIENREYNESIYVVNAHHMRNVPGRKTDKKDAEWIATLFQHGLLQPSFVPPRVFRDLREVARTYQKCIGEKSRYVNRTEKLLQAHGFKLSSVLSDIFSKTGIHILHVLAENGRITEEEISLCIAGTVKHTPAEIHAAISGTMNPYERRLLNFLLGKYERAIEDLNALLDLMREIAEPYKSALAQIDSVPGFDEVAALLLLAEISDKPHESFASPEQLCAWAGLTPRNDESAGKVKSSKILKGNIYLKPILCQSAHAARKGSKSPYRDWYWSHVKRLGDGKTIIAIARKLLAAVFALLRDGTYFRPYTAVLQT

SEQ ID NO: 280980 - protein, 354 aa, unidentified
MSQTPNTAIAVIGIDIGKNSFHVVGHDARGAIVLRQKWSRGQVEARLANVPPCLIGMEACVGAHNLSRNLASLGHDARLMPAKYVRPYSKGQKNDFNDAEAIAEAVQRPTMKFVATKTAEQLDLQALHRVRERLVSQRTGITNQIRAFMLERGIAVRQGIGFLRMELPTILATRTDALSPRMLRVIEELAGDWRWLDQRIDGLSGEIEALARLDQACLRLMTVPGIGPIISSAMVAAIGTGDVFSKGRDFGAWLGLVPKQISTGDRTILGKISRRGNRYLRVLFVQAARVVLARIKHLERYGLKSWIEAAKKRLHPNVLAIALANKLARIAWAVLAKGRAFELTRTDDAGVRPA

SEQ ID NO: 280981 - protein, 343 aa, unidentified
MPQWIGCDAHKKFSVFVAVDERGKAGHAVRVEHQREVFRTYLESLPAQSEIAIESMGSWYWLVDEMERAQHVPHLTNPLEAKKRMGKPNKTDRLDARGLGILLRNGTLPECWIPPGELRDQRELLRTRMALRDMRSKLKLRIHAALDRYGLQAEGISDLFGKTGRTYLAEAAAELPTETRRMVVTQMEAIDELTEKIDAVEKRIQEQIAPSAEVKLLLTMPGVGAILAPVIWLEIGDVNRFPRAEQLASYAGLVPRVISSGERMRLGSVSRSVNQYLKWAFVEAATCAVKLEAYRSEHIGRLYRRLLQNAVMGGLSWPWRGIWPKPVTGFCGSSKRIALRKEN

SEQ ID NO: 280982 - protein, 330 aa, unidentified
MYLGIDTHSRYSQVAVVDDDGNLQDEIRLPNDRLSDLAEQYAGGEAAIEASGHYRPVYEMLDEHLDVTLVNPSKNRLIAEATVKTDRIDAKRLAHMLRADMLAESYVPSDEIRTLRDLVRTRKSLVEERTAEKNRVRAVLKRTDNAYESELFGPTGREFLAELSLSEADRAIVEAHLSVIAEYDEQIERLETKIEEKVFESPAAAGLLSIPGVGQSTAALIVAEVGEIDRFDRHEELVSYAGLDPQVHQSGDKEIHGSISKEGSGALRWALVQCAHISVRHYDYLGIFYRRLKRRKNKQIAIVATARKLLVSIFYMLKRQEPYNPPEVSA

SEQ ID NO: 280983 - protein, 345 aa, unidentified
MYAIGDVVSTKSCVCGIDVSAKTLAVALTVGGVTEDLEFSNCEVGHRALVSRLTKRRRRARVVLEATGIYSLDISLALHRAARVEVMVVNPRAARAFAIASSRRGKTDVIDARMLSEYATRMQFDEWVPPSPQVLKLRTITRHIQGLSQERVRTKNRLHAARSTSTTPAAVVEDLEAQLVALKARVELLTLSAKEIAVADPVLARRYDLLVSITGIAEATALRLLGELAVLPSDMTARQWVAHAGLDPRPHRSGTSVNRADRISKAGNRYLRTTLFIPARTAAVHEPVVGAFKQELLDRGKKPLQANVAIMRKLLHAIWGMWRTDTTWDPARFRPVRRELAAEST

SEQ ID NO: 280984 - protein, 367 aa, unidentified
MKKISTVAGKQSNNFGEQKLTIGLDLGDRSSWYCVLDEAGEVLLEQRLSTTPKAMKEVFGKMPRSRIALETGMHSPWVSRGLSELGHEVIVAHARNVRLIGESRRKDDRFDARTLARLARIDPQLLAPVQHRSAQAQSHLMVIRARAGLVRARTSLINTARGLTKSYGERLRGCSARNLNVEKARQLSPELQAALEPLLAAIESLSQRIYVYNQQIGKIAKKSYPQVARLEQVKGVGTLIALTYMLTLEDAQRFRKSRDVGCYVGLQPGRRNSGQSEPQLHISKEGDPYLRTLLVQGAHHILGPFGADSDLRRWGLKLAERGGKNGKKRAVIATARKLAVLLHRLWVSGEAYEPLRNSRREMLPAAA

SEQ ID NO: 280985 - protein, 370 aa, unidentified
MPNDEAALTEVFTRLAAHGRTLVVVDQPASIGALAVAVARSLGIEVAYLPGLAMRRIADLHPGQSKTDARDAHVIADAARTMPHTLRRVSTDDETLAELSVLAGYDDDLAAQSTRLTNRLRDALLHVHPALERLLGPRMDRGGVLDLLAAAPTPQALRDLGEAGIAATMRPRSPRLATTLPAMILAALDTQTVVVPGTAAFGRVIAGVAAQLREVRVERDSLAAELEDLLEAHPLAGVLTSMPGLGFRTALKILTIVGDGAAFPTAGHLAAYAGLAPVTRRSGSSIKGETRSQRGNHALKSALFLSAFASLADPVSRAYYDRKRAAGKRHNAALICLARRRTDVIYAMLRDRRPYAPPSVPTLPPVAAAA

SEQ ID NO: 280986 - protein, 449 aa, unidentified
MEQSLKGISLDCIELNAAGIDVGATEVYVAVPPGRDREPVRRFKTFTEDLRQMAAWLVQCGVTTVAMESTGVYWIPPHEILEEAGIRVCLVNSKHVKHVPGRKSDVSDCQWLQYLHSVGLLKASFRPDSQICAIRSLSRHRAGLVESAAVHVQHMQKALTQMNLQIHHVLSDITGLSGMAIVAAIVDGERDPVRLAALCQRGVRSDQQTVIKSLVGNYRPEHLFTLKQSLIAYRHYQQLMAECDREIEQLMQRLDSRIDPQQNGPTPPANKGKRKRRKNQFYFEMAPELHRIFGVDLTAIPGISALTAHTLLAEIGPELNRFPNAAAFASWLALCPANNKSGGKVISSKTRQTNSRASRALRLAAQTLARCRSHLGNFYRRMRARLGAPQAITAAAHKLARIIYHLLSTGQTYDETIFLNEDRKQAQRHEKRLRKQANALGFQLIPIAA

SEQ ID NO: 280987 - protein, 319 aa, unidentified
MSQKINSVAVRTIGIDTGKNTFHLIGLDEQGTIVLREKLARGRMARRLANASPCLIGIEAGMATHYVARELLALGHDVRQIPPAYAKPFRQGHKNDFRDAYAIAEAVLRPSTRCVPVKTDDQLDLQALHRVRSRLVGQRTAVINQIRSFLLERGIAVRQGPRFLRQRLPEILAKRIDVLSPRMIAIIEDLSGDWRRLDERVERVTEEIEQLAHRSEIGRQLMTVPGIGPLIASAMVAAIANGAAFAKGRDFAAWLGLVPKQMSTGDRTILGHISKRGNRYLRTLFMQGARVILLRPANWARLSFGPWLTAAATEAALEL

SEQ ID NO: 280988 - protein, 555 aa, unidentified
MAYFMASLAPETCLEHPTFATLIRDPIRQAVAETFIGAVCPRVSMAPVLAITGMVAGTANRASFDPVGEISKPFVTGPNPSRVQEEEDRMRKDKRVKGNRRERKELARRLKSEDPGLEVVHPDAAGIDVGNEAHYVAVRGDRDPEPVRRFECFTADLYRMADWLRSCGVKTIAMQSTGVYWIPVYDILEEFGFQVFLVNARHTKNLPGRKSDVQESQWLLKLHTYGLLNNSFQPPSDIRVLRTYWRQRAEHAVGMATSIQRMQKALTQMNIQLANVISDLSGRTGQAIVRAILAGERDAKKLAKLTDCRIRATRDEVAKSLEGNWRPELLFVLQQQVEMYDIYQRRIAECDQKLQQHLSTFENSALPLTKERLSQTNKNKSRQRYMPQFSLSDELVRITGVDLTKIDGINVMIAQTLISEIGLDMSRWKTEAHFASWLGLCPDNRISGDKVLSRGTRRVVNRAATALRIAANTLLKSRSYLGAQYRRLRTKLGAPKAITAMAHRLARLVYRMLKYGDQYIDRGAEYYEQKNRQQQIDFIRKRAAQLGLVVTGACV

SEQ ID NO: 280989 - protein, 405 aa, unidentified
MKELLVGVDWSQSHYDIAIVAPNGALLTQFRIAKTAPEFSLLAEKIEQFGVPAAHCHIGLETAHNILIDFLWSRQYAAFVIAPSIVKSSRGRFGNSGAYTDAKDAHLIADLLRTDRERFTPWRPDSELLMRLKTKLGHVDYLTKLITGQTNHLRSILLRVYPQVLQAFNDLHVSIGLHLLVVCPTADALATLSYPEFAAFCRSQHCHRLDWISTWYSRLQQPQPPVQSTLAAAYQDEIVFMAQQLISLIGEKKHALQQVQALYQQHPDRPIFASLPGTGDLLQPKLLVMFGEDRARFPSPQDLRALAGTCPVTKQSGKRRGIQFRRACNHSFRETAQQLAVASVQQVDWAAAYFTAALARGLRKNHAYRCLANRWLGIIWKLWQTHQLYDEAYHLQQIHQQRRPT

SEQ ID NO: 280990 - protein, 355 aa, unidentified
MTGEKYIGLDVHQATISVAVMDPMGKVVMESILETKAATILEFFAGLRGTLSVTFEEGTWAAWLYDLLKPHVAKLVVCNPRKNALLKHGNKSDKIDARKLANLLRLNDLEPVYHGETGVRMLRELARSYLTIVKDLSRVMNRLKALYRSWAIPCAGRDVYYTRHRSEWLGKIPEAGTRRRAEQLYQQLDMLQHLRQQARRELLAESRKHAITAKLRQIPSLGPIRSALAVALIQTPHRFRTKRQLWAYSGLGLETRDSGEYHYVQGQVRRRKKQVSIRGLNKDHNHDLKGLFKGAATRASVQPGPFQDFYQRSLAKGIKPTMARLTLARKIAAITLTLWKKGENFDAEKLKSQAA

SEQ ID NO: 280991 - protein, 346 aa, unidentified
MKILALDLGKYKTVGCAYESESGTHQFQRSFTTPADLARMVQEVKPDRVVIEICSIAGWVCDLMGQLGIAVQVANTSDDAWRWRKVKQKDDRRDALKIARLSAVNQLREVYIPQTEVRQWRALITYRQHLVGRRTKIKNHIRDLLVREGQILPRGSRCWNQLGQEQLNSMARPLAEVEVGELWRGELWEELQQLAVIQARVASVEEKLNAIGGADARVRLLRTIPGVGPRLSEAIVALLDQPQRFRKASQISGYIGMVPKSFDSGESERRGRITRQGNRLVRSLLIEVAWVGLRHNSWLRQTYQRLSGGKKARKKIAIVAVGRKLLVRCWAMLRDNRAWSWQPQIT

SEQ ID NO: 280992 - protein, 367 aa, unidentified
MKKVSTAATKQSRNISRQRLTIGLDLGDRNSGYCVLDEAGTIQLEQRVRTNEKALREVFGAMPRSRIALEIGTHSPWISRLLSDLGHEVIVANARKVRLIGESRKKDDRLDAQTLARLARIDPELLYPVKHRSQQAQADLMMIRARAGLVRARTGLVNTARGLAKSYGERLRGCNVRNMDPEKAEGLSPELQRALEPLLATIEELSERIVEYNERIEALAQTSYPQVELLKQIKGVGTLIALTFLLTLEDPHRFGKSRDVGGYLGLQPGRRKSGESEPQLHISKEGDPYLRTLLVQGAQHILGPFGIDCDLRRWGLKLAERGGRNGKKRAIVATARKLAVLLHHLWVSGEVYEPLHNSSRLTVAAAA

SEQ ID NO: 280993 - protein, 391 aa, unidentified
MIYVGIDVAKDKHDCFITNSDGEVLFKAFTISNNLDGFNELYQKIESVMEDTTKVKVGLEATGHYSYNLLGYLINKGLPTYVINPLHTNLYRKSLSLRQTKTDKVDARTIASMLMSDVNLKSYSDTSYHNEELKSLTRYRFDKVKERAKLKTSVSRLVCILFPELEKLVPTLHIASVYAMLSEFPGAKQVANAHLTRFTNLLSEASKGRYGKETAIAFRDAARTSIGSNMPAKSLELKHTIKLIQELTSEIDEIEHEIKLIMDELNSPILSIPGINYRMGAMIIAEIGDFTRFDSPDKILAYAGFSPSTYQSGQLDGAYSHIEKRGSRYLRYALYNAAKYVCIWDPTFAEYLAKKRSEGKHYTVAISHAVKKLVRVIYHLEKTNQQYIKAA

SEQ ID NO: 280994 - protein, 408 aa, unidentified
MEVLYPRCAGLDVHKDSVVARIRCVSEPLHEEVKTFATTTSALLQLNEWLSAHAVTHVAMEATGVYWKPVWHLLEGDFELILANAQHIRNVPGRKTDVSDAGWIADLLAHGLIRSSFVPPAPIQELRDLTRTRKQLVREISQHSSRIQKVLEDANLKLGSVLANVLGKTGQAILQALIDGESDPEKLADLAQGHARKKRTELVQALHGRIRDHHRALLRVHLDLVTALQHGLAELDARVGKALASIRESARLLSTMHGISDVTAHVIVAEIGVDMTRFASVAHLRSWAGFCPRNDESAGKRRSTRVRKGAPWLKTTLVTAAWAAVRVKDSYLQAQFHRLRARRGAKKAILAVAASMLTAAYYMLKNGVEYKDLGAAHFARRDRGKMIQRLVRRINDLGCDVQLTPLAA

SEQ ID NO: 280995 - protein, 353 aa, unidentified
MKRDQYMGMDVHQATTVVVVLDANGKVILETMVATEAAAIIRLVQGLSGPLHVTFEETTQAGWLYEVIRAFVAEVIVCDPRRNSLLGEGSKADKADARKLAELLRAGLLRPVYHGHEATRKLKEFVRAYETLSEDTVRTMVRIKAVYRGRGVQTPGRGVYQPQQREQWLEKLTGPGARQRMEWLYEELDQLRLLRRRAKQAMLAESRTHRAVSLLRTIPQLGAIRCALIVATVDTPHRFRTKHQLWSYSGLAVVTHMSAEYEMKEGRVVRSRKPIATRGLNRNCNRYLKEAFIGAATGGSQREPYRSYLQGLEQKGMRREMARLTLARKIAAIALSIWKKGEAFDPKKLNWTT

SEQ ID NO: 280996 - protein, 332 aa, unidentified
MGDITMLAIDLAKQVFQLHGVDVQGACKLRRQVRRTQLLPLISQLPPCTVAMEACAGAHEWGRRIEQLGHRVRVISPQFVKPFVKGNKTDRNDAEAICEAAQRPGMRFVALKTVEQQQVLALHRVRSGMVKTRTALANQLRGLLAEFGLVAPQGLKRLRRALPEQLEDAENGLPPLLRQELALQAERLRELDTEVERLTACIEQSAKADERANGLMQRRGVGPLIASAFAAEIGDPRAFKNGRQVAAWLGLVPRQHSSGGKPLLLGISKRGDGYLRTLLIHGARAVLRTAPRHSDATSSWALTLKSRRGVHKATVALANKMARQLWAQLAYG

SEQ ID NO: 280997 - protein, 334 aa, unidentified
MRGLYAGSDLHGNNNLVGIVDEQGKRIFKKRLPNEPQLILEALKPYKEEIVGVVVESTYNWYWLVDALMDEGYKVHLANPSAIEQYSGLKHADDKHDAFWLAEMLRLGILPEGYIYPKEERPVRDLLRKRGHLVRLRTSLMISLQNILSRNLGRKMNVNDVKALKEDRVSPLLEMNEDLALAGRVSKEAIDHLTHQIFKIEWVVQKKTALKPEYRYLPSIFGVGKILSLTIMLETGPISRFPTVGDYVSYCRKVPSQWTSNGKRKNGNKYLAWSYSEASEFARRLYPEARAYYQRKMQKTNAPVAHSALAHKLARAAYYVMRDHVPFEPDKLFG

SEQ ID NO: 280998 - protein, 398 aa, unidentified
MKGQDIMIYVGIDVASQKHDCFLLKDTGEVFSKTSFTIKNDFEGYKKLHNSILQFVESTKDSNVRIGLESTGHYSKNILLYLIKQGYQSTLINPILTNMDRKASTVRKTKTDKIDAEAICKFLDKNRFDFKPYTLLSYHIDALKSLTRQRFSLVKQMTQQKLIFQRLVNVIFPELLSHFSNDYGESVLNILYSYPTPKKLAKAHKESITKLLHSRCKITSSEILELAKNSIGQSEEYLGFELKHTIDMILFYQSQIEIYNKQIEIELNETEYGKIITSIPGVGIITGAMIISEIGDINNFTTSDQLLAYAGLDPSVYESGKFESSHNKPSKRGSKYLRWAIHQASSVIWQHDNTFKDYYLKKIKESKHHYVAIGHIDKKLIRVIFSLLKNKSMFIPQK

SEQ ID NO: 280999 - protein, 430 aa, unidentified
MTKLSFTPADAVLVAIDMSKHRQEVLLERPEGGRRRRMTIMATKADYDRLADDLAAVGRPVIVGFEATGNYHRTLAHRLLSAGFELRLISSVALARTREALHNGWDKNDSKDAQVILHMLRIGATQRYVDPLAAGINDLQEMSKTHEAISKAKTQTWHRILTHYLPLYFPEIERFAGNSRSDWFLALIERFPTPGSITSIGREAFTQQAWPLIGRKISKTRVVNDIYETACASIALPIDEHSTAVTMFRMVITQARTLIQQRNEIERIAHDALTTNRDYQLLRMIPGIGPINALTILAEAGDLRRFSHHRQFLKFCGLDLATCQSGMFRGRTKLSKYGNARLRRTFWMATQVAIRQPNNSFRDKLSRYVTGHADDPDRRRKAMTALTAKMARVVHAVIKTGTEYRPFVERADTRWKDPSLLCREGARATL

SEQ ID NO: 281000 - protein, 312 aa, unidentified
MDAIYVGIDVSKDRLDVAVRPSGESFAVSRDGAGIEALIARLKLLSPKLVAIEATGGFETVVAAGLAGAGLPVVVVNPAQVRAFAQALGKRAKTDPIDAAVIAHFAEATKPQLRQLPDETTRLLGDLVARRRQIVEMIAAESQRARRVTAARLKKSIARLRKALEKELAEIDSDISDHVRGSPAWAEKEDLLASVPGIGPTIARTLIAELPELGLLDRRQIAALVGLAPWTRQSGKWQGKRFIGGGRSSVRRILFMGAMVAARFNPELKLFRDKLVAAGKPKLVAIIAVARKLLTILNAILRDKVKWQPKNA

SEQ ID NO: 281001 - protein, 423 aa, unidentified
MDVLYERVAGLDVHKDTVVACVRIMVDGKTTRECRTFATTTEQLVALRAWLEECRCTHVAMEATGVYWMPVFRLLDADKFALIVANAAHIKNVPGRKTDMNDAMWIADLLACGLIQASFVPNEEVQELRALTRTRKQLVREQTRHVQRIEKTLAEANIKLSSVISDIMGASGRRMIQAMIDGVRQPNKLAELAGKQIKASPKELYDALHGRLTDHHRFLLALHLKQWDSIDETIRKLDGELDQRIGRMATAAEDRTIPFRALIELLTTVPGVSAVAAPAILSEIGPDMSRFPTAGHLVAWAGLCPGHNESAGKRKSSRLRKGAPWLKTMLVQCAWAAKRTKDSYYRAQFFRLQAKRGPQKAICAVAASILTAIYHILKHGTEHHDLGSAHFDRRPVEVKASRLVAHLKKLGFNVQLQPIAEAA

SEQ ID NO: 281002 - protein, 351 aa, unidentified
MEKTESVYKNKNLYIGIDVHKKRWVVTVRSYDLELKTFSMSPIAEELEKFLVNTYPDALSHIVYECCFSGFWIYDYFHQRDYDIIVTPTNRIYRDGSIVKTDKIDSRKLAFQHSRGLLREVKVPKMKIREYRSLFRIYDKEKMREGQILRQIRCILECKNHELKWGKWNKGFIEKLKLVRFQEEIFNRKFETLIKEYEFVKEQIKDSERRIKEIGEDEELKDRIKRIEQINGIGIVSAVRLVVYLFDMKGRFTEGESLVHYVGLIPGEQSSGEEIVRSRTGLIGSRQLRSIIIQLAWVAVRKDGNLLNKFERVYKSSGCKQKAIVAVARKLMMKIHAITEKEEAYEINKAA

SEQ ID NO: 281003 - protein, 359 aa, unidentified
MRFYTKQHKFYCGIDLHAKKMYLCILDEAGQVRLHRNIKTARDVFLEVIEPFREDIVVAVECMFTWYWIADLCKEHSIPFVLGHALYMKAIHGGKAKNDKIDSHKIAVLLRGGMIPMAYTYPAEMRATRDLLRRRNHLMRKRAELYAHIQNTRSQYNLSDFLGRIAKAQNREGVAERFEDPSVQKMIDADLAVIEAYDPIIAKMERDIISMANHHDPVAYALLKSIPGIGKILGLVILYEIETIERFPSVQDFVSYSRLVKCSKESNGKKSGTSGKKIGNAHLKWAFSEAAVLFLKGNEPGKRYLDRLATKHGKGKALSILAHKMGRAVYFMLKNKKPFKSNRGRISHLHNLPYPTYRN

SEQ ID NO: 281004 - protein, 446 aa, unidentified
MELDIINPNCAGIDVGSKSHYVAVGQASEDVKEFGVYADDLVAICLHLLGFGINSVAMESTGNYWQNLYVELERHGIEVTLCNGKFTKNIKGKKTDVQDCQWIQKLHSIGLLTSSFLPDQITEQLRTYCRQRTNMLALAAEASHKMQKYLKLLNFRLDVVVNDICGLTGLAIIADICKGNLDPQKLAELRHGNCRKSEEEIAKALKGNNRVDFLFGLKQEYESYLFYQKQIEGCDKQINSFLKNQINTNPDKKKLQTDDKKHKRINKNTVKGIDLNQASFQYFGGVDLMKIEGLSHSTILTIMSEVGPDGFHKFKTAKEFSSWLRLAPNNKISGGKVLSSKTPKGSNRLKIALRNAANAIGNLKDTHLSDFFRRVAYRKGRTTAVSATARKLAVIIWNMITKKIEYQPPTEYLFVDQKRKLKLVNRIKKQINTFAITNQELGFVTA

SEQ ID NO: 281005 - protein, 348 aa, unidentified
MKITIVGIDLAKNAFRLHGCDEEGRAVLRKQLTRGQLLAFIAQLPACTVAMEACASAHYWAREIEQLGHRVRLINPRFVKPYVKANKNDASDAEAICEAAGRRSMRFVPVKTAAQLEVQALHRVRQQLVKSRTALINQVRGLLAEHGIVISQGRAQLQRALPRILEDADHRLSGIMREILSEIGERLKFIEARLHQYELHIERLFRQDPRCRRLAEVAGVGPLIATALVAAVGNAAEFKNGRELAAYLGLVPRHRATGGRTQMLGISKRGDRYLRSLLIHGARAALWTIARRGDQRSAWAARLKLRRGSNVAAVALAHKNARVLWALLSRGEGYRAAPCSPRMAQAAG

SEQ ID NO: 281006 - protein, 365 aa, unidentified
MNKCHLNTELSSHEGTRCQFNGGTGAIKLGIDVHQDFYVVVMQEGGANPKPPQRFWKQAFLHWVAKLARSGSEVHAVYEACGFGFTLQRQLSALSIRCYVVCPQKLDEQNRRVKTDGLDAKALVLKLDRFVEGNRSALALVRVPTQEEEQKRAIHRQREQLVKVRKQLEAQGRSLMVNHGFEPVKSWWKQRTFAALQLPAWMKELLLANTQPLLLALQEKIGALTVQLQSAADPKQPRGLGLMTSVIIDREIGDWNRFNNRRQIASYTGLCPGEYSSGNTRLQSCVTKHGNPRLRAALVELAWRLVRFQPNYKPIFKWRRLLAKGAFATGAARKKAIVAVARQLAVDLWRVRTGRCKAQALGLFI

SEQ ID NO: 281007 - protein, 386 aa, unidentified
MSQANNLRRCHTTLDQDSSLIAVVEMSQSSWLVAGIVPGISRQPAKKLKPDQTALLGLLRRWQDEAAKAGRRISRLAVAFEAGRDGFWLARWLRARGIEAYVIHATSIAVSREHRRAKTDRLDTELLKRAFIGWLRGEPNHCSMVQIPSLEEEDAKRPNRERESLVGERTRIVNRMKSLLARLGIRDFKPALRKAPEHLATLRTAEAMQLPPNTLAELRRDMARLRFVMDQITEIEQARLDRIAQRPEEGMHTMIRVLAGVKGIGVETADMLVHEIFSRPLRDRRAVARYAGLTGSPDESGGRRREKGLAKAGNARVRRGMVQIAWRFLVFQKDSALSQWFRFRTENARGTRKTMIVALARKLLIALWRFTRTGELPEGVVLRASA

SEQ ID NO: 281008 - protein, 410 aa, unidentified
MDLLRREVPASALVVAVDPGKAFNRVWLTTGERGLIGEPITLPVLREGIDELARLISASGVPGSPVIGLEATGALHRAWAAEIERRWPGSLRLFAPSETTAARSQLGSRRFKTDDRDCAAMVWLLRQGAGRRSESGTVAAMLGAVRHRRQLVEARQVLQQRLHDQLNVLCPGLSAPPGHGRKLALDSPAGQAVLACAAAFAGRPPSKRSLLARAPGRMTDATAAFWAARWKQLLAPPGDAALCAERLVGDLRRWQDLRNDIARAEDQLDSLLARTAGHVLTTLPGVAVVRAAEFSAYTLPIERWPTPEHLYSATGLASATYQSSTITRRGRISRQGLAEHRNAPMSIAWGLSLNCPAFRARDAELRARGFRPIQARVALARHACRLCWRLLDSQQPYDDQRYARARRRGR

SEQ ID NO: 281009 - protein, 385 aa, unidentified
MAPIRMPEAVIGLDVGKSSHWACVATRDGEVLLSAPVANREDDLDSLFGRFPDALVVVDQSRNIGALALARARAAGMSAAYLPGLAAHGAARLFAGDAKTDERDAMVIAKTALGIPDALLPVGDPGPTVAAARALAAQRNFLTCENTRSKNRLRSILLESCPAFEALVDLSDGPQLRLMASLGGAWSVADAGPRRAAALTRGAARGKIETLVRSTASSTRPDAAAIAAEDRAVKLLARRISENSAEIEAITAEISALLEGDDTYRCLLTVPGIGPKTASELAISIDIEDFPSHDRLASYCGLAPRNRQSGTSISSVTASRQGNKRLKNLLIFSCNCLTRTEGRWGDYYTRCRERGMSHGKALKALARKRLKVIYAVMRDRVPYAA

SEQ ID NO: 281010 - protein, 410 aa, unidentified
MELLHRRCCGLDVHKETVVACLRLVSDGKVTTEVGTFQTTTAGLLRLSEWLATNGCTHVAMEATGVYWKPVWHILDDGEFELVLANAAHVKNVPGRKTDVNDAMWLAELLAHGLIRASFVPDAQTQEMRNLLRTRKQLVREQSSHVLRVQKTLEDANIKLDSVITDVMGKSGRAMIEALIAGETNPAKLASLADRRIKASPEELREALRGRVTKHHRFLLRLHLNQIDALEAAMATIDAQVEANLGPFRTAVELILSIPGIKNLGAHVIVSEIGIDMSRFPSAAHLISWACICPRNDESAGKRRSNRQRKGANWLKTTLVQCALAAAKKKGSYLQAQFQRIKARRGPKKAIMAVVASILTAIYHMLKDGTMYHDLGCDHFKRHSTDQQKKRLVKGLTDLGYAVELKPLAA

SEQ ID NO: 281011 - protein, 449 aa, unidentified
MSTWNLGIDLGVTNAHQAVLATNEGKFVWPKPWSFTTHEADLDHLDRRVRQAAPPDTTFRAVMEPTGMSWFSVAVALQKRGWQIHRVKSQKVQALRQYYKKHAKSDRLDAQTLAKMPLVDEEELYPLYLPDATTLACQRLCKQREHFLESAVAAQNRIQAIDHLALPGLGKALGDPFSPVARAFRDELYDPREVLAIGAAGLNAFCARWAAAGEDSAVARQQAQRVYAVCQNALALYRRSGSESTMYLDYTVLCQEVRRELHFLALYEQQVREIEQAIWPLYRQLHPSGYVQSIYGVGVHGAPVFVSFIGDPHRFASLREWRAFVGLIPESVQSTNTDQKGLHITQAGQDILKKYAYLGADVARHYDPQIAAIYYDQMVNKGHHHIQAVCACATHLLDRILVVLQEGRPYELRDVDGRVVTPEEARAIIAQRYTVPKEVRARLRKQRAR

SEQ ID NO: 281012 - protein, 423 aa, unidentified
MNQTPGQLNDQPALFIGIDWADQKHDCHVIDRHGKGFHREIAHSPESIDTWVAEMLKLAGGQPIAIMLEQSRGALVYALMFRKNVQLYPVNPKQLARYRESYPGGGKDDPTDAKYLARMLCERITTLTAWQPDDEDTRLLANLSQQRRKIVDGQTKLRQQLISLLKSYFPLVLELFGKDHQLPLLLSMLGRWTDPRKLRRADRRLIRRVLRDHSTGSEEQQDEIMARIRSAQLLCDDEALITPSAMAAKLLASQIQQSQKTIRDFEAKIAEVMKQHPDAHLFTSLRGAGKALAPRLLCAFGSQRDRWEDADSLASFSGIAPVTKKSGKLCHVHRRYACPKYLRQTFHEFADSARMYCPWSKARYRMLRDRGMKHHAALRKIARSWIRILFRVWQTRIPFDCDRYIAKLQQRCPEITQYLIEGN

SEQ ID NO: 281013 - protein, 346 aa, unidentified
MVTTIGIDPHKATHTAVAIDEDETVLGEITLPADRDQTKKLMEWAGNVDGDGARVWAVESAGGLGYLLSQQLVAGGEHVLDVPAVLASRVRVLSSGKSDKNDPNDARSVAIAALRQPALAVVQREDHAAVLRMLAKRHLELTSLRTQAVCRLHATLMLLKPGGIQRRLSAKAASRMLQGMRNLDAVGEQRRRGAKAHLGDIRRLDRDIKANKTLIRHAVVASESTVTDVYGVGPIVAAFLIGYTGDPTRFATSDHYAAYNGTAPIEVSSGGNKRHRLSLRGNRRLNHAIHMAAVTQIRFDTPGRVYYDKKLAEGKTKKEALRALKRHISDAVYRQLVADQQQATTS

SEQ ID NO: 281014 - protein, 416 aa, unidentified
MKSTMITAVGIDISKNKSTVAVRRPGGEIVIRPFEVRHTSSDLKRLTAKLKQLGGDIRVVMEHTGNYWRPVALTLKKAGFFVSVVNAMLIHDFSDNSIRKLKTDRADALKIANYALTFWDELPPFNDEEEIRLLLKTQSRMCERITTTATALRNGLIDLTDQTFAGINQAFDRAAKSAEGHEKWVDFFQHYWHRDCVCKFSLEAFTESYRRWCRQKNYKFRTDTAHKVYALAKECVATLPKCESTKVLITQACKSLNAVCEAKLASQHEMQRLASLLPEYDIVMGMEGAGPITGPALMAEIGDVRRFKNKKALVAFAGVDAPPFQSGTFESKSRHVSKRGSPHLRRTLFIISSVILQLSHEDNPVFCFMDKKRSEGKHFYVYMVAGAAKFLRIYYATVTGHFKASKYINSLPAIAG

SEQ ID NO: 281015 - protein, 316 aa, unidentified
MTLHQNVVGVDVAKDWIDTCDLASGEVRHIDTTPRALKAFAAKLAGSPGQTLAVFEASGGCERPLIAALEAAGVAYARVNPRQAREFARATGRLAKTDKVDARVLAEMGRALELAPTIPVDPARRRLAELVARREDLVGAISRETQRLGQACDAFVRRDIRSLLTVLKGRRTSLEKEIAAQLRANQTLAGKDRRLRTAPGVGPSVAATLIACLPELGQIERRPIASLAGLAPHASDSGRSKGKRQVWGGRAEVRRALYIAAFIASRYDPELKALRARLIAAGKPFKVAIIAIARKLLTILNAMIHENRDYQTRSAN

SEQ ID NO: 281016 - protein, 326 aa, unidentified
MQGKEASEQETKAKSTVGIDVSKYWLDVHVLPQGESLRVANGCDGIRRLKRWLTRFDIDLVVVEATGKWHRHVHRSLVASGIPTAVVDPFRVRMFAKAQGIFAKTDWLDARVLAQFAAVMAPPIRAPTPQAMQELAELVVARSSAVEAQTALKNQLAAAEGKFLKRQLARWIARAAKDIAALEGEILKRIKADQTLARRYAILTSIPSFGFVVAATLIACLAEIGSSSAKQIGMLAGLAPIADQSGEREGSRVIWGGRARVRRILYLAAVTATRVNADMKAFYLRLTESGKPAKVALIAVARKLVVLANTLINEDRTWEHQAPKHA

SEQ ID NO: 281017 - protein, 347 aa, unidentified
MTIVEAARGITGGVDTHRDVHVAAALDPLGGLLGSESFATDPAGYKALLSWLESFGEVNKIGVEGTGSYGSGLSRYLRRVGVTVIEVDRPNREERRRSGKSDPLDAVEAARAALSGRASGHPKSRDGAVEAIRVLVVAKRSARQARVKALTQMRHLGYSAPEQLRCRLKGLSVPALVAEGKGLRPTRSPDPVTAATKASLSSLAHRISSLDEELAELDARIEALLVATVPDLLDVFGVGPDTAAALVMAAGDNPERLHSEAAWAHLCGASPIPTGSGKKSGKVRAHQGGDRQANSALWRIVMVRIAHDQRTQVYFERRVKEGMTTHEVIRILKRYVAREVYRYLPRG

SEQ ID NO: 281018 - protein, 399 aa, unidentified
MRFLGIDWGEHHHDLCLLDQDGRLLAAGRITDGLAGAGELHALVAAHAQDPGQVAVGIETDRGLLVGALLAAGYQVYAVNPQVVSHYRNRHGSSRAKSDRGDAKVLADLVRNDRHNHRPVAGDSPLAESVKVLARAHQNLIWSRQRHVNALRSALRDFYPGALSALGTQLAEPEALAVLTLAPTPEQGRQLTRAAVRRALVGAGRRRNLQARVVAVHAALTAPQLAAPAPVEAAYREVVVALVAMLRCLNEQVTALEQQLAARFAAHPDAAILRSQPGLGVVLGARVLGEFGDAPHRYATAKGRKAFAGTAPVTRSSGLRTVVVARAACNQRLVDACYLWAFAALTASPGARRCYDAHRARGATHHQALRALGNRLVGILHGCLARQVAYQEQLAWPAA

SEQ ID NO: 281019 - protein, 420 aa, unidentified
MKESKVSDFSTLIGIDWADQKHDICERTLDHKGYQYSVISSSPKSIHAWALDLKKRHPNNPVAVACELQKGPLIYALAKYEHIVLFPINPSTVAKYRDAFTHSGAKDDPSDARIQTEILENHMHKLRLISPDTFDIRALTQHVENRRKLVQDRVDLTNKITATLKNYFPQILEWFPEKDTIIFCDFLSKWPTLSAAKKARKSTLLSFFNQHNSRYPEANERRIEAIKEAIELTDDRAVIEPNQLMVEIFIPQLKLLIESVLQMDKVIRKHYRSQSDSVIFDSLPGAGPQLAPRLMAAMGSNRDRYNNAAEIQKFAGVAPVIERSGQKSWTHWRYSCPKFLRQTFVEWAGHSIKYSFWAKAYYNQQIEKGKLHNTVIRSLAFKWIRILFKCWKERKPYDESKYLEALKAKGSPLLNYAVNG

SEQ ID NO: 281020 - protein, 451 aa, unidentified
MELDIINPKAAGIDVGSRSHYVAVGQSLEDVKEFGVYAEDLTALCLWLLSYGVNSVAMESTGDYWQNLYAELMKHGIDVVLCNGKFTKHAKGKKTDVQDCRHIQKLHALGLLTSSFLPDETTEKLRTYCRHRSNLIASAAGTARKMQKYLKFLNFRLDVVVKDVCGLTGLAIIEDICKGNLDPESLAEHRHYNCRKSKEEIAKALHGNNREDFLFGLKQEYQTYQFFQKQIKACDKNIDQFVKQELKRWPEKTKLKTTDKPYKRQNKNAISIKNFNQIAYQYFGGVDLMAIEGLSHSTVLSIMSEIGPDGFKKFPTSKQFVSWARLAPNNKISGGKVLSNKLPKGSNRIKIALRQAANAIGNLKDTHLSDFFRRVAFRKGRQAAVSATARKLGVIIWTMVTKKVPYSPPKEYLFLDQKRKLKMLTRIKKNISKFDIKPEDVGFCNCLYMSP

SEQ ID NO: 281021 - protein, 413 aa, unidentified
MDVLVERCAGLDVHRDSVMATVRLPGKRRRQREQHKRAFGTTIAQLQELEEWLQGFGVTLVGMEATGVYWQPVFDVLERRFECWLLNAQHLHNVPGRKTDTIDSAWICQLVEHGLVRPSLVPPPEIRRLRDLTRLRKAQINERARAIQRLEKVLQGVGIKLTSVASAAYSVSARAMLEALLAGTTDPNELAELARGSLRGKIPQLREALANRFELTHHGVLVSGLLAHIDALDQGIAALDARIVEATEPLAELVELVSTIPGVKQRNAQVLIAECGIDMSVFPTVHHFASWARICPGNNQSAGKHRSGKTLRGSRWLRQALTESARAAARTKGTYLASHYWQIRGRRGEPKAIGAIRHDILVAYYHIARDRVPFRELGADWLARRYSPEHRARRLVRQLEALESDTRGRRLST

SEQ ID NO: 281022 - protein, 350 aa, unidentified
MDHIGIDVHKKESQIYILADGGEIIERRIRTEAERFAAVLGTRPRARILIEASTDSEWVARCLEALGHEVIVADPNFAPMYATRSRKVKTDRRDARALAEACLLGAYRRAHRLSDPQRHVRGRLGVRDALVHTRTRYISLIRALLRQQGYRVPSGSAERFADRVQAVPLPGRLRSVVAPLLAVMGPLNQQLAYSDATIEHLAVQDPRVPRLRSVPSIGPVTAAAFLAAVDDAQRFRHAHQLEAYLGLVPREYSSGDTQRRGPITKAGHSRVRWLLIQAAVSILRRHPPQADELRTWALRIATRRGKQVAVVALARRLAGILYALLRDGSVFAPPRVRPPRPTAAAALVNM

SEQ ID NO: 281023 - protein, 387 aa, unidentified
MSQTIAAPIPAAVDYERTLVLAIEVSNQSWVLAAQVPGLPHTKAKRTIDPEAEALLAAIAGYRTRAAATGRSIERVIAVYEAGWSGFWLARWLMRRGVEVYVVQPSSVPVDRRMRRAKSDGIDSELLLRTLLAWLRGEPRVCSMVPVPDEADEDARRCVRERTELISERIGMTNRIGAVLATLGVSDYNPLLRNRCRRLAELRTGLGEPLPANAHAKIKRLLARLELVLTQIAELERERDAVVETESPDKASKMIQQLTGLRGIGVQSATVLVREAFVRRFANGKALGSYAGLASSPYSSGGTDREQGIGKAGNRRVRTVMVELAWLWTRYQPDAAQVCWFRERVGSTGPRVRKIMVVALARKLLIALWRFVIDGVVPEGAVLKPAV

SEQ ID NO: 281024 - protein, 339 aa, unidentified
MTVKTVGLDLAKDVFQVHGISENGRVIFNKAIKRAKLLAFFEALPPCTIGMEACGSAHHWGRTLRKLGHDVRLMPANYVKPYVKRGKTDAVDAEAICEAVRRPTMRFVEIKTEEQQAILSIHRTRDLAVRQRTQMANMIRSLLREFGHILPIGVEAVTAFAKRHLDGDQPDMPDIANGMLGMQCYQFIGLNERIAGYTKMIEQHALLSTDARRLMRMPGIGPITASAIIATIGDAKQFRTGRDLAAWLGLTPLNKSSGGKERLGKITKKGDRYIRKLLVVGMTSRAVMAKRSPEKVDLWTAKIIADKPFRLATTAMANKAARTIWAMLTKKQEYRQPAF

SEQ ID NO: 281025 - protein, 354 aa, unidentified
MSQKINTVVAVIGIDIGKNSFHIVGLDKRGAIALRQKWSRGQVETRLANMPPCLIGMEACVGAHHLSRRLKSLGHDARLMPAKYVRPYNKGQKNDFRDAEAIAEAVQRPTMKFVATKTADQLDLQALHRVRARLVGQRTGIINQIRAFLLERGIAVRQGLRFLRTELPGILATRTDLLSPRMLQVVEDLAGDWHRLDERVEDLSTEIAALVDQDAACKRLMTVPGVGPIISSATVAAIGRGDVFSKGRDFGAWLGLVPKQISTGDRTILGKISKRGNRYLRTLFVQAAWVVLIRPKSWERYGLKAWIEAAKKRLHHNVLAIALANKLARIAWAVLNKERNFECVRRDAMAPHAA

SEQ ID NO: 281026 - protein, 355 aa, unidentified
MNGLRYIGLDVHQDTVSAAVLDGAGKLLMQSIFATRAAAILDFLHGIKGTLHVTFEEGVHSAWLYDLLQRRVARVVVCDPRKNKLLKSGNKGDLIDARKLAELLRNNSLSPVYHGGMSALEVQHRTRSYTMLTEDTTRVMNRLRAVFRSQAIRVHGGKLFRSDLRESHLAQLATPGLRQRAESLYRELDALHPLRLRAKREMLAECRKHPAMKWLRSVPFLGKVRTAVLIGRVQTPHRFRTKRQFWSYCGLALETHDSAEYRVVHGQVQRKSRPAQVRGLNWNHNHELKGLFKSAATMAAFRKGIFREFYSGLLAKGIRPEMARLTLARKIAAITRKIWKEGETFNAEHIKPQAA

SEQ ID NO: 281027 - protein, 364 aa, unidentified
MDEVKLYIGLDVHKDSIAIASAHSRDDPQFVGTTGYSVISLTKALSRLGKPLELSVCYEAGPCGYGLVRALRKHGYHCEVVAPSRVARRPADRIKTDRRDALLLARLHRAGELVPVAVPEPQDEAIRDLVRAREDAVNDQRRVRQRLKSFLLRHGHSYTGTRWGPKHELFLSKIKFEDPAQHIVFTEYRMAVRFASELVERLTQSLRTHADTWRWLPVVKGLMTLRSIDFVSALTIVAELGDLRRFPHPREFMGYLGLVPSEHSSGSSRQRGGLTKTGNTHVRRILVEAAWNYRLPARIGESLQPRLEGQPQSIIDIAWKAQLRLCHRFRRLRARGLHQNKTCAAIARELSGFIWDIGTRLQPA

SEQ ID NO: 281028 - protein, 385 aa, unidentified
MDEEVNPTTKNGDKHMKKTDKYVGLDVHQDTTVIGVADGGRTGEVRSYGTIPSDLQALSKVLGKLGGEAVRLHVVYEAGPTGFVVYRRLKQMGIDCIVVAPSKTPQPKGGRIKTDRRDALQLARLHRAGELTGINVPDEVDESVRDLTRARADAVHDLTRAKQRLKAFLLRQGYRYPGKANWSEAHQRYLRKLTLPLPALRSVLEEQLLAVDQATERVKRLDELIEAQVPQWRYYPAVEAVMCLRGFQLNAATVIVSELGDVRRFAHPKNVMAFLGLVPKEDSTGNTRRLGSITKAGNAQARWCLIEAVQKALTPPKVSARLSMRQEGQPAAYKELAWKIQVRLHKRGWHLLQRGLMKAKVNVALARELAGFIWDLLRQVPIPEA

SEQ ID NO: 281029 - protein, 438 aa, unidentified
MSNKVIFNLDELFISVGIDVGADFSWMSIALPNQQFVGKPYKILHNSIDSLTTAVSKIKEAEELYSLESRIFLESTGIYHYPLFCYLRDKGFNCSVINPIITKNSTNINIRKVHNDRFDSKKAALVGLKPDLKVSLMPSDLALNCRNLCREYYDLMDNRSAYVNKLQGELRIAFPQYLGIFSKVTINTSLTLLETYTSPSAFLKADKQEIIDIIKSTARFGLTYAQNKYNAIIQAATDANQFGYIIDSNIKRIRLYIRFIRKYDEEINSILESLHELVDANEDSDFVKQIHLIETFKGAGFLSAVSIMGEIGDFSAFSKPKQLFAYFGLDPAVKQSGKFEGTKVQMSKRGSAIARRVIHTLTLQSISISRNREAKNPVLREYYLKKCDSKPKLVAMGAVSHKVCNMIFAILRDNKPFKIIALQGHIKQYNSAKCDIAA

SEQ ID NO: 281030 - protein, 415 aa, unidentified
MTKTDSTPGSVTLVAVDVAKSHNEVLIEPALSARRRHFRMANTLTDYERMAEYLRALGPRTVVGFEATGNYHRPLAHFLYRQGFELRLIPTLALARTREAMHNSWDKNDPKDAQVILHLLKTGLTQTWHDPLVSGTHDAQELSKTHHQVALARTRVWHSLRNHYFQLYFPEIEHFIRSDTNDWLIRLLLQFPTPGAITALPGEEFVAQGSKLVGRKVHKTELLANIYAAAQSSIALPVASDRPAIAMYRLVLEEYLALGRLRESIATQAETALANHPDRRRLMTVPGVGPITALTILAEAGDLRRFGHYRQFLKFCGMNLSTQQSGRFRGVSRLSKYGNARLRTAFWMAAQSAVRMRENSLRRKFDRYVHSNPLSADLRRKAYSAVAAKLARIVYGLIKNGCDYRPFFEDVIPGG

SEQ ID NO: 281031 - protein, 356 aa, unidentified
MYTHVYIGLDAHTRNCVLGTIDADANVVSVHDFPTSETGLIRHVKALPATFKYLALEESSLAGWIAGVLTPHVTELIVCDPVQNALISRGGSKDDVRDSLKLARLLRLEELKPVYHNHDPSRVDFKIVAQQYLSITNEIVALKNQIKSKYYQGGVLKISGSLVYSKAHRRSYLNHVESEAMKKVILNFYDPLDCMVRVRENALSLMQELGKKYGEIEPFQRIPGIGVVGAHVFSAFIQTPHRFATKQQLWKYCQLGIRVRQSGGKKLSGECLDRSGISVLKAISYQCWMSSLRTKEPNEVSMFYHASAKRTQDLTRARLNTQRNVLATLWTIWRKNVDYHPHLFYRPPVSARKAKQ

SEQ ID NO: 281032 - protein, 387 aa, unidentified
MKIMAGIDLHSNNAMCGLVDSEGKRLLHKKVPCDLRCVLSVLEPYKQRLESVAVESTFNWYWLVDGLQEHGYKVALANPAAMQQYNGLKHTDDKSDAFFLGELQRLKILPTAHIYDRKTRPVRDLLRRRLLLVHQRTSLLLSLKSLHARTSGCSLSLGLAKALLPEQAAKLFRHPADQLIAREQAQHIRQLSQSIEAIEKMVLGEVKQLFCYRQLQTLPGVGSILALTITLETGDITRFPSAGDYASYCRTVDSARLSNERKKGQNNEKCGNKYLAWAYVEAANFAQRSDGPCRRFFDRKLAKTNRFVAIKALACKLSKAAWYVMSQGVDFDSARAFPGPRPEAQTQRSGKAQAGQATKQTELKKKTDLGRASVNPSKGSGSKTLRD

SEQ ID NO: 281033 - protein, 400 aa, unidentified
MISVGIDVSKEKSTICILKPYGEIVSRPFEVCHTEKELSELTSMLLRLNDDVHVVMEATGIYHLPVLCYLKEKGLFVAVVNPFEMKEYRCQGLRCVKTDKQDAITISNYGIDHWYRLKNYEAEESVYAELKLLGRQYRHYMRMRVESVLELTHLLDYTMPGIKTLLKGWNETNGKDKLGDFAEEYWHYDNITKKSEEQFIESYLKWAKEKGYHQSQDKAVKIYALAKEGIPTVSSDTPSTKMLVQEAVRVLREVDNTLMTILTQMQALAKSLPEYPVVRAMGGVGNVLAPKLIAEIGDVRRFHSGKALIAHAGIDAPPYQSGQFIGTERKISKRGSSSLRKIGYEVMRCLKTHKEPEDAAVYKFILKKEKEGKSKRAAKIAGLNKFLRIYYARVMEVYQK

SEQ ID NO: 281034 - protein, 425 aa, unidentified
MAVSCGIDWAEGHHDIALVDGDGGLVAKRRINETLDGIAELIAMLAAAGDTAEAMIPVAIETPRGLLVAVLRATGRPIYPINPLAVARYRQRTSVSGKKSDHVDAMALANILRTDAHLHRRLPDDSDLARSITVLARAYQDAVWRRTKIVQELRARLREYYPGFLAAFGSGCGFGSGMSTTQLASSDARAVLAIAPCPEEAVRVSKARVEAALRRGGRQRRISTMATTMVAALRVPQPRQDRLVEQAMRTETLALLGVLNAVCGSVDQLAAALTEAFRQHPDYEIITSFPGLADISGAIVLAETGDDRHRFTDDRALQAFAGSAPVTRASGKSRTVTRRRTKNNRLAAIGYSWAFTAAARPSPARDHYLRRRKRGDGHPAALRHLFNRMLGQLHHCLQTGQSYDPIKAFPHAAAGHAEHPAPVAA

SEQ ID NO: 281035 - protein, 339 aa, unidentified
MTVKTLGLDLAKDVFQVHGISENGRVIFNKAIKRAKLLAFFETLPPCTVGMEACGSSHHWGRQLRKLGHDVKLMPAGYVKPYVKRGKNDAVDAEAICEAVRRPTMRFVDIKTEDQQAILSIHRTRDLAVRQRTQLANMIRSLLREFGHILPIGIEAVTAFAKRQLSGDHPEMPEIANGMLGIQCYQFIGLNERIDGYSKMIEQHALLSSDARRLMRMPGIGPITASAIVATIGDAHQFRTGRDLAAWLGLTPLNKSSGGKERLGKITKAGDRYIRKLLVVGMTSRAVMAKRSPEKVDLWTAKIVADKPFRLATVAMANKAARSIWAMLTKKQEYRQPAF

SEQ ID NO: 281036 - protein, 362 aa, unidentified
MTGTIIHSTVAETYQFVVGVDTHAATHHYAIIESRTGGLIDDAEFPTHTKGLLRAATWITRRTGEPTGGDLDRVLVSIEGTRSYGAQITTLLAQTGYRVVDAPSPRRERGTGKNDHIDAVVAARGSLHKRLDQLADARAGDTSTTLQILLTARDAMTSERTRAVNALNALLRTHGLGIDARKKVNRPTIRVIATWRARKSDTLTTATARAEAIRLAVRILSLDIEVTTNEQALLDLVTETHASLLDLPGVGPITAAIILAAWSHPGRVRNEAAFAKLAGTSPLEVASGNRHEHRLNRTGDRRLNSALHTIASSRMRHDERTHDYLARRTEQGLSKRRIRRCLKRYIAREIYRHLAAQGVDNP

SEQ ID NO: 281037 - protein, 337 aa, unidentified
MTDDQSQTGTTASAAAVTPVPAPAPAPVHVGIDVSKARLDLCVLPSGQTLSVANDDAGVKRVIECLAPLAPMLIVIEATGRYHRRLAADLLDAGLRVAVVNPRQARDFARALGKLAKTDTIDARVLAEFAGVGHLRPCEKEPANRVALDERVTRRRQVVHMLVMEKNRLEGVRDKRTLSSIRRVIRVLDQQREDLDREIAKLIEGDDDWRGRHAILTSVPGIGDTTANLLVTELPELGKLGRAQLAALVGVAPINRDSGAMRGMRTCFGGRPHVRAALYMGVVCAMRFNPLIKVFADRLRAAGKPFKLVATACMHKLLTILNVMIRDRKTWNPPVAA

SEQ ID NO: 281038 - protein, 410 aa, unidentified
MNTLYVGIDVSSNNNVIYLMKPDGSKHSNFKVANSLNGSKELVKRIISALNSLELTSLSIGLEATSVYGDNLVYFLREDGSIATYDKQIHVLNPKQVKKFKDSYNDLPKNDYIDSFVIADCLRFGRINKEAYLDDYRYKALQNLTRARYFAVQNLTKEKQRFLNYLFMKYSSITQEKVFSCKYGTTAFAVYEEFDSAEQLAEMDLHDLTEFIKAKGKNRFPDPDAVAKAIQKAARGSYRLPKTINDSVNQVLSISISSMRALESQIKEFDKAIEEQVKLIPNTLQSIPGIGPVYSAGIIAEVGDINRFKNQASMAKYAGLAWSQYQSGDFEAEQTHIIQSGNRFLKYYLCEGAWSHVCCDTEYKRFYDIKYKEVNRNQHKRALALTARKFARLVYSMLKTNQLYKAPVSK

SEQ ID NO: 281039 - protein, 340 aa, unidentified
MSHSIALVGLDIAKSVFQVHAAAEDGTAILRKKLKRAEVERFFEELPSCKIGLEACPGGHYWARLLRNMGHDVRLLPAQYVRPYVKTNKNDAADAEAICEAMTRPSMRFVPIKEEHQQQILVLHRVREMLIRQRTQLINGIRGHLTEFGIIAPARAHRIGLLIDVIRDEEDARLPSAARRALSYLVAQFEEVATKLASIDTELMAMARQDDTCRRLMTIPGVGVIIATAMVASTRDPNDYKSGRHFSAWLGLVPKQNSTGGVDRLGGISKRGNGYLRRLLIHGSRSIMRWRSKSWIWLAKLRGRRPANVATVAVANKTARIIWALMKYGGIYGEPANARM

SEQ ID NO: 281040 - protein, 331 aa, unidentified
MNYIGMDIHKQFTVAVVKDEQGNKLNESKFTNSEINFGNFMQQYKPEETKIVIESTCVWEYIYEILEAKHYEVKLANPSKTRAIAGARIKTDSVDASTLADLLRGNLVFESYIPPKEIRRLREITRERRTFVKQTTQIKNQIHAILIKRGIELEYTTLCDGAILWIREKLPDDKIMLHYLDLLEYHKKKLIEIDKIISDKSYEDNNAKLLMTIPGIGSTRSLDLVAEIGEINRFPRADKLCSYAGLVPSIHQSGNTLRFGGLIKQSSKTLKTTLIETSWNITRTKESNPLQEFYKKLAKKKGKQKAICATARKLCCVVYAMLTNQKEFRYS

SEQ ID NO: 281041 - protein, 355 aa, unidentified
MSSTEGRWCMKTVTLDVHAEACQMAVVTECGEVVYEAKVETSPEELRRAVGGVPGPKRVVYEEGPLSGLIHDALRDVVEEVVSCDPTQNALIARAEDSNDERDARRLALLARVGAIRRVYVPPESQRTLRSLVHYDYALAQGVTRAKNQLKAFCRRQGIRCKGTRVYHSAGRGEVLKLAANALVRWQMESLYRRLDQLRRERVRSRRMVSKQAGRVRAVRRLRTIPGVGPVTGPAMVAWIADPVRFRSRGAVSSYGGLGLKQDVSNWKPTGHAHASRRGQRELKRALFISARGALKGKSALRKRYDARLAAGWEDKKAIRDVARTILFIACAIWKKGTEYDDAKVRVPEKERGAP

SEQ ID NO: 281042 - protein, 347 aa, unidentified
MKHYVGLDVSMKETSICIVDEARKVVKEGKVGSEPETIAAWLERTGLGFERVGLEAGSLAPAMHDGLAAAGLPVVCLDARHLKAATSAMPVKTDRIDARNIAWALQAGWYRAVHVKSQATHKLRALLRSREMLVTSRVGLDNHLRGILKAFGLKVGKVAVGRFEQRVRELVEDDGILEQVVGAILRVRREVLERLDDLHRMVLATVKADPVCRLLMSVPGVGPVTALAFRTAVEDPTRFAKSSLVGTHFGLTPRKYASGETDRNGGISKCGDRMVRSLLCEAANVLLTRVQRWSWLKRWGVEVARRRGKLRAQVAVARRLAVIMHRMWVDGTTFRWTRDTADEAAGA

SEQ ID NO: 281043 - protein, 423 aa, unidentified
MEVVYPCVAGLDIHKETVVGCVRLTTGGKALRECRTFATTTEGLLDLLAWLQASGCSQVAMEATGVYWMPIWKVLCDGDFTLLVANAAHIKAVPGRKTDLNDAMWLADLAACGLIKASFVPPEAIQDLRTLMRTRKQMVREQTRHVQRIQKTLTEANIKLDSVISDIMGVSGRRMIEAMISGVRSPARLAELAHKQVKASPKQLYDALHGRLTAHHRFLLKLHLDQWDTLAAAIETIDEEVEARLARMDEEAAPGEATFSRLTALLSSIPGVSLLAARSILSEIGTDMSRFATAGHLVAWAGMCPSQNESAGKRKSSRLRKGAPWLKTMLVQCAWAAKRKNDSYYKAQFLRLRSRCGPQKAICAVAASILTAIYHMVKNRTRHQDLGGGYFDKRSTSDKAKRLVGQLTKLGYEVTLQPIAKAA

SEQ ID NO: 281044 - protein, 388 aa, unidentified
MLTAVDQSEAHAAIRSDLGVIFVSLELSKSSWLVTSLAPASSKMSRHSVPGGEIAGLLAVLAELRKKAGSRLGQPHRLVIIQEAGLDGFWIHRVLNREDWIESHVVDAASIAVSRRHRRAKTDRIDGEALVRTLMAYHRGEPRVCSMVRVPTPEDEDRRRICRERKALVAERVRHVNRIKGLLLSQGIRNYEPMHRNRRERMEELTTGDGRRLSGNIKAQICRELDRLELLLEQIRAVEIERDRLVASSANDQPSSLAMLTSIKGIGPEFAVILDSEGLFRHFDNRRQVAAYAGLAPSPWQSGTIDREQGVSKAGNPRLRTTMVQLGWLWLRHQPTSALTCWFNERVANNGGRLKRATIVALARKLLVALWKYVTAGVVIEGAIMKAT

SEQ ID NO: 281045 - protein, 363 aa, unidentified
MRIIGCDLHARQQTLAMLDSTTGEIASITLKHEGDNVREFYSSLPRPVRVGIEATGSMHWFLNLMEELGIECLVGHPAQIRAAEPRKQKHDRRDADLILKLLAENRFPAIWLPSKELQDLRSLLRHRHQWVRMRTRVQNALQSIALANGLRRGTALWSRDGQSRIAALPLAPHSAYRRSELQAMYEKFEAEIEKLNERVEQLASQRSGARLLMTHPGVGPITALATEVFLGDPARFADGKALASYVGMIPREYSSGGMRQRLGGLSKQGNPLLRFLWGEAGAHAVRKDPELQRFYRRKLVQKGLGKASVAVARKLGIRLWIMLRDQIEYNEFCRRGQKQQKSSDACAGMPETANGANSHRPVD

SEQ ID NO: 281046 - protein, 418 aa, unidentified
MTVDSVAQKRSAIKPDTLVIGVDLARHTHVARARFYDGSYTRPVKVPNTRAGFLALTEQIGAWKSRPDSSVIIGVESTGSYGVNLVRWLSEYGCRVVLVPSLHVCREKELLDNGRGTNDDKDALIIADLVARGQYLGFVALSGACLELRPLVSLRSRLIRERTGWLNALHQAVDVLFPEFETIFADLKPPSVRLVLGRFGTAAAAQAYSPAEMRQMLARDGVSRLSLAKLKRLQAAAAESVGPLAVSAGQERSLREMLEILATIEGRIAGLEAEIVRLLAQLPEAEYLMSVKGVGAMTAAVILAETGGLGQYSCAAAVLKLAGFNLYQNSSGQYQSGRHISKRGRSQLRRALYMVAVQHARRGWPLQPYYAALVERGKPKTVALTAVCCRLVRLLYALARDGRCYSECPPKVSRPAAA

SEQ ID NO: 281047 - protein, 352 aa, unidentified
MIVLGADTHKRSHTIAAVSSTSGEQLGEQTVQSGAKGAAALLRWARGLGNERVWAIEDCRHVSGSLERFLIERGERVLRVHSTLMSASRRQARGRGKSDGIDALAVARAALREGLDTLPAAHLDGPELDLRLLVDHRERLVRQRVAINNTLQWHLHDLWPETQFPGSALFYGTWGPRIARRLARADQTMRVRIARDELRRIRELSQTIKALEAEIADLVAQIAPHLLSEPGFGPLTAAKLVGEIAGAHRFTSDAKLARAAGIAPIPVSSGKTDRHRLDRGGNRQINATIHRIAVTRLRCHAQSQDYIARKRAEGKSTKEAIRCLKRHLTRRVWHLLQTSDPAPNQTITPSIS

SEQ ID NO: 281048 - protein, 385 aa, unidentified
MQTPNDLSQSGIVLKQDSTLIAVIEMSLSSWLVAGMVPSVERQPLKKLAIDENALLKLLHRWREEAEKAGRKIERIAVAFEAGRDGFWLARWLRARGIEAHVIHASSVAVSREHRRAKTDRLDTELLKRAFLGWLRGERDHCKMVAIPTIEDEDAKRPNREREGLVGEQTRIINRMKAALSRLGIRGFNPKMKKAAQRLEYLRTPEDEPIPPNTLAELRRDMERRRLISEQIRQIENARLERIEHAPRHGPHAMVRVLARVIGVGIETADMLVQEALSRNMRDRRAVARYAGLTGSPDESGTRRREKGLARSGNARVRRGMIQLAWRFLMFQKDSALARWFRARTENARGARKTMIVALARKLLIALWRLVREGVVPDGVVLRPV

SEQ ID NO: 281049 - protein, 398 aa, unidentified
MLSIGIDVSKGKSTVCGMKPGGEIVYTPFEVQHTREGMSELVSLLRGSGEEVRVVLESTGSYHCPVVAALLENGIFVSVVNSLRMKRFCSQSIRKVKTDRIDAMQIALYGLAYWQELQPTRLPEDTYRELQLLARQYYQMTSMLIKAKVDFNAICDQVLPGMQELMNDHAGRHKLSDFVLRYRHTTHILEMGETRFRKDYCKWAEKKGYRNCERMAALIFATAQNGIPVLPNAPSTQIVITEAIRVLHTVEASRDAILTQMQALAKTLPEYSLVREMPCIGDTLAPRLIAEIGDVRRFHSKRALIAYAGIDAPPYQSGKFSANNRHISKRGNRYLRKTGYEVMQSYVMHKPANDPIFTFIEKKRSEGKSGKLAMVAGLNKFLRVYYGKVTELYRSLPQ

SEQ ID NO: 281050 - protein, 320 aa, unidentified
MSASVEPVYVGIDVSKARLDVCLLPSGQAAVFDNDPAGIRQLIELLRKQSRVARCLLEATGRYERRCAADLLEADFAVAVVNPRQARDFARSLGRLAKTDSIDAATLAEFAKLSHVRLSEKTPDNTAILDDLITRRRQVTQMLGTEKTRRGDLTHKKALASVDKVIRLLDQQREDLDREIARLIESDDDWKNRRDLLASVPGVGNTTASQIVADLPELGKLNRQQIAALVGVAPLNRDSGTMRGHRTIFGGRANVRSGLYMATLSAMRCNPIIKLFAERLLAAGKAFKVAMIACMRKLVTILNVMVKNNEHWRTPVLQNA

SEQ ID NO: 281051 - protein, 368 aa, unidentified
MEKFITYVGLDVHKKTISVALADEGDSEVKSYGTIESNLASLDTVVRKIVSRGREPRFVYEAGPCGYGIYRYLKEKNIQCMVTAPSLIPEKSGDRIKNDRRDAKKLARYHRSGDLTAVHIPDREDEAMRDLTRAREDAKTAERKARQQLNALLLRHGLIYSGKSHWTKAHWRWISGIKMEHEAQQFTLQEYADTIRSCSERVERITEKIRLMVGQWRFAPVVEALQALKGVCLVIAATVIAEIGDLSRFENPRDLMAFLGLVPSQHSTGDNVKLGPITKTGNRHARRMLVQAAWSYRLPARVSQRLLDRQQNLPEKVWKIAWKAQVRLCSRYRQLTARGKPTQVTTTAIARELAAFMWAIFRTVEVAA

SEQ ID NO: 281052 - protein, 347 aa, unidentified
MSKIKLVAVDLAKRCYQLGAIDVDNKLLFNRKLSPRKFALAVAQLEPTVVAMEACAAAHYWGRRLMRLGHEVRLVPPQHAKAFRRVHKSDAHDTLSIAEAAQRPNLHFVPVKTIAQQDLQLLGRIRERLVAQRTAIINQARGLAREYGVNFPKSRQALLEELPLALGDADNELSPVAREALGELLQQIRQSSESIAQTMQRITALASEDPAYERLCTIPGIGPTIAPALLASVGHAQQFQNARACAAWLGLVPKQCSTGGTTHLGGITKNGNRSLRVMLIHGARTVIRWADKHDHAQSRWIKQLVARVGKNKAVVALANKMTRMSWAVLTQGVDFDMKKAYRPQTAR

SEQ ID NO: 281053 - protein, 391 aa, unidentified
MIYVGIDVAKDKHDCFIISSEGVVLSDVFTIPNDMTGFNCLLQRIQACSAGQDRIKVGLEATGHYSYNILGFLLDNGLDSFVINPLHTNLYRKSLSLRKTKTDRVDARTIAAMLMSDVGLKPYTDTAYHNEELKSLTRYRFDKVRERAQLKQSVSRLVCILFPELEKLVPTLHMASVYALLDEFPGAQQIACAHLTHLKAVLHDASKGRYGRDKAIELREAAKASIGSRMPAKSLELRHTIRLIRELDAEIAEIEQAIQSIMDEMRSPITTIPGIGTRMGAMILAEVGDFSRFDSPDKILAYAGLSPSTYQSGQLVNGYAHMEKRGSRYLRYAIFNATKYVCHWDPTFAAYLAKKRAEGKHYNVAISHAAKKLVRLIYALEKSGEPYRLTA

SEQ ID NO: 281054 - protein, 390 aa, unidentified
MDARTVNNLPPAATHDGATRCLIAIELSKRSWVVAANTPLSEKISRYTLKACDAKGLLELIEKIRMRIARELKQPVEVICCYEAGYDGFWLHRLLEAHGIRNYVIDPASLQVDRRARRTKTDGVDVERLLRSLMAYLRGEPRVWSVVRVPSVAEEDDRRLHRERDRMINERTQHVNRIKALCALHGIYDYEPLRSDRMRRLEQLRTGDGRQLPPRVGAEIRRELQRLELVLQMITAIEKERNAIASGKAASSHPYANKIQGLVKIKSIGSEIATVLAGEVFYRSFDNRKQLGSYVGLTPTHFQSGPMCRDQGISKAGNPKARTIMIELAWSWLRFQPDSPLSIWFRERVGSAKGRIRRITIVAVARKLLIALWRYLENGLVPKGAILKTK

SEQ ID NO: 281055 - protein, 568 aa, unidentified
MASASRQIGTVKVEPGVVTEDQVELLQRDCGVGLDTDRDYVEVCLLIRPGKDLSYKRFNFTANNTPPGCDRLIATVFRLLDEQGITPTKDKPIVFIGESTGPYSRLLFTKLIAYSVIDPIMLNARFVARMLAEEGKSDKKDAFTLVRLGLSWNLRRSRITTGDQYDHKTALRKKRRFTWWRGSTYNSLGSTLTDIGFPLGAVFPLSGRSAQVILKAILRGERDPYRLLGESFTISLSRQEANHLRQFGGERFAAIRATKNERHQQKLDKAIEILSGVQYLTPNTLDVVESYTKLIETQVMQIDRLNLLANVLATSTPELVEKAKLYATVPTFTLETAQAIIAEYGCNVSTYYKSASAFAQTIGVAPNSMVSAGKVLKSTKPSSNRYIRPLLIQGAAGFLRRKQPCATDEWLWRWAHAYMQRAGRKKATAAIAHKAIKSLYHVDRTGQPYTSRQHVDAGAVQIDRVVKRLQQAISVLPPDAAKNVEIQSILAAASSQRYRLGKTAGVEMSIFNVRRTNLLLRQGYDSVAAITIAIVTGEFSTALPGVGKTTVDAITDALLHAKCIIPTH

SEQ ID NO: 281056 - protein, 343 aa, unidentified
MSEYDGQQFVGIDLHRQRSVIVRQSDTGEHLSTVRIINDPASLALQLEKAGEHPEVVLEATYGWYWAVDALQAAGARAHLAHPLGVKGFRYRRVKNDVRDARDLADLLRMNRLPEAWIAPPVTRELRELARYRAKLVALRSGLKAQVHAVLAKEGQLVPVSDLFGVDGRQRLAKIPLGVAYAQRVISLLEVIDVLDTHEARFTAAIADQLRNHPGYRAIQQLPGVGPVLGAVFVAEIGDVHRFAAPDRLCSWAGLTPRHHESDTVAHRGHITKQGSRLVRWAAVEAIQHQPAGTKISLDRARIEGRRGKNIAKVAAARKLLTLVYYGLRDGHIRALAHQKAVA

SEQ ID NO: 281057 - protein, 412 aa, unidentified
MSQTIQRFVALDVHKNYVVVGAVNTRQEVVLHPRRVSLVRLDGWAKKHLKPTDAVVLEATSNAWYIHDLLEPLAARVVVANPYLVKLIAASFVKTDKRDTLVLARLLAANIIPEVWVPPPHVRELRALVSHRRRLVSQRTAAKNRLQSVLMRHNIVPPAGQIFSTAHRDWWDRLSLSDSEKLRARHDLAVIDHLSPLMEEVEMELARLSVGGFWADRVAFLVQLPGIGLLTAMTLLGAIGDITRFASDKKLVGYSGLGSRVYDSGQTHRTGRITKQGRRELRSVMIEAAWVAVRFHPFWQAKFERLADRIGKQKAIVAIARKLLVVVWHVLTAQAADRQADPQAVARSLMTWATRYGLATSLGMPRTLFVRRELDRLGIGQTMNRFKYNGNYYHFPLTVPTIVTDENIAVDR

SEQ ID NO: 281058 - protein, 339 aa, unidentified
MNYYAGIDVSLELSSICVVDATGQIVREAKVASEPEALIAFLTRLELPLTRIGLEAGPLSQWLYAGLAKAGHAVVLLETRHVKAALSAMIVKTDRRDARGIAQLLRMGWFRPVHCKSPPAQEVRALLVARKQLQAKMRDVELSLRGLLRGFGLKVGEISKGQFAVRVRTLVAGHIMLERIAEAMLRAREALQTEFGKLHRAMLAIVRRDDVCRRLMTVPGIGALIAVTFTSAVDRPERFSRSRAVGAHFGLTPKRYQSGETDITGAVSRVGDPMVRTALYEGAHIMLTRAVRFSALKHWALQVAKRRGMRRAKVALARKLAVILHRIWVDGSTFRWAAR

SEQ ID NO: 281059 - protein, 344 aa, unidentified
MLYVGMDISSKSFVVHAVDERKRVVLKTEIAASRESLRWLIGQLGPQPKLFVFEAGNQLKWVADTLGKQDGVSLHVVHPNEVKWISTSSGKTDKVDAKKLAELARGDLLPRKVHLVEGEVRQLRELISARTQLMRKRVSMMNTLRGYLKQEGVRLGEKFFARADWKERLEKTRLSQTLKLILRAFHPSIEALTASEHELDQRISDIKNAKTELLETIPSIGVLSSRTIVAALDDAKRFENRKAVAKYGALTPTIYQSGDTVQLGRINRDGRHEVRRVLLQCAHLLTRMKSPAARPLRLFYERIARRQGKKKALVALARKLLTVAYGVLKSESPYDPMKLLPQAA

SEQ ID NO: 281060 - protein, 466 aa, unidentified
MGKGSGTTRGDRRRNARRERLRGLLPRDGAVVGIDLAEDKQAIAVVDHDVRVLARKTVRVKAFRLDEALDWAVAQARARGFAAVTVACEPTGPRWLQVQRLCAERGLALVCIQPLVSHIAREQQDYTTHKSDESDCVMIARLALELHCYVPEELDEAWAQLRHLGRRRAQLITAGTASVQRVRDFLSVAWPVVTGTCAYPLESTTWLAALQVVTSRCGGDPSRLAEMGPEAFTALVRDAQRGWGGQKAWGPICRRVFAALTETEGVVLSCRRGLLRRVADELGDLQRTRGQLRAVEADMVAVLAELGLARLADIPGLTAAGAAAILAETGGPRRYDSSSSLVKHAGLSPAENASGASAGQAHISRRGRPALRLAVWRAVWPMLQYNPVMAAKYAAMTRAAGAAADAAAAADAGSRQVSAAAAAARARRAKARVACAASLLRWIYSMVVHDTSWDAAAASGCQPEAA

SEQ ID NO: 281061 - protein, 416 aa, unidentified
MKKGQDTRGYERYMALDIHREYLLVGAWNEEQEWVLTPRRVGLEKFPEWAKKNIREGDIVVLETTTNVWTIYDIVAPLASRVLVANAAEVGEIANARVKTDKEDIKRLLKLLIGGIVPEVWVPPMHVRELRAFTSYRGRLVKTSTMIRNRLQSLLHKHNLMLSEVGLLDQAWWEAQKNISALEKLQIRQELVLLREVEKLKAAVDEELQRQSTSSTWGKQALQIMQLPGVGFVVAMTVLAAIGDISRFENAKQLVGYAGLGAGVHDSGKTHKEKKITQKGRKELRWAMVEAAWRAVRMSPFWKAEYEKHLQRMRKPNQAIVVIARKLLVAIWHVLSKEETDIHASEEDLAYKMLLLSWSLSEDVRLGLTYKQFAKYALMKLGVETDITRFVRKNVPRRLAPRDEVLMRMTELGLSA

SEQ ID NO: 281062 - protein, 435 aa, unidentified
MGNESHYVAVPPGRDARPVREFGSWTAALEEMAQWLKSCGVETVVMQSTGVYWIAVHDVLERHGLEVNLVDARGTKSVPGRKSDVQECQWLLKLHTYGLLRSCFLPAPEIHGVRTVWRLRDQHVKDAGRCIQHMQKALIEMNVQLHIAISDLSGVTGQAIIRALLSGQRDPRKLAALRDRRIQATEEEIIHSLQGNWKEDVLFELQQAVEAYDFYQKQLAACDTQLKSYMAALPTREALPTTAAASEPTAAANGRKKRRPRKPTGNQPAFALAEELQRILGVNATRIDGIDVMTIQTVLAEVGPDLSAWKTEDQWSSWLNLAPKRDISGGRVIRHRREYHTNRAGNAFRMAAESLVRSQSYLGARYRYLRAKLGGLKAVKAMARVLACLYYRLVTKGQVWIDRGSVEFEQRKQQRDLASLQRKARSLGMQLVPAA

SEQ ID NO: 281063 - protein, 341 aa, unidentified
MTAIGIDTHKSSLAACAIDELGAVRAEATFPNDPAGHHQLGLWAAAVVPDARIGVEGSSVYGSALSRLLVAAGRDVREVPPHLSRYERVRTRRAGKSDPGDALAIARVTAREADLPPVRIDDLSHDVGLLTEARDDVVADITRTRNRIHADLVRLVPGYEARSANLVAARHRQTAARLLRRVPGVHAELAHDRLRELERLIAKAGALERRLADLVGDHPLLGLKGSGVLVAAKLIGETGDVRRFRSADAFAMLAGVAPIPASSGQTQRLRLNRGGNRQLNRALHSIALSQAWHHPPAKAFIERKRAEGRTWREALRSLKRHLARVVFRLLVAGTARSAPTT

SEQ ID NO: 281064 - protein, 346 aa, unidentified
MLYAGLDLSRKRLDFHLLDAEGATVEVGAAPPDADGLLGLSERLARHGEAIRAAIESMNGARFVHDRLELAGWQVEIADAQKVKGLAPLACKTDRIDAWVLAELSRRELVPAIWLPDPLVRAERERARWRLHLVRHRSSLKQRVHAVLLTHGKPCPVSDLFGVRGRQLLARLGLPEPWQATIEASLRLIDELDREIGDCERELRRLGADHRYVPLLCTVPGISWVLAYTIAAELGDIDRFPTPRKLTGYTGLCPRVYQSGERDLRGPLAKQGPRYLRWALVEAATHACTAPVYRDRYQQTKARIGKQRGAKVAQIDLARRLSEAIWHMLTRNQPFAPKGATDPLAA

SEQ ID NO: 281065 - protein, 373 aa, unidentified
MPKYSTAFGMDVHLRSTTVCALDADTGEAVTRRFPGNPWGEIAGWMGGFPGPSLAAYESGYPGFAPQRELAGLGVECVVAAVSKIPRSAADSASKNDRNDAARMAKAILAHDISPVWVPSPEVEGIRDLAGAYDGATARLATAKQRLLAFLAKRGFAYGGTTPAGNPRKYWTYDFLRWLDKARPEDDGGVRTLAALRNEVEAAAEARADLLSEYRAAADASPIAAEVAALQSIKGCAFALAAAFSAEVGDFTRFRSGRQVTAYFGLAPSQRSSGDSVRLGGISGAGNALVRKLAVEGSWCYAAARHQPKLMPRDTGVPLEIRMHGRKGSERLLRRREEMLARGMPAAKANAATAAELVRWLWALGMMCREGAE

SEQ ID NO: 281066 - protein, 337 aa, unidentified
MEQQQQYVGIDLHRRRSVIVRRNALGETLDTVRIDNDPVALAAEVAKAGPHPEVILEATYGWYWAADVLQECGATVHLSHPLGNNWGNRRVKNDERDATDLVDLLRLGRLAEAWIAPPPLRELREYIRYRAMLVQLRSNLKAQVHSVLAKEGVTVPMTDLFGVKGHHLLNDVQLGDAYRVRVESLRDLIELFDREVAMLEDRIDPYLADDLGYHAVQAIPGVGPVLASVFTAEIGDVSRFKTARHLCSWAGLTPTHHESDDKVRRGHITKQGSRLVRWAAVEAVAHQRGDTPIAAHHRNVGERRGTQIGRVAAARKLLILVYYGLRDGEIRCLAETG

SEQ ID NO: 281067 - protein, 454 aa, unidentified
MALPFLNDDGEQAMAARKQEVAVFPNAAGIDVGATSHWVAVPPHLADGPVREFGPMTTDLNALADWLLACGVDTVALESTGVYWIPVYEVLEQRGLKVWLVDARQLKYVPGRKSDIQDCQWLQKLMSLGLLRAAWRPDGEVCVVRAVARQREVLLTEQASWVQRMQKSLVQMNLQLTEVLTDVMGVTGQAIIRAIVAGERDAVVLAQHRNRRVKASKDDVIKALSGNWREEHLFVLGQSLAMYDDIARHLAGCDTKLQALLTERSRGGIELGKPPRAGSRTRAVFDLRQTLADWAGVDLTRINGLEVTSVMKILSEVGPDLSRFANVKHFCSWLGLCPATKISGGKVISASTKHSANRVRQTLKLAAMSLSRSQSALGAFYRRLCTRMGKPSANTAAAHKLARLVYFMLTRGEAFVDQGQQRYEEQQRERSVAALKRRAADLGFQVSPATPTAA

SEQ ID NO: 281068 - protein, 395 aa, unidentified
MFIVGIDIAKRSHEAIIIAEDGQVVRKAFSFRNNCTGYNLLLEQVRRLTLVKSQIVFAMESTAHYWLALYARLLKDGYTVMVLNPIQSHSLRELYIRKAKTDARDSLIIADLVRFGRCKASNVPQDKILALRELCRSRAYLVDMAADLKRKLIALLDRIFPEYESLFDSVFSKASIAVLSKYSTPQKVKNANLRKLTDLLMESSNGHFGEWKAHQLKEAACSSFGIDDSGGVYSTLLGMFLEQILSLTAQADSLEKQISVFFQEFNNPLTSIPGVGTVLAATILSEIGDITRFSSADKLLAYAGLDPSVKQSGEFKSNQNRMSKRGSPYLRRAIWLASTVAVHRDPIFQTYYEKKISEGLHYMNVIGHVSRKMTAVIFAVLRDGQPYQPILQSAG

SEQ ID NO: 281069 - protein, 332 aa, unidentified
MNTSDSLSVGVDVSAKTCAVLKRQMGKSGVVQHFANETAGHRALIAALAGHAQVRVCVEATGMYSMDLVMALHGAGIPVMVVNPKSSHNFAKALLLRSKTDNIDADTLAQYAERMPFVPWQPPAAEHFALRAFARRLTALTEEKAAAKNQLHALSATAETPRALLQDAKRGIAQLEKRIDQLTAHALKLIKAHETLRTALALFTSICGIANTSAIALLGEVLVLPSNLTHKQWVAHAGLDPRETQSGTSVHKAPRLSKAGNRYIRRALYMPALCAVQRDPYVKAFYQHLIDNGKKPLQALCAVQRKLLHAIHGMLRDQKPFDNTRFFAMVKT

SEQ ID NO: 281070 - protein, 293 aa, unidentified
MNEYDGRQFVGIDLHRQRSVIVRQTDAGEQLSAVRIVNDPVALGLQIEDAGPDPEVVLEATYGWYWAVDVLQAAGARVHLAHPLGVKGFRYRRVKNDVRDAGDLADLLRMGRLPEAWIAPPATRELRELVRYRAKLVAIRSGLKAQVHAVLAKAGVLIAVSDLFGVGGRQRLAKVPLGSAYAERVRSLLELIDILDTHEARFAGLIAKRLDAHRGYQAIQQVPGIGPTLAAVFVAEIGDVHRFTSPAHLCSWAGLTPRHRESDTVVHRGHITKQGSKYRSGAASPDHGQDHGR

SEQ ID NO: 281071 - protein, 421 aa, unidentified
MGKIIERCAGIDVGKRFLFCCVLTGAANEEPHSQTIRFDATVPALERLREWLHTERVTHVAMESTGSYWIPIFNVLEDQVAIILANPEEVKNRKGHKTDRNDAKHIADLLRHEHIRPSYIPPKPIRQLRDLTRRRVQLTQDATRERNRVQKLLEQVNVKIGNVLTDVFGVSGQDMILALLEGHSTPEQIAGLARGQAQRKIPQLIEALEGHRMSDHHCLVIRSSLRHLGCLQEEIETLDDEILRRMQTPPFESAFGLLQTVPGVGRLSAAAILAETGTDLSPFPSPEQLASWAGLCPGNRESAGIQKGRQTTHGNPYLRTALVQCAWAATRKHGSVFAVRFQRLAPRRGEKRAIVAVAHLMLIVVYCMLKRGMEFRGAECVHQQRRRERRAHHHMRCLRRLGLTVQVISGPAPLLGEPSTP

SEQ ID NO: 281072 - protein, 314 aa, unidentified
MPDRFVGIDVSKAALDVHVRPEGAALRVPHTPAGVRGLVARLARLAPTLVVADATGGLERALVDALHAGGLPVAVAGPDRVRHFARALGMRGKTDRVDAAVLAHYAERVRPEVRPAPTADGRALSALAARRRQLTAMLAAERNRLQAAGAALRADVRAHVRWLEARIARLDARIGAAITADPERATAASRLQTVPGVGPVVAHTLAAELPELGRLGRRQVAALVGLAPFPRDSGTLRGQRAIWGGRATVRTALYLAAMSGVRANPTLRAFYTRLVAAGKPKKAALTATAHKLLTILNTMARDGTTWSPPAPSPA

SEQ ID NO: 281073 - protein, 328 aa, unidentified
MMNTMIGIDVSKAKIDCAWLRDLETGKVKTKVFKNNPEGFQLLIQWVENNTQHPIAASCFVLEATGIYHEALAYALHDAGAMVCVVNPAYIHDYAKSLGVRSKTDKKDSVIIARFGVTHHPAPWQPEAPEIRQLKALITRHEAIEKDLQRENNRLEKAEITQVSQEVISSINTVINELTKELKRIKQLIDDHIDQHPTLKQDSILLRSIPGVGPVISQRMVALIRSRAFVSARQCSAFIGLNPIIRESGSSVKGRSRLSKMGDPRIRAKLYMAAIVAIQYNPDIKRQYERLLKNGKAKMVALGAAMRKLVQICFGVLKHQIPYQPQVE

SEQ ID NO: 281074 - protein, 422 aa, unidentified
MDRDASTVDYAVFVGLDWGSEKHSIALQPAGSKEIERYELKQNPEDLHGWLSRLRDKFNGRFVAVAIEQTKGAVIHALMSYDFVHVFRINPKSMADYRKAFSPGGAKNDPADAEYLLEWLTLHRDRIKPWLPDDPQTRALQRLVEFRREVVNQRVALTNRLTQILRDYFPQALDWAGEIDSVMACDFLSKWPTLEKVKKAKPDTIRTFYRQHGSRSKEVIEERLKAICMAQALTQDTTVIGTSVSVVQTIIRVLRPTMENIDRLDKEIHTRFETHPDVAIFDSFPGAGAVLAPRLLAAMGSDRSRFGSASEVQQYSGIAPVTDRSGKHMWIHRRFACPKFIRQTFHEFAGQSIKWSGWARGYYDMQRSKGKGHHAAVRALAYKWIRIIHRCWKDRVTYNEEVHLNSLRNKGSEILNFIDKAA

SEQ ID NO: 281075 - protein, 416 aa, unidentified
MKSTMITAVGIDISKNKSTVAVRRPGGEIVIRPFEVRHTSSDLKRLTAKLKQLGGDIRVVMEHTGNYWRPVALTLKKAGFFVSVVNAMLIHDFSDNSIRKLKTDRADALKIANYALTFWNELLPFNDEEEIRLLLKTQSRMCERITTTATALRNGLIDLTDQTFAGINQAFDRAAKSAEGHEKWVDFFQHYWHRDCVCKFSLEAFTESYRRWCRQKNYKFRTDTAHKVYELAKECVATLPKCESTKVLITQACKSLNAVCEAKLASQHEMQRLASLLPEYDIVMRMEGAGPITGPALMAEIGDVRRFKNKKALVAFAGVDAPPFQSGTFEAKSRHVSKRGSPHLRRTLFIISSVILQLSHEDNPVFCFMDKKRSEGKHFYVYMVAGAAKFLRIYYATVTGHFKASKYINSLPAIAG

SEQ ID NO: 281076 - protein, 429 aa, unidentified
MNSTQNKKIEQVKETTMIVGIDVGSEKHYFRAFNWRGIELTRKPVPFSNSMEGFNSFYNTIVELMQKSELEEALVGIEPTGHYWFDLGQFMGEKDIKFVMVNPHHVHKTKELDDNSPSKNDRKDPRVIAGLVRDGRYFYSYMPTGAYAELRNASNRRFVLVEEQTRAKNRLQKWIAVYFPEYKGIYTHIDAKGGMLVLKKAPTPEEIVRLGVEGIIKIWKDAKLRGNGHKKAMLILAAAMRSIGLKAGLTEARMEIQDLIEDYELQTKRLERINDLIKELCQQIKYANKLLEIKGIGITTVAGFIAEVGDITRFDNTKELQKLAGLELVADSSGKHNGKTKISKRGRKRLRYLLFEAAISVVGKNEEFKEIHRYYTTREKNPLKKMQSLIAVACKLIRVFHVILIKGVSYDASKMLEDIRHPGVQLKAA

SEQ ID NO: 281077 - protein, 375 aa, unidentified
MKEKLRFLGLDVHAETIAVAIAEPDGEVRSLGTIPNRLESIRKLIKKLGPTEKLRACYEAGPTGYVVYWQLAELGVKCDVVAPTLVPVKAGDRVKTDRRDAEKLARSHRSGDLTAVWVPDEGSEALRDLVRTREAAKQDQLRARHRLSKFLLRSGQRPPTGIRPWTRPYLIWVAQLRFTQMAQEATRLDYLHEVEHMRERVERLERAITEAVKLASPALQQVINDLQALRGIADISAVTIAAELGQVSRFDGARQLMGYCGAVPSEDSSGKRTRRGSITKTGNAHLRRIVVEAAWSYHRPPCIWYGLRKRQESISEEVKEIAWKAQHRLHKRYMRLAAAGKDKRKITTAVARELLGVIWAIGTRAETTVRQRIAA

SEQ ID NO: 281078 - protein, 354 aa, unidentified
MNIKYIGLDVHKETISIAVMNGDGKLVMESIIETKTITILQFIQGLRGDLHVTLEEGTWAAWLYDLLKPHVTELVVCDPRKNALMKQGNKSDKIDARKLADLLRGGYLCSVYHGENGLRTVKELARSYLTISKDLSRVMNRVKALYRSWGILCGGQQVYAPRHRSEWLNKIGEAGVRRRAEFFYQQLDALRALRQAVRRDLLAESRKHSATKLLRQIPYIGPIRAALLIALIQTPYRFRTKRQLWTYSGLAIETRDSAQHRYVAGQLRRSKKPQQVRGLNQNHNHDMKAIFKSAATMASTREGPFYDFYQGLLTKGMKPAMARLTLARKIAAITLIVWKKGAHFDGEQLKPQAA

SEQ ID NO: 281079 - protein, 392 aa, unidentified
MYIVGIDIGKNHHEASIVSPEGKQIGRSLRFATTHKGADSLMSFIFKNIGNSPCVFGMEATGHYWYPIYSFLKAKGYTICVINPIQSDSLRKMYIRQTKNDSIDSFLIAEVIRFGQFGTTSMADENILAMRQLCRYRDSVISSRTEIKLRIGTIMEQIFPEYEKQFSSLWMSTSMGILEKYLTPENIENAPIDELFEIIKDKSHNRLTKAKAISIKEAAADTFGIKIAQDAFSFQLKQLIDRMNFLDKQIEALDIEIMKYYEQFDCYLHTIPGIGIIGAATILAEIGDISRFKNSSALVAFAGIDPTVRQSGEFNSTHNHMSKRGSPYLRHAIFLAATTCSFHNSPLNAYYKKKRDQGKHHLTATGAVARKLTTVIYAVLRDSKPYEPKKFC

SEQ ID NO: 281080 - protein, 421 aa, unidentified
MRKADTRKVKFVKDGTLIVAIDVGMEMNRGYCTTPDGRDIKPFKFDNTREGMDKLWGMIMASKNRFQCDEIIIGYESTGPYGEPLVHYLMKKPVMLVQVNPMHTKRVKEINDNSPLKTDDKDPRVIADIIRWGHSLSIVIPEGDAAYLRRLNNSRERHVRERTALLNQLQQLVFVLFPEFKKVMKDIKCQTPIYILQKYPTPEAISVLDKDVLGAEMKKQSRGKFREQHADMLITLAQNTIGIREGVSGLSLDIRHILVQLEMLRNLIAEIEGEMEIALGRIAYSAKLLSIKGLGVVSVAGIIGEIGDFKKFQTQAEIMKLAGLDLYEISSGKWKGRRKISKRGRGLLRKILYYAAIQTIRRNGILHEYYTRLTDRGMKRMMALVAVSRKLLGIIYAIVRDDSEYSVNFESIKRQVIKKAA

SEQ ID NO: 281081 - protein, 339 aa, unidentified
MSDVVFDHYIAVDWSVKNMAIARMTKKSNKITAIDVPSDISELQVYLKNLEGSKILTIEETTTSQWLYTELKDYANKIIICDPTRNRLLDDGPKTDKIDATKLVQLLRAGLMKEVYHSADKFIYLRRIVSAYEDLVKAGVRLKNQRYSLLRVCGLKGNEEEDVKLGSSGEQYVLECLDRQIEAYEEEKKGYEREFKKLARKYPEIRYQISLPGIGAINAVKVVSRVVTPYRFADKGHYLSYCGLIKLDKVSGGRNYGKKNPRYCRQLKSVYKTGALAAIGGNNPINDYYEYLIKEKSCPAYNARHKAARRLAILSLGVFKSGRKYQPYDSRYRINKENN

SEQ ID NO: 281082 - protein, 333 aa, unidentified
MNQEKYIGRDVHAATISVAVKNAQGKLLMECVLETKAATILEFIQGLRGTLALSFEEGTSATWLHDLLKPHVSRLVVCDPRKNALLRDGNQNDRVDARNLAELLRTNQVKPVYHGNHGTRALKELGRSYLTLTRDSTRVMNRIKSVYRSWAIPCAGTSVYSARHRAAWLAQLVEPGVRIRAEHLYEQLDSLEPVRQAARRELLRESGKHAAVKLLRQIPAIGPIRSALLVALLQTPHRFRTKRQLWAYSGFAVQTYDSGEFRMVRGKLQRNRERITVRGLNRNHNHDLKNLLKGAAISAIHDYGRFVREEQIVGVKWRLHSKPLWLRREGFLV

SEQ ID NO: 281083 - protein, 348 aa, unidentified
MIVGIDVHKRSHVAALLDERGGEIGTLSFANSPEGMRRLCAWLDEHDAGEALVGVESPAGYGRLLVASLEAAGHEVLNVPAWRTHRERRRHGPGKTDPGDAIAVAQVVLSRRAELGPALEPELVRALALLELQRRRLVRDRTQATQRLRADWNQVDPVGEARVVNVTRQRELRRLKRINFGDGLVERVATRCIHDLARDIEDLNQRIATLDAQIAELLQEHGNPVGDLHGAGAQIAAAVIAHAGDVRRFRDAAAFARFCGAAPIPCGSGQTAGRHRLHRGGNRQLNAALYRIAIVQARHHPPARAYLARKIAEGKTPREARRALKRHLANVIYRRLYAWADATPALNT

SEQ ID NO: 281084 - protein, 413 aa, unidentified
MSYSIAGIDVHKKMLAVVVADVSKEGEWQFERRKFGTMPAELDRLHEWLTALEVKEAVMESTAQYWKPVWARLEGEFHLELAQAQSNRGPRGRKSDFADAERLVRRYAADELVLSFVPGPEQRLWRRLSRGKQELTGEKVRLQNRLEALLEEMHIKLSSLVSDLLGVSGRKMLQAVAEGETDAVKLAALADVNLRATPDELRDAFRAAATLDRRYRMVLQQYLDRLALIERHMEELETELARSLKEHEGAVTRLAQVPGLGVDSAQQIIAEVGPKAERFPSAGQLSSWVGTCPGQEESAEQSKSNRSPKGNRPMRRILNQAANAAAKSQGTVFEALYKRIKGRDPKQHNKAVWAVANHQSRVIWKILHDGVNYEERGNRTNIRAMKHRARRLARELRQLGYIVQPPPPQGASA

SEQ ID NO: 281085 - protein, 319 aa, unidentified
MAQNDLVVAGIDVAKDKVDVCLRAASLRRTFASTAEGRRELTAWFRRQKVGKAVMEASGGYEREWAKVLRNAGIEVRIVDPKRVRNFAQSAGQFAKNDTIDAEMIAWFAETFDEARSQACDAAREELVQIVNARQALLEQQTQMQNRSGHAVPIPVRKMHERLLNAITLEVAKLEAAIAALIKAGPHFAEVANIIESVPGLGKITSAGLIAAMPELGQVSNEAISALLGVAPYDDDSGKRRGERQIKGGRRKVRNLFYMACLGAATRHNPVLKAFYRRLIVKGKKPKVALIACMRKLIVILNIMIARGEKWDASRYVVA

SEQ ID NO: 281086 - protein, 342 aa, unidentified
MEEVTIIGIDLAKNVFQLHGAAADGSVIFRKKLTRLQFQRFMKALPPCTVAMEACPGSHYWAREMAKLGHTVKVISPQYVTPYVKRQKNDAADAEAIAEAATRPHMRFVEPKSAEQQARAVVFRVRQKAIAQRIELINALRSHLYEFGFIAPVGLQHLPKLIAVLEDETSDLPRPARTACRGILRQIESLGDEIAALDAQIAELSKESRWARLLQTMPGVGPITAMAIEAFAPPMETFRRGRDFAAWLGLVPRQSSSGGKARLGKVSKAGQHDIRRLLVVGAMAAMVGACRRGIPEDTWLGKLMLRKPRILVAIALANKMARRIWAMLTKGESYRDPALAAA

SEQ ID NO: 281087 - protein, 410 aa, unidentified
MEAMIERCAGLDVHQETVVACVLFGPLEKKPKTSIETFSTTTTGLLALSDWLATLQVSDVVMESTGVYWKPIWNILEGSFHLVLANARHVKNVPGRKTDVKDAEWLAKLLRCGLIESNFVPPEDIRDLRDLTRYRKKLIHHRTSEQNRIHKILQDANIKLTSVLSDIFGVSGRRILEAILNGEKIETDGLRKMVDWRTKASITDIASAINGRIRRHHRDMLRYHWEHMGYLEETIEELEKQIDQLLSPYRKEVELLDGIPGVNKAAAATFIAEMGVDMSVFKSAKHLASWAGVSPGNYESAGKKKTSKTTQGNKALKTMAVECVLATSRQNNRIASHRKRITKRQGKMKGRIASAHLLLTITYNILKTGEPYHELGSNYLEEKQNNKELKMIEYLKKKGYTIAPSEQQTA

SEQ ID NO: 281088 - protein, 370 aa, unidentified
MKQFSKYVGMDVHKATIAVSVAEAHGGEVRYLGEIENTVDAVAKLVRQLRKGDAQLSFCYEAGPCGYGLHRQLTELGWDCQVVAPSLIPRKAGDRVKTDRRDSLMLARLHRAGELTAVWVPDDAQEGLRDLTRAREDMKSLQLKAKQRLCAFLLRYGKSYPGKSNWTQAHFRWLEQMKFQPVQQIVFQEYVDTVKLLSKRVDAIDQQLEVAASASVFWPVIEGLMALRGVNLLTAVTIVAEIGDLQRFASAPQLMAYLGVVPSEHSSGATKSRGGITKTGNGHVRRVLVEAAWTYRHPARKTKHLERRAERTSDVVQEIAWKAQKRLCARYRLMEGKGKLKVQACTAVARELAGFIWAIGQALPQPSVNP

SEQ ID NO: 281089 - protein, 366 aa, unidentified
MLKHSDYTVGCDAHKHYSMFSVFDSQGKPLERTRVNHSRGAIEAFLRELPPGTPVALETVGNWYWIVDEIEAAGCIPLLAHAAKAKSMMGHVHKTDKLDADGLATLLYNGTLPTVWIPPGEIRDERELPRTRMFFSRWRAAIKNRIHSTLAKYALSLGTGSDIFAAKWRPPLLELLQQLPPETQRCMAQELELLRLVQTEIDALEERILQRVELTRTIQLVMSIPGPAKILSIVIDREVGSIDRFPSPKHLASYSGVVPRVSSSGGKTHYGRMIKQSNHNLKWAFIEAANVIVRHRHAANWRDKYVSRLFERIRQRKGHAVAVGAVARYLAEATYWVLTKNEPYREPAIPVRRQSPTSLKQGQARA

SEQ ID NO: 281090 - protein, 356 aa, unidentified
MELLAYSAGVDISADDFDACIEGVYDTRATKVIATRKFKNTAVGFKQFDKWLFRKAKQKTLLQVGMEATGRYHEGLAYYLFAAGYRISVILPNKIKHFAYSVNQYSKNDALDASLIAAYVSKHVPGAWQPISESMRDLRELSRERQALIKQRTQTKNRLKALKAGYAPLKKTVARLTEQVDFLNRQLKQVDAEMAQITERDETLSDNFNLLVSIPHIGAVSAYTIMAETDCFNLFVNRNQLIKYAGLDVIEKQSGSSVRGRTKISKRGNAHLRSAPYAGLNAIMRTQSVFVDTYTAALERGMHPKQARTAVVRQLLRVAFGVVKSGRPYCEANHRNRSAKEVGEHSGSPTVTDSVA

SEQ ID NO: 281091 - protein, 343 aa, unidentified
MQTVTTIGLDIAKSVFQLHGIDAAGSVVMRRQLKRRSMPAFFQKLPPCLIGIEACATSHHWSRELQALGHTVRLIPPAYVRPYVKRQKNDCTDAEAICEAVGRPHMRFVPTKTVEQQSGLVLHRTRSLLIRQQTSVINAIRAHLAEFGIVAPVGRNGLEALLKVVASEEDGRLPEIVRGCVAALALQLRALKAQILAFDRKMLEWHRSNELSKRLDEIPGVGPALATALVASIADPKSFRSGRDFSAWIGLVPKQHSSGGKPRLGGITKQGDRYLRSLFTAGALAVIRYAKIHGAKRRPWLAALLARRPTKVAAIALANKIARTAWALMVKGERYREPAALAA

SEQ ID NO: 281092 - protein, 374 aa, unidentified
MHKYIWVGLDVHKVTIAVAVAKGEEVPHSLGTIPNDPDAIAKLMRKLGPSARLRVCYEAGPCGYVLYRQLTAMGIDCAVVAPTLVPVRAGDRVKTDRRDALKLARLLRSGELTAVAVPDEAHEALRDLVRAREAAHKDLRRARHRLQKFLLRQGHRCPLRTKAWGVRYLAWVSGLRFAHAAQSVVHREYLAEVERLAERRTRLDRELEVALAQAPAAIQTVVRALQVLRGVAFVTAVTAVAEVGQFRRFTRARQLMAYSGLVPRESSSGDTVWRGAITKTGNAHLRRVLIEAAWQYRHQPRAGTTIRQRRKGQAAALCAIAEKADHRLHLRYRRLLARGKSKGKVVTAIGRELLGFLWAVAVHAENGSTMPAAA

SEQ ID NO: 281093 - protein, 413 aa, unidentified
MDLLYARCAGLDVHKATVVACVRRPGPRPDARHAETETFPTTLRGLAALAAWLTAHGVTHVAMESTGVYWRPVFAVLEGTVQVQLVNARHVKMLPGRKTDVRDCEWLAQLLECGLFRGSFIPPAAVRDLRDLTRLRKALIRDRGHHVNRIAKTLELANIKLGSVVTDLMGNTGRAILEALSLGIDDPDKLAACAQGLLRKKQAALREALVGRLTPHYAFLLQQHLSLIDALDVHIATLDARIAEAMAPFADAAALAQTMPGVAARAAQAILAETGMDMATFPTADNFASWARLCPGNNESAGKRRPTTTGKGATWLRATLQEAAWAAVKSKKSYYRALFHRLKARRGGPEKAIVAVQHAMLVALWHMLKHRVPHQDLGADYFTRRDTERTRRHHVRRLEKLGYQVLLVKEAAA

SEQ ID NO: 281094 - protein, 338 aa, unidentified
MRAYAGIDLHSSNNYIGIMDQDYKRLFARRLPNNLDNILRFLEPFKADLEGVVIESTYNWYWLVDGLQEHGYSVHLANPSAIKQYEGIKHTDDKWDSFWLAHMKHLNILPEGYIYPKEQRSVRDLLRRRLFFVRHRTANILSLQSTITRNLGIKISGNDIKKLQLDDANDLFDSSNLVFMAQNNISTIKHLRKIIKGIEKEVKSQVQLRKESVMLLTIPGIGLILALTIMLEAGDITRFFKVGNYASYCRCVSSKRLSNGKKKGENNKKNGNKYLAWAYVEAAHFAKRYNAKAQRFYQQKMAKANGAVATKALANKLARASYFIMRDQVPFDEDMLFR

SEQ ID NO: 281095 - protein, 476 aa, unidentified
MNPSYPYDLIIGLDRSDKKADLCLITTATGQRRSQTIDTAPEALWEWLLALRQKHPQARVGLCLEQPAVHLVAFLEAYDWITLYPINPITLQKYREAFVTSCAKDDAKDADYLADLLLTHHAKLKPWAPEDSATRAVQQLVFHRRAVVDERTGLTNRLIALLKQYFPQALVLCGEDLWRPLATRFLLKWSSLQAVQKVKPATLKTFYYLHGSRSAKLLEQRLALVQKAVPVTDETALIESFALRVQLICRQLQLVQQTLTHYEKQIVSAYAAHPDHEIFASLPGAGPVLGPRLLASIGSQRERFGAAAELQHYTGIAPVTKRSGGSCYIHRRYLCPKVPQAELPRVCQGKHSVEPMGGGVLFAAAYQGQSASDRGAGLGLQVAAGDLPLLAESHSLSGSHLRGGFEEKWQQLGVALRPRGIGQKSLQKSHERILKKPLTDYLRGELRHAGPNDVNPVKVRGPTGLYARAAELACPP

SEQ ID NO: 281096 - protein, 337 aa, unidentified
MKYSGVDLHSNNNVVVVSDEVDRVVCAKRLPNELGKVLELLEPYREELVGVVVESTYNWYWLVDGLQAAGYQVHLAHPAAIKRYEGLKRTGDESDAAHLAHLLRLGILHTGYICPVAQRRVRDLARRRLQLVRHRTMHVLAVENVQARETGSRMTADRIKRLDVQAVSALGYAGEVAMGVQANVAVIGALNEQIRALEKYIAQRVKLSCDYKVLMTAPGIANILATTIMLETGKVERFASVGHFSSYARCVDSVRLSNDKRKGEGNMRNGNTYLAWAFIEAANMAKRWCPEAKRFHERKRAKTNAIVATKALAHKLARACYHMLKTGQPFDMKRCFG

SEQ ID NO: 281097 - protein, 339 aa, unidentified
MNINTIGLDLAKSVFQAHGVDDTGKTVLVKKLHRKQMLPFFSKLAPCLIGVEACATAHHWARTLIAMGHDVRIMPPSYVKGYVKRGKSDALDAEAICEAVQRPTMRFVPVKTVEQQGILMAHRARSLLVRQRTMAANALRAHLAEFGFVANPGIANLAKLADRAFADEALPTYAHRALEILIRRITELTEEVGELDQELRIWHAENEASRRLAAIPGVGVITATAIAATVTDPDQFQSGRQFAAWLGLTPQQQSTGGKTRLGGISKQGDRYLRRLLVVGATAVMRHAKRNPTPITDWVNGLLEKKPFRLASVALANKLARIAWVVLTRGETYRPYGRPA

SEQ ID NO: 281098 - protein, 405 aa, unidentified
MFETEDVGVFLGLDVGRSAHHGHGLTPSGKKVFDKPLPNSEPKLRAVLDKLREKFGTVLVIVDQPASIGALPLTVARDTGCRVAYLPGLAMRRIADLYPGEAKTDAKDAAVIADAARTMPHTLRTLELTDEITAELTVLVGFDQDLAAEATRTSNRIRGLLTQFHPSLERVLGPRLDHQAVTWLLERHGSPASLRKAGRRRLVELIRPKAPRMAQRLIDDVFDALDEQTVVVPGTGTLDIVIPSLAASLTAVHTQRRALETQINTLLEAHPLSPVLTPMPGVGVRTAAVLLVTVGDGTSFPTAAHLASYAGLAPTTRQSGTSIHGEHAPRGGNRQLKRAMFLSAFACMNADPASRTYYDKQRACGKTHTQALLRLARQRISVLFAMLRDGTFYEPCTPKDVELAA

SEQ ID NO: 281099 - protein, 353 aa, unidentified
MHTHQKSSDPIASIGLDIGKNTFHLVGLDKRGAIAMRIKVSRHQLVRRLVNLPRCLIGLEAGSGSHHIARQINPLGHDVRLIPAQYVKPFLKGHKNDYRDAEAIAEAVQRPTMNFVAIKTPEQSDLLSLHRVRSRLVRHRTAIINQIRGFLIERGITVRQGPGPLRKVLPEVLSSPPQALSPRILRLIAELDQDWRYLDERLKALSAEILSLSENDPACQRLMTVPGIGPIISSAVVASIGIGSGFKQGRDFAAWLGLVPKQESTGGRTKLGRISKRGNKYLRTLFVQAAHVVLQRRPATAMRALWPWIEQASRRLTHRNLLAIALANKLARIAWAVLARGRHYDPRITPNAA

SEQ ID NO: 281100 - protein, 346 aa, unidentified
MKVLLKQTVGIDVAQKELVVSLGRMDEQINIEVYAYKVFPNTKKGFSSLVSWVNKQTSITTEVRYIMEATGVYHESLAYYLFSIKKQVSIVLPNKISNYARTLDIKTITDKSASQAISRFGLERQLEIWQPPLKIFNNLRQLCREREQLVHERTMLKNQLHAEHTSATSSESSVKRTKKRIALIDLQEKEIREEIAVLIKGDQALVEKIKIVSSIPGIGNLTAVTIIAETNGFELIKNKRQLVSYAGLDVREKTSGTSVKSKPRISKRGNRNLRKVMHFPALAAIRTDERFRDIFLRIVSRHGIKMKAIVAIQRKLLELTFILWKNNAFYDSGFNHDQVPSALIKA

SEQ ID NO: 281101 - protein, 344 aa, unidentified
MGVVVGVDSHKSSLAVAVLDDVGREIGNREFPNDAKGHASLTEWVTRHGSERVIGIEGSGNYGAGLARHLLERGEHVCEVPAFLSHRERKKRPSAGKSDAQDAVAIARVVACGEGLSSPQRSGAFADLKLLSDHRDQLIRSRTQLINRTHKDLVVSHPGYERRIPKLTSKKNLQAATTLLRGERSIRANLIRERIGDLRRLSERIAVVEKQIAAKVIECGTSLTQLHGIGFLMAAKILGEVGDPARLRSKASFAMFTGTAPLEASSGRTKRHRLNRGGNRQLNYALHMMAIARRRGNDDTKTYMARLRSEGKSEKEAMRCLKRQLSNVVFRQLLEETGTAARAA

SEQ ID NO: 281102 - protein, 335 aa, unidentified
MDLHKSTSSFCVMNKEGLILREQRIPTTVSEVTKFIHSLGKKQGISIAFEPVSQWYVYADLLEELGTDVHLAHPRKLKAIATSSSKTDKIDARVIADHLRTNHLPEAYHAPKEVRGWKELVRSRSALVKLRTETKNRIHAVLFKNGLESPFASLFTSRGIVWLKSLDMESHFKLSIEKYISVIEHLNTEIKEMEKAVREKVSETKEMKLIKSIPGIGDILSATIMAEIGDIRRFKSPKQLQAYAGIVPWVHNSGDKQWNGRITKIGSAWLRYAVIESVVGMARTKRSSDLKDYFLKVKERRNYQTATVATARKLLAIMWSVLRNDREFVARYPAI

SEQ ID NO: 281103 - protein, 337 aa, unidentified
MSTIHILGIDLGKHCFHAVGNNHTGKDVIRRKFSRSQLLRFLSVLEPTIIAFEACGGAHWLARKCEAYGHRVRLIPPQYVKPYVKGNKNDFIDAAAIAEAASRPSMRFVSAKSEEAQVIAAIHRVRDGYIKERTASMSRIGAILLEFGLSFPKGHAKMKALFQWLAEQDIKLPPSLVAELLSIHEHYKYLNEQVSTQDRKLKAITENNENAELLKSIPGIGDLTATLCVANISSPSNFGGGREMAAWLGLVPRQYSTGGKSKLLGMSKRGNKHLRALFIHGARSVLSRIETTGKVFGDWLVNLRATKPFNVVVVALANKLARIAWAVLYHRQAFKAV

SEQ ID NO: 281104 - protein, 342 aa, unidentified
MKITTVGLDLAKNVFHAVCFDEHSKEVKKRMLRRNQLRIFFTQLPPCKVGMEACASSHYWGRELKALGHEVKLIPAQHVKPYLLGNKNDFDDARAIAEALTRPQIQGVAIKTTEQQDIQATHRMRSQCLRDRTALCNSVRGLLAEYGVVLGKGISILRKSIHGLLEDAENGLSLIFRNLLARRYEQLVELDGHIDFFTHELEIQSRQDDACQRLQEIPGYGPIIASAFYSTVGNGEGYSRGRDVAASLGLVPGQHSTGGKNVLLGISKRGDGYLRGLLIHGARAVVIHASKKKDKLSQWINRIVAERGKNKAAVAVANKMARIGWAILRHNAHYQAALKATC

SEQ ID NO: 281105 - protein, 366 aa, unidentified
MKKISTMQVFGNEILKGQKLTIGLDLGDRWSFYCVLDEAGKILVEQKVATTPEAMKQTFGKIPRSLIAMETGTHSPWVSRLLTELGHELLVAHAQKVELITKSNRKDDRHDARTLARLARIDPELLGPVRHRSAQAQIHLTVIRARAELVSARTALVNAARGLVKSYGQRLPKCGTQQVSRELGAGLPAELREVLEPLLKEVESLNERIQEYDERMENIAKEEYPEVSLLKQVKGVGTQISLTYVLTIEDPYRFPKSRAVGCFLGLRPGRRNSGESEPQKGISKEGDRYLRTMMVQGAHYILGPFGEDSDLRRWGLKLAERGGKNAKKRAVVAVARKLAVLLHRLWVSGEVYEPLRNSQKAMRAVA

SEQ ID NO: 281106 - protein, 367 aa, unidentified
MSSVIYVGMDVHQDSFSLCALASSSGEIIRETRCSADVKNVVKFINHLPENESNQVTLGYEAGIWGYSLHNRLVELGYDCVILAPSTMYSNAKHQMVKNDHQDAQMIAHNLASGTYKVVYVPDQEDDEVKEFIRLIKAMKKELKQTKQRIRAFVLRNGFRFERTPWTGVYLEWLSQLQLPRIKKMVLDEYLVHYHESTDKIERLSRLLGDLSHQERYQEPISKLRCFKGIDTVAAMTIHVETSDFSRFPNARAYAAYLGLTPSEHSSGKNVSLGRITKQGNSTIRTTLVESAQGLVRGNPSKKSKKLKARQINQSGRVINYADRAVNRLHERYERMIHAGKPRNVAIIAVARELACFIWGMENGKIA

SEQ ID NO: 281107 - protein, 423 aa, unidentified
MSQNQPEIQYAAFLAIDWADQKHVWSLQEANSSTCERGEVDHMPEAVEAWVAQMSQRFAGRPIAVAVEQSRGALVFLLSKYEQLHIFPVPPAMTANLRKAFYSSGAKNDPSDADLLLDLLQRHREKLRRLSPDTEATRRIQNLVEERRKLVDEKTAQSNRLEAHLKIYYPQIPRWFGDVDSPLVCALLERWPTLEALQKARPDTLRSFFRKHHSRKEELIENRIKAIGEAMPALKDRAVVEAKVAVVKVSVQLIQVLHEGIEGLNRQIQEAAEAHPDFFIFDSLPGAGAVMAPRLLAAFGSQRERYQDAAEVQILSGIAPVSESSGKSSWVHFRFACSKFLRQSFHEWAALSIPQSQWARAYYELQCRRGKKHHAAVRALAFKWIRIIYRCWKEQVAYNENVYLAALAKHNSPLVAATKAVAL

SEQ ID NO: 281108 - protein, 338 aa, unidentified
MDHFVGIDLHSNNSYIAVIDTDNNRTFKKKARNNLSEIIKHLAPFKKQIKGIVVESTYNWYWLVDGLIDNGYKLHLANPSAIKQYEGLKHSDDITDAFHLANLLRLGILPEGYIYPKHERPLRDLLRKRIHLVHYRTALILSFQNLVARNLGSKMHVSTISKMTEEDLEDLFEDDYLILSAKASISTIHFLRSRIVQLEKVIAKAAKLKSEYKLLKTVPGIWNILAQMIMLETGPIERFKKVGNYASYCRCVQSNRLSNSKSKGKGNRKNGNKYLSWAYVEAANHALWNYEYVKKYHQRKTAKTNNVVAIKAIAHKLARACYYIIRDQKEFDPGKAFA

SEQ ID NO: 281109 - protein, 417 aa, unidentified
MERLYETCCGIDIHKQTAVACLITTGAQGQRTRETRTFATTTEALGELRDWLRAVGCTHVAIESTGVYWKPAFNVLEEHCTVIVVNAAHMKAVPGRKTDVADASWIADLLQHGLLRASFIPSRAQRELRDLTRTRTSLIDERSASVNRVQKVLEDANIKVAGAGVVTDIMGKSGRDILAALLEGVMSPTEMAELARGRMRSKREALEKALEGRMSTHHRMLIALHLEHIDLLDEQIERLSAEIAARLRPYEAELLRLETIPGVGRHIAEILAAEMGLNMEQFPSAGHLASWAGMCPGNHESAGKRKKGPVRKGNQALRRALNEAAQAAARTKKPGRTYLRGQYRRLVVRCGKKKAAVAVGHTILRIAYHLLKEEETYHEGVLVQLDERRRARVQQRALDQLRALGYEVTITPKEPAA

SEQ ID NO: 281110 - protein, 411 aa, unidentified
MEKVYDKCCGIDVHKKLIVACFRNGNKQEVRNFGATTRELLELADWLKEGGCEMVAMESTASYWKPLYNILESSDLNAMVVNAHHMKAVPGRKTDVKDAEWIADLLQHGLLQPSYIPAKDQRELRELVRYRKSLVGERGRELNRLQKMLEGANIKLSGTVSDINGKSARSILEYLITGASIDSEKYDEMYEQKVIAHNLKASKDQIIDDLNGVMTPLQRRMMKELLIHLDELNAHIKNLDDEIDNFMKPDEKKAVAVIEDVTGIGHTSAQAIISVIGTDMSRFPTDAHIASWAGLCPGNNESAGKRKSGKTMKGNALLRSTLVTCAHAATRNRGSYFYAQFTRISAHRGKKRAYVAVAHSMLVAIYHILKDGVVFKDLGADYYNQFNKERKINAYLKKLKALGWEASVVAA

SEQ ID NO: 281111 - protein, 343 aa, unidentified
MQITRIGLDLAKNVFEVHGVDAQDNAVLRKTLRREAVAQFFTELPPCVVGMEACSGAHYWAGVISDLGHEVRLISPQFVIPYVKSNKNDRNDAEAICEAVGRPSMRFVPPKSPKQLEIQAVHRIRQRLVSSRTRLVNQIRGLLAEHGVVIGRDISRLRRALGQIAEGKDMGLGDMIRDLASDVYQELAELDQRISSYNQRIRHLFRTDAMCQRIGQIEGIGPITATALVAAVGDRSCFKNGRQFAAWLGLVPKQRSSGGKARLFGISKRGDRYLRTLLIHGARAVLGKAGGKTDPRSQWIERMRERRPPNVVAVALANKNARIVWSVLSREEDYRPAQTASAI

SEQ ID NO: 281112 - protein, 454 aa, unidentified
MPKNMPSALKHVHLNAAGIDVGSESHFVAVPADRGEEPVREFGAFTCDLQALVRWLKECGIDTVVMESTGVYWIPLFELLEDEGLEVKLVDARNLKHVSARKSDVLDCQWLQQLHTYGLLKAAFRPDRQTAALRSYMRQRASHIQNASDHIRHMQKALDQMNIKLHKVVSDITGQTGMNILRAIVAGERSAKLLAKMRHNGCKNSEEMIAKSLEGTWQKEYLFELRQAIELYDFYQEKIAEIDEAMEIYLASFEDRGDAADYKPAPKNKQPRHNAPKFDLHKELHRISGVDLTSIDGINTLTAITLISEIGLDMSAWSTEGHFGSWLGLAPGTRITGGKKYRAISKRRPHRVAQALRLAARALHGSRSELGARHRKMRARLGPKSAMKATAYRLAKLVYRMLRYGMNYVDIGEEGYAERFKEKAVQALKKRARALDYNILPINEIERIVPVGVS

SEQ ID NO: 281113 - protein, 337 aa, unidentified
MESKLFMGCDIAQDSFTFCLRSDSEIICQGEVCNSLSSIKKWLSDLKKVQMLDLSRITFCMEHTGVYGLILMRTLHERSLGICIESAMNIKLSLGLQRGKNDKVDARRIAEYALRYTDRLKLWKPKRVVLQKLQVLNGMRARLIKARNILSRNIQETKFFMGKEEYIILKRGTQAALAGIEKDIKLADKQIADLINSDEILRNLSRLVTSVQGVGMVTCSALLVKTNEFQDFTEAKKFACTAGLAPFEHSSGKSIRGKTRVSHRAHKDLKTLLHMCAVGCISRKGEYRDYYERKVTAGKNKMLVINAIRNKIVHRIFAVVRDQVMYQKNYQYGLVMS

SEQ ID NO: 281114 - protein, 386 aa, unidentified
MQFAADSAVSFAAIRTDLAAIFVSLELSRSKWLVTSLSPGAGEKMSKFVVGGGDMPALLARLADLRRKAEARTGQSFRIISIQEAGLDGFWIHRVLEREGVESHIVDPASIATSRRLRRAKTDRIDGEALVRALLAHKRGEPRVCAMLRIPTPDEEDRRRVVRERKALINERVRHVNRIKGLLFSQGISEYEPLNRDRRQQLDTLQTGDGRPLPPALKAQVSREIDRLELLLEQIGGVEEARDTMLAVAKQSARAPALLLNLKGVGPEFAAVLWTEGLSRHFDNRRQVAAYAGLAPTPWQSGQISHDQGVSKAGNPRLRTTLIQVAWLWVRHQPTSALTAWFKARVIQNGGRQKKSAIVALARKLLVALWKYINAGVIIEGAVSRA

SEQ ID NO: 281115 - protein, 343 aa, unidentified
MKHHRTIVVADHHKSVFVCQVLDRHTGEVTRRQVAGSRSELEALLGSLERPALVYVEACRAWEWVSDLCEELRHEFRLVDPRRMPEIARSTKKTDRNDVEAMVRRLQIEGDLPRSYRATRQERERRRLSRRLADVRKGRRQVLIKIHAVIDSHGLPAKKAQFIKAEWRERMQAALSADSWLDLEVLLLQYDQLLTLGDRLEGRIAARFAEDRGYQRLQAIPGIGPAIAATIVAESSGIERFKSARQFAAYCGLVPRVRSSAGKAKHGHITRSGPRDLRWALGMAVMIGQFSKQPTPQVLMYRRKRKRRKPARVALCAAANKLARIVYVILARGEEYRPVGVAS

SEQ ID NO: 281116 - protein, 331 aa, unidentified
MFIGVDYHKHFSVTTTMDATGKIVDRRKIKNDAASLLAFAASLPENSRIALEATNGWYYFYEVMEDHCDQIVLAHPLKTRAIAEARIKTDTIDATILAHLLRTDLLPTSYIAPRDVRDAREVLRYRASLVSLRTSLKNKVHAILDKNGIRIEVSDIFGKKAVEGLRGLSVRECYRIEMDGYLRLMETLGVLLKEVDENIKKLVQMNADAALLLSIPGIGNYSALLIVSEIGDITRFPSAKKLCSYAGLVPCVYSSGGKTRYGSITKQGSKWLRWILIELSHHFINSSPRMKAFYGRIAYKHGKNTARVAVAREMLKIIYAMLTKRRTFIKG

SEQ ID NO: 281117 - protein, 418 aa, unidentified
MSLLPEQPFTAYVGIDWADTKHDICVQAPGSPRRESSCIAHRVAAIDEWANALHRRFGGPIAVALELAKGPIVAALQKYDFLVLFPINPATLAKYREAFQPSGAKNDPKDAELALDLLLHHPERFGPLRPQSAAMRTLVSLVERRRQLVDDQTRLTNRLCDTLKQYYPQALEWFDDRGTLLFCDFLDRWPTLRSVRQARTATLEAFFHAHHCRSARRISARIASIREAAPLTEDPAIIGPCRLHVLALAAQLRAVLTAIVQFEHEIAAVAPTLPDYTLFKNLPGAGAQLAPRLLAAFGEQRERFRSADELQKYVGIAPVTERSGKQSWVHWRLQCPKFLRQTFVEWAAQTIPRSFWAGAYYRQQRAKGSSHHIAVRALAFKWIRILYRCWQTRTPYNETVYLNVLRKRGSRLLGTLGT

SEQ ID NO: 281118 - protein, 467 aa, unidentified
MMSRRHLTRGQRQPRGMPVKAPAQRGAMENVNVNAAGIDIGATVNLVAVPEGRDSVTVRSFGTFTADLIALADWLRSCGVTTVAMESTGIYWIPLYELLESRGFEVLLAEPSQIKKVPGRKSDVLDCQWIQRLHSFGLLRGSFRPADVIVVLRSYLRQREMLVQGAAAHVQHMQKALELMNVKLTEVLDDITGLTGRQIIESILEGERDPVRLAKLRDPKCKHGEETIALALQGNWRDEHLFALRQGLELCRVYQQKLHELDQQIEAHLKSISAACVMPPEPLRPRPAGRRKKSRNEPVFDLRSLLHRLSAVDLTTINGIGPHAALQLISEIGTDMSHFPSVKHFCSWLCLCPGTNKTGGRIRSRSGKTRPSANRAARVLRLCAQSVIRADCALGAFGRRLKARLGAPKAVTAVAHKLAKLVYELLSTGRPYTDQGAASYEQRFRDHQLQRLTKQALKIGYTLQPAT

SEQ ID NO: 281119 - protein, 391 aa, unidentified
MIYIGIDVAKDKHDCFITNSDSEVLFKAFTIANNLDGFNDLYQKIESVMDDVTKVKVGLEATGHYSYNLLGYLIDKGLPTYVINPLHTNLYRKSLSLRQTKTDKVDARTIASMLMSDVNLKSYSDTSYHNEELKSLTRYRFDKVKERAKLKTSVSRLVCILFPELEKLVPTLHIASVYALLSEFPSAKHVATAHLTRLTNLLSESSKGRYGKDTAITFRDAARASIGSNMPAKSLELKHTIKLIQELDSEIDEIENEIKIIMDEINSPILSIPGINYRMGAMIIAEIGDFNRFDSPDKILAYAGFSPSTYQSGQLDGAYAHMEKRGSKYLRYALYNATKYVCHWDPTFAAYLAKKRAEGKHYNVAISHAVKKLVRVIYHLEKTKQQYIKAA

SEQ ID NO: 281120 - protein, 353 aa, unidentified
MDKITRVGVDLAKNVMQIHAVDGAGRVVVRKAIARERFVSWFANLEPCLVAMEACGAAHYWARKLRALGHDVRLIPPQFVAPYRKGGVHVKNDALDAEATCEAASRPHMRFVPVKSPAQQSVLVLHRMRTGYVEERTALVNRLRGLLAEFGVFVPQGIGQLRKHFVDRVEDGNNELAGSARQALMRGWAQWQALDEEIAWFDRQIAEHASHDPQAQRCLDVCGVGRLTASAAVATVVDAQQFKNGRQLAAWLGLVPRQKSSGGKQRLGRITKQGDDYLRTLLFQGARSAVVTAHRRHDRLSRWIVQLQARVGYYKTLVAVANKHARILWAVLAKGERFDPSYAPARTRMAAGA

SEQ ID NO: 281121 - protein, 348 aa, unidentified
MLIIGCDYHPGFQQIAFVDTETGELGERRLTHREEAEQFYGTLKERGVRVGMEASGHARWFERLLRELQFELWIGDAAEIRTKRVRKQKTDRQDAQLLLRLMMEDRFPRIWVADAENRDLRQLLWHRHRLVQMRTRVMNQLHVVALNEGLRRKKALWRPAGRNELESLILAPWASRRRQDLLDLLDQLTPKIQELTRALEQEVEKRPVTRRLMTHPGVGPLTALAFELVIGTPERFHCGKQIASYVGLVPSEESSGDRRRLGHISKQGNALLRFLLVEAVQVTVRSHPQWRNKFFHLAMRRGRKIAKVAMARKLAVHLYWMWREGRDYEQGKKFGSHVGELGNRHGVQ

SEQ ID NO: 281122 - protein, 432 aa, unidentified
MFGCDAGEGVVLEEDPQVEEIVARVAALDIGKAELVCCVRVPHEGKPGRRLQEVATYSTMTRSLLAMSDHLRCLGVSRVVMEATSDYWKPVFYLLEAQGLDPWLVNAKDVKHLPGRPKTDKLDAVWLCKVAERQMIRPSFVPPPAVRQLRDVTRYRIDLVGARTAEKQRVEKLLEDAQIKLSVVASDIFGISGRQMMAALIGGQTNPKALAQLARGRLRAKLEALEEAFTGHFTDHHAFLLATMLARIDALDADIAALEAKIQEMIAPFAAAVDKLDEIPGVGATGAHIILAEIGLDMSRFPTAAHLSSWARFAPGVKESAGRKKGSGTTGHGNRYLARVLGEAAVAASKTNTFLGERYRRIAKRRGKKRAIVAVGRSILVIIWHLLSNPAARFIDLGSDFYENRTGPDRKKRNHIRQLEALGYKVTLEPAA

SEQ ID NO: 281123 - protein, 345 aa, unidentified
MQPMYYIGLDVHKQKISYCVKDSSGKIYAEGWTPATRFDLDRWMKTLPQPWSAALEATMFSGWIYDHLKPHAAELKVAHPLMLRAIAAAKKKNDRIDANKICDCLRCDFLPECYMAPTAIRERRRTLRYRNLLVRQMVQLKIKISTLLMEAGVSYNQQKLHKAGYFRELLASNPDIDESLRQLLRQCREMVVRLGKMESALIHSLQQDRVLVERVERLMSIPAIGPITALTWALEIGEVQRISSIKKAISYCGLCGDEQRSANTAQRTPLSKQRNKHLQTTLIEAAKMAPRYSPTLALLYDREKQKGNANRATLAVARKLVAYLMAVDRGQTHFLVLDRATCAVA

SEQ ID NO: 281124 - protein, 322 aa, unidentified
MTQETRFVGLDVGKLEIYAFDAGRDAEIIVTNTGSGHLALADWLGDPNDIVIALESTGGYEWMVWQNLNDAGFDARQVSAAHVRSFSRASGALAKTDPIDARLIARFIAFRPTAGRKPPAYKVREINRLNVKRRQLVEMRKRLRCQVKQRHSPQLDEMDTDLLDLLTQQIADLEGLIETAISSCQELSNRAKILRTIPGIGPVLMANLIGDLPELGHCSDKQIAALAGLAPINNDSGKMAGKRAIKGGRYAIRGLFYQAALVASNHNPVLRIFAKRLREKGKPHKVVLIAVARKLLIIANVLVAKKCGLGAKLNTVATGCRR

SEQ ID NO: 281125 - protein, 352 aa, unidentified
MEIIALDAHKRYSQVCVQQQNGQILCEKKISHSKGQIRQFLSKWTAGSHVAVETVGNWYWIVDEIEQAGMRPQLVHAHKAKLMLGTINKTDKLDARGLNLLQRTGTLPTVWIPPGEVRDHRELPRTRMVFANLRTRLKNRIHSVFDKYGLHTEFDGISDIFGRKGRERMLLSIKQLPPETRYTVCALLRELDMVESQIQRIEKRMKKVFLQTEPVRRLMTLPGIGFILAVAVANEIGDISRFATAENLAGYSGTVPRVHSSGGKTRYGKLRNDVNHYLKWAFSEAGNSIAVNHKRFPGRHVSCLYERVRSKRGHAKAVGAVGRHLAEASFWMLSRNQDYREPKVRSVSLTVA

SEQ ID NO: 281126 - protein, 414 aa, unidentified
MDVLYPRCAGLDVHSVVAGVRLAGDRPSRTDVRTFNTTTPGLLALSAWLAEQGCTHVAMEATGVYWKPVWHILSDGEFTLILANAAHVKNVPGRKTDVADALWLSDLLAHGLIRPSFVPEAPTQELRALLRTRKQLVREQASHVQRLQKTLEDANLKLGSVLTQIMGVSGRAILQALIHGERDPHKLFTLVQRGVKARPEKLHAALQGRVTERHRFLLRLHLRQFDALDAAISEIDAEVDRDLDPFRQAVRQLRTIPGVSDLTAQVIVSEIGTDMTRFPTAGHLISWAGLCPRSDESAGKRRSTRLRKGAPWLKTTLVQCAWAAARKKASYLQAQFQRLRHRRGPKKAICAVAASILTAVYHMLGDGTLYQDLGADHFRRASPENQANRLVRQIAKLGFTCTIQPAQHQQAVSV

SEQ ID NO: 281127 - protein, 387 aa, unidentified
MPQSNDLSRSLTAFAQDNTIIAVVELGLRSWLVAGIVPGIDRHPLKKLKADEQALLRLLQRWRDEATKAGCVITRIAVAFETGRDGFWLARWLKAQGIEAYVIHATSIAVSREHRRAKTDRLDTDHLKRAFIGWLRGEPDHCHMAAIPTIEQEDAKRPTRERENLVGERTRIINRIKGCLARFGIRGFKSTLRKAAERLAVLKTPEGVLLPPNTLAELRRDIARLRFVMDQIKVIEVARLERLKKAPKEGPHAMVCLLARVIGVGIETADMLVHEVLSRNLRDRRAVARYAGLTGSPDESGKRRREKGLARAGNARVRRGMIQLAWRFLMFQKDSALSQWYRTQTADARRGTRKTMIVGLARKLLIALWRLVTSGEIPIGVALRPAA

SEQ ID NO: 281128 - protein, 380 aa, unidentified
MSTVTTRSEEPARTLHLAFDLGNRVWKLAFATSVAHAPRLRTMAARDLAQLDTEIAAAKARFGLAPDAPVVSCDEAGRDGFWLHRALAARGLTSHVVDSASITENRRARRAKSDRLDATALARLLVRHHGGERGVWSVLHVPSVEEEDRRHLHRELFTLTRQRTRQVNRIKGLLALHGIVLAKPRGLPARQPELCDWCGAPLPPALAARVTREWTRLRAIQRDVVALRAARRAMLARPEAATDPLLRQVEQLRALRGIGEVSAWLYATEFFSWRAFRNRRQVAGLAGLTPTMRSSGDLEREQGISKAGNARVRGLAVELAWSWVRRQPASALTRWYRARFAAGGGRRRRIGIVAVARKLLIALWRYLETGVVPEGAVLKA

SEQ ID NO: 281129 - protein, 331 aa, unidentified
MNTQNEQDEHEQTGTNDQACYVGIDVSKATLDVAVRPSGAAWQSANEEAGIAALVTRLVPLAPRLIVLEATGGLERMVVAALALAELPVVVANPRQVRDFAKATGRLAKTDAVDAAVLAHFAQALQPTPHPLPDAQSQALAALVERRRQLVNMLTAEKNRLQQALPAVHAKIAAHIAWLEQALSDVDGELDQMLQASPLWRERDQLQRSVPGVGPAVSRTLLAHLPELGQGSVKHLATLVGLAPLNRDSGAWRGSRAIWGGRQQVRAALYMAALVGVRHNPLLHAFYERLVARGKPKKVALTACMHKLLTILHAVLRTRTPWSPGHAAMLT

SEQ ID NO: 281130 - protein, 412 aa, unidentified
MSHGHVMWVSREAAFRSTDDWKDITMPSAISPPKAVLGIDVGKSSHWACLVTREGEVALNRRVRNSEGDLDGLFSQVACDTIVVVDQCRNIGLLAISRARLAGLGVAYLPGLAAHQAARLFAGDAKTNERDALVIAKTARGIPDALLPVPEPDEALEAARSLAAQRSHMVTCATRDKNRLRSILLESCPAFEALADLGDRRWLNMLEKLGGPWGCIDAGKPAFGAVTKGANRARMDAAWNAAMASTRPSKRRVDAENPQARMLARRIREALEEADGIDREIAALPAGDGTYECLVTIPGIGPRTASELVIGINIEDFPDHDHLASYCGIAPRNRRSGTSISSASASRQGNRRLKNLLIFSCNSLVRSENRFGEYYRACRGRGMCHGEALKAVARKRLKVIYAIMRDKVPYSA

SEQ ID NO: 281131 - protein, 403 aa, unidentified
MNNVAGIDVSKGKSMVSVLRPFGEVVAKPFSVGHTGSELKELADYLKSLDGETRVVMEHTGRYYEPVARFLHEEGVFVSAVNPKLIKDYGNNTLRKVKTDKADSRKIARYGIDNWAELRQHTPMDTIRMQLKTLNRQQSLYTKTKTMMKNNLIALLDQTYPGVNALFDSPVREDGSQKWVDFATTFWHVDCVRNMSLTAFAERYRKWCKRHGYNFRQSKAVEVHTGAQDLIAMLPKDALTKTMVRQAIDALNAVSASLERLKAEMQALAAQLPEYTVVMAMHGVGDSLGPQLIAELGDVTRFTHRNAITAFAGVDPGADQSGTHEAKSTRVSKSGPPELRRALFLVMDCLLKTMPQDDPVYRFMDKKRAEGKPYLVYMTAGANKFLRIYYGRVKEYLASLEGN

SEQ ID NO: 281132 - protein, 349 aa, unidentified
MVVVGADVHKRAHTFVAVDQVGRELGCQTFPATTPGRRDAVRWARLKFGDELSWAIEDCRHLSARLERDLLTAGQQVVRAPPKMMAEQRRVARTRGKSDPIDALAVARALLRQPDLAVASHDETSRELKLLVDRRETLVRQRTSTINSLLWRVHELDPSWAPPARSLDLAKQQQLLMSTLADVPGIVAELARDELGDIVELTVRINVLEKRISGVTAKAAPSLLELPGVGVLTAATLVGESAGIGRFKSEAAFARHAGIAPIPVWSGDTAGRVRLTRSGNRQLNAAIHRIAVTQIRMDGLGKAYYEKKKTEGMSTPEALRCLKRRPARVVFNHLTTDHAAARTDLAAAA

SEQ ID NO: 281133 - protein, 425 aa, unidentified
MSEKIVVGIDVSKAFSDICILSPNNDIIKRLKISNDINGMKSLIYVLEKVEDEYEDSAVIIMEATAHYHQILANFFRKHNYEVIVINPIQSGALKNINIRKIKSDKTDAYNIALLYRIKNYNETITHSDTVNSIKKLCRQHKELTDEIVEHINRLIAFLDISFPDFKKVFTDLQGKTPLSLLEKYPTIQEVLSPENKQDIIQLIKENSHKSNSYAEAKYEKLVKAAEKSIEVWIVSLSSAGLIQTTVRVIFSLQEALKAIDDEIKRLSLLDEKFHKEIVLLQSIPGVGEYTACVVLSELGDISNFSKPKELVAFFGLDPGVSQSGTYNRKNNKISKRGSPHVRSILHMLAKSNVYPNRNREYLNPVMRAYFEKKIAEKPYKVVMCAIMRKMVQIIFAVLRNQKSFELRTPEEHQKLIREKSKLVA

SEQ ID NO: 281134 - protein, 343 aa, unidentified
MDQYIGLDVSLKDTAISIREDGKRIWRGKCPSDPKLLAEMIRKHAPHARRVVFETGPLSTWFYHALTAEGMPAICIEARHAQKVLDETLNKTDANDADGLAQLAEAGFYKVVRVKSFDSMLTRTLVGARNQLLNISTQLSNQIRGLMKTFGLIVPKGTGRVFDGNVRELLAGNNDLARIILPLLEAWRDIRKRAADLDRQLLAVARQNQSTKLLMTIPGIGAVTAVSYIAAIEDPENFRTSRSVGAWLGLTTRRYQSGEVDYNGHISRRGDNHLRGLLYEAATVLLTRASVRTESSLKTWGLKLRERLGFKRAAVAVARKLAVIMHSMLRTGEVFNASVGATA

SEQ ID NO: 281135 - protein, 406 aa, unidentified
MEVIYPRCAGLDVHKQTVVACVRIAGDGPPLQEVRTFATTTSGLLALADWLDSCGVEHVGMEATGVYWKPVWHVLEGHFELVLANAAHVKNVPGRKTDVNDAMWLADLLAHGLIRASFVPPVVVQELRTLTRTRKQFVRERAAHVQRIDKVLEDANLKLSVVLSDILGKSGRAVLQAIIDGQTDPERLLSCIGRVKASRAELLEALRGHVSAHHRFMLKLHLGHIDALDQAIAAIEKEVGAGLEPFRQAAKLLSTMPGLSTISAHVVVAEIGIDMSRFATPGHLLSWACMCPRNDESAGKPRSTRLRRGGKWLKTTLVQAAWSAVKVKGSYLQAQFHRLRARRGAKKAIIAVAASMLTAAWHMLRDGTEWHDLGAAHFDRADAQKTANRLIRRLQQIGYTVQVTPA

SEQ ID NO: 281136 - protein, 466 aa, unidentified
MTTGNKLWRNRKERKDWARRLRSEDPGLEVVHPHAAGIDVGNSAHYVAVRPDRDPEPVRRFECFTTDLYRLAEWLASCGVKTVALQSTGVYWIPLYEILEDRGFEVYLVNARHTKNLPGRKSDVQESQWLLKLHTYGLLNNSFQPPAEIRVLRTYWRQRAEHVSGAATCIQRMQKALTQMNLQLANVISDLSGVTGQAIVRAIVAGERNPQKLAELSDPRIEASREEVAKSLEGNWRPELVFVLRQEVEMYDAYQRRIAECDQQLQKHLASFADTELPQSPKAESKEKRAKSTKNAPRFDLSSELKRITGVDLTRIDGIDVMVAQTLLSEVGMDMSRWNTEAHFSSWLGLCPDNRISGDKLLGKGTRHVVNRAATALRLAARNLIRSRSYLGAQYRRLRTKLGAPKAITAMAHRLARLVYRMLKYGQQYVDKGTEYYENRYRQQQIHLLQKNAAKLGLQITVAAQS

SEQ ID NO: 281137 - protein, 322 aa, unidentified
MPQEARIVGIDVSKLKVDACIRSLRQRLSQPSTPQGEAALIAWLRQNRVGLAVMEANGGYERGWAEALRKAGIAVRVVDPKRVRYFAKSAGRLAKNDPIDAEMIAWFGETFSPQAEPIHDPERLALDQLVTARRRLVGLATQLAQLAEHRQPPVVEQAQRAIARTIKTHLARVESAIDAKIGANPGFVARAAIVRSVPGLGPHFAAGAIAWLPELGRISNKAAAALVGVAPYDDDSGGHQGERRINGGRREIRDLLYMATLAAAGRHNPVIKAYYQRLRAKGKKAKVALVACMRKLIVILNTMLARGQSWNPPALIVGAALA

SEQ ID NO: 281138 - protein, 339 aa, unidentified
MTAHRTIVIADHHKSIFVCQILDRETGAVERRTLQSSRSVLEPFLRALEGPVLVFIEACRSWEWVGDLCEELGCDFRLIDPRQMPEISKSRKKTDQADVEAMVRRFLVQGDLPRAYNATRSERELRGLTRQLSKLRQARRDLLLQIHAEIDAHGLPSAKKYFHDLLWRRQMEAKLSEDCWLILLSLLQRLDFIDVQRELFDSRIQTRVAGLETYRRLQTVPGIGPIIAATIVAEVPNMKRFGSARQFASYCGLVPSVRSSAGKARMGSITKSGPRDLRWALGHAVFVGRNSDAVHLCRRKKAQKKAWKAALCAGANKLARIIWAMCVHETDYESRLKLA

SEQ ID NO: 281139 - protein, 353 aa, unidentified
MNNSRNKAEVILGVDTHLDTHVGVLLNAQGHLLGCLMVTTNISGYERLVTWANSFGCLKRAGVEGTGTYGAGLACVLRKHGVEVFEVNRPDRSKRRLQGKSDPTDAENAARSVLSGSATAIAKTQSGAAEMMRVVSVARRSAVKAKTQAMNQLRTLLVSAPQDVRERLWKSKPADCAKGCARVRSLGSTEFLHTLTTTLCLLAKRWLLLADEVEKLDAMLDALTHQHARRLREQFGVGPQTAAVLLSTAGNNPERLRNEASLAALCGVNPLPASSGKTVRHRLNRGGNRAANNALWTITMVRMRGGPQTQSYVARRSAQGLSSKEILRCLKRYIVRELYPLILADLADSARAC

SEQ ID NO: 281140 - protein, 333 aa, unidentified
MPNPAVIGLDIAKNVFQVHGADAEGRCVLRRRLRRAEVITFFARLPKALVGIEACPSGHHWARELRSLGHDVRLIPPQYVRPFVKTNKNDAADAEGICEAVVRPNMRFVPIKSVAQQAAMMLHRTRALLLRQRTQLINAVRGHLAEFGLVARRGARNIRELAELVRDTGSDKLPDAARAMLVLLLEQIREAQLRVQKTEHALEAWAKQSDACRRLMTIPGVGIMSATAIVLAMDDPKRFRSGRHFAAWLGLVPRQSSSGERQVFGRISKRGDGYVRTLLIHGTRSLTRWLVGLPMRRPTNIAAVAIANKTARTAWAILAYGHQFQPTRRAEAA

SEQ ID NO: 281141 - protein, 337 aa, unidentified
MDRQYVGIDFHRRRSVIVRLSATGEKRSSVRVANDPLAIAAAVAEAGPDPEVVIEATYGWYWVVDLLQANGARVHLANPQGLNWGQRRVKNDERDAVDLADMLRLGRLPEAWIAPPEVRELRELVRYRAKLVGLRSGLKAQVHAVMAKEGVLPAQGRMFGPAGNAQLDGMAMADSFTTRVASLRDLIERYDREVTMLEGQIHHQLRHHHGYQAIQAIDGVGRTIAAVLVAEIGDVGRFRSAQALCSWAGLTPKHRESDTKTTRGSITKQGSRLVRWALIEAVSRYHGGPRLAGDFRRIAERRGTNKARVAVARKVLTLVYYGLRDGQIRCLAQAPAA

SEQ ID NO: 281142 - protein, 330 aa, unidentified
MNVHPQGREAVAAPRANAGIDVSKDWLDVAWADRTERFANDAAGMESLTVLLGQQEVDLIVLEASGGYEKAAAAALQAAGLAVAVVNPRQARDFAKAMGVLAKTDKVDAKVLRSFADVLARHEKRSQFLHEVPDEKRAELAALVTRRRQLVEMRTMEVQRMAMTHAKRARKSLNNVILFLDQQLAEIDRELDQFTKDHFQDLRKLLSSAKGIGPVATSTLLAALPEIGQLDRRAIGALVGVVPLARDSGKRHGKRCCWGGRSQVRHVLYMATVTAITHNPVIRAFHQRLVAKGKPPKVALVACLRKLLTILNAMVRDGTAWNPALHVKTA

SEQ ID NO: 281143 - protein, 351 aa, unidentified
MLTVGLDVHQSCSSLCVLDEKGNRVREQEVRGGWDHVVEELGKFQEPFQICYEASTGYGALYERLTPLAKKVAVAHPGKLRLIFQSKKKSNRVDASKLASLMHLNQVPAVHVPSQEVRSWRGLIEHRRRLVDKRVMVKNQIRALMRGYGIKGAHGANLWTKAGVKWLRELPWPTTLEKLRLEVMLEELTDLQKKERQVTEALDKLGSQHSGVGLLQTIPGVGRRTAEAFVAYVDDPHRFRSGKIGSYFGLVPREDSTGTHRHLGHVTREGPSTVRKLLTEAAWRGSQSDEVIKAVYERLLRGDKGRRKLAVVALGHWLCRVMLAMLKTGEVFRGSSASSSATPEAESKVTL

SEQ ID NO: 281144 - protein, 403 aa, unidentified
MTSHSYFAGIDWASQAHSVCVLDAAGRVELRLDLPHNKEGIERLIRQLRSFAGIVIVIERPSGLLVDALVEAGLRVVPIHPNVLKASRPRYRGAGKSDPADAYMLADILRTDGHRFRGLEPQSDEIRALRALVRTRDDLVASRVALANQLTSLLESFWPGAAEIFADIDSPIALAFLARYPTPQSAAHLGEKRLASFLAQHSYCGRRPATVLLERLRSAPAGYTGKLEAEAKGELARSLASILERLVGELAKLTARIEHTVANLADGQIIMSFPRSGRICAAQILAELGNVRERFPNEAQLAAEAGVSPVTYESGKHRSVVFRFACNHRLRRALTCLADQTRHAHPWAADVYHRARSRGCDHTHAVRILARAWVRVMWRAWYTRSPYQPHLHRSAAAFNATTG

SEQ ID NO: 281145 - protein, 363 aa, unidentified
MTSMTPATGPVTGGVDTHGQTHHAAVLDHVGRQLGDREFPTTPAGYRALGLWLSRHGQLERVGVEGTGTYGAGLARYLCGTGVTVVEVDRPDRKARRAKGKSDPLDAYAAARAALSGTASGCPKTRDGRVEAIRALRVARSGAVKARSQATNQLKALLVTAPAELREQHRQLSTTALIATCARLRPTGDIGDPEQATKTALRRLARRHQHLSEEIAEADTELKALVSATAPGLLALPGVGTEVAGQLLTTVGDNPDRLRSEAAFAHLCGVAPIPASSGRTHRHRLNRGGDRAANNALYIVVLGRLRYDARTRAYADRRTKQGLSKPEIIRCLKRYVARQMFTALTARAVESPPATTSTLSTAA

SEQ ID NO: 281146 - protein, 435 aa, unidentified
MEEVEDEPLFCDRVAGIDIGKATVMVTIRVPSDARKGGRQQETREFGTTRRELLALADWLRCWQVEKAGMESTSDYWKPVYFLLEREGFDCTLYQASQVKALPGRPKTDKLDSAWLAKVTERGSLAGSFVPPEEIRRLRTHTRYRRKLVQMRTAQKERCEKLLEDAHLKLSSVISDIHGVSGRDMLRAVAAGERDPKVLAEMARGVMRGKIRRLEEALDCSFFTEEHAFILTMMLDSIDQLTAQAEVLDEKIAAMCEPYERQVAQLDAIPGFGVTTAQDLIAEIGVDMSVFPTAGHLASWARQAPRVAESAGKRKGRNATGRGNPYIGGTLGEASVSVGRTQTFLGAKYRRLNTHMPKKKAQVAIMRTQLVIAHALLSDPAAEYQDLGPDYYERRADTRRRARGHARALERLGYKVTIEAPDPETGEYLPIATAS

SEQ ID NO: 281147 - protein, 400 aa, unidentified
MSGLKGNVDCIVGIDVSKDKFDACGITGEEKKLFQFSATMDRKGFEKLKGHLAVVSASSVLIGMESTASYHVNLFSYLVSEGYRVIIINPLLISNYVKMQLRKTKTDKKDAVVIALFLLANGNTLIQRVTPSLISDLRDLARQRESLVDEMTALKIEIKRLLNITFPELEHMVGVFTKSILKLLQQYPSAFALRDADLGNLSQTLIADSYGHKRESFAAELIKTSRASVGSHSPAKEVILKQKIALLLHLEDALQEITDMLIEISRKLMEEDMNIMTSIKGIRDKTAAHFLIEMGGDINQYECSGKIIAMAGLDPAVYQSGKHEGKGRITKRGNRHLRRIIWLMTTSVIQYSDLFKVYYLKRRKEGLPYKKAVLATAHKLIRVIYAMLTQRTTFCPQANL

SEQ ID NO: 281148 - protein, 349 aa, unidentified
MQYYIGLDLHRKYTEACVIDQEGDILMRNRLYHEDEQEVADFFEQLPKDTSVAMEATIGWPWISDLLESFGFDVHLAHPLKLRLIAEARLKTDKVDAWVLAHLLRIGFLPESYLAPSHVRDQRNLLRHRESMKKIRGTIKNRVHGLLAYHNIHPKESDIFGKAGMEMLHNLELDPHSRHILDDMLDHIEYSNKEIKKLERYLRKTLARDPRVGWLRTLPGIDYLSAYYIIAEIGDISRFLTPEKLISYIALCPTTQSSGGKTWHGPPEGGRKLLKWVLVEAAHTAVKRDSYFATIFHQKKRKKGKHSAYFIVAHKMAKIIWHMLTEERPYKVRKKQTQVGSRLNMAVAQ

SEQ ID NO: 281149 - protein, 371 aa, unidentified
MRKSTRERSEMPAMNKIDASERARITTLGIDVGDRTSRYAGVDAQGELISEGSVATRESALHALLSQLATGTRVVIEVGIHSPWISRSLHQKGFKVTVANTRSLKLISGSTRKSDRRDARVLATIGQSAPQLLDPVEHQSEQVQQDRAVLRARDCMVRARARLITQTRGIVKSIGGRIKRCSADAFAGRATEQIPENLHPALDPVLIEIDRLTVQIHAYDQVVEKLAATYPGCGAVSAIKGVGPVTALAFVLAIGDPHRFPSSRRTGPYFGLTPRRHDSGDSAPQLRITKAGDPFVRRLLVGGAHYILGPFGPDCDLRRYGLILAARGGKNAKKRAVVAVARKLAVLMHKLWVSGIAYDPLFNATRIQAAA

SEQ ID NO: 281150 - protein, 348 aa, unidentified
MNAVHYIGFDVHKKSISFCIKTAAGEIVEEGVVAAQRGTLQQWASARRQPWRGALEATLFSGWIYDTLQPYSEQLEMAHPAKMKAISAGKKKSDTLDARTIADLVRCNLLPACYVAAPRIRELRRLLRYRSLVLSEAVRMKNKMAGLLMETGALYVKEKLHRKKYFASLLEGLEEVPESVIDLLRLSRGALEMFESTQKRLIRELLAAPELAQRVERLQSIPAVGEITALTWALEIGNPHRFRSGSDAMSYCGLTAALKSSAGKQQRGPLSKQRNHWLQSTLIEAAKLAPRWNPQLAALQARELERGHRNRATLAVARKLVAYLLAVDKSGQVFQARAPLEGPRQKAA

SEQ ID NO: 281151 - protein, 412 aa, unidentified
MDRLYDCCCGLDVHKQTVVACLIRPTPGVGQTKTIRTFGTTTEELDALADWLAEAGCTQVAMESTGVYWKPVYNRLDGRFTVTVANAQHIKTMPGRKTDVKDCEWIADLLQHGLVTASFIPDQGQRDLRDLTRTRTTLVDERSRSIQRLQKVLEDANIKLAGVASDIMGVSARQMLDALVAGTSDPATMAELAKGRLRKKRAALERALTGHLRDHHRALIAMHLEHIDFLEEQIEQLSHQIAELLLPFEAELRRLETIPGIKRRIAEVIAAEIGLDMSHFPTAGHLASWAGMCPGNHESAGKRKTGKTRKGSKWLRRALVQAAQAAARKKSCYPSIQYRRLIVRGGPKKALVAVGHTLLITIYYLLTRKEDYHDLSPLQLNEDLRAHAQKRAMQQLEAMGFEVTLSPKPVAA

SEQ ID NO: 281152 - protein, 342 aa, unidentified
MDHFAGLDVSVKETSVCIVDDTGKIVREVKVVSEPDALLAVLKNPAYRFKRIGLEAGPLSQWLFSTLAEAGLPVICVETRHMQAVLQAQINKTDRNDARGIAQMMRVGLYRPVHVKTLRSQKLRMLLTHRKLLQSKAIAIENDLRGTLRNFGLKVGMVGKVKFEARIKELVENLPDLAALVEPLLIVRRVLREQIIILHRRLLAIVRDDEVCRRLMTTPGVGPVVALTYRATVDVPVRFRKSKAVGAVFGLTCSKYQSGEIDRSGRISRCGDEMMRVMLYEAAQSMLRSKKWSWLKAWAMQIARRRGMKKAIVALARRLAVIMHRIWVDGTEFRWTREAATA

SEQ ID NO: 281153 - protein, 360 aa, unidentified
MKVQRTSIGLDVHARSVVACGLDGDTGEVSQRRLCPDHREILQWMAGLPAPVAVTYEAGPTGFGLARALTDAGIDCRVAAPSKLQRPAGDRVKTDARDAAHLARLLHLGQIVEVTVPSVAQEAARDLARAREDCRGDLMTARHRISKMLLRQGIVYYGGQAWTGKHELWLRAQDFNDPALRLTYETVLDAMTSCVHRRDRLDEAITELAADSEFTPIIRRLCCLRGVSTLTAFALAVEIGDWHRLSGRSIGAYLGLVPCEYSSGESRTRGGLTKTGNTHARRLLIEAAWHHRPHYRPSRDLRRRWDAAPAGARERGHAANHRLHTRWAAFDQRKKRPVIANAAIARELAGWCWSLAVMTT

SEQ ID NO: 281154 - protein, 384 aa, unidentified
MDVLYQSCAGIDVHQANIVVCILHGPLTSTRPKREMATFDTTTKGLRACHDFLSQFHVEAVGMESTGVYWRPVWHALCDDFELILAQPAHMKAIPGQKTDKKDAHWIAKLTRIGLLPRSFVPDETIQELRELTRQRKHYVESRNRETNRIHKILQSGGIKLTTYIEDIMGLSGRNLLQLLVDGTPITPRIVHQSVYTSLKKKVPQLLEALDGYFSDHHRFMLKQSLEIYDFYQKQIELLEERMNVYLSQYEKHVEILDSIPGIDVITASVIISEVGVDMSQFPTSGHLASWAGLCPGNNESAGKKRSTKIRHGNSYLKKCLCQAAFAVKRQKGSPLAERYYQIQSRRGSQKATIALAHQLLKIAYILLKEQMTYPEFLAQKKDY

SEQ ID NO: 281155 - protein, 459 aa, unidentified
MKKVGVSKGVRKKKVAVMTHVIEPNAAGIDVGSTEMFVAVPVDRDPQPVRRFSTFTNELVALADWLKQCGVTSVAMESTGVFWIPLFQLLEDRGFRVCLVNARHVKNVPGRKTDVADCQWLQYLHSVGLLRASHRPTQTICAIRSLWRHRESLVQIAAHHTQHMQKALDQMNIQLHHVISDITGVTGLAIIDAILSGERDPDKLAQLRNARIKASERTVAEALVGDYRSEHLFVLRLSLEAYRQYQRWITDCDREIEQQLSRIESKIDPVQHPLIRTKDDRRKPRGNEARFDLRNDLYRIFGVDLTDVPGVSSLTAHLLLTEVGADLSKFPSAAAFASWLGLCPDNRISGGKILSVRTRHVVSRLAIALRLAAQSLHGSRSYLGDYFRRMRARLGPPAAITAAAHKIARILYHLITTRQRYDESVFAVMEQRAKQRQISILKKRASVLGFALTPAGCVP

SEQ ID NO: 281156 - protein, 407 aa, unidentified
MEVTFPRRAGLDINKDVVVACVRCVSPLRHQEVCSFATTTSGLVALGDWLESHGCTHVAMEATGVYWKPVRHLLEDRFELLLANAQNIRNVPGRKTDVNDAMWIADLLACGLVRGSFVPPAPIQELRDLTRTRKQLVREISQHTLRIQNVLEDANVKVASVLSSILGTSGRTMLDATIAGEEDPERLAELAVGTARKKKAALVEALRGRVTPHHRSMLQLHLNVIAALEAALADVDASVGKSLAPIRARAETLTTMPGVSDLVAQVIVAKIGVDMSLFPTAGHLISWAGLCPRNDESAGKSRSTRVRKSGTWLKTTLVTAAWAAARTKDSYLQAQFFRLRALRGAKKAILAVAASMLAAAYYMLRDGVDYRDLGPHHFDHREKTKTIKRLVQRLNDLGCEVVLTHAA

SEQ ID NO: 281157 - protein, 446 aa, unidentified
MLFPPSGRGGAGRPTMSTIQPFRAKRVKKSTVRVRPVERPDAAGIDLGATVHFVAVPPDRDERPVRSFATDTAALHLLADWLVACRIKTVAMEATGVYWIPLFQILEARGLEVVLANARHVKNVPARKTDVQDCQWLQYLHSVGLLQASFRPPAAVCAIRSLVRQRDNLVRTGCEHILRLQKALDEMNVLLHRAVSDITGETGQAILDAIVAGERDPAVLARLRDRRCKKSEAEIAAALRGDWQPEHLFVLRQSLEAWRYHRKLAAECDAQIQLLIQELTPVAPPATVSMPSSPRPASPTTSAGDADEPLRRLLLAKLGTDLTAVDGVGAGTALVWLSEVGPALDKFPTAAHFASWLGLCPDNRVSGGRKLATATRPVANRPAPAVTATAHKIARILYAMIKLRLPFDPAKLGNPSLLRSRHERSLRRQAASLGFALQPLLPDAVS

SEQ ID NO: 281158 - protein, 307 aa, unidentified
MALDDQSKTQCIANSGTEIGALVNRLKPLAERMGVILLEATGGFERPAAAALCAAGLPVMVVNPRQARDFAKSMGYLSKTDAMDARVLSHFGRTLHQSAQRERLLMKLPDANQEALEALLVRHNQLVAMRVAEANRLATSHPSQHKSIKLVLKMLDRQMAVIDKNIDGMLKEHFAEKLALFKDFKGVGPCMQAALMGALPELGQLTHAQIGKLVGVAPLNADSGRHKGKRITWGGRATVRTTLYMAALSAIRYNPVIKTFYERLLANGKLKKVALVACMHKMLTIMNAIVKSGIPWNPEHQNVSKNA

SEQ ID NO: 281159 - protein, 346 aa, unidentified
MRFYTKQHRFYAGIDLHARNMYLCILDHEGEIRLHRNLKARPEAFLEAIRPYRDDLVVAVECIFTWYWLADLCARENIPFVLGHALYMKAIHGGKAKNDRIDAHKIAVLLRGGMLPQAYVYPNGMRSTRDLLRRRLYLVRQRGELLAHIQNTHHQYNLPEPTARIAYKANRDGVAERFEDPSARKSVEVDFALIAHYDELIRDLELYITRSAKVHDADTFHRLRSIPGVGKILALTILYEIHDIRRFPSVQDFASYARLVKSAKESGGKRLGSSGKKIGNVHLKWAFSEAGVLFLRCNPKGQNLLKRLERKHGKGKALSILAHKIGRATFYILTRRTTFDANTFLN

SEQ ID NO: 281160 - protein, 342 aa, unidentified
MEHAAIDLGRPYSWLCWLEKGTKSFRRLRLTKPELDRWFKGRAGMRVLIESSTESEWVAQHLESLGHEVIVADPNFEPMYGRKRKKIKTDKRDAEAMFEANRTGVYRMAHRRSARGREMVRLLATREALVRTRTRWINVCRTQLRALGYWIPSGSAETFFDRLVDLDLAQERREHLRPFDVMWGPLNTQIESLDKQVQRLGVDDALVRLLQTMPAIGPMRAAAFVAVIDDARRFRNAHQVGSYLGLVPSEWSSSDTERKGKITKAGDTRLRWLLVEASWTILCRPLLGCEELRAWGQGIAARRGKKVAVVALARRIAGILWAMMRDRSAFNPAHLRHLPRAA

SEQ ID NO: 281161 - protein, 427 aa, unidentified
MKRVSRAGSQPLEVAMDVMYPQCCGLDVHKKTVAACLITSTAGAEPVKEIRTFRTMTADLLALADWLQEAGCTHVAMESTGVYWRPVYNLLEGQFELLVVNAQHIKAVPGRKTDVKDAVWIAELLRHGLLRGSFIPSKPQRQLRELTRYRSTLVQDHARALNRLQAVLEDANLKLAAVVTDIYGVSARAMLAAILDGQRDVEALADLARGRLRAKRDQLKEALEGRVTAHHSFLLTEHLSTLEYLDEAMARISAEIDQRLTAEQEAITLLDTIPGVGQRAAEMLIAEIGTDMSRFPSAKHLASWAGMCPGNHESGGKRLSGKTRKGNRWLRQILVEIAHVASKTKNTYLAAQYKRLAARRGKKRALIAVGHTVLTIVYTMLTRQQPYQDLGAMYFDQREQHRVERRLVQRLERLGYKVALQPQALAS

SEQ ID NO: 281162 - protein, 315 aa, unidentified
MTTSSERFVGIDVSKDTLDVHLHPDNIDRQFANTDEGISILLGCLEKYPPTLVVLEATGGYENAVVAALSVAKIPLSLVNPKRARDFAKAMGRLAKTDKIDARVLAEFADKVRPGVRPLPDADTLKLQAFLTRRSQLIGMRTMEKNRLAALKDRAIRRSVEAVLRTLEKEIERADRDLDKAIQESSVWAAKDELLQSIPGIGPAVSRTLLAEMPELGTFSREEVAALAGVAPVNRDSGTRKGKRMITGGRAAVRSMLYMASHAAKQGNAILRAFADRLKAAGKPPKVIRIAIARKLLIIANAVLRDNCPWKLKMA

SEQ ID NO: 281163 - protein, 389 aa, unidentified
MIFVGADVHVRNSYLYATDFDGKRLGHGRVPNSLAELRVFCEGLMREVGGELQPVRFVLESTTNSRPVQRLLRQAATAVGFEEVTADVLNARKLRIIAESVAKCDAIDGRVLNQLARSNLTLPTCYMPDDEEFALREHLRARSDLVRMRTMIKNRVHAVLHRGGILTPKNGLFSKEGRKFLDGLPLDEAGRGITTQYLTALDQFEALIDRSDKDLRQVMRTPRWAKPAALLQTMPGIGVITALTILAELGDLKRFKSRAAVANYAGLVPVIRDSNTQHYSGGITHCGSAHLRAVLSEAAWTAISRVPLYQALFERIAERRGKQIAIIAVARRMLEDAVRMLWKQEAFRFVPVTKDAAKAASNAVGTPCSDSSIPAAKAAKVEVAASVAG

SEQ ID NO: 281164 - protein, 393 aa, unidentified
MWGVNPITLPSRDEEDHILYKQKVAHKLNEFAESIKLFKQIEKKEGGKISFALEGKNGYSVPLDRILLAQGFTLYHVDNLKLKRFREAFAGEWRDDERDSLMLSKMLKLKEHLDSKREKVFIKIEKPSPVTESLKLLSRHQQTLIDEKVRLTNRLRKKLLEVSPQILRLAKLKNKKMIAILAQYPDFSKYKRITLKSLLKIKGIGKKQAPFLLKRLNHLEYMPGPTDIYQTIIFSYAQRILPLEEEIKDLDKKLDKIGEKDKEVHHLKTIPGVATKLASRLIGEIGDINRFPSEKQLAIYCGIACVNHDSGKVTKAKAVYKANKICKQTLITMAGGSIRLSLQCKAYYLKKRAEGKSYNHALRCLARQMIKVIHRMLTEDRDYMVRKELKKAA

SEQ ID NO: 281165 - protein, 343 aa, unidentified
MERTDGVETFVGIDAHSKQCSIKAISRQGEELKEIDVATRAVDLKKALKGLPRPVWAMVESSYLAPFLRDLIEESVDRFIVCETRENRWISHSEDKGDQADADRLCRLLRMGEFKAVHVPGGLGRDRREVLRMYQKVQGDVSRTKNRIKGKYREHGVPLQGKRVYGAVHRKECLAQVSREQGRFLLEVLYQKLESDEERCDEVLDRLVKLMRGDARYESLQEIPGLGKVLSAVVAAVIDEPDRFATKRKLWSYAGLGVRSRWSGDPSKAKVSGSKGGNRLLKYAALMAANAALRGENRFSRHHRKMLAEGADPSMAKRTVARKILATALVLMKTGAAYEDNQV

SEQ ID NO: 281166 - protein, 326 aa, unidentified
MKKLVTGIDISKDTLDYCTLESSEVKVQNKGALDNQYKPIDKWLKTFDKHTTVFALEHTGHYGATLIDCLATNGYTFYLINPLELKNSLGIQRGKSDAKDAYRIAQYAITNKHKLVPYQLPGENLRKLKALITARERYVKMSVQVQNSLKANEILNQSIDVKMLVKEEKKQLACLKKSVKTIEAQMQKIIESDPSLKSSYNKVIGVIGVGPIITIKCIVETDNFTKFANARKFNCHCVQAPFPYQSGSSVKGRAKPHFLRDKSLKAILTKGAITAIQHDPQLKAYYNRKIKEGKHRMSVINAVANKLVLRIFAVAKRDEPFVKLAA

SEQ ID NO: 281167 - protein, 342 aa, unidentified
MTNFNTKYQSVCGIDIAKNVIQIYQVNQDGECKNFQVKRKEFLQLFENREPSLIGMEACGGSQYWARELQKLGHTVNLMAPSAVKPYVSGFKSDRKDAIGIFNAMLAGVRKVAVKTEAVTDLATLLGIRARRVRARTAKVNMGRGYLMEYGIVMAKGLRQFKNSIADSLLQLERAQASNMVKEEFKFLVDEVNKETEAILRLDREINSLAKQCKNFDHFLTAPGVGPITAATMCVKLADPQVFKNGRQFAAYIGLVPQHYGSGGKNVNTTIPIKCNKELRALLVQCAQSIRRTKNKSSWVTQIEDRKPNSVATIAVANRLARRLWAIASKGEDWKRMDINFG

SEQ ID NO: 281168 - protein, 340 aa, unidentified
MTMFAGLDVGFKRTAVCVVDGSGRSVWRGVVDTHPEAIAAALKRWRNGLEKVGLETGSMSPWLARGLGALGFPVVCMDARRAADAVKSRRVKSDKADAFALAEMLRTGWYSAVHVKSLDSHRLKALLGARDQLVRAKRALGNQVRGLLRPFGIRLPSRQGTKKFAEAVHQAVAHDAMLSASVTALMEALAAIEGQLARLDDRLKELARRSPVCWRLMSVPGVGPIVALAFMAAIEDVGRFARMRDIGVYLGLTPKRYQSGETDVGLGISHQGDAMARHYLYEAANVLLTTVRRPSALKSWGLKLVKRRGPKRSRVAVARKLAAVLGRIWKDCTHFEAAAA

SEQ ID NO: 281169 - protein, 350 aa, unidentified
MNETGLYWIGLDVADRTFDAAVARSGDRASASAFKGLPAQTFERTPEGVEAFVAWLQTLVPGSAPLPARAVMEATGNYSIKLAAMLSNACPELRPAIVNPEWTCAFRNSLGLRNKTDRMDARALAFYGRERQPEPYEPLSPEQARLREMSRCRDGLIRSRTAHENQLAQTPGCPLVRSTLKAVIARLQKAIERIEQAMRDLIQTHPSLQSDYELLTGIPGVGFVTAAVVLAELGDLRRFGKARQVTAFAGITPRQNQSGNHTAPGRMSKKGNGRVRQALYLSAMSAITYNPALAATYRRLVADGKKPMVALGAVMRKLLVLMWAIVNSGKPFHAGGKPRENFNLQVQKTS

SEQ ID NO: 281170 - protein, 365 aa, unidentified
MDTIYIGVDFHARQQTICYLKTETGELVTCELKHQDKEQVRAFYKQFQGHVIIGLEASGYSPWFEAMLEQLGCEVWLGHATEIRRRARWRQKNDRRDAELILDLMLHHEFPRLHRPPVQSREVLRMLRYRQKLIKLRTMSKNSLQAIALQAGLAKGSGLFTKAGQQELSTAEMTPVMQWQREHWLQLLKPLNQQLLETMVWFKAQSKGDISITRLRTHPGIGLLTSLCILHTLQPVNRFRNTRKVAAYAGFDPVERSSAERKCFLGISKAGSRILRYLLVEAAQTAVRKDEDLKRFYKRLAERRGRPKAKVAAARKLLIRAYIMLRDEIDYAEFRRRAVAARLARRGHRPNVPEVLIGQPASPVQ

SEQ ID NO: 281171 - protein, 314 aa, unidentified
MKETGVVYIGIDVSKHSLDIDAGELGASKAANTPAGIRRALKALARKTGGSLQACFESTGPYSDTLAGVCRDTGVAHSVLNPYKAACFAKSVAQAKTDRIDAQVIRRYAEARRPEPATPRSEAQEAVAGLLLARDAIVKSNVALRGTLEALTGAAAKAVRRHIAAGGREIARLDSLIAGTVAADEDLAGLTAALAGVKGVGALTAATVAARMPEIGTLGRRRAAALAGLAPRTRESGKWRGRSFTGGGRKGVRGALFMPATVAIRWDPHMRRVHGALMARGKPYKAALTAVMRRLIIRLDAVARAYRAGRGGPG

SEQ ID NO: 281172 - protein, 423 aa, unidentified
MKPQPTLSFTAFVGIDWADRKHDFCLQATGSDHREFGTLDHSPEAIAKWAYSLRDRFGGPIAICLELAKGPLVYALQRYDFLVLFPVHPSTLAKYREAFVPSRAKDDPTDAEMALDILLRHPDKLHPIKLQSAAMRALATLVEERRCLINDVTGITNRMTSTLKQYYPQVLDWFEDRDTMIFCDFLSRWPTLRHVKRARRSTLESFFHQHNGRRAHIVEGRIQGIRAATSLTDDDAVILPYQLVVQTLVEQLRALLQAIDRFDAEINVVTKKLPDYDLFAALPGAGHIQAPRLLVAFGEDRDRYTNAAEIQRYSGVAPVVERSGNKCWVHWRIACPTFLRQTFVEWAGSTIPRSYWAGAYYQQQRNKGCSHRVAVRALAFKWIRIVYRCWKTRTPYDESVYLKALKHRGSSLLANISESAKMT

SEQ ID NO: 281173 - protein, 335 aa, unidentified
MEKVVVVGIDISKDAIHACLKESVGDAGSRIRGTRKFLNSYIGFTELLYWVSQRSREASSVCYVMEATGSYYENLAYFLYENRLKVSVVLANNIKYYAKSQNLKTKTDKVDASLIADFGLSQKPALWQPMSSGYRQLRDLCRERICLKQARSRAKCQLDAMHHSHDKLACILHIKEEQIALYEKLLLEIEEEIQEKVASDAELSRKVAQIQEVKGLGLLTILTVLCETNGFLLFGNIRQVVSYAGLDVKMSESGHYKGRTRISKQGNTRIRSCLYMPALSAVRSNEPIKNLHLRICERNPHARKKALLQPCENSYVNRHPLSGKGNKSLPASIYT

SEQ ID NO: 281174 - protein, 343 aa, unidentified
MTKISTIGLDLAKNVFQLHGVDGSGAVVLKKQLRRGALEKFFAQLPPCLVGMEACGSAHHWARVIGRYGHEVRLMPPAYVKPYVKRNKNDGRDAEGICEAVGRPTMRFVPVKSVEQQATLAVHGTRALLVRQRTMAANALRAALSELGIVAAQGYEGLRELMAKLEEPGEEIPEAMRGALLVLAKHWQALDADERLLERQIAKAARSDQDARRLMEVPSVGPIIASTVLAKVPDAKVFRSGRDFAAWIGLTGKDHGTGGKHRPGRISKQGDRMLRAMLICGASAYLRHQKARGVSDPWLRELLARRPYKVVMVALAAKTARIIWAMLAKGEPYRDRASASAAA

SEQ ID NO: 281175 - protein, 462 aa, unidentified
MQDSQKRKSSSGNPREIEGLPVIRRRIAGIDIGSERHWVCAPTIEESGREVADFGATTPELIRMAKWLKERNVESVAMESTGVYWIAPHEVLEAEGLEVMLVDTRQLARVPGRDKKTDPVDCEWIQRLHSCGLLMGSFRPQEAVCMLRTLVRDKGNLVAEAGDWLRRMQKSLDQMNVRVHRAVADLQGATGMAIVQAIVEGERDPRKLAKLRDHRCHKSEAAIAEQLSGHWREDHLFSLRQALKMYHSILERISDYEQELLKKLAAMEREECRGQEAPKVNNPQKAHAIRRRGEEPMRHALYRMSGVDLTGIDAIGVATVEVVLTEYGPDMSRFPTEKQFVSHVTLAPHRPTSGGKPVKKKKRNSASTRVAAALRMAALSLRHSDTALGAYYRNIARRKKGDVAVFATARKLATLIYRLLRWGQPYVDEGAQAYERRYQQTRIRGLMARAKELGYQLTPTTA

SEQ ID NO: 281176 - protein, 402 aa, unidentified
MNSVGIDISKGRSTIAVMRPFGEIVISPFEVRHTDSELSELARRLKSLNGETRVVMEATGNYHAPVAKLLHDAGLYVSVVNAKLVHGYGNNDLRRVKTDRKDAVKLANYGLDRWLTLPRYVPEENTRLLLKNCYRQYRQYSKVQTVLKNNLISLLDMTFPNANRLFVSPARADGSEKWVDFVAEFWHCECVSERSLKSFVNKYWRWCRKHGYNFSEEKAHAIYDEASGHIGVMPKSETTKLLVEQAVSQLSATSAALAALKQEMQSLSSQLPEYPVVMGMFGVGPILGPQLIAEIGDVRRFYSKKALVAYAGIDAPPNDSGDVIGRHKSMSKVGASSLRRTLFLIMSAYLQNSPPNEPVYQFMDRKRAEGKPFRVYMMASANKFLRIYYATVKAYLESLEQV

SEQ ID NO: 281177 - protein, 340 aa, unidentified
MNLTTLGIDLAKTSFSLVGMDQHGKVVLRKTLSRAKLLPFIAQCPTCLIGMEACSGAHYWAREFTKLGHKVGIIASKFIAPFRKGGKNDNNDAEAICEAVGRANIWFVPIKTAEQQAQLCVHRVRQGLVSERTALINQLRGLLSEFGIVMPKGRYPAQREIPLILEDANNGLPMLARQMISNLWDRIKIANEQVLFYDRELHKQAHHHPVAKRLLTIPGVGEQVASAVVASVPDPSLFKDSRQFAAWFGLVPKQHTTGGNVRLGRITKHGDRYLRMCLVHGARSVLANLKDKQDKISCWARELIARRGYLRAVVAMAARNARLIWTLMVKQEDYKVIAAN

SEQ ID NO: 281178 - protein, 340 aa, unidentified
MNFIGVDLHKKTIAVCVMNEKRTILARKSLPCNQPDQIVEFFRRFRPFTVVVEATASYRWFVELVEPLAEKVVLANPKKLRIIAESTKKTDRLDAQVLTEFLARDMIPQSYLPTPRQRQHRALVRHRQYLRGRMTSVRCKIRRILSDYNADRKDLFSANCGLTYIKGVALDDADRFVIKQLWSEWEDHQAQLQALTKKIKAFAAKAPQREKEARDVIKTAPAVGFVTAEVVLSELGDISRFRNAKAVCAYAGLVPTVRQSGEKRSKDLRITKEGSGLLRWALVESAWRLVGSNVKWSALFARLKKRSGKKRAIVAVARKLLCVLYAMLKTSTPYKPMMAA

SEQ ID NO: 281179 - protein, 340 aa, unidentified
MGYYVGLDVSLKSTHICVLAGERRVVWRGVSDTQIAMIAEHLARWSKQIVLVGLETGSLTPWLYHGLSDLGLPMVCMDARRASDALKARAEKTDKADARALAEMLASGWYSAVHVKSLESHQLKALLGARDQLVRVKRQLYGQVRGLLRPFGIKISQRVGAKSFDEAVRMACNKEDVLYIAVGALLDTLANVAGQIAVLDKQVRTLAQKRKACWHLMSVPGVGPITALAFTAAIEDPHRFGSNRDVGAYLGLTPKRYQLGERDVSLSISRQGDEMVRHYLYEAANCLLTTVTGASALKSWGLKMVKRCGAKRARTAVARKLAVLLLRLWKQESHFEAQSA

SEQ ID NO: 281180 - protein, 370 aa, unidentified
MRIIGCDLHARQQTLAMLDTETGEVVNLTLMHEGNNVREFYSKLPRPVLVGIEATGSMHWFLNLMEELGIECRVGHPAQIRAAEPRKQKHDRRDADLILKLLAQNRFPAIWLPSKELLDLRALLLHRHQWVRMRVRMQNALQAIALANGLRRGPALWSYDGQAKIAFLPLLPHAAYRRSALQAMYKNMQSEIENLTRRVAEQAGNRCGARLLMTHPGVGPVTALATEVFLGDPQRFTDSKRLASYVGIIPREYSSGEHQRLGGVTKQGSPLLRFLWGEAGAHAARRDPELKRFYRRKLVQKGLGKARVAVARKLGIRLWIMLRDEIDYQEFCRRGQIQQKTVRPVVGMPETGNGAKSHRPSDEATRLPES

SEQ ID NO: 281181 - protein, 359 aa, unidentified
MSGEEGAGRHVVGGVDTHKDLHVAAVVDERDRLLATASFATTRQGYRQMLTWMRSFGTVKRVGIESIGSYGAGLLRFMQKAEIEVLQVTTPDAHDRRRRGKNDDLDAESAAHAAFAGTRTVTPRTRDGMIEALRVLSACRKTAVAARRVALQMIQNTIVCAPDNLREMLRRMTRMQLIRTLAAWRPDLTGYRDVEAAYRISLKSLARRYLELHDEIADLDAMIGAIVDELAPELVARNSIGQNGAAQLLLTAGDNPERLRSEAGFAALCGVSPVPASSGKTVRHRLNRGGDRAANSALHIIAIGRLRTDARTKVYVAKRIAEGHSKLEAIRCIKRYIAREVFTLITRRQRAINQTRIAA

SEQ ID NO: 281182 - protein, 397 aa, unidentified
MIAVGIDVSKGKSTVAILNGDGSIRAHPYEMNHSKAELEALIKYIKAVDDHPIILMEPTSHYHYPVLKAFRDAGLSPSLVNPYLLKKYGDAELRKAKTDKKDAMRIARYALEKWYSLVPYSPMDQKYEDLRFLSSQYRQRISMVVKSKNQLINLLDESMPGITRILALKSRNPEKCMLLQFIKRFHSFDYINSIGKTRFMNSYTTLARKVGERNAAAKGLAIYELSKASITTRSNSDYMDIALDQCVDILSDSQRAADEIMLQMQNIAETIPEYKVLLSMNGVGDRLGPVILAEIGDIRRFHSGKALNAYAGNDAPPYQSGQFESRSRHISKRGNPALRKACFEVMQALKLTKPQDDPVYLFMMKKEQEGKPYNVAKMAAVNKFLRIYYARAMELYK

SEQ ID NO: 281183 - protein, 367 aa, unidentified
MKKQTSAASEAGLKGKNIIDFTSKTIYVGIDVHKKDYQVAKLCDGLCLGNVRMNASAETLIKHLQTHYPGADFKCVYESCAWGFNLQRKLTKAGMDCMVVHAADVATNDKERKRKTDKVDALKLAQSLASGYLKAIHVPDEISQKQRSLMRYRSQLASDLTRTKNRLKGALKFNDIAIPEQYDNGHWSKNFLEWIEQQGLNDPHLCDTLVLMVGHVRLLRQQLLETERALRRLARNHYDERIKLAMTVPGIGSTTAMLFVLEIGDINRFKNFDALNDFIGFCPDTADSGETYRSRGMTTRRHKKLRSGFVEASWRAIRIDPALLQTYQELTKRMKGVHAIIRIARKLLRRLRTVLITGVPYQLGVTQ

SEQ ID NO: 281184 - protein, 340 aa, unidentified
MTKISVVGLDLAKRVFQVHGADDDGRPVARRKLRRGKVLAFFSEMPPCLVGMEACASAHHWARELQALGHDVRLIPPQYVRPYVKTNKNDAADAQAICEAVMRPTMRFAAVKSAEQQSVLMLHRARELLVRQRTMVINALRGHCAEFGLIVAQGASKVEELVAIIEDPGDTRLPPLARQALGMLVEQFRSAQARIKELEATLLAWHRSNQASRRLATIPGVGVITATALVATIGDGSQFRSGRQLSAWLGLVPRQHSSGGRDRLGRISKRGDGYIRRLLVHGARTVLRWRRAKPGIGPGWTDRLLARRPTNVVLVAMANKTARVAWALLRYERIYEPTPA

SEQ ID NO: 281185 - protein, 354 aa, unidentified
MEKIAIGIDFSKETFDMTVLDMKRTNGKVDADALAKAPHEQFKNQRGGFRKSLSWVKKVTGRKLDKDNVIFCGEATGKYSIRMSEYLRERGFFIWIDSGLRIKNSMGIVRGKSDKADSGRIAEYAFRHWDKAELYEPLKKDISALRELFLYRNHLVDLRKATEQRNRLMKEFSDVVGESSFIRRSGDRIVKDLKEEIKRCEEEMKKLIESNEEIKTTYDCITSIKGVSLINGVAFIIYTNNFEWFGNNPRKIATYWGVAVFGKESGTSVKGKTKTNKCASRMLKRLITEAANSAIRWEPRIRTYYEKLMAKGKHHGVAMNNVKNKLIHIITALAVNKTMYCDTYEEERKLKKAG

SEQ ID NO: 281186 - protein, 423 aa, unidentified
MTKLSSTSAGAVLVAIDMAKNRQEVLIERPEGGRRRRMTVLATKADYDALAEQLAAIGRPIVVGFEATGNYHRTLAHRLLTAGFELRLISSVAMARTREALHNGWDKNDPKDAQVILHMLRIGATQRYVDPLAAGINDLQELSKTHEVVSKMKTQTWHRILTHYLPLYFPEIARFAGNSRSDWFLAMIERFPTPASITSLDREAFSAEVWPLIGRKVSKARLINDVYETACASTALPVPEDSAAITMFRMVIAQGRSLIQQRDEIERLAHLRLADHVDYQLLRKIPGIGPINALTILAEAGDLRRFNHHRQFLKFCGLDLATCQSGTFRGRTKLSKYGNARLRRTFWMAAQVAARQRDNSFRDKLGRYTAGHADNADRRRKAMTALTAKMARVAHAVVKTGTEYRPFVERPDARWKDPSLQVP

SEQ ID NO: 281187 - protein, 419 aa, unidentified
MNKLYVGMDVSQDDVKVYILDQEGNEAIKRFAVDNTPIGAEVIAGNILDCCKKLNINKVFAGLESTSVYGWPLQFYLADHIDLKTYDPMIISFNAKIIEAFKKSLGNLPKNDWIDAFTIAERLRFGRLPKSCSVDFRYLALQRLTRHRFHIVDNIVREKNYFLSNLFLKFSGLCQNKVFSNNFGATATQLFHEFLTLDDIAARPLDELVDFMVENGKDHFSDPKASALILKDAVRKSYRMNASVDNSLNFVIKSCLDNIQSLEKQKKAAEKAIQQEVSGFNNQYLCLTSVKGIGPTIAAGLISEIGGISRFENDNSLAKFSGLYWSEYQSADFIAEDTYLKRTGNEYLRYYFIQAADQLRKYVPEFSLYYSRKFKEAKTHKHKRALALTARKAVRLIFALLREEKLYKPPAQKGGITEN

SEQ ID NO: 281188 - protein, 377 aa, unidentified
MLKSVVGWSTREQEESEMNATTVAVDLAKNVFQLAVADASWKVVESHRLTRTQFERFFANRDVRLVIMEACGSAHHWARWLNSRQIEVKLLPAAYVRAYLRRNKTDAADASALLEAARCAEIVPVRVKSVEQQALQGLHRVRSLWMGNRTARINTLRGLCREFGLALPQGARTGVEATARALADPNSPLPALIRGSMKLLVEEIRLLEARIAQLERELSALARQSPACTTLLSIPGIGLLTATAMVAATGGEVSHFRDARHFASWFGLTPREYSSGGHRVLGRISKRGDRYLRMLLTHGARSVLRAATVARRAGRSLDGLRLWATQIEARSNHNKAACALANKLSRICYATLRDGVPYGEPRRQGRKIDRTAFAIAA

SEQ ID NO: 281189 - protein, 344 aa, unidentified
MIAVGIDVSKSKSTVAILNGDGSIRAKPFDVHHVADELQALVDYIKRTSEPPTILMEPTSHYHYPLLKAFTEAELPVCLINPYQMKKYGDTELRKAKTDKRDSLRIAQYALEKSYSLIPYTPQDQKYEDLRFLSRQYSQRISTLTVAKVQLLSLLDETMPGITTILPLKSRDPDNCVLLRFIKRFKSFDVIRKMGKTRFLDSYQVLVKKTKDRFAGSKGLAIYELVLNSVTTRGENPLSAMTQDQCVDLVSTSQKAADEINLQMRIIAETMPEYKVLRSMAGVGDRLGPIILGEIGDIRRFHSGKALNAYAGNDAPPYQSGQFESRNRHISNCLLYTSDAADEL

SEQ ID NO: 281190 - protein, 385 aa, unidentified
MMKLDRTDAPATDEYATVYVAFELSKAKWKLGVLLPGRGKLSRYTIDGGDLAALSSRLADARLKAERCGKPVRILSCYEAGFDGHWLHRWLSQQGVINHEIDPSSIEVSRRARRAKTDRIDLEKMMRALLAHLRGEPRALSVVHVPTEEEEDRKRRTRERERLLKERTAHTNRIKGLLHAQGVRDAMPMKRGFIAGLAMLRTGDGRALAPRLKEEIVREHERLCLVNKQLGELEAKSKAELRRAAPGSAEAKIVQLIDLRGIGLASSQQLVNEVFYRSFANRRQVGSCFGLTGTPYDSGESQRDQGISKAGNRRARTLAIELAWLWVMHQPDSELTRWFRARVRDLKGRIRRISIVALARKLMVALWRYLTTGVVPTGAVLRPGV

SEQ ID NO: 281191 - protein, 347 aa, unidentified
MNSVGIDLHRSRSHIAVIDGEGTQVLSRRITNDPATFLDLLGELEDKTQIAVEATYGWEWLADALEEAGYELHLAHPLRTRAIAAARVKTDAVDARTLAYLLRADLLPESYIAPRELRDLRDLLRHRIALTQMRAALKNRVHAHLARHGIQRRHSDLFGVGGREFLTGLGLREEPRRRLDSLLALIGDFEREIEAATAEVDSRAKADARVDVLTQIRGVGPYTAMLVIAEIGDVSRFPNARKLCAWAGLTPTVRSSDGKARLGHISKQGSRALRWALVEAAQHAPRDTGPLRDAFERIAERRGRKVAKVAVARKIATLCYYGLRDGEIRCLARRCRPSAAAVMAGSS

SEQ ID NO: 281192 - protein, 375 aa, unidentified
MIYIGIDVAKDKHDCFITNSDSEVLFKAFTIFNNLDGFNDLYQKIESVMDDVTKVKVGLEATGHYSYNLLGYLIDKGLPTYVINPLHTNLYRKSLSLRQTKTDKVDARTIASMLMSDVNLKSYSDTSYHNEELKSLTRYRFDKVKERAKLKTSVSRLVCILFPELEKLVPTLHMASVYALLSEFPSAKHVATAHLTRLTNLLSESSKGRYGKDTAITFRDSARASIGSNMPAKSLELKHTIKLIQELDSEIDEIENEIKIIMDEINSPILSIPGINYRMGAMIIAEIGDFNRFDSPDKILAYAGFSPSTYQSGQLDGAYAHIEKRGSRYLRYALYNATKYVCHWAPTFAAYLAKKRAEGKHYNVAISHAVKNWFE

SEQ ID NO: 281193 - protein, 309 aa, unidentified
MKQAIVYIGIDVAKAHLDVAWAGTFRRLPNERSGHAALVRWIKQSATPVQLICEASGGYEQALLESLQKSEVKVTLVQAVRVRQYARAAGILAKTDRIDAKVLAAFGSALQPQPTSPLSGEQKRLRQYEAQRRHLSRILVAEENRLAQLSCTELRTLSRSLISKIKTQIKTLDRGISDLIAQDQTLCVKAQKLTAISGVGVRTAALLLAQMPELGQLNRRQAAALAGLAPFNHDSGSVRGKRAIFGARPALRSGLYMAALSAARFNPILSSFYQRLRTKGKPHKLALTAVMRKLLLALNQTLKPLPCST

SEQ ID NO: 281194 - protein, 352 aa, unidentified
MRLAKHQVTSGEDLFVGIDLHKHRWHVTIRTFDVELFSASIPGNWEALQRVLARYGEHQLQAVYEAGYFGFRLHDRLVAHGIPYLVTPPSLVPQEYGNRVKTDCRDSSKLAHLLAKGMLKRVWVPSEEELYHRQVIRRRRQLVRDRVRTQSRIKAELRFFGVHLEEPRGGWTKIYCETLRRLRFGNRWMQESFTRLLEQYEFLSMQIDKQTQLLRELSETERYRERVEILQSIPGIGVISAMELLLELQDVSRFRRAEQLAAYVGLTPSQYSSADKVRMGRITGIGKNTLRSILVEASWTLIRKDQAMREKYDRIKIHSGGKRAIVAIARTLLLRMRRMLLDGQVYALQRAA

SEQ ID NO: 281195 - protein, 403 aa, unidentified
MNNVAGIDVSKGKSMVSVLRPFGEVVAKPFSVGHTGSELKELADYLKSLDGETRVVMEHTGRYYEPVARFLHEEGVFVSAVNPKLIKDYGNNTLRKVKTDKADSRKIARYGIDNWAELRQHTPMDTIRMQLKTLNRQQSLYAKTKTMMKNNLIALLDQTYPGVNALFDSPVREDGSQKWVDFATAFWHVDCVRSMSLTAFAERYRKWCKRHGYNFSQSKAVEVHTGAQDLIAMLPKDALTKTMVRQAIDALNAVSASLERLKAEMQALAAQLPEYPVVMAMHGVGDSLGPQLMAELGDVTRFTHRNAITAFAGVDPGADQSGTHEAKSTRVSKSGPPELRRALFLVMDCLLKTQPQDDPVYRFMDKKRAEGKPYLVYMTAGANKFLRIYYGRVKEYLASLEGN

SEQ ID NO: 281196 - protein, 414 aa, unidentified
MALKIVYQICCGIDVHKTFVVACIASTNYKGVTVYKSHRFSTYTKGLKELLQWLSDNNCKDVCMESTGKYWIPVFNVLENSCNIVLAHPKYVKAIRGKKTDKKDAKWIADLFKHDLVAGSFMPPSDIRQLRDLMRYRFKLTCFMSSEKNRLQNCLTVSNIQLGNIVSDTFGKSSQKILDKILENPLDTSFDIESLIHSSMKKKLPELELAVDGYITPEQAAKLKIIKKHLEDLKNRKAELESIITGLTKPYQSEIDIILTAPSFKNIFTAITLISEIGANMNVFPTAKHLCSWAGLTPTNNESAGKKKSVRVSKAGCYIKPLLVQCATAIVKSEKHPEIRNRYLRIKKRRGHKKAIIAIARMLLTAIYNMLKNKEPYNAELYKKSDVFPVDREISIEQAILLAQNQGYRIKSAT

SEQ ID NO: 281197 - protein, 317 aa, unidentified
MSEKVLVAGIDVSKERLEVWVLGAELGVCVGRDADGLRVLVEWLGAAGVTIVGLEATGGYERAVIDALEAAELFRVRLLNPLRVRRFAEAAGRRAKNDGIDAKLIARFAATFEEDRPPREPELRPIGDHLTLRRHLIDAMIALEGELEHLAEPGLRRMLKELLRLVERRRDALDKQIAALIAAVPALAEKAARLRSVPGVGPVLAATLVALLPELGQVGRREIASLVGLAPFDNDSGKSRGERHVAGGRKTVRNVLWMAAGVAKRHNPVIRAFAERLAAKKPPRVVRTACMRKLLVILNAIMRDEAAWRPNQLARAA

SEQ ID NO: 281198 - protein, 314 aa, unidentified
MSIQESKVYVGVDVASKHLDLFFPDTGKSERIKNDTEAVKELCVRIQSQSQYMFVMEASGGYESLLCAQLGSHGILYSVVNARRVREFARSMGVDAKTDQIDARVISQFASVLKPIASEAQSDQERSHTALVTRRTQLVDLITQEKNRLKQTWDPYAKKSVQKTLKHLENELESIDKLLVKMLQNDKKNQRKIEILQSAKGIGNVSTSMLIAQLPELGKLNREQIAKLVGVAPMNRDSGTTMGKRFIMGGRGNVRAILYMATLVAIRHNEKIRAYYKHLKSHKKESKVAIVACMRKFITILNYLIKTDQVWETK

SEQ ID NO: 281199 - protein, 351 aa, unidentified
MVVVGADVHKRTHTFVAVNQVGKQVGQLTVAATTPGHLKALGWARREFGAELIWAVEDCRHLSARLERDLLSAGQQVVRVPPKMMAEQRRTARTRGKSDPIDALAVARAYLREPGLPVASHDEVSREAKLLVDRREALVNTRTRTINSLLWRVHELDPAMAPKPRSLDLAKHQQALRSWLVTLQGVVAEMALDELDDVIALTARVKAFDKRIAVLARRDAPELLALPGCGELSAAKLLGESAGISRFSDEAKFARHGGLAPIPVWSGNTAGRVRMTRSGNRQINCAIHRIAITQLRLSNSMGRAYYDKKLAEGKTTTEALRCLKRRIARTVFHRLTSDHDNRHTACLPAAA

SEQ ID NO: 281200 - protein, 404 aa, unidentified
MELNAIYRCVAALDVHQAKLTVCILFETDAGEVVSQLREFGGFKRDRREMAAWVSSFKPELVVMESTGIYWKSPYAALEWYGLNLAVVNAYHVKHVPGRKTDIGDAQWLAILARSGLLRGGFVPPQHFREYRLISRQLQKLTSLAAGEKNRLHKLLTDAGIRLSVVLSDLYGKSAKAMIKGLLDGETPEQLLAHADSRLKASPDELRDALDGDLSESHRFVIRELMAHIDELEARVLRFRQTLLNHLSSYQVILQNLQTLPGIDELSAAMLFVEIGDDMSAFGSPAKLASWAGVCPGQNESAGKRKSAKTRKGNPYLRRILCEAANAASRTRCSLQDRFKGLMIRRGRKRAIFAIAHKLLKTVFLLIQRGDYYRDANTDYEALSVQRNAPRWIKKLVQYGYINA

SEQ ID NO: 281201 - protein, 341 aa, unidentified
MGDVTTIGLDIAKSVFQVHAADAAGSVVFRKKLGRSRLLTFFAEQPPCVVAMEACAGAHHWGRELMKLGHTVRLIPPAYVKPFVKRQKNDEADAEAICEAVQRPTMRFVPVKSREQQASGVVFRARDLLVRQRTQLLNAMRGHLAEYGHVAPKGVMYVDRLIVQIEDPDSDLPEAARASLVGLVRMIDRLDGEIALLDAEIARRAKEDPVARRLMTIPGIGPITAAALTALAPEPQAFRCGRDFSAWVGLTPVQRSTGGKQKLGKITKAGERTLRRLLVIGASAVIKQALLKGAPPGSWLAQMLARKPRMLVAVALANKTARIVWALLAKGGIYRAPALAA

SEQ ID NO: 281202 - protein, 345 aa, unidentified
MKIVGCDLHTRYQQIAMLDEETGELVERRLEHGNGEAKEFYASLLGPVRVGIEATGHTRWFEQLLAELGHELWMGDAARIRAAEVRKQKTDARDAALLLDLLLSGRFPRLWRPAREERDLRHLLWHRQKLVWMRNAVGNQLHALAMGEGLCRKKQLFTKKGRCELEALKLDAWASRQRQELLRLLDQLDASLAQFDQAVNEQAAANQDAVRLMTHPGVGPVTSLAFVLIVGPAARFERSKQLVSYLGLNPSEHSSGGKQKLGAISKQGNPMLRGLLVEAGHTAARMDPELRQDYQRLRLRRGGSVAKVAIARKLAVRMYWMLRRQVNYTQLVRTQGSSRATLVQQ

SEQ ID NO: 281203 - protein, 343 aa, unidentified
MQIRTIGVDLAKNVFQVHGVDSAGKVVITRQLRRKQVIEFFSKIPPCLVGMEACGTAHHWAREVSKLGHTVRLMPPSYVKGYVKRSKNDAADAAAICEAVTRPSMRFVAVKSTDQQASLMLHRTRDLLIRQRTQLINALRAHLAEFGLVAETGREGVAQLAALITDESDREALPFAMKQALQAIVDQLAALELQVGTLDRAIHAHHRANDMSRRLETVPGIGVIGATAIASAVTDPSNFKSGRDFAAWIGLVPRQHSTGGKERLGGISKQGDRYLRRLLVVGATAVVRHARQHPQKHPWVMRLLAKKPAKLVAVAVANKMARIAWAIMAKGGYYRAPELAAAA

SEQ ID NO: 281204 - protein, 403 aa, unidentified
MNAVGMNVSKGKSMVTILRPFGEIVSSPFEIKHTSSDIHSLIKLIHSIEGESRVVMEHTGRYYEALAHQLSAADLFVSAVNPKLVKDFNNDSLRKIKSDKADSVKIARYALDKWQSLEPYSITDELRAQLKVMNRQFHFYVKQKTAMKNNLIGLIDQTYPNANTYFNSPTRSDGSQKWVDFVSTYWHVDCIRKMSLNAFVEHYQNWCKRKKYAFNKSKAEEIYTKTKELVPVFPKNEITKHIIRQAIDQLNSTSVTVETIRTLMNETASKLPEYSIVMQFKGIGPSLGPQLMAEIGDVTRFTHKGALTAFAGVDPGVNESGSYAQKSVPTSKRGSSNLRKTLFQVMDVLIKTMPQDDPVYQFMDRKRTQGKPYYVYMTAGANKFLRIYYGRVKEYLSVLPDPS

SEQ ID NO: 281205 - protein, 326 aa, unidentified
MTPIVGIDIAKDKFDVCLVAAEGQRHQESFANTRSGINKLHKWLKQRGAKTAHVCLEATGIYGELVAETLHQRGYRVSVVNPARIKAYAASQMQRNKTDALDAALIAEYCRTQPPPAWTPPSPELKELRALVRHLDTLKQEKQRARNRLEAQTASPAVARQLRAQISLLEKQIAQTEQLIRQHIEHYPDLKQQRDLLKSIPGIGDITACHLIAELGDMRRFDDVREVVAFIGLNPRQHQSGKKRVTHGISRMGRASLRAALYMPAIVAKRCNPLFKAWAAQLTQRGLTGKQVIVALMRKLVHLAYGILKSGRAFDPHYGHPMPVAA

SEQ ID NO: 281206 - protein, 355 aa, unidentified
MESTKYVGMDVHKEAITIAVMNSAGKLIMESIIETKAITILQFIQGLRGDLHVTFEEGTWAAWLYDLLKPHVTKVVVCNPRKNALLKEGNKSDRIDPRKLAELLRNGSLSAVYHGENGVRTLKELARSYLTISKDLGRVMNRVKALYRSWAIPCAGTQVYAPRHRSEWLSKITEAGVRRRAEHYYHQLDALQVLRREVRKDLLVESRKHNATKLLRQVPCIGPIRAAQLVALMQTPHRFRTKRQLWTYSGLGLETHDSAQYCYVKGQLQRSKKPQQLRGLNKNHNHDLKNIFKGAATTASVSAGPFHNFYEALLTKGMQPTMARLTLARKIAAITLIVWKKGARFDPEHLKQQAA

SEQ ID NO: 281207 - protein, 361 aa, unidentified
MKKPAQHLIAEVPRRQAKVEITIGIDLGDVWSHYCTLNQDGEVVDCGRFRTTPKAIEKWFTDVAPARVAMEAGTHSIWISAQLQELGHEVIVANVRELRAISHSDRKSDQVDAEKLARYARLDPNILRPIAHRTVKQQQALTLIRARALLVRLRTAAVNAVRGLTKSCGYRMPASATTCFAQRSLAVMPPGLAQALGPVLQQIAEMTVKIKQYDRQIQQLGQTDYPETQALLKVHGVGHLTALAFVLTLGSKERFGRSRDVGCYLGLRPRRSQSGDHDPQLGITHAGNAYLRSLLIECSNHILRPHGRDSALRQWGLRLAARGGKQARSKAVVAVARKLAVLLHHLWSTQATYMPFYEQAA

SEQ ID NO: 281208 - protein, 413 aa, unidentified
MRVMIERVAGLDVHQETVVVCVLIGKPGERPTKEVRTFRTMTRDLEALREWLLSLGVTHVGMESTGVYWKPVYAVLEGSFELIVGNARHIRNVPGRKTDVKDAEWIADLVRHGLIAKSFVPPPPLRELRDLLRYRRKLVESQAAERNRLLKLLETANIKLASVVSDVFGASGRAMLRALIEGTASAQIMADLAKGQLRRKRADLVLALEGRVEEHHRFLLGMQLRRLEAADEEIAALDARIDEKLEPYRAPHALLMQIPGVDRLVAAVLIAEIGIDMSVFLSVYHLASWAGVCPGNHESAGKQKSGRARNGNVHLRTMLVGAAISASRAKGSYLKDKFYRLKARRGSMRAALAIAHKILVAAYHMLAKGVGYREIGEAYLDQISQTRTVANLKRRLERLGFHVTLQSKAQPTA

SEQ ID NO: 281209 - protein, 312 aa, unidentified
MPTNPPNYVAIDIAKDSLQIQTDHAAWSVPHTAAGHRQLLERLQPLGAVQVVCEASGGYEQPLLRFLHQQGVPVSLVNPARVRAFARSEGQRAKTDPLDAAILLRFAHEKRPLPTPPPAPQQATLAAWLDRRAQLSEQLAREKNRLQKSPRLLHPGIRAMIAFIEEQLAEVDCQLHRVVQADATLRDRAAVLQSVTGIGAVTTWSLLAYLSEIAAADWHRNQLVALAGLAPWNRDSGQWKGKRSISGGRGKVRRCLYMAAQSAAQHNPVIREYVQRLIARGKPYKCAIVAAMRKLLIHLQSLLKHHQNALAS

SEQ ID NO: 281210 - protein, 375 aa, unidentified
MSQSILLYQSFIGVDLHKTTVTLVAVAPDGTMIARLTINTKCREKIKAWLLALPRPSHLAVEAVGFVEWFIECFRPCVDRIDIADATELSNRRGKRRKNDYRDALDVAQRLARGECPCGYIADDELMQLRKLGRHWRQLSSVMARAKQFMKSMLLAANLRGPKFEGASAQRWLLAHGHLLKPAQRRAFANFTCVVQLIELQRQPLRFAIIEACRSERFAPMTKILQSVPGIGEIWSCIIAAEIGPFNRFPNADALEFWAGMTADLKESAGRTQSGPITKAGSRTLRWALCNAALTLCHSDAGQEAIRQRLIRKTGGIKGKANTAMGRRLLRLLYAMVRDGKPYQAGPSRHRNAAANKARAAKRAQKAPKNRKEAA

SEQ ID NO: 281211 - protein, 420 aa, unidentified
MKYARVPQLDAPLGVLSAGIDWASADHAVCIVDAGGAVVSRFTVAHTAEGLKTLVSRLARAGVTEVAIERGDGPVVDALLEAGMTVVVITPRQIKNLRSRYGSAGNKDDRFDAYVLADVLRTDRARLRPLVPDSPATVTLRQACRARKDLVRHRVAVGNQLRAHLLVVFPGAAGLFCKLHSAISLAFLARFDCQDRADWLSQKRLAAWLKGAGYSGRTDPADLHQRLTSAPRGATGEEGAASAQVTRALAAVLASLNTQIKALEAQIAARLARHADGHIFTSLPRSGTVRAARLLTEIGDCRARFPEPQALICLAGAAPSTRQSGKHKAVTFRWAVSKQLRDAVCDFADGSRHESPWAAQIYNAAIARGKDHPLAVRILARAWLYVIWECWHNGVAYDPARHRGLQRLLADQATGTDQAA

SEQ ID NO: 281212 - protein, 372 aa, unidentified
MDAPTRTGIDVPKWKCQQPLEPKGASTMKITTVGIDLAKNVFQVHAVDEHGKVAWRKQLRRDQMTAFFVNLPPCLIGMEACGSAHHWARTLQGFGHTVRLMSPQFVKPYVKSNKNDVADAEAICEAVTRPNMRFVPVKSVEQQAVLSLHRARQGFVIARTAQANQIRSLLGEFGLVIPKGICHVAKQVPELLEDASNQLPGTFRRLIARLTEHLKELDKLVDEFEDQIKAWHRSSELSLRLEKIPGIGPLGASALVASIADANSFDNGRQLSAWLGLVPRQHSSGGKPTLLGISKRGDVYLRTLLIHGARSAIVAAQRKAVNTNVWLASLLNRRHPNVAAVALANKNVRTVWALLAHGREFRPNYVPPQLAA

SEQ ID NO: 281213 - protein, 326 aa, unidentified
MFFIGIDVSKAKLDCCLLLDVASAKRRAKSVANSKAGVGDLLAWCIKQQVPPETLHAILEGTGVYHEQAALALSDAGVTVSIVNPAQVKDFGRSLGVRTKTDGVDSLVLARYGALLTPRPWTPPAHEARILQALLSRREAIAQDLQRERNRLEKADATDIPPQIRQSIIESIDFLAKQLAKIQQDIDDHIDKHPNLKADRDLLLSIPAVGSQVGNHLLAVMHNHQFQSAEQLAAYLGLVPVERQSGTSLLGRPRLSKAGPARIRAVLYMAAIVGTQHNPHIKALYQRLQARGKTKMSALGAAMRKLVHLCFGVLKTRLPYQPNYAI

SEQ ID NO: 281214 - protein, 467 aa, unidentified
MARKVKNIKGKGHKDYPQSLKTIKPHSAGIDLGSREHWVAGPPSKDGKPNVERFGTTTPELLRLADWLKEQGVETVAMESTGVYWIPLFEILDNRQFEVVLANARQISHVPGRKTDMLDCQWLQLLHACGLLRGSFRPSDDICQLRSLIRERNTMVQQRSDWVRRMQKNLDQMNVCVHHAVSDITGVTGMSIIRAIANGERDPHVLARLRDSRCRKSEEQITNELTGNWRPEHLFNLCQALKMYDQFCTVIADYDSEILSCLEVIQPTDNNDKSAPPPDSKSKAMNLTKRGQEPLRQALYRLCGFDLTTIDGIGVDTASVLVSELGLDFTVFPNERHFVSYLKLAPNLSISAGKKVPKKFKASTCTRVATALRMSALTLRNSKTALGAFYRRVSRYKGASVAVFATARKLAQYVYRLVCYGQSYVDGGAQAYEARFNLRRVNLYTKILNDLGYKVQTLTKDEAIDTC

SEQ ID NO: 281215 - protein, 338 aa, unidentified
MMIIGCDFHPRFQQIAFVDQETGEYGERRLNHPGEAELFYRSLAGRKVRIGAEATGNFRWFRKLMQELGHEFLLGDASAIRAACPRRQKTDKRDARHILNMLVEDRFPAVWQPPVENDELRQLLLHRCRMVRMRTRVKNQLDSMAKNEGLLSSRVWSPKRRQEIEALPLPNWYAQRRSDLLGVLDELNKRIKPLDEAVLQAAEENTEARLLMTHPGVGPVVSLTYVLTIGDWKRFPRGKQIGSYLGLIPAEESSSDKRRLGHISKQGNTLLRWLLVEAAAKAQRYDPGWHRQYVRLSMNKHHGVAKVAIAHKLAVRLYWMLRSGQDYKQVMERGSHVG

SEQ ID NO: 281216 - protein, 399 aa, unidentified
MLNPQSLELRVGVDVGSRSHHVAVGLSDGRLLDEFEIPHTAAGFREFFARIEGHAKRHPYPIAVAMEGYNGHVRPLDSLVRVRGWQLFNVNNLKLARFKEIFPAPAKSDRIDSTKSLELFQLRDHLPMAGDVLQEVMATPEENNILKRLSRRRRRLVDERGRVINSMQTDLQAVAPGLLQITRFVGNLWFLNFLTCRKDIRKLSRVRRASLLKLTGIGPGYADCIQAWQQDACFGPDASLVSDMIRQDAMRILQLNRQIRALEDETARIAANSTIACQLASIPGYGSVCTAELAGEIGTIARFRSEGSLALYLGMAALDNSSGKFRGSKAPKHVNTRAKAAMMAAVDHHRKRVPQSQRYYEKKRAEGKRHNQAIRALGRHLCRVIFKMLGEERPYRIDP

SEQ ID NO: 281217 - protein, 375 aa, unidentified
MTKIIRIGVDTSKSVFVLHGVDCAEQPMLRKKLRRRQFLEFFAKLEPTRIGLEACGASHHWARELQELGHEVVLLPPQYVKPYVQRNKNDSRDAEAICEAMSRPRMRFVPVKSAEQQAALMLAGTRDALIRRRTQLTNTIRGYAAEFGLTAAKGLNKIEPLLARIAAAENLPDLAKELFASCAQEYARLKEQLRSIEARLMAWHRSNEASRRLAEIPAVGPIGGALTVMKVPDPKAFRCGRDFAAWIGLTPKDHSTAGKTRLGVITRAGDEALRSVLVAGATAVIQQARKGRGQHSRWLIDLIGRKPPKLAAVALANKNARIIWKLLVSGERYNPARAMRNAAVSEGHGAALRRAPRRAPRSPASQIGATAMIEV

SEQ ID NO: 281218 - protein, 356 aa, unidentified
MRWSLPPSRYYAEDRLSFGELSWKTLRSLVSIWVKTLSIFIARIVAGRLFTVKKFTRPKLIEFLATCPATTIAMEACGGSHFMARKLEELGHSPKLISPQFVRPFVKSNKNDFVDAEAICEAASRPSMRFVQPRTESQQAMRALHRVRESLVQDKVKTTNQMHAFLLEFGISVPRGAAVISRLSTILEDNSLPLYLSQLLLKLQQHYHYLVEQIKDLESQLKRKLDEDEVGQRLLSIPCVGTLTASTISTEIGDGKQYASSRDFAAATGLVPRQYSTGGRTTLLGISKRGNKKIRTLLVQCARVFIQKLEHQSGKLADWVRDLLCRKSNFVVTCALANKLARIAWALTARQQTYVA

SEQ ID NO: 281219 - protein, 355 aa, unidentified
MDSKKYIGMDVHKESISIAVMNGAGKVVMECIIETKAGMILQFIDGLRGDLQVTFEEGTSAAWLYDLLRPHVTKLVVCDPRKNKSMREGNQSDKIDARRLAELLRLDHLTPVYHGEHGLRTLKELVRTYLTVTKDLTRVMSRVKAIYRSWAIPCTGKQVYAQRHRAAWLGKINEPGVHRRAEFYYQQLDALRVVRQEVRRDLLAESKKQKAWKRLCQIPSIGPIRAAVLLGILQTPHRFRTKRPLWNYGGLAIEMHSSADHRKVDGQLQRSRKNVLVRGLNRNCNHDLKNLFKGAAAVASSKPGPFQEFYTALLAKGMRPEMARLTLARKIATIVLIVWKRGVCFDAQHLKPQTA

SEQ ID NO: 281220 - protein, 405 aa, unidentified
MFPEHDTVDVFIGIDVGKTDHHAVAIDRAGKKLLDKPLPQDEAKLRALISNVSGHGRILVVVDQPATIGALPVAVARDMGVMVGYLPGLAMRRIADLHPGEAKTDARDAAIIADAARTMPHTLRSIVLADEQAAQLSMLCGFDDDLAKQATATSNRIRGLLTQIHPALERAIGKHLDHPVMPALLEKYPSPDALKKAGQKRVATFMRKYAPRGGNAWAADIFEALDQQTVTVAGSDAAGLVLRQLGTQLAQLRAAREEVFEQVEVLVNYHPLCHLLTSMPAVGVRTAARIITEVTGKHFETAGHLASYAGLTPVTWRSVTSIRGDHPSRKGNKVLKRALFLSAFAALKYPDSRAYYDRKRAEKKKHNQALVALARRRCDVLFAMLRDGTFYTAPTTPKVPIATAA

SEQ ID NO: 281221 - protein, 416 aa, unidentified
METKREVVCGADIHKQFLLATILSNSGQKIQARFDMDFEGLLSFRKWLLDHSCQKLAVESTANYWQPIYLIIGKDVEFVLANAYQIKHIPGRKTDVLDSEWIAELCLKNLIAPSRIFSGEYRDLRAITRTRENYVKMRSQIKNRIHQELESACIKLSSVLSDIFGKSGIHIIRGILSGSNIEDILNRIPSKKIKAKREEIRNAIQVNISPVQVDLIGRLLDSIDFLSKEIASIDMQIQTLTAGRQEDLKIAMSIPGMGITSATTILAEIGNFADFKTGEQLAAYCGLVPSVYQSAGKLITGHITKRGSPHVRRMLIEVAHAISRTKADSKLKRFYFRIKSRHGAKVAVVALARKVICILHHLIVNKEMFEDETKNKFRRVKSIRSSSSPEMIVSDAIQILIRAGYVVQKRSEQEGG

SEQ ID NO: 281222 - protein, 411 aa, unidentified
MSLDHRCTEPTAIHTQLAAIFVSLELSRKTWLVTSVSPQGGSKMSKHSVAGGDMAGLLARFEDLRSKARVAAGKTYPIIVIQEAGLDGFWIHRVLEAEGIESHVVDPASIATSRRRRRAKTDKIDGEALVRALLAYKRGEPRVCSMVRPPTPDEEDHRRVSREYKALITERVRHVNRIKGLLFAQGVPDYEPLRRGRRQRLETLRTGDGRPLPLRLEAQIARELDRLELLLDQIKTVEKERASMLTSVLAAEAGKAANNKANQASIARASPAPALPARPQAMLMELKSIGPDFAAVLWTEGFCRSFANRRQIAAYAGLAPTPWKSGNVSHEQGISKSGNPRLRTTMIQLAWLWLRHQPDTALARWFRERIATVRNARKRTIVALARKLLVALWKYVSAGVVIEGAVLKTAA

SEQ ID NO: 281223 - protein, 386 aa, unidentified
MPQLNDLSRSLITLEQDATLIAVIEMGQSSWLVAGIVPGVERQPLKKLAVDESALLKLLNRWREEAEQAGHRIKRIAVAFEAGRDGFWLARWLRTRGIETHVIHASSVAVSREHRRAKTDRLDTELLKRAFLGWLRGERDHCKMVAIPTTKDEDAKRPNRERESLVGEQSRIVNRMKATLTRLGIRGFNPKLKKAAERLDDLRTPEDQPIPPNTLAELRRDMVRRRLVSDQIRQIEGARLERLEQAPCDGPHAMVRLLARVIGVGIETADMLVQEVLSRNMRDRRAVARYAGLTGSPDESGQKRREKGLARSGNARVRRGMIQLAWRFLMFQKDSALAQWFRARTENARGTRKTMIVALARKLLIALWRLVRDGVVPDGVILRPAQ

SEQ ID NO: 281224 - protein, 344 aa, unidentified
MVTIGVDTHKATLAASAIDEAGRERGAETFPNDGEGHAQLLHWARMHGPERRFGIEGSGSYGAALARLLVASGEQVVEVPAVLTDRERRHLRRAGKSDPGDALAIARVALREKSLGPAPMPGITEDLKLLVDAREQCLAERTRVANQLHAHLVVLTPGYKREIRNLSAARYMAAVARLLRRVGGVRAELARAELVRLRALDAESDALEGRIRALVQLSGSSLPTIRGVAALTAAKLLGETGDPRRIHSAPAFALMSGTAPIPASSGQTSRHRLNRGGNRQLNRALYTIALTQARTDPRAKTYMARRITEGRSWPEALRCLKRHLADVIWRTMLADAQRSAEIGA

SEQ ID NO: 281225 - protein, 371 aa, unidentified
MNEFSKVFGLDVHKDTIAVSVAMAHGGEVRYEGEIANTPEAVAKLVKRLKKDASTLSFCYEAGPCGYELHRQLVSLGQDCQVVAPALIPKKPGDRVKTDRRDSLTLARLHRAGELTSVWVPDEAQETLRDLTRAREDLKRLERQAKQRLLAFLLRHGKRFSGKSRWTQTHFRWLESLTFSHPIQQIVFQEYVDTIQALSRRVAALSSQVEKAGTESAFALQIQGFMALRGVDRLTATTIVAELGDLHRFTTAPQLMKYLGVVPSEHSSGPKKSRGGITKTGNGHVRRVLMEAAWTYRHPARKSAALQRRGKSTTEQVQEIAWTAQKRLCGRYRKFVARGKIQSQVCTAIARELTGFIWAIGRALPTPEAKV

SEQ ID NO: 281226 - protein, 394 aa, unidentified
MFYLGIDIGKRTHVASIMNAEGKVVLKGFSFLNSLEGAHALLDRLNAFSATPDDFLIGMEATGHYWLALFSFFDEQGFYTHVINPIQTDGWRKGTEIRKRKNDIIDSVLIADLIRYGSFQETALANETMFSLRQLTRYRSYLVGTAGDFKRKIIAILDQIFPEYETVFSKVGIFGKASKAVLLEFSSPEKFNQVSAKVLAEALGLASRNRVGTAKAEALKSAAAHSFGIRFAKEAFVFQMRSMIDQLIFLEDQIKQTENEIEQLMASLDSVIETIPGIGPVLGATILGEIGDIHKFSNPKKLVAYAGIDASVTQSGEYLATHNVMSKRGSPYLRKALFQAALIASRHDPVLKAFYDKKRAEGKHHLTALGAVSRKLCYIIHAILTKNEPYEIRQ

SEQ ID NO: 281227 - protein, 426 aa, unidentified
MSVRDYSKQVARRQRIGDTTLVVGVDIGCAFNAVGFMSKEGKVLGSYPKMPNSREGFEQFVEMTEGLKVKHGLSEVLIGMEPTGHYWRKFAYFAKEKGYEVRFVRTTALKHHRELDESSSAKSDKRDALTLTNITREGKYIETVIEDGKMRHLRTLVKVREKIQKRNASAKNSLHAALDDYFPELKEIFWSMHSRGLWALLQRCPFPVDVVSLKTSALREIIARASRRRAEAFRKAMAVSQAAKESIGLKEIGSADRYRLRMCLDEVKRMELMIKDIEREIKRMLKDIPQAEYLLSIPGIGPISAAVFFGELGDPSYFPGARQIVKYAGYDPQESDSGYRVSRKFISKKGRWLLRKHLFLMSMRAVVLSRYFQEYYQRKLQTKNRFGQLPRKKEILCAVAIKLIKVIFALLRDKRNFEDTVTRTVQ

SEQ ID NO: 281228 - protein, 344 aa, unidentified
MDHFGGLDVSVKETSICIVDDTGRIVKEVKVASEPAALLKVLGNPTYRFKRIGLEAGPLSQWLFSALAEAELPVVCVETRHMQAVLKAQVNKTDRNDARGIAQMMGVGLYRPVHVKTLRSQKLRMLLTHRKLLQSKAIAIENDLRGTLRNFGLKVGMVGKVRFEARIQELVKNQPDLAVLVEPLLIVRRALREQIVILHRRLLAIVRDDEVCRRLMTTPGVGPVVALTYRATVDVPARFRKSKSVGAVFGLTSSRYQSGEIDWDGKISRCGDEMMRVMLYEAAQSMMHSKKWSWLTAWAMQIARRRGMKKAIVALARRLAVIMHRIWVDGTEFRWTREQAAAAA

SEQ ID NO: 281229 - protein, 357 aa, unidentified
MNNLNFEGQNIYVGFDAHLKSWQVTILTDGLNLKTFTMPPKPEVLSEYLHRNYPGATYHSAYEAGFSGLWAHYRLCNLGIHNIVANAADIPGTQKDRLQKEDRRDSRKIANALRSRTLTPIYTPSERTLNDRALIRSRRTLVRDLVRFKLRIKSFLNFYGIQYPEEIKTAAKYWSNLFLDWLTELPIKQESGRKALDMLVYEARYHKKMILDVTRQIKQLSENEIYAKRSKLLRSVPGIALINAMAILTEVEDIHRFPNAERYASFIGLIPMSKSSGEKEKIGQITFRAHDFLRCMFIESAWVAIRMDPALLSAYQKLIKRMEPNNAIIRIAKKLANRTYCVLKYDKPYELGKTDNL

SEQ ID NO: 281230 - protein, 420 aa, unidentified
MNHPKMRFTYVGVDSHKDTHTAVFLDCFFDKLGESVFDNLPSKFPAFLGDAEKLKQDGTELLFGLEDTGEFGRLLTVFLTDAGQQVKHVNSYLVARERKNQNITQKTDSIDAECAARVLLSKFGELPAADPSNKYWILRTLVVRRDQTVLSNKRMKTSLHNLLTQHYPNYRKFFVGTFGKTALAFFKTYPSPKTLDKVTVEELADFFQEASNGGIFGPGLNSIDRAKLIFDTLQNTAVPFQEIRDEAVRSTIRQIEFNLAEIERIEFSMATYLETFDCTLTTMTGIDVVSACQIMSCVGDVKRFPTPAKLARYSGIAPVTHASGKKDYQFANQRGNRELNSLFYWLAVRVSTPCGPNHKILNQFFYDYYHRKMSEGKTKRQALKCVQRRLVNIIWTMLTNSEEYVNPPVMDMPEPEAKAG

SEQ ID NO: 281231 - protein, 316 aa, unidentified
MIDTKCWVGIDVSKQTLDVHIRPSGHIFQYANEKDGIDALVASLESVSIERIVLEATGGMELPAAVELSQSGIAVAVVNPRQTRDFAKATGQIAKTDTIDAAVLAHFAEAIQPETRPLASEESQLLGELVTRRHQIVDMITAEKNRLAAMHGPMKAHIEQHIEWLKKQLDELDEQLQKTIRKTPVWCEQAKLLKSVPGVGEVLSSVLLADLPELGKLDSRKIACLVGLAPLNRDSGKSRGKRMIWGGRSRVRTALYMPTLVAIRYNPVLKTFYERLVGQGKPKKVALTACMRKLLVILNAMVKSNQRWNPEIAGGA

SEQ ID NO: 281232 - protein, 433 aa, unidentified
MQDVQDEPLFCERVAGLDIAEAEVEVTIRVPSDTTAGRRQQETRTFGTTRRELESLGDWLACWGVTRIGMEATGDYWKPVFFLLESRGFDCHLYNAAQVKALPGRPKTDRADSIWLARITERGSVCSSFVPPEPIRALRTHTRYRRHLTQARTAEKQRVEKLLEEGHLKLSSIISDIHGVSGREMLNAIAAGQRDPRVLAQLARGTMRAKIKRLEEALDCAFFTGEHAAVLAMMLATIDHYTTQIDNLTAKIEVLAEPYLHQIRQLDEIDGVGPVCAQDIIAEIGTDMTVFPTAPHLVSWAKWSPQVKQSAGKRKGSNATGRGNPYLSAALGEVSISAGRTQSFLGAKYRRLARRMPKKKALVATGNSALTIIHALLSDPAARYTDLGPDYYEQRMHARRQARNHVRSLERLGYKVTIQAINPDTGELLAAAG

SEQ ID NO: 281233 - protein, 371 aa, unidentified
MNESSKMIYVGLDVHKDAIAVAYAPEDRGAEVVSLGSVGPRQCDIDALIRKLQSKGATLGFVYEAGPCGYWLYRYLTRKGLSCHVVAPSLIPRKPGDRVKTDRRDAITLARLMRSGDLSSIYVPGIEDEALRDLSRGREAAMEDLKRSKRRLKSFLLRQDIRYEGRASWNAAHLRWLSEVVCPTPPQQIVFQEYVRAVTEQSERLQRLERELHEAVKGWRLYPVVEAIQALRGVELTGAVILMTELGDLTRFDTPRQLMSYLGLTPSEYSSGARRRQGGITKAGNTHARRALVEGAWAYRYPAKVSRHLQLRLEKLPPEIQAIGWKAQVRLCKRYRQLTARGKHVNQVVVAIAREMAAFAWAIARLVPRAA

SEQ ID NO: 281234 - protein, 343 aa, unidentified
MQAVKTIGLDIAKSGFQVHGVDADGQVVFRRQLKRRHVLAFFQKVPSCLVGMEACATSHHWSRELQALGHTVRLMPPAYVKPYVKRQKNDATDAEAICEAVSRANMRFVATKTPEQQSGLMLHRTRHLFIRQQTAVINAIRAHLAEFGIVAPVGRNGLEQLLNVVADAGDKRLPEVARTCLMALGTQLRALKAKLLELDRMITAWHRSNETSKRLDAIPGVGHVLATALVASIADPKVFRSGRDFSAWIGLVPKQHSSGGKDRLGSISKQGDRYLRSLFTAGALAVIRYAKIYGTKHRPWLTALLARRPTKVAAIALANKLARMAWAMMTRGARYKEPVALAA

SEQ ID NO: 281235 - protein, 379 aa, unidentified
MDHANTGTPAETILHGALELSKNSWLLALQFPDRAQPSLYPISGGDTVGLMAKLTAARDRWAKMSGKAPSIVLCYEAGYDAFWLARFLKARGIECLVVDAASMQVNRRARRAKTDRIDVGMLLRALIAWGQGDRHVWSVVRVPSVDEEDLRRSHRERDRLVRERTAHINRIKGLLFGQGIRGINVKTKYKTLQIDKLVTGDGGPLPPRLASEITREIARLALIQEQIATLERERDQAPTPCKATEKRRLQLMSLNGIGPAIAAVMTREVYYRQFDNRRQVAGFLGLATSPHDSGDVERSQGISRAGRGQVRGTMIQAAWLWLKHQPKSAITRWFVQRTAGQSGRIRRIMIVAVARKLAIALWRFLEQGLVPQGAMLANR

SEQ ID NO: 281236 - protein, 452 aa, unidentified
MELDIINPNCVGIDIGSKSHFVAVGQALEDVKEFGVYADDLTAICLHLKTYGITSVAMESTGNYWQNLYVELERHGMEVTLCNGKFTKHAKGKKTDVKDCRWIQKLHALGLLTGSFLPDETTEQLRTYCRQRTNWIDLAAEASHKMQKYLRLLNFRLDVVVKDICGLTGLSIIADICKGNLDPISLAKHRNGNCKKSEEEIAKALKGNNRADFLFGLKQEYDSYLFFQKKIDACDVQINSFLKTQINTHPDKKKLRTDNKIHKRINKNSLKGIDLNQAAYQYFNGVDLMKIEGLSHSTILTIMSEVGPEGFPKFPSSKQFTSWLRLAPNNKISGGKILSNKIPKGSNRLKIALRHAANAIGNLKDTHLSDFFRRVAYRKGRATAVSATARKLAVILWNMITKGIQYNPPMEYLFLDQKRKLRMVTKIKKSIAKFELKPDDLGFVDASLSVSL

SEQ ID NO: 281237 - protein, 344 aa, unidentified
MLQVSTIGLDIAKHVFHVHGADGKGRAVFSKRISRGKLLDFFAALPNCTVALEACGGAHHWARQLTQLGYEVRLIPPAYVKPFVKRQKSDAIDAEAICEAAQRPSMRFVAVKSEEQQAAGLVFRTRDLMVRQRTQLINAIRGHLTEYGWIAPKGPSHVATLADLIEEEAMASSLPEAARPMFRVMLDLLAELNGKIADLDKEIARRAREDEVSRRLMTIPGIGPISATAIVALAPPIETFAKGRDFAAWLGLTPLQKSTGGKQKLGATSKMGERTLRRLLIIGSSAVVQQASKRGAPKGSWLEQMLTRKPRMLVTVALANKMARIVWALLVKRENYRAPVSAKA

SEQ ID NO: 281238 - protein, 391 aa, unidentified
MEPEGKTIGHQTFSNTLSGAEAIESWLLKIMKENDFSDLKIATESTSFLDLHLVDFLAQSQELSPFIPSIYQLNPKLVRNFKRVYSDKEKTDKVDAFVIADRLRFGRLPEPYESHQPYLPLRRLTRYRYHIVQSISREKAYFLTHLYLKFSAFSVEKPFASLFGATSLALITEFSPDELVSLPLEELTQLIIKTGKNRFEDPEGVVEAVKRAARESYRLRPSLASSIDLILGSILQTIRALQESLKKVDRAIEKEFQAFPNTLQSIKGIGPVYSAGIFSEIGEIRRFPREDALAKFSGLYWKRYQSGNFEAEETRMSKSGNEYLRYYLIEAANALRVHNAEYRAYYETKFKEVTKHQHKRALALTARKLVRLVYALLKKGQLYRANYQQEA

SEQ ID NO: 281239 - protein, 347 aa, unidentified
MNYCGIDVAMKSSYIYITDAQGRKKASGEIPTTYMTLRRRLRPFVRGGLKIAIEAGNQTAWIYESLVDLGAEVVVVNPAKVKLIAESRRKTDKIDAKILCELLRLDGLPHPVHMPGRSARELRGLLVARRQLLAARTKLCNVVRGLLRQEGVCLPSRYLLTFQGWQTLLENEGYTCEHIRPVLEAYFSTFESLTRSIQALDRELASRERADKRAARLQTMPCVGRIASLTFLAAVDDVRRFGSSRKLVSYSGLCPTVRSSGERTEYGSISRAGRAELRAVWVQIAHLVVRDTHRNTARLRAWYAKVARKRGSKTAIVAMARKLLTIAYRLLMDGTEYRSWLVSRRAA

SEQ ID NO: 281240 - protein, 414 aa, unidentified
MALARWVGRAIGLDVHRDFCVVAICEDGQVRTGARVASTPEGIELLAQSLLASDRVALEVTGSCWEVARILEPHVERVVVVSPDDTGISQARAKTDRLDARTLARLLWSGELESVWMPDERCRVLRRRLARREQLVRSRTRVKNEIHAVLQRRLQGKPPCSDLFGVKGRRWLAGLELPLEERESVDAGIRHVEFLDAEIGTVDRLIAQQALAWPEIRRLMTVPGVNLICAATFIAAVGDPRRFLTSRKLVAYLGLDPKVRQSGDTPARSGRISKRGSAAARWALVEAAWSVVLQPGPLHAFYDRTRARRGHGKAIVATARKLAILFWCMLCRGEDYAHQQPSLTRKKLRRLEITAGAPKYAKTAHGVWSSNTAIRQAERELATQAETSYKRMVTDQQAGAPARKVGASATPERA

SEQ ID NO: 281241 - protein, 390 aa, unidentified
MTYIVGIDIAKYAHTCLVINHHGEVIIESFNFDNTYEGFKTLGSILNSLDSSQIKIGFESTGNYGHNLKNFLIKSGYDFMEIHPVLINRFSKANSLRKTKTDKVDVSMICSYLNTVDFKSYSKESYHNTSFKSLVRDRDKLVKQRSQELVTLTNLLDVVFPEFKPFFSSSLKSATALYILEEYTVPSRIKRMNANSYNKMKSKLRRTISYARFVELKKLADNTIGIEDDILFFQIESHISQLRNLKNTIDKYDELITNEFLKRKSFIHTIPGIGIISAATILAEINDIYNFNHHDKLVAFSGLDPAFYQSGETEFTGKMVKRGSSLLRQTIMNSAQYSLIHNHKFYDYYNKKRDEGKPHRVALSHVAKKLIRMIYTLETKQIAFDINQMK

SEQ ID NO: 281242 - protein, 339 aa, unidentified
MSQQYVGIDLHRRRSVIVRLNEAGETLSTVSIDNDPVALALEVARAGPDPEVVLEATYGWYWAADVLEAAGARVHLAHPLGVVMFSHQRVKNDRRDATNLAELLRMGRLPEAWIAPPELRELRELVRYRAKLVALRSGLKAQVHAVLAKEGVHVPMTDLFGVAGNRLLDTLQLAPAFDARVRSLRDLIRVYDTQVVAFERALNHELAGHAGYRAIQAIHGVGRVFAALFVAEIGDVTRFPGPRQLCSWAGLTPKHHESDTVVRRGSITKQGSRLVRWAAVEAVTQARGTSKIQVDRHRLAERRGTGIAKVAAARKLLTLVYYGLRDGEIRCLTRPKAAA

SEQ ID NO: 281243 - protein, 420 aa, unidentified
MNAQWAEQSCFAALDWAKNHHDVIVVDRVGTIVADFQFEHTIEGWRQFDQLMQGFGQCPLTIETSCGMAVDQLLQRGYPVYPVNPKAAQRYRERKAPSGTKTDRHDAWALADALRNDGHAWRVLRLQDEATATLRLLCRDEIMLIEQRTALVNQLQAALSDYYPLALASFEDWTKPFAWAFVHSFPTAAALAQAGKRRWEKFLHVHKLWRPETAPERLRLWAGGQQLQASPAVITAKSLLALSLATVLESLQRQIDEYRRQITGAFVRHPDHDIFGSLPGAKEKLGPRLLAEIGAVREIFPDADSLLCLAGVSPVSHQSGQIRKARIRWACNRVLRHTVHLWVDESRKTCDWAQAYYQVKRAQGHSHASALRCLGKRWLKLLWRLWQDHAAYDETKHHQSLKQHGSFVWQKLHPLQTTAM

SEQ ID NO: 281244 - protein, 412 aa, unidentified
MDVLIERCAGLDVHKDTVMACVRFPGSDGRRAQEIHEFGTTTAELLALGDWLAAHGVTVVGMESTGVYWKAPFYVLEDAFTCHLLNARHLKNVPGRKTDVRDAEWIAQLVEHGLVRPSFVPPKPIRELRNLTRYRKAQIEERTREAQRLDKILQDAGVKLSSVATNILGVSSRAVLKAMVEGTTDPEVLAELARGRLRVKIPALKEALVGRFGPHHALIVGTILSKLEFLEEVISHLSDEIEEAIAPFGRQVELLETIPGVDRRSAESIIAEIGVDMARFGSSARLASWAGMCPGNNESAGKHRSGKTRKGSKWLRVTLTESAKAAARSKGTYFSAQHARLRGRRGAGRATIAVGHSILVAVYHLLDRNEPFHDLGADFFVGRHDPQRHANKLVRQLKTLGFEVNLQPVEAA

SEQ ID NO: 281245 - protein, 335 aa, unidentified
MDVIKQSIGIDVSKNSLEVKFKEKNTKGIKIKGSSKFDNTSNGFINLLEWCTKREKVKNVVYVLEATGVYHEDVLYFLFDQGKKISVELPQRIKYFAKSKGVKTKNDLIDSGIIADYGLERELKVWQPPGKEFKTLRDLSREHNTLTNSKSIAKNRLHAAKHSHDKNIRVIERLQSTIKFYSHQLSEIEKDIKTTVNADKELSGRIKKVTTIKGVGIMTVVKIIAETGGFYLFKNINQLISYAGLDVVENQSGNHNGKTWISKKGNADLRTALYMPAMSAIRFDEKIKSFNERIMATHIYKKQGIVAVMRKLLILIYTLWKKNEEYNSDYKWGRV

SEQ ID NO: 281246 - protein, 482 aa, unidentified
MKKRNIYQNQSQELLSLFEQAANNAKVMCVPIDYAKKDHVVMFCNGYGDILRKPFSVKNSPQGVDYLTDQVMRSCRQRAISEKHVFFGGEDVGSFADNFVSTLRCQGWLVAGVNAHEAKTQRENLQASTDRLDLMGIAKSLLNRRANCSPAQSGIYLNLRTVVRHRRKLVDITTEVKNRIHAVVDRLFPGFLNESKSGITPFSKSSLWLMKERFSAGQIRRRRRPTLIEALRRLGTKKPECTADQLQQYATQVLKPPQDYVHMLQLSLAQHVTHFCCLQESIGQLEKEIAVNLAQTQGAFLTSVRGIGIVLAAGVSAEIGNPFEQKPLNNLVSYCGIIPRVKQTGGPQGETKTGKVAKRCNRILKDYAVQSASHLGLHGPADLMSDYKRRDAAGQHADFGMTRRYLRMAMCLMRTSQIYLPSGLRKAQGQMDERADYYLITWPYLRDKWQKSGALEIAFKADQPLGQWRKIVQQFYGIKLTL

SEQ ID NO: 281247 - protein, 344 aa, unidentified
MKHYAGLDVSLDETSVCIVDEAGAYVAEAKVASDPAALADYLHETGLSFGRVGLEACPLSQWLYSGLAGAGLPVVCVEVRRMKAALSAMINKTDRNDARGIAQMMRTGWFQPVHVKTTESHELGFLLVARKLLLKQQYEIESCIRGSLKVFGLKIGVVTKRMFEARVRELIDERPLLVTIVEPLLRARARIMAEHNRLYRMVVRVVQRDPVCRRLTSVPGVGALVALTYRTGIDVPARFLRSKAAGAHLGLTPRKHQSGEVDRTGHISKVGDEMVRSALYEAANVMMSRVVKWSALKAWAMRVAKRQGLKKAKVVLARKLAVILHRIWVDGTAFRWSARAEVAA

SEQ ID NO: 281248 - protein, 411 aa, unidentified
MRLFVGDDWAEDHHDVELMDERGRVLARGRLPEGVAGMARLHELIGEQLGEDADDAEVVIGTETDRGPWVSALVAAGYTVYGVNPLQASRYRERHGVSGAKSDRGDAHMLTDMVRTDSHQLRAVAGDSPDAAAVKVVARTHKTLIWERTRQVQRLRHQLREYFPAALEAFPHLDAPDALELLGKAPDPATAAKLTRAQISAALKRARRRDIPGKATVILAALRSAQLSQPPAVTNAYAVTVRSLAAVITVLNEQVKTLQRQVEADFGRHPDAEIYLSQPGLGPILGARVLGEFGDDPDRYASGKARKNYAGTSPITRASGKRKIVAARFIRNNRLTDALMAQAFNALGASPGARALYDAERARGTEHNPALRKLASRLVGILHGCLKTRTLYDEATAWPHREKTPQSDIAA

SEQ ID NO: 281249 - protein, 358 aa, unidentified
MEYGAIDLHKKESQIRIVTERGEVLDRRIATTRERFTAVFEGRRPMRILLEASTESEWVAQHLEALGHEVIVAEPTFAPMYSERSRRIKTDRRDVAALADACHRGCYRAAHRRSASQRTVQAHLNVRRELTDSRTRAISLARAITRGAGLRIRSGSTGSFLVRVAALDVPSPIAETLAPLQRVIAVLNDELGTADDRFASIATQDPVVARLTTMPGIGPITATAYVAALDDAARFGRAAQVASYLGLVPREYSSGEQQRRGRVLRSAHPYVQSLLVQGAWRVWLSKDPRTADLRRWAQGIAHRRGKSIAVVALARRLARILFAMWRDGVPYDAVRTRPTRAHRDTAIGEAAEPSAGPS

SEQ ID NO: 281250 - protein, 421 aa, unidentified
MSKVSPVINGLPVIHERAAGIDIGSRFHVVAVPSTLSDEPVQTFQAFTADIQRMADWLKTIGVETVVMESTGVYWIPVFEVLESAGIGVMVANARETRSVPGRKSDINDAQWLQRLHACGLLRASFRPGRDIAALRAYLRHRERLLDYAAAHIQHMQKALTFMNLQLHHVVQDITGVTGMKIIRAIVAGERDPQVLAEFRDVRCKSSIEIIQGALVGNYQPEHVFALTQSLALYDFYQARVDECDVQIEQALAVLKANKPEPEQPIPKARHRTKQPNAVNFDVRTALYQLIGVDLTQIHGIGPFLALRLVAECGTDLSKWHTAKQFTSWLTLSPGCKISGGKVLSAHSRKSSNRLTAHLRLAAVTVGRTNTALGAFYRRLAARIGKAKAVTATARKIAVLFYNAMRFGMHYSDPGADLYEQ

SEQ ID NO: 281251 - protein, 371 aa, unidentified
MGEYREAFVGIDVAKGRNAIAVADGERGGEVRYLGEVDASPASMARIVRRLAEKYDRVQFCYEAGPTGYGLYRLITALGHACAVVAPSLIPRKPGERVKTNRRDAVALAKLLRAGELTAVWVPDAGHEAMRDLVRARSAAVETLRVHKQQVSAFMLKHGRHYPRKKAWSMRYLRWLQEQQFDHPAHQIVLQEMVEAVRLAKERVERLERTIEEFLPAWSLAPIVGALRALRGVDLIVAATFVSEVGDIGRFDNPRQLMSYLGLVPSERSTGDSVRRGGITKAGNRRVRHMLVESAWTYRHSPRLGAHKLYILEKLPAKVREIAWKAQMRLTARYRALAGRGKRTTVVCTAIARELVGFMWSVAHEVEVRSA

SEQ ID NO: 281252 - protein, 338 aa, unidentified
MTIIATGIDLAKNVFAAHGVNDAGKVELRQPRVARAKLNALVAALPPGMIGMEACSGAHYWARLFQSHGHTVKLMAPKLVTPYRMSGARGKNDAADAAAICEAMQRPNMRFVPVKSEDQQARLMVHRARQGFVTERTACINRIRGLLSEFGIVLPLKAEVVRREARNHLEDLPGFANLVIGDLLSELTHLDERVKQYDIHIRTMARDCNAAQQLMQLMGIGETTATAIVAMVGNASEFTCGRQFAAWIGLVPGQYSSGGKARLGRITKAGDPYLRSLLVMGARAVLNAAKGKQDSLSRWAVSVAERRGYWKAVVAIAAKNARMAWAVLTRGAQFKLPA

SEQ ID NO: 281253 - protein, 617 aa, unidentified
MLQLSEPRIALDPSADARQASGPHHTSPRSRTPHGPSRNGASSHCARPRKASTKTLGIRRAVAPGTLRVAWLGAAARQDQATEQGKTGAAIIAPAATFAAENARLRAAENGDPPAHPVPAAPPSFIRGEFPSALRTLIDETIYDCDRQGGRCYLDITNSRESLTRGPLAYFGLLPWRHHPQGDGDREHGGESTVSQGHHAGWYLVEGSVMKVMHRRCAGLDVHQKEIVACRRRFVGRKVEAEVRRFATTTPGLLELADWLAEGKVTHVAMEATGVYWKPVWHILEGRFTLILANAAHIRNVPGRKSDVNDATWIADLLAHGLIRASFVPPQPIQELRDLTRTRTELTREVVRHTQRIQAVLEEANIKLASVISDIVGGSGRRILKAIVAGETDARTLAKLGSLRLKASRDELVAALTGCILDHHRFLIDQHLQMIERIETAIADFDARIEAVLAPFRDAVKRLIDIPGLSTTAAQIVLAEIGADMSAFPTADHLVSWAGLCPRLDESAGKRRSTRVRKGAPWLKPVLVQSALAAGRTKNSSFRTRYHALKSRVGPKKAAIAVAANLLRVIYHMLKDGTFYQDLGEAYRRPRNPARAAATLANRIRALGYQVEIKQAA

SEQ ID NO: 281254 - protein, 414 aa, unidentified
MRIIYENVAGLDVHKKTVVATTSVKQANSTWHEERRTFGTMTGELLSLSDWLLGQGVTHVAMESTGEYWKPIFNILEENFEVILVNAQHLSRVPGRKTDQSDADWICELMQYGLLKASFIPPKGQRELRELVRYRTSFVRERATLINRLQKVLEGANIKLASVVTDIMGASGRAMLEAIVGGSATNAEMAELARGSLRGKRDELAKALEGRVKAHHRFVLTELLCQIDSLEDSIARFDQEIEAMCRPFEEVIVLLDTIPGVARQTAEIIVGEIGVDMSRFPTADHLASWAGVAPGNNESGGKRRSSKTRKGNQHLRTALTQAANAAARTKGTYLQAQYHRLVGRRGRKRAIMAVAHSILIIAYHLIVRKEPYRELGGDYFDNIHPEKTAKRLIKRLEQLGFQISIVEALAPVVS

SEQ ID NO: 281255 - protein, 291 aa, unidentified
MNEVTMIGVDLAKSVFQAHGATAAGEPVFRKKLSRGQFLKFLSEQPSCVVAMEACASSHYWGREIMKLGHEVRLIPPIYVKPFVKRQKNDANDAEAIAEAAVRPTMRFVPVKSAEQQSRSMVFKTRDLFVRQRNAIINALRGHLMEYGIIAPPGRNFVKKLAEQIESPDCDLPSIVIDLSRVHLDQLSVLTDKVVAIERRLKDEAKSDPETIRLQTAPGIGPISAMAIKAFSPPLEGFKRGRDYAAWLGLVPVQKSTGGRQILGRTSNPLGTMLRMTLTGNGWGTVISAGC

SEQ ID NO: 281256 - protein, 345 aa, unidentified
MEQLIRIGMDTSKRVFQLHGVNAAEDVVLRKKLRRKEMVALFADLAPSVVGIEACGGAHHWARLLRSFGHEVTLLPPEYVKAYRKRGKNDAADAAALCEAMSRPTMRFVPVKSAEAQAALMLAGLRERLVRQRTQLSNAIRGYAAEFGHVAAKGLDKIEPLLARLAADEDLPELAHELFALHAKEHAELQAKLAAIEAKLMAWHRTNACSQRLDKIPGIGPVSAAMLTMKVPQPQLFRSGRDFAAWIGLTPKNHSTAGTTRLGVITRAGDETLRSLLVVGATAVIQQVQRGRGRPSPWLAALLKRKPPKLVAVALANKLARIAWKLMVSGESYRAAPTPAMPVAA

SEQ ID NO: 281257 - protein, 378 aa, unidentified
MHKDSVYLCILRENGEKIERVYGVLTPQLDSMRDFMAENKVSEVAMESTSVYWIPIWRVLVDSFELKLVNPYFIRQLPGRKSDVKDAQWIAECVMKELIRGSFIPSPLVQRLRLYDRRIFEINAELVRKYSKIDAILQRCNIRLSNYVSNTDCKSYKAVVKQISEGVTSPQELLRHVHKRIINKHGEDTILAALTGVVSDAEIDMLAQYVAESAILEDNKNKCIEKMREICNTEFKEQMKNLQEIPGVSERSALTVLAEIGPDVNAFPSAKHLVSWCGFNPRNDESNKKIKSNKITHGNRFIRIASVQCAWAASRTKDCYFSKFYAFHTQVRKKFKLKVVVAVARKVLVCIWHILKFNVTYKDFEPQKSVAKDCTQLA

SEQ ID NO: 281258 - protein, 342 aa, unidentified
MYYIGLDVHKKTISYCVKDASGQVQREGTIGATRRELDIWIQTLPQPRIMAMEATIFTGWIYDHLLPHAEQVKVAHPLMLRAIAAAKKKNDRIDAGKIADCLRCDFLPECHMASTEIRDRRRTLRYRHLLVRQMVQMKNRISGLLMETGVSHNKQRLHKVGYFRELLASNPEIHENIRPLLRLSRDTIVRCQKTEYALVNSLQRDPLLAERIKRLRTVPGVGPITALTWALEIGDVSRFRSIQQAISYCGLCGEEKSSADKALRTPLSKQRNKYIQRVLVEAAKLAPRQNHELALIHEREKQKGNRNRATLAVARKMVAYLIAVDRRERDFVPAEGHPTTAA

SEQ ID NO: 281259 - protein, 483 aa, unidentified
MSKKKREYIRGEKEERFKRKIKGIEKKKILGISIDVSKDYHKALIFDFEGRLVDGPFEFSVFKDGYENFKQRVGEAIKKKGAKKIFFGLEPTGPYHENLARHLKENFKEVEFINPSATYANRAQDMLVGLKTDDIDLGAIGDLLMRGKGYEYNLEEAGMYLSLKEETFWREKKLKMQTRLKNQIKARLNKIYPGLMSKYHNNEPLFSDLWRSRVARGLIRSRLTPAQIQIMKAEELIGEFERIGYALTRKWAEKIAHYTKRILAPHDKIIEIDLDLVNRDLNLLEALEGEMSRVEERMIEEVKETDSSFLLGKIKGLSDLQIASFVGAVGRIENYRLGKQIFSKSGLSSKVNQSGKRNIKGLGIRRVGSKILRSILFKMADSVKKHNPYFALYYSYLTEEKGKLWKKAHIAVSNKLVRVMFAMLRDRADFNPPTAKIDYLEMLFSQRRNRRRQERKKEKENSPSPFFGPKGIRASERIPSPVR

SEQ ID NO: 281260 - protein, 338 aa, unidentified
MRLYAGVDLHSNNNYLGIMDQKDKRVHKKKLPNELPEVLRELEPYKKELEGIVVESTFNWYWLVDGLIEDGYKVHLANPCAIKQYDGLKHSDDTKESFHLAHLLKLGILPEGYIYPKKERPVRDLLRKRSLLVRQKTAHILSFQNLVSRNLGKQMNGDEVMKLQEEDVEEIFGEKHIVLSGKANIATIRFLLEKIKEIEKAVLKVARLKGEYKKLLTVPGIGKILALTIMFETGDIQRFPDVGNYASYCRCVGSTKLTNSKKKGEGNRKNGNKYLSWAYVEAANFAVWSYPYIRKYYQKKMSKTNKIVAIKTVAHKLARASYYVMKDQEVFIPKKAFG

SEQ ID NO: 281261 - protein, 400 aa, unidentified
MHLTENISIPQKNFIAIDLHSDNAVICVRRNALNKAGELIGKNIWCGRVSIRDGLDNFIKVLVPHCQDFDHVAVVESTYNWYCLADAFEERGWLLRVADPSTVSQANLKSSDDRTDAQYLAVRLRVGSLKHYLPLNYSSRALRELCRYRMAMVQDCASLKIKLINLYRNQLSKNVRVADLLERCQPHMQPNYRFNSDILEEFKDPNIRLRVAFEISRIAMLEEMIEECNAEIQKQCKDQELVKLCKTIPGCGPVLSAVICTEIGTMQRFKSAGDFVSYCRLCSTSKLSNGKSKGLGNAKNGNAYLSWAFTEVAQYASRNPVIREILQRLLRKYGGLRVKAIRTLAGKIARVTFYVLKNKQPFNAAKCFGMELTKSIVKKLPHKPLREDAAVVLPAVAGQA

SEQ ID NO: 281262 - protein, 421 aa, unidentified
MKKKVRIVGFDCAEDEHAAVLLDVSGEFERRVDVINERGQIQESLAELMLSVGPNAQLVVVVESKRSHGRIVADVASELGCEVWQVNTVALNHYRDLEGQPRKDDEWDAYLGARMVFLRMGGCREAVETTEEERALSRLTRTHSRLVEDRKRHVARLRAVLLELAPEMLHSSWEGPQPGSKAMLYLLERWPGFEGLERAQMRSIEKILHRCRYGSKTPHVAKLIRKMARGISVAIEERSALTLELGLLVQQIRFCNESADQVYTKITHHVEHHPLGKKLLEMHGNGPVITGVLVSELLPVARTSTEPKSATYAGVTPLSRKSGKSLDKDRLTQGVNKRVLHALYTASVVAIKNSAVDRAYYQKKLRDYAGHPKPHVAAFIALSRQRHKLVYKLMTTDARYDKEILIATHLARLEQERTAAA

SEQ ID NO: 281263 - protein, 444 aa, unidentified
MEIVNQHAAGIDVGSRSHFVAVGQGADQVREFGVYEDEVRELTQWLLSCHISTVAMESTGTYWQSLFTALQQAGLEVLLCNGKFTKNIKGRKTDVQDCQWIQRLHALGLLSGSFLPDQATEELRTYCRHRASLLETAAVTTQKMQKYLRLLNLRLDVVVRDITGQTGMAIIEAVCQGETNPEKLACFRHGNCRKSKEEIALALRGNGRRELLFTLAQELDMYKMLQDKIAACDAAIEQLLREQIGADKERRELRTDPKPYKRVNKNAPQQMDLNQLAYQYYGGVDLLRIEGVSHATVMALMSEVGAEGIRKFPTAKQFTNWLKLCPNTKVSGGRVLSSHIPKGSNRLKIALRNAANVIGNLRETHLSDFFKRVAFRKGRQAAVSATARKLAVIIWHMLTYRVPYNPPTQYLFLDEKRKLKLVQRIKKNIAKLDLKPEELGFATA

SEQ ID NO: 281264 - protein, 440 aa, unidentified
MERSESMPTSSAVEPAFAELAHYAGLDWAKDGHQVAVVDRRGKLVLELNFADTAADWAALREKLAPLAPLGVALETCCGPAVERLLAAGWSVYPLNPKAAERYRDRKAPSGGKSDRLDARSFADALRTDGHGWRRLQPQDPRTHELRLLCRDEIGLIAQRTALVNQLQEALHEYYPTARAAFDDWTAPGAWAFVVAFPTPAELVRAGRRRWEKFLHVHKLYRPETTARRLELFAQAEAFVNPNPAVTKAKSFLAASLARQLQFLEKQLDQYRQRIEQLFREHPDHDIFGSLPGAGPKLGPRLLAELGGNRAEFATAQDLQCYTGTAPVLSQSGTRRKRPDVRMRRACNHWLRATVHLWADKSRQQCAWAQAYYAEKKRRGMEHAAALRCLGQRWLKILWRLWQDGVPYDEALHLRNQVAHGSWVIALVPPTADDSTACRD

SEQ ID NO: 281265 - protein, 338 aa, unidentified
MEIKRIAIDTSKHFFAVHGVDTHERTVLRCELRRAQVECFFAKLQPTEVALEACAGSHHWGRLLGRLGHRVKLIPPQYVKPFVKRAKNDRKDAEAINEAASRPEMRAVPIKTVEVQAATMVVKHREMLVAQRTQAINALRGHAAEFGIVAPKGEQNVPVLFAVLAANPAIPPAAREVFAEMGRHIADLDNKLNALDQQLLAQHKANPVSRLLAEIPGVGPITAITMALTVDPANFESGRHFAAWLGLTPREHSTGGKRRLGKISKAGNERLRRLLVVGATAVVRFAKPGRKSASAWLLRLLERKSRKVAAVALANKMARIIWAMMARGEAYRHQPSMA

SEQ ID NO: 281266 - protein, 340 aa, unidentified
MNATTYGLDLAKSIFQLYWVDPETGETHSRRLSKTQLISFLSNRTPGKFVLEACGGAHWWARKIISLGHEAILLHPKYVRPFVRTNKTDAADARAIWTAAQQPGMRPIPVKTEAQQALLGLHRIRSELVDSRTRQVNQIRGLLGEYGLHFVLGRKAAMAQFVTRLSEIEQTIPAPLWRLLSRQLQRLRQLDAEILAAEQEIAAWLKTEPAAQCVDAIPGIGPITATALVATIGSPQAYRSGRAFAASLGLVPTQSGTGGKVHLGHISKRGDPYLRKLLIHGARIVLTRSKRRPCWAEALLVRRPTNVAIVALANKMARTAWALLAHRRVYEPGYVSARPA

SEQ ID NO: 281267 - protein, 409 aa, unidentified
MYFVGIDIAKKTHQTAIICSDGKLIGKPFKFPNTVDGFNLFLEKLTAVNTDLSQFEIGMEATGHYWLNLYTWLSDKSFRLHVINPLQSDALRNLYIRKTKTDSVDAKIIADVIRIGQYSETQLADENIIALRDLNRQRFYLVDMAADLKRKIIAMMDRIFPEYQDFFSDMFGKTSVQVMKEYTSPEQILQISAERLTQLLKKASRGRFTETKAKELKALAANSFAALLSSEMTTLLIRQMLEQLDLLEKQIADIEHIIAAQFTQFNTKLTTIPGIGTTLGATILSEIGDINRFDKPKQLIAYAGMDPSVKQSGNFVGTQSHMSKRGSPYLRRALWLAAVVAVNHDDLFKYLFQQKMNAGKTYAQAMGYICHKLLNTVFAILKTGEEYKPVYPPQIDVSKFADQPINSQL

SEQ ID NO: 281268 - protein, 376 aa, unidentified
MPRAKKPVPEMEPRCRGRLSTEQYAGRWPGQQPDYKDGQERRNSAVLLEVPWTSSASTISKLKFDVVLIIGERSKHAVFSNTEAGFQQLLAWLGKQRPDPDCSLHACMEATGNWGLDLADFLHGQGVQVSIVNPLRIKAFGQSELARNKNDKLDAGVIARFCRSQNPPLWVPPAPHLRELRELVRRCNALKDARVQETNRQKSGFASPAVAKSIEAHLSWLDRQIDEVSAAVLRLVQGDTTLRKNLSLLRSITGFGEVSAAILLAELPNIADFTPKALAAFVGLSPKEHSSGSSVRRPGRMSKVGAERLRGTLFMCAFSAKRFNPRLADFVQRMKNAGKAPKVILVAVARKLLVYAHAVIRTQKPFQPLPNAPSSI

SEQ ID NO: 281269 - protein, 459 aa, unidentified
MRKKVQNHKKRKQKIAMDQAWPLINPNAAGVDLGSREHWVAVPEGRDAQSVRRFGTFTSDLEELAEWLKKCGVTSVAMEATGVYWIPLFQLLERRGFEVLLVNARQIKNVSGRKSDVLDCQWIQRLHTYGLLGASFRPADPYCVVRSYLRYRDELVAARSTQTQHMQKALQQMNVQLTQVLSDVSGLSGLAIIEAILQGERHPLKLAAMVDRRVKCTQDQIAKALIGDYRAEHLFQLKTAFELYHTYEAKISAADDELVRELGNLPDRVDIKLKPLPAKSYPKAIDENLRTGLYLKLGVDLTAIEGIGALVALTTLSEVGPDLSRFKTEKHFTSWLGLCPDNRISGGKVLSCRTRRVVNRLSDALRLAATTLERSQTALGAYYRRMKAKLGGAEGVTATAHKLARILYRMLTHGDEYVRQGMEEYEKKHQARKLQALQKAAESIGLQLVEKQKVAEAVS

SEQ ID NO: 281270 - protein, 344 aa, unidentified
MKNTAIAIDLAKSVFEVGISDRPGHVAESYRLTRADLGPFMAKRQATTVVMEACSSAHYWGRAFQGYGHEVKLLPAIYVRPYVRRNKTDRTDVKGMLEAWRNSDIVPVPVKTESQQQLTALHRVRSGWMEARTKRLNAARGLLREFGMIFPLGPALLVGRIDALVVDPDSALPLALRELLRQLMMEVGELETRVRQVEQQLKALAAETPVVARLITIPGIGLLTATALVGFVGDVERFPSCRHFASYLGLTPSEHSSGSRRRLGRISKQGDVYLRTLLIHGARSVLVSARSKTDPDRFQMWALQLQRQYGYNKASVAVANKLARIVWAVWKSGRCFESRPQIPT

SEQ ID NO: 281271 - protein, 458 aa, unidentified
MGRNKSRNKDRGTISVVHPNAAAIDVGATMHTAAVNADRAPEPVRSFGTFTTDLHRLIDWFAECGVDTVVMESTSVYWIPIFELLDARGFAVFLVNARDAKHVPGRKTDVSDAQWLQRLHSFGLLRASFRPKGQIAELRAYLRQRERLLEYGASHIQHMQKALTEMNVQLHHVVTDITGVTGLRIIRAILAGERDPAVLAGMRDRRCHATVETIEKALAGNYRVEHLFALEQALALYDTYQQKAFACDARIEAVLKELSVHRGREEGQLPAARQNRSSQQNSLLFDVRAALFALLGKDLTQINGLGPYLALKLIAECGDDLSAWPSAKHFTSWLCLAPSNKISGGKVLSARTRRSGSRAAALLRLAARTVGRTDTALGAFYRRLAARIGKAKAVTATARKIAVLFYNAVQHGMNYVDPGASSYETRYRARVIANLHRRAKAFGFVLQPVDPPPGVAVS

SEQ ID NO: 281272 - protein, 385 aa, unidentified
MSQFSVSRQATIDHNSTIIGALELSEKKWVLAVQLPGVDRHSRHVLDACGERLVSFVERLKARCASAGRKIARVILTHEAGRDGFWLARFLARQGIEVHVMQPSSLPVDRRARRAKTDIIDVEMLLRALMAWLRGEPRVCSMVPIPSEADEEARREHREREDLTRERRSIVNKIDGILATLGVKGYKALRRDRRDQLNCIRQPGGDPIPQKARARIERLLDRLDLVLKLIEQVESARDAILKKDAPADEAERMIRSLTALRSIGPEVATLLVREAFVRQFRNRRALGGYVGLGGTPFSSGGSEREQGIGKDGNRRVRAAMVELAWTWLRWQPDSALSVWFRARVGAMGGRIRKIMIVALARKLLVALWRYVRDGVIPAGAKMKPA

SEQ ID NO: 281273 - protein, 340 aa, unidentified
MKLYGAIDLHSTNNVTVVIDEQDRVVYQKRLPNDLALILMELSVYQTELQGIVVESTYNWYWLVDGLMEQGYKVHLANTAAIQQYEGLKYTDDHSDARWLAHVLRLGVLPEGYIYPRADRPVRDLLRKRSQLVRQRTTNLLSIQNLVTRNTGESLSANQIKGLDVQQVDELLPNGDLALAVKANLSVMCSADEQTKILERTVTQRVKLSPQFSLLKTVPGIGQILALTIMLETGDIRRFCSVGNFASYCRCVGSQKVSNGKKKGKGNTKNGNKYLAWAFVEAANFAIRFNSKIKSFYQRKKAKTKGVVAIKAVAHKLCRACYYIMRNRVAFDLTKAFGQK

SEQ ID NO: 281274 - protein, 320 aa, unidentified
MGVLSPLGYYGVRMNSYVGIDVSKDELVVHVLPAQQDRVFPNTTQGLVELVGWLVELGGCRVAFEASGGYERALLDALHQAGVVAMRLPARRPRNLARALGLKAKTDALDARVLALAAQILPATATPPATAPVQELREWLQLRTALVQERDNHRRRIQQIRQASVQTFLRSVIDSLQQRIAEVEQQLRCALERCPVQIAAAPGLGPILRATLAARLPELGQLDRRQIASLIGLAPYNRDSGRWRGQRCIGGGRADVRRVLYMATWAAIRARSPLASTYQRLVAAGKPKKLAVTACMRKYLTMLNAMARDQAPWAPATSTA

SEQ ID NO: 281275 - protein, 330 aa, unidentified
MKNWNVILGVDVSKLTLDICCAERNLHLKIENQSKGFRMFKTWCKTNGINLKETLVVMEFTGGYEHRFIQFCESQSIAYCRLPGLEIKNSMGMVRGKNDQVDAFRIGRYGEEKIKRLAPSKPLNKDFFILRQLLSFRKRLVRENAGLKSTLKERKHMYDATKTDPIVRIIQPKLKANKQYIRELEMEIMDIVKRNEQMKENYKIITSIRGIGPVNACMTIAYTENFTSFADARKYAVYVGVIPFGRTSGTSIKGKPKVSHLAHKELKQELNQAAKTAMTHDPELRAYGERKQKTKCYNLVLNNVKFKLILRMFSLVKRGEIYVENYQRAC

SEQ ID NO: 281276 - protein, 344 aa, unidentified
MDNHTQYSGFAGVDLAKKVMQIHFVTEDGEITDKSAKRAEFLDFFRNRTKCLIGMEACGASQDWARKLEAMGHEVHLMSPKAVKPFVSGQKNDYNDAIGIYKAMFNGVRRVPVKSTEIRDLQTLRRIRSQVTKDKVKEINHVRGLLAEYGIVMGKSITAFNKGISSALESLKERGDVSPLVAEELQTTVESIKTKIERQKRLDREIEQLARGCKNYENFLKTPGVGPFTAAMLCVLLCDPAIFANGRQFAAYIGLAPRSRGSGGKNFIIGIPSKFNCDSESRAVFVECAQALARYKNKSPWVDGILRRKPKKVAVIAIANKLARQVWAMANKGESFKQMTILTA

SEQ ID NO: 281277 - protein, 336 aa, unidentified
MKYSGIDLHSNNSVVTVTDDSDRVIAEKRLPNDLRKIIDFLTPWREELVGVVVESTFNWYWLVDGLQASGFRVHLANTAAIKKYDGLKHSGDETDARHLAHLLRLDILPTGTILPKEDRAVRDLGRKRLQLVRSRTSHILAVENIIARHGGRMNSNQVKQLQSEVIDKLGLPADVALAIKANHAVIVTLSAQIAILEKCLQERVAPRPEYKWLNTVPGIGQTLSTIILLETGPIDRFKQVGNFASYARCVDSVHKSNFKKKGEGNTKNGNKYLAWAFVEAAHSALHWCPEAKRFYDRKKAKTKAVIATKALAHKLARACYHILKEKKPFDVTRCFA

SEQ ID NO: 281278 - protein, 348 aa, unidentified
MAHFVGLDVSVKETSVCVVDDAGKVILEQKVPTEPADIIALLSSLAVTFGRIGIEAGPLSQWLVNALTAVELPVICVETRHMKALLKAQQINKTDRNDARGIAQMMRVGLFKPVHVKTLVAQEQRMLLTSRKLLQRKLLDLESDLRGTLRNFGLKVGVVSGGRYEARVRELIAGFPRLAAIAEPLLKVRQVMRQQLAVLHKMLLDTVRDDPVCRRLMTAPGVGAVVALTYRATVDQPQRFVHSRAVGAHVGLTPKRYQSGEIDYDGGVSKCGDALLRTMLYEAAQVLLTHGSKWSWLKAWGVRVVQRRGMRRAIVAVARRLAVVLHRMWVDGSEFRWSKDSAAVPTAA

SEQ ID NO: 281279 - protein, 461 aa, unidentified
MKNQYSNPKNKKVKKIALQENWEKINPNACGIDVGARELWVCVPSDRDPEPVRCFGTKTPDLQEMAQWLKACRIDTVAMEATGVYWIASFQLLEREGFKVVLVNPRQVKNVTGKKSDVMDCQWIQKLHTFGLLGASFRPADPYCVARTYMRLRDDLVAGATTQIQLMQKALHQMNIQLSHVLSDITGCSGQAIIEAIMAGQRDPIALAELASRRVKSTKAEIAKALIGDWRPEHLYCLAQAHQMYLRYRLDIGQCNAKLADELEKLPNKVDPKLQPMPPKMDRKKEIDEKLRLGLYCKFGVDVTAIEGIGPTAALTLLTEVGADLSAFASEKRFCSWLGLCPDNRISGGKVLSSRTRRVVNRMADVLRMSATTLKSSQSALGAFYRRMVAKLGPAEGITAVAHKLARLLYSLIKHGHAYIRTGMEQYEKKNADRKMKVLRKMAESLGVELLEPQLVTTGVS

SEQ ID NO: 281280 - protein, 344 aa, unidentified
MLTKNVIAIDLAKNVLQACHINVHGELLSNKPLSRQKMKEFLVKAKPSIVAMEGCCGSHYWGRLAESFGHEVRIINPKKVKGYLEGHKTDHNDALAIANAALQIGIKYSQPKSLEQQSMQSLESSRRFLSRSVVALGQHIRGTILSYGIANPKGEKGLKASVQTVLDGDTSIPANVVSVLSMLWEQYKELKAKLIAFEKEKNALTRQIEPCQRLMDIEGVGETTAAMLYSTLGDGKQFKNGRQASAFVGLTPKQHSSGGKVFMIGIDKCGGVKELRSLLYLGAMSYVGRLPEKPKTQKDAWLKSIIERIGFKKACIALANKVVRTAWAMLRYETEYKPVLLNDK

SEQ ID NO: 281281 - protein, 346 aa, unidentified
MKYFAGLDVSLEETAICVVDEAGAMVREAHVPSEPEALVAFFQGSGLVLERIGLEACSLSAWLHESLVAAGLPAVCIETRRAKAAMGAMPNKTDRNDARGLAQIIRTGWYRAVHVKSPACRSWRALLTARRLLLNKMRDLENGLRAVLREAGLKLGTPTRKEFAARVRELTAADPGLSVLAEPLLTIIAAMTRELAQLTKRVLDIVRDEPVCRRLMGVPGVGPLTALTFRATIDQPERFRHSRDVGAHLGLTPKRYQSGETDVQGAISRCGDELARTALYEAAHSLLVRSRRWSALRAWGMQVAKRRGMARARIAVARKLATILHRMWADGTEFRWGKEGPMPAAA

SEQ ID NO: 281282 - protein, 359 aa, unidentified
MRIIGCDLHARQQTLAMLETTTGEVENQTLMHEGRAVREFYCQLPCPVLVGIEATGSMHWFLNLMEELGIECRVGHPATIRAAAPRKQKNDRLDADLILRLLVENRFPAIWLPTKELLDLRALVLHRHQWVRIRTRIQNALQAIALANGLRRGPSLWSYDGQAKIAFLPLLPHASYRRSMLQEMYRKMAEEIENLTQRVVEQAGQRCGARLLMTHPGVGPVTALATEIFLGDPKRFVDGKALASYVGLIPREYSSGERQRLGKITKQGSPLLRFLWNEAGSHAVRHDPELKRFYRRKLVQKGLGKARVAVARKLGIRLWIMLRDEIDYQEFCRRGQKQHSGAACAGMPEVGYGAKSPAD

SEQ ID NO: 281283 - protein, 344 aa, unidentified
MSTIKVLGIDLGKSSFHLIGRNHRDQNILRKKFSRPKLIEFIAQLPKCMIAFEACGGAHWLAHQCLQYGHQVRLLPPQFVRPYVKGNKNDFIDADAIAEACGRPGMHFVPVKSEDAQMLAVCHRLREGFISERTKVMCRIGAILLEFGLALPKGHATMKGLFQWLSKQKGELPTALMLELQVAQDHYKLLNERIAAQDRKILNSVKQDERCQLLKTIPGVGDMIASQLVMTVGSGQAFRQGRDMAAWLGLVPRQYSTGGKPKLLGISKRGNKRLRCLIIHGARAVLSRLGDGNRPFDAWLRTLRSSKPFNVAVVALANKLTRIAWAVLSKGQAFDGKALQPGLQ

SEQ ID NO: 281284 - protein, 346 aa, unidentified
MVTGKDIILVVDYHAKNLEVRTFNRATGEERTANVPTTRGNILRLVEEAVAEAADAGGRVRWIMESTTGWARVKELIGDRVQFTLANVLQMPLPPKAYRRKSDKIDTGRMLREELNGSLPRSFQPDRWWRQARRLVDCREDLVRRQTAVKNWISSLLHHETWQDRSGLWSAKGLARLGALKLPASDRFVLQIKLERLEHLGEWIGRVEAKMKQLYDRWPDARAADAIRGIGRVTAVSVLAHIGPIGRFGSAEELISYAGLAPGHRSSDRSSRNGRIGGGGTDGRLRYLLIEAATWLQQIPRYRATHQRVAARRGKDIARIVVARMCLRSLYKMLREKVKFNQAPAA

SEQ ID NO: 281285 - protein, 316 aa, unidentified
MLYVGIDVAKNKHDVTALNVPGKTVLKPLTFSNNKAGFELLDLSLRQLNQDCLIALANTGHYAFNLLNFLHEQGYKVYTCNPLLIKEFAKSLSLRKTKTDKKDAHGIALKLLSDPNREQFQHDNRQVELKILARHIHRLKKKQSDWKVQYTRCLDIIFPELDKIVGKHSEYTYQLLTRYPNPQKRIEAGFDKLIEIKRLTASKIQDILSVAPRSIGTTSPAREFEIIEIIKHYKRLIDKAETCVNDLMAEFNSIITTVTGIGGRLGAVILAEIRNIHAFDNPAQLQAFAGLDSSIYQSGQIDLAGRMVKRGSPHLR

SEQ ID NO: 281286 - protein, 351 aa, unidentified
MGEYIAFDSHKHYTLAEREEADTRRAAQCRIEHRRGAIRKYLEKREPGTAVAVEATANWYWIVEEIEAAGLVPRLVHPRKAKLMMGMINKTDKLDVHGLNVLQRNGTLPTVWIPPARLRDLRELTRVRMMVAAHRTRLKNRIGATLSKYALFLEGYSDAYGVRARTALHHQIRRLPPHTRYATEMLLEQLDFIEEQIAGQQRRLKDLLEVTPQMALVDSLPGVGTILAAVIVLEIGDVQRFASAERLASYAGTTPRVHSSGDKMRFGRLRPDVNRYLRWAFVEAGNSVAVNHQRCPERHVSQLYRRLRARRGHSKAIGAVARHLAEACFHVLNRKEPYQDPAVQRGRAREA

SEQ ID NO: 281287 - protein, 343 aa, unidentified
MDYFAGLDVSVKDTSVCIVDSTGKIVREVKVASEPDALLAVLRNPAYDFKRIGLEAGPLSQWLFSALAEAELPVICVETRHMRAVLKAQINKTDRNDARGIAQMMRVGLYRPVHVKTLRSQKLRMLLTHRKLLQAKAIAVENDLRATLRNFGLKVGVVGRVKFEARIKELIESFPDLVALVEPLLVVRRVLREQIAILHRRVLAAVRDDEVCRRLMTVPGVGPVVALTYRATVDVPARFRKSKSVGAVFGLTPARDQSGERDRPGAISRCGDEMMRTTLYEAAQVMLLRSAKWSWLKAWAMKIARHRGMKKAIVALARRLAVIMHRIWTDGTKFRWTREVAAA

SEQ ID NO: 281288 - protein, 352 aa, unidentified
MEKGNKLDFRGQHIYVGMDVHKKSWSVSIHTEQFEHKTFTQPPEVEKLTHYLQRTFPGATYHTVYEAGFSGFWLHDQLREEGIDCMVVNPADVPTKNKERAGKTDRVDCRKLARGLRNGEIKGIYVPSRMKVEDRSLVRTRQSMVRKQTRCKNQITSILFFYGITIPEESRWSRQFINWIESIRMKRASGDFALKAHLEELKHLRQIIANLNRAILSLSRTEEYRSDVLLLKSVPGISTLTAMILLTELADIFRFSSLDKLASYAGLVPDIKSSGETEYSTGLTFRRNAALRGLLIESSWVAVRKDPALIMAFNKLSMRMKKTQAIVHIARKLLNRIRFVLKNRQKYVPAVV

SEQ ID NO: 281289 - protein, 349 aa, unidentified
MRFYTKQHQFYCGIDLHARLLAICIVDEAGVVVCRTQIPADKTILLETLAPFRRDVVVAVECLFAWYWVADLCREEKIPFVLGHALYMKAIHGGKAKNDDIDAEKIGRLLKGGNIPVAYVYPKGLRETRDLLRRRMYLVRQRAALITHVQIVNAQYNLPEFSKKLIYAKNRAELKIAERFDNLQLRKSVAIDLALIDALDVQIADAELHLERTAKVEDPQTFHLLKTIGGVGKILGLTLLYEIHDIRRFPDVGEFLSYARLVRCRHESAGKKLGSGGHKIGNAHLKWAFSEAVCLLVRHYPAVKVWQARHEKKHGKKKTLGILAARLGRTVYHMLRKREAFDVKRFLGQ

SEQ ID NO: 281290 - protein, 343 aa, unidentified
MQFFVGIDVSLDSSSICVIDERGVIIKEGKTDSDPTAIARFVRHKGRKIEHVGLETGSLSQWLHAGLSREGFRVTVMEARHVRAAFAAMRVKTDRNDARGIAQLIRLGWFKAVHVKAPSAQETRTLLNDRRFLVDKLTGIENSMRASLRNFGLKMGHVTRSKWAARARELAVGIPALELIIESLLRVRDALRQELRTIDRQLLDEAKADPVVRMLMTAPGVGAVVALTFKSAVDDPTRFKRVRDVGPWLGLTPSRYQSGRTDIVGHITKAGDAGVRTALYEAATTVLSRVTRWSTIKNWGMRVASRSGAKKARVAIARKLAIVLLTMWRSQTPFRWSATQASA

SEQ ID NO: 281291 - protein, 344 aa, unidentified
MPTIQIGVDLAKTVFEVAVSDAPGVVTSRHRLSRAAFPRFLAAQAPAEVLLEACGSAHHWGREAERCGHRVKLLHPADVARYRDGNKTDRADAKALLEASRNHALTPVPVKSVEQQAVVALHRIRQGYLRTRTARINALRGHLRELGHTIPVGARRVTLDARAALTDETVPAFLKHALFELIAEIRTLEEKADAVRTSLTALVHHMPEARRLMTIPGIGILTATAMVACVGDIHRFRSARHFASWLGLTPREHSSGASRRLGSITRKGNSYLRMLLIHGARSALRAGAVTDQPDDLRTWAAEVSRRHCHNVAAVALANKLARICWRTWRDGRDFERREAQVTNC

SEQ ID NO: 281292 - protein, 335 aa, unidentified
MPLYCGIDLHSNNHVICVIDDKGKRIFEQKLGNHAELTIGALKKYKRRLKAVAVESTFNWYWLVDALMAAGFKVELVNTAKVVQYNGLKRTNDRYDAFHLAHIMRLGILPTGYIYPKAERGLRDLLRKRIQLVQDRSSHIIRYKSQLQMHTGRTIRADFIKAKKYQTPIVGDDNVQLALQSHIAMIKALSIQIALLEKSILAQVEPNPVFTFLKTTPGIGDILAETILLETGDITRFKGPGNFASYCRCVDSRRESNGKKKGENNRKNGNKYLAWAFIEAANFAIRRSEKANRFYEKKKQATNMLVARKALAHKLARASYWVMRNQQDFNEDLVF

SEQ ID NO: 281293 - protein, 343 aa, unidentified
MQTVSTIGLDIAKSVFQVHGVDADGLVVIRRQLKRRYVLAFFEKLPPCLVGIEACASSHHWSRELQALGHTVRLMPPAYVKPYVKRQKNDMADAEAICEAVTRANMRFVPTKTPEQQSGLVLHRTRHLFIRQQTSVINAIRAHLAEFGVTAPVGRNGVEELLNVVGNPNDKRVPEIARRCLLALGAQLRRLKEQILEFDRLIRAWHRSSEMSMRLDDCPGVGPALATALVATVADAKAFRSGRNFSAWIGIVPKQHSSGGKDRLGSISKQGDRYLRSLFVAGALAVIRYAKIHGTKHRPWLAALLARRPTKVAAIALANKIARMAWAIMAKGERYKEPGALAA

SEQ ID NO: 281294 - protein, 489 aa, unidentified
MSTASQQPAGRKARKIHAKALKRKARGSQRQQGEGNQPRSELRITNPDAAGIDIGSQVHYVAVPEGRAERSVRSFGAYTAQLDELVQWLKECGVKTVAMESTGNYWIGLYQKLEAAGFEVLLVDARQAKHVPGPKSDVQDCQWLQQLHTYGLLRAAFRPEDSICRLRTLERHRKNLVEAAGMFVQHMQKALNEMNLHLHHVLSDISGYSGLAILDAILAGERDPRKLASLADYRVKKSQAQIEAALTGDYRPELLFVLNQSLEGYRQIQQQLAQCDLAVEKQLAQIADCTNPSQDSAPKQPSPDWASSKRGKTKAKDALEVSLAGHLKRILGVDLTTIPGLNVVAILTLVSEIGTNMAKWRNEKAFVSWLGLNPNNKISGQRVLSSRTRKVVNRAATTLRLAAMVLGHTNTPLGSFYRRKRAQLGAPKAITATARKLGCLIYRLIKNGQGYQETDLQVYELKYKQQILNSLRKRANSFGFDLVEVPKAA

SEQ ID NO: 281295 - protein, 360 aa, unidentified
MEDTMHNSRKLSFEGQDFFIGIDTHKKDWKVEIRHGGMRIKGFSMNPSPEELYKHMTSNYPNANYHSVYEAGFCGFWIHRQLSKLGFNNIIVHSPDVPTSDKEKQSKSDKVDAGKLSRELENGSLKGIYILDEKQEHLRSLCRLYHRCTASSTRVKNRIKSHLYLHGVKLPDNIEMTHWSNNFITWLGALTFSHQPGKDYLDFCLEELLEHRQRQLTILRKLRHYCREYQINGLIKNLRTLPGIGFKTAISLYTEIVDINRFPTFDHLKAFVGIIPSLRGSGDHTIDYGIVKRRNKYLRYLLIEASWVAIRRDPALLEAFDRLTRRMKKQNAIIRIAKKLLNRIRYVWKNSTPYVMRVIE

SEQ ID NO: 281296 - protein, 356 aa, unidentified
MATVRDNTTRVKRFRELKATLRTDRSRLLVGLDIAQAEHVVHLRHAHTRVVTPALTIPNTTRGFTQLWAAITRAQRATGCREVVCGLEPTGTYHQAVAAFLETQGADVVLLSSSVAYWNRRTQDGTWDKHDRKDAANCADLLEQGKVLFYSQPTGPLAELRHLVRCLRRARGELAACKARWRTTLRPALAPVGEPLPQRLWAELPAVLQAWEPAAPGRPAVPKGRLPLGLATACADLGAQVTAVQARIAGLEAACTPVAERLPAYALLRSIPGVGPTVGAILLAEIGDIGWFTKFSQLRKLAGLDIVRVQSGQFAGQARISKTGRGLLRWALYQAAVGAARTAAGRARLAALKAKK

SEQ ID NO: 281297 - protein, 387 aa, unidentified
MPQPNDLSRSPVALDQDSTIIAVVEMSQSSWLVAGMLPGIERQPRKKLEPSPERLLGLLHRWRDEAIKAGRKITRIALAFEAGRDGFWLARWLRARGVEAHVIHASSVAVSREHRRAKTDRLDTELLKRGFLGWLRGERGHCTMARVPTIAEEDAKRPNRERECLVGERTRIVNRMKATLARLGIRNFKPTLRKAAERLATVHTPEGSALPPNVSAELQRDMARLGFVVSQIKEIEGARQERLEQEPETASHAMVRHLARVVGVGIETADMLVHEVLSRPMRDRKAVARYAGLTGSPDESGAKRREQGLARAGNARVRRGMIQLAWRFLRFQKESALARWYQVRTADSRAGTRKTMIVALARKLLIALWRFVTTGETLEGVILRPAG

SEQ ID NO: 281298 - protein, 355 aa, unidentified
MSQEKYIGMDVHQATISVAVMDAQGKVIMECLLETKAATIVEFIRGLHGTLSLTFEEGTSAAWLHDLLKPHVSWLVVCDPRKNALLKDGNKSDRIDARKLAELFRVNQLHPVYHGEHGVRTLKELGRSYLTITQDVTRVMNRIKALYRSWAIPCAGATVYSPRHRAEWLAKIAEPGVRVRAERLYQQLDLLQPVRLEARRELLAESHKHSAVKLLRQIPSIGPIRSALLVALLQTPDRFRTKRQLWAYSGFAVQTHNSGEYRSVRGKLQRNRERMTVRGLNDNHNRDLKNLFKSAAISASTRPGPLRDFYVDRVEKAMRPTMARLPWARKMAAISLTIWKKGAEFDPRQLQRPAA

SEQ ID NO: 281299 - protein, 431 aa, unidentified
MLKINPLSTLYVGIDVSSKSNYVCALDFYKNKYINSSFANNQPGAEELALKILECLKEHPDITTIVAALESTSVYSIHIANYLSSCEELMRFKPYVFVLNPKCTANYKKSYIGLGKSDPIDAFVIADYARAGNIESEPWRGSQFLALKRLTRHRLHLVECMTREKTYLVSNLYLKFSELQMLEGDDQPFCDIYGATSSSVLMEYFSPEEILDSSEEDLIAFLAKKSRNRIKDISKTVDLLKKAARDSYRLDKALYEPLNVSIASSFNCIETFKREIKVIDNAIEKEIKGLNPNAFIILQSIDGIGPVFAGGIIAEIGDITAFHSSDALAKYAGLTWKSNQSGDFNGEDTPMIKAGNRYLRYYLGEAANSMRKHNVEYGTYYRKKYNEVPKHQHKRALALTSRKFVRLVYGLLARNQLYSGVSLDTSIKDSN

SEQ ID NO: 281300 - protein, 389 aa, unidentified
MKIYVGIDIAKLNHFAAAISSDGEIIIEPFKFTNDADGFQLLVSKLESFDKNSLIIGLESTAHYGDNLVRYLVTELYQVCVLNPIKTCQMRKNNVRKTKTDKVDTYVIAKTLMMQDNLRFVSFFDLDMMDLKALGRFRQKTIKQRTRLKIQLTTYVDQVFPEIQYFFKSGLHQHAVYALLKEAPSPKEIASMHMTHLANLLKVNSHGHFTKEQAKELRVLAQKSVGANDSAISIQITQTIQQIELLDSQLEKIEVEMTDIMKFNDSVIMTIPGIGYINGGMILGEIGDIHRFSNPNKLLAFAGLDPSVYQSGNFQAKTTRMSKRGSRVLRYALVNAAWNVVRNNATFKAYYDVKRAEGRSHYNALGHCAGKLVRVIWKMLTDEVEFNLE

SEQ ID NO: 281301 - protein, 351 aa, unidentified
MVIIGCDFHPSFQQVAIFDNRTGEIREQRLGHREEAEQFYRGLTGAVLVGMEACGHWVWFERLLEELGHGLWLGDAGQIRAKMVRKQKTDRRDAAHILRLLMEGRFPRIWVPSLEERDVRQLLVHRHKQVQARTRVKNQLQAQALSQGVQRKWKLWTQVGRAELEKLELLPYAAKRRRQLLESLARLEAEIGELDRQVDEEVRRRPAAIRLKTHPGVGAVTALAMVLTLGPAERFGSAGEVASYLGLIPREHSSGGRQQFGRISKQGNPFLRFLLVEAGQSAVRYDAELGRFYRRLAARKHRALAKVAVARKLAMRLYWMLRNDWDYAQLCRAVMQVSPSHSVVARQKPSA

SEQ ID NO: 281302 - protein, 405 aa, unidentified
MRYYLGVDWADQTHAVWVVDESGTKIAARAVSHTAEGLGEWGRELDEWRAQGIALWAAIERPDGRVVDVLLDHGVVVYPVNPKALDRARDRFRQSGAKSDPFDARVLADFLRTDHAHLRALQPSSEAAQELKLLTEDCQRHIRQQTRLVNQLTATLKAYYPRALEVAEVTSALAREFLPAYPTPEALTALTERQWQRWARAHRLPEARAGELWAVLRQPQLPVPAHVVRAKARLMQTLMEQLRPVVAAVAQYRKAIDDFFASMPAAQWARTLPIGKHGITAPTLWARLGDAPGRWESFRHLQAHAGTVPVTKRSGKQQRVVQFRFACDKALRYVVDQVAYLSLLSSAWARPYYDQQRARGHSHRQALRALGAKWLKIIFIMWQRQVPYDEQYHLATMTRQQLGRR

SEQ ID NO: 281303 - protein, 333 aa, unidentified
MYYSGIDLHSDNSYITTVDDSGAVVKQQRVENNNELVLDYFQSLPGSHQAVVESTTGWYWLNDLLGENGIELVLAHAKYLKAISYAKVKTDKVDSQTLAILLRQGLIPRAHKISRELRGLRDTMRIRLRLVQQRSDTLRRLHSIHAKFNGSVPDPYRFQLAVLEHTRDTLSKEILALEKSLHPVLIPNDDIQRLLNIPGIGKLSAFTIYLEIDGIQRFNSDKHFVSYCRLVPAADNSNRTLHHRSSKDGNKYLKIAFSDAAVHAIQFYPEYKRLCQKLVRRSGEATARTVVAKELAKIVYYVLKNKTAYTGLKGQPMSRQKSQQWPRLSSPLF

SEQ ID NO: 281304 - protein, 364 aa, unidentified
MDECTHIGLDVHKETIAVAVLRPGTVECDERQIPNTPEALRKLFARYPDRSALRTCYEAGPTGYDTQRLLSSLGIACEVIAPSLIPRRAGVRIKTDRTDARNLARLHRAGELVCVRVPTPAEEALRDLVRAREDLKGDRRIARQRIRSFLLRYGKRYPNGPDRWSWRFEVWARALRFDEPASQAAFEHLLGAYFVRDTQLVAIDAQIAELAASEPLADAVARLRALRGIDTLTAVTLTTETCDFRRFATAASFMAFTGLVPSEHSSGQSRRQGSITKSGNAHVRRVLVEAAWAYRHAPAVRGTLRARQLGQSPEMVAYSWAAQCRLHGTYRRLAPKKGPNKAVTAVARELSGFVWGAMTDRMAV

SEQ ID NO: 281305 - protein, 353 aa, unidentified
MTSIKYIGMDVHKESISIAVRNAAGKIVMECVIETKANAILDFIHGLRGELQVTLEEGTWATWLYDLLKPHVTKLVVCDPRKNSRDGNKNDQIDARDLSNRLYMNKLSSVYHGGAGVRTLKELARSYLTISKDLARVMCRMKAIYRSWGIPCAGKQVYAPRHRAEWLAKITEVGVLRRAEFYYQQLDALRLLRHDVGRELLAESKKHKATKLLCQIPSIGPIRAALLVALIQTPQRFRTKRPFWKYSGFAIETHSSADYRSVKGELQKSRKQVSVRGLNRDCNHDLKNLFKSAATIASVKPGPFQEFYAALVAKGMRPEMARLTLARKIATIVLIVWKKGVRFDAQYLKPQTV

SEQ ID NO: 281306 - protein, 351 aa, unidentified
MLIIGCDFHPRFQQIAYVDQESGEYGERRLNHPGEAAEYYRGLAGRAVRIGLEATGNYRWFRGLLAELGQEMLLGDASAIHATIPRRQQTDKRDARHILKLLVEDRFPSIWLPPLENEETRQLLLHRCRLVQLRTRIKNQLDAIAKNEGLLGPRVWRQKRRRQVEALPLGGWRSERRKDLLELLDELDRRIEPLDEAVRKAARENPDAQRLMTHPGVGPIVALAYVLAIGDWQRFPRGKFVASYLGLIPAEASSADKRRLGHISKQGNGLVRWLLVEAASIAQRYDPSWHRQYVRLSMTKHHGVAKVAIAHKLAVRLYWMLRSGNDYEQFKERGSHTGQSVFPTGAVRPIG

SEQ ID NO: 281307 - protein, 338 aa, unidentified
MPTTFDCPTGPVAGIDTHTDTHTVAVISDTGRHIATDTFPATNPGYVAISEFMATYGVTTVGVEGTSSYGAGLTRHLRTQKYSVVEVLRPTRAVRRRDGKSDPVDAVAAARQVLTGEALSIPKDTSGPVESLRGLQITRRQLVMTAAKLMTTIKSLLVTAPDEIRRRYSAMSTLVMVEALSRCRPSADLADPRNGVLLALKTLATTYRDLQKQGTQLEKHISILVEMINPHVTSIFGCGSVVAADLIVSVGDNPGRIHSEAALAHLCGVAPIPASSGRTHRHRLNRGGDRRANSALHRIALVRMHHDQRTRDYVAKRTKEGLSKKEILRCLMFRRLKW

SEQ ID NO: 281308 - protein, 317 aa, unidentified
MSAVPVFVGIDVAKAELVTAVRPSDETWTVTNDELGVQGLLRRIRSMGPTLVVLEATGGYERGVVAALATAGVPLVVANPRQVRDFARSTGQLAKTDSIDARILALFAERVRPEPRPLPDEATRTLDALLTRRRQILEMISAERNRLEHALPAVRRDLIQHIRWLERRLRDVDHDLDRTVQSSPLWRAKENLLRSIPGVGPITSRTLIGDLPELGTLNRKQIASLVGVAPLARDSGTLKGNRLIWGGRAPVRAALYMAALVASRCNPAIKAFYQRLVAAGKPKKVALTACMRKLLTILNAMLKTNTHWREAAHHRIA

SEQ ID NO: 281309 - protein, 422 aa, unidentified
MLQDTHDTEEVIGRIAALDIGKAELVCCVRVPSSTGSGKRSQEVMTYKTMTRSLLGLADRLGELGVTRVVMEATSDYWKAPFYLLEAHGFEVWLVNAKDVKHLPGRPKTDKLDAVWLCKVAERQMLRPSFVPPAEIRRLRDLTRYRSDLVAVRTAEKQRVEKLLEDAQIKLSVVASDIFGVSGRAMLDALVAGERDPKVLAQLARQRLRAKLSLLEEAFHGHFSDHHAFLLQTMLDRIDHTSADIAAVEAKIEEAIAPFQAAVDRLDEITGVGRAAARIIIAEIGLDMGRFPTPGHLVSWARFAPGVKESAGKKKGKASTGRGNPYLARALGEAAVAAGKTNTFLGERYRRIARRRGAKRAVVAVGRSILIIVWHLLADSNLLYHDLGPGFYDTRVNAERTKRNHIRQLEAFGYKATLQPAA

SEQ ID NO: 281310 - protein, 334 aa, unidentified
MQNITLIGIDLGKHSFHIHCQDKSGKALLRKKFTRTKLMQFLATCPPSVVVMEACAGAHFMARRISDLGHETKLISPQFVRPFVKSNKNDFVDAEAICEAASRPSMRFVQPRTEPLQAMRALHRVRESLIRDKVKTTNQIHGFLLEFGISLPTGDAVIKRLSLVLAEHEIPEYLSRLLVRLHTHYLYLVEQIAELESELSQSINADDTAQRIMTIPGVGPITASLLSSQPGDGKQFSCSRDFAASTGLVPRQYSTGGKLTLLGISKRGDKNLRRLLVQCARSFMMRLERQHGKLAEWVREQLNKKHSNVVACALANKLARIAWVITTQQKEYQA

SEQ ID NO: 281311 - protein, 338 aa, unidentified
MALFAGIDLHSNNGYYGIVDETGKRVFKKRLPNKLPEILEKLDPFRDGLEAIAVESTYNWYWLVDGLMAHGYPTRLANPAAMDQYDGLKNADDENDAFFLAELLRLGILPEGYIYPKEERPVRDLLRRRMLLVKQRTTHLLSFQSLLTRETSAQMSSNRIKQLNPEEVAGLLDQEHLVLAGETNIAMMRFLNERIRQMEAAVKKRIKLKPEYEQLLTVPGIGTILGLTIMLETGPIDRFPKAGNYTSYCRCAKAKRTSNRKKKGDNNRKNGNRYLSWAYVEAAHFAVRSMPEAKSFYQHKAAKSLVCVATKALASKLSKACYFIMRDQVPFDKTKMFG

SEQ ID NO: 281312 - protein, 439 aa, unidentified
MPRYVGLDIHKQFIEACFIDEDGKPLGRCRIAVSRESIQTFVPKCLQSCDRVVMEATTNTWEIAELIRPRVAKVAIANPLKVKAIAEAKTKTDKVDAEVLAQLLRCNFLPEVWIPDGATRLLREMGAHRAGLAADQTRIKNRIQSLLAQRLIPIPVRVLFNGCGRNWLSHLELDTQDRARIDGYLRVLDQIESEETNLRKALAQLSFDNGQIRLLMTLPGVGPAGAQALCAALGDWRRFKDGAHAASYLGLTPSTRQSAGHCYHGSITKAGNSLARWLLTQAAGQVSEHPGPLGVFFRRIRKRKNYNVAVVATARKLVTIAFLMLKNNEPYRYSLPAPTQRKLSAFRVEATGSRRPKSKLRLPMQRREPETRVQSIPSLDEVYRSENLPPITKAEALPRGEQRMLQQMGIDHLPQRLQTVQTRTYRSTKTAHAQKRKHL

SEQ ID NO: 281313 - protein, 326 aa, unidentified
MATDLFQGKRMTIPADPETLRNFVEKNFPDHEVHCAYEAGCCGYSAHRSFEAYGWQSLVFNPSDISRTGKSQFQKSDQIDADLICRELRDNRLVGITVPDLERDHLRCLFRRRNDLVKDLRQIKSKIKMQLLYLGIKIPAEFDNSNWTKSFRRWIDELSFENETVKAAMNSRKAHFDFLEASVREVSNELRKYCRKHYKQDYMLLRSVPGIGGIVACAILSELGDLRRFNNFRQLAAYVGLMPSIYQSGDNTRSLGISPRGNSIIRSYFVEASWQALRFDPVMQAYYRTHAGKNSKAILVKVARKLLSRTMAVIKTRTPYQTGVVA

SEQ ID NO: 281314 - protein, 408 aa, unidentified
MHNRQNYLYVGVDLHKEQHTAVIINCWQEKLGEIQFDNKPSAFSKFLLEVETYVSDGLSVVFGLEDVGGYGRALAKYLVDHKQVVKEVNPALSFLERKSHVTTQKSDSWDAECVARILVNKFNQLPDAKPNDLFWSIQQLVSRRNALVKAQSALKNQLHIQLNHHYPSYKKFFSELDGKTALAFWQQYPLSSCLEEANIKQLTAFLLDVSNNTCSVKKASEILKLVKEDGQTMKEYQETRDFLVRSIVRDIEFKKKEMKYIERELKRLVNLLDYQLETMPGIELVTASALIAEIGDVRQFPNANKLARFAGIAPVYFGSGGKGKTHKSKQGNRALHALFYNLAVQQVQVAKGSKLARSPVFYAYYQKKLKEGKTKGQALVCIMRRLVNIIYGMMKHKTAYELPVVQEK

SEQ ID NO: 281315 - protein, 343 aa, unidentified
MQAVTTIGLDIAKMVFQVHGVDAEGKVIIRRKLKRRYVAAFFQKLPPCLVGIEACASSHHWSRELKALGHTVRLMPPAYVKPYVKRQKNDAADAEAICEAVTRANMRFVETKTPEQQSCLMLHRTRHLFIRQQTAVINAIRAHLAEFGIVAPVGRNGVEALLDVVADSSDKRVPEIARGCLAALGAQLRMLKAQILQFDRLIMAWHRSNETSKRLDEIPGVGPALATALVASVGDARAFRSGRDFSAWIGLVPKQNSSGGKEKLGSISKRGDRYLRSLFTAGALAVIRYAKLHGTEHRPWLTALLARRPTKVAAIALANKIARMAWAMMAKGERYKEPVALAR

SEQ ID NO: 281316 - protein, 331 aa, unidentified
MKTKETIGIDVSKLTIDVSIHSNQMFETFENSNIDFKTMINWVYKSSCFSKDEILFVFEHTGLYSLELSFFLSENNIPFTVVPGLAIRRSLGITRGKDDRIDARNIALYAYRLKEEIKPYKMMSKNLITLKSLLALRERFVKQRAGYKASLKEQKRVLTKKDNQVLLDSQEKVINQLSKLIDNVEREMEDIIKADDNLKNIFELIISVKGVGKQTALYMIVCTNAFTKFDNARKFASYCGIAPFPHSSGTSIRGKTKVSNLANKTVKSLLNLCAIVAIQHNPEMKQYYERRTKEGKNKMSTINIIRNKILARIFAVVDRKTPYVDIMKYAA

SEQ ID NO: 281317 - protein, 414 aa, unidentified
MKAVYPICCGVDVHKSFLIATIITTTNSLEPHYEKKRFSVYNRDLHLFADWLISNNCFDLCMESTGKYWIPVFNILEERGIHVVIANPKWVKVIKGNKDDAKDSKWIGDLFRLGLVPGSFIPPKKIRILREFTRYRYKLVSMKSSEKNRFQNAFTVCNVALDSVVSDMFGVSASAITDYLISSDSFNPDYCRSLLKRSLKKKADSVLTSIEGYSMTSEQKFRVKVVREHLSAIDHSIAKIDNAISKMVSEYESLISLLCTIPGVDRNSAITIISEIGTNVDLFGSSKRLCRWAGLTPGNNESAGKKKSVRISRAGVYLKPALVQVAHAAVNSTASPYYRLKYERLSKRRGKKRAIIAIARMILTAVFSILKTGEVWNPTDLFKVDLPEHLKELQRTKAIKQALKFLLSQGVLSS

SEQ ID NO: 281318 - protein, 368 aa, unidentified
MIVIGVDPHKATHTAAAVDDGIGELLAERTVQARRTGHEQLLGWARGLADERVWALEDCRHVSVSFERFLLASGEQVVRVAPKLMAGARRSSRIRGKSDAIDALAVARAALREPQLPAARLEGVEREIRLLVDHREDLVAERTRIQQRLRWHVHELQPELELPAGCLDRRVWLERLARRLARTEQTAQVRICRELVGRCRELSRRAAELERELAMLVSAHAPALLEVPGCGVLTAAKLVGETAGAERFSGEAKLAMHAGTAPLQASSGARRRHRLNRSGNRQLNCALHRIAVTQGRCYPPAQAYLARNRSVAEGFSTSAAAYELSRRLDVEVPITEAVFRVLHEGLPLQDAVQILVTRAGKHELYGIR

SEQ ID NO: 281319 - protein, 408 aa, unidentified
MKRYYIGVDWGDRLHQVYVGDEEGKKVREVKVQENPEGLAEIGRWLDEKRVEGLELWAAIEKPAGRIVDFLLDHGVVVYPVNPKAVDRVRDRYRMSGSKSDAFDAYVLAEFLRTDQAHLKALRPSSEKAQELKLLSRDQRRVVRHKTRLLNQLTTTLKEYYARPLEVFEDLETEIALDFLKQYPTPAHLSALKRRQFNRFATKQHHLSKQRCEELWEKLNKPQLAVPEHVVRAKTQLLEVLIEQLRALIKAVKIYNHRVESFFASSPAAQFAKTLPGGKSGTLVAAIWAELGDAQGRWESSGHLQAEAGAVPVTKASGKSRVVHFRFACNKHLRHTMYWFSFVSLNHSEWAMLYYRGHRDKGHNHHQALRALGAKWLKIIFVMWRDHKPYDENYHLANIARQKLRQAA

SEQ ID NO: 281320 - protein, 413 aa, unidentified
MSQILVGVDVSLKTHHVHFMNGEGQSLDEFSIPNNREGADTLIQRLLKRAKKVHVAKLQIGMEATDQYNWHIAHYLQAQLKGYEPDYQTSVYVLNARKVARFKKGYDTLPKNDHIDAWVIADHLRFDRLPRAMQEAVHYEALQRLTRTRFHFMKDLARNKTFFLNQLFLKFSGLRQDNPFSNTFGAASLAVIEELEPETIADMSIESLVDFLQEKGNHHFSEPEEIAKYLKKLARSSYQLNQSMKDTVNLSMSVTLSLIRHIEMQVKRLDKEISRLMQGISQRLVLTSIKGIGDVFAAGLIAEIGDVKRFNSHHALAKYAGLVWSQYQSGEYESEDTKRMRTGDKYLRYYLIQAADSIRKHDSEYQAFYQKKYKEVTRHQHKRALVLTARKLVRLVYSLLSTNQLYTPPERRS

SEQ ID NO: 281321 - protein, 373 aa, unidentified
MKKLSKVPKPVGETVGIDLGDKISRYCVVDQNGDVVEEGSFRNQASSIDKHFAGEPRRIALEAGAQSAWISGELKLLGHEVIVANPRELKWITSSDTKNDPVDARKLALLARADVRLLAPVEHRSAEQQAELAVIRARDAILRARTLLINSARSIAKGFGLRLPKSITGTFGERALEALPEFLHTALTGLLEQIDAISQEIAGYDQNIGELAAKHPELTRLESIPGVGRLTAMTFVLTLGRVERFAHSRDVAGFLGLRPKQRQSGARDPQLGISKSGDPYMRKLLVQCAHHILGHYGKDSALRQWGLTKGEGGKKATLRAIVAVARKLSVLLHRLWASGEFYKPFPKMGERFRDGECCESPNFPATALVALSL

SEQ ID NO: 281322 - protein, 412 aa, unidentified
MQIIHECCSGLDVHAKTVVACLIRRGKKQTRTFSTMTDDLLRLSDWLVEEGCTHVAIESTGVYWKAVFNILEGVLEVILVNAQHVKAVPGRKTDVKDSEWLADLLRHGLLKASFIPPPAIRELRELTRYRQSLIREQTALSNRVQKLAESGNIKLSQVASDALGVSGKLMLRAVADGETDAEKMAELARRRMRSKIPELRRALEGRMTKAQRWVLGELLTRYEEIERAVERVERQIDEEVSQGPDPFVEEAVTLLQTIPGIGESVAETIVSEIGVDMECFPTDGHLASWGGMCPGNNESAGKRKSGKTTKGSTYLRAALTQAAWAASHTKGTYLAAQYQRLAKRMGKKKALVAVGHSILVIVYHVLANRASYEELGGDYFDRQNVVQQRTRLIRKLETLGLKVTVEELPVAA

SEQ ID NO: 281323 - protein, 360 aa, unidentified
MDKIHDTSLSFKDQDFFIGIDVHKRQWTLSIVSMNMLLKKYLSIDPSPSVLLKYMQKHYPDGNYYAAYESGFSGFWAVRELNNSGIKCMVVHPSDVPSSQKERLNKNDRVDSRKLSRSLSNGDLIPIYIPEKISEEYRHLNRHRFKTIKDQTRLKNRIKSVLHQFGVSIPLQYQERRWSGVFINWLLTIKFDTEYAQFAYEDLVDQFIQIRTRITRQLKKMRVMAKEQEPFNIIIPLLLSIPGIGFITAMTLVTEIIDMNRFKTLEKLASYVGLVPSMQSSDETEINYGISPRRNKYLRTLLIEAAWKAVKKDPALTMKFNQLSRRMNRNKAIVRIAKILLNRIRYVWKNQKPYVLSVVN

SEQ ID NO: 281324 - protein, 444 aa, unidentified
MTETLYLGIDVSMAENACFSLLQDGTEARRRFTVPNNLPGAEQLANEMVKLMESYHLNRLLVGLEATNLYWWHLACFLNSSPQLSPFQPRVYAFNPRLIKSFKKALSDTTKSDINDAYAVAERLRFGRLPAQFIPNQLYQPLQRLTRFRCHLMHQIAREKNYFLSFLFLKFSEYQNLDPFSDIFGATSQAVLTDYLSVDEVATAPLEELAQLLVKEGRNRFSSPETIAAVVKRAARDSYRPHATLNESLNLILGTTLENIRTLSRQTKKLDQAIEREVRKFPNPLISIPGLGPVFAAGIMAEIQDIHRFPDQSALAKFAGLFWRTRESGSFQAEETSMGKSGNAYLRYYLIQAASSVRMHNAEYGSYYRTKYNESTKHKHKRALVLTARKLVRLVDAMLRHNQLYVPPLMNLTEEVNKLATTRARPAKQHHYRQPGSHSLALCA

SEQ ID NO: 281325 - protein, 460 aa, unidentified
MKLYLGGDASKGYSDWVIITEKKQVVLQDTQLDDTYGGHCKLFSILKSYFDQYPSLEIYAAMESTGGYENNWLNSLKSFQKTLNMKVARVNPTGVHFNHLAGMTRNVTDATSAESIARYMIDHDGNIRYDQDEKWTSLCRIWNFTEMLKKQRVQTINLMESLLYGANPTLVRFKKDNLPNWLLEVIILCPTQAQLAKAKPGKLAKIPYLSLERAKEMVAEARQGIASATDDHTAMLLRQMARQIKAFDSSIKSQLRLIEEQLCCPEIELLCSFTGIDTTSAIGLLLETGAVERFSGVKAFCSFFGLHPKFKQSGDRVTGVHMSKQGSRNMRKILFNIARGAILCNPLIKEIYERKQHQGMAPMAALGVCMHKILRIVYGMLKNKQAFDPGVDQLNRDRSGKKQGEKEQQKRAFTQKTRRHQPFDSKAPVSSRQTKKRKEHALSQCGINDHKARDLHVPSL

SEQ ID NO: 281326 - protein, 462 aa, unidentified
MPRRKLKTQARKPRPQPLYREDAATLQVQNPHAAGIDVHSDNHVVCVGPGRVATFGAYTADLHAIAEHLRRAGVTTVALESTGVYWIPLFEYLEAQGFECYLIEPGQLHGCGARPKTDVLDCQWMQRLHTYGLLKASFRPPESVRALRAYHRQRQMVIRHAATHVQHMQKALEQMNVKLTEVLSDITGVTGLRIIQAILAGQRDPHTLAGLASPKCAKTRDEFALALQGLWQPEHLFELQQAQDLFVTYQRLVDECDRQIEAELAKQPNRAGDQPLPHKPRRCGRKKNDLRFVATGPLFRALGVDLTEIEGIDVGTALVILAEIGVDVSRFPTEKQFASWLGLCPNTSRSNLREKKRSPRQGSSRLRQAFRMCAQSVGRTQTPLGMFYRRIKSRIGGRGACTATAHKLARLVYRMLKYGRAYVKQGMDEYAAKVKANAERILRKKAAALGFELTPRESVART

SEQ ID NO: 281327 - protein, 321 aa, unidentified
MSKYTEIYGVDISKDVFDVYSSQTGSNQFKNDCQGFKKFLKVLNKEALVVMEATGYYHYRLAQFLHGQGILVSVVNPLSVKRFIQMKLAKVKTDKSDAKAISEYGQMNEVPLYNALTEVQSECLQLFRLLDSYLKHRTAIKNKLKGEEALGVPSKFVYRSLRRNLNHLNKEIESIESRLLELVKQDQQQQLTLLKSIPGMGMKTALFLIVVTEGFSRFNSASELCSYVGVTPTIRESGRSVRGRSRISKVGNKKLRNLLFLCAFSACKHNKGCRELYERIVAKGKSKKLALIAVSNKLLKQAFAIAKSGLPYDENFMSKLA

SEQ ID NO: 281328 - protein, 431 aa, unidentified
MNYNQNKKIAQITSQTLIIGVDIAKFKHVARAQDFRGIEFGSPCQFENTKEGIEHFLKWISEIKKEQRMEKVMVGMEPTGHYWFNLAHILKDNGIKFVAVNPLHVKKSKELDDNSPTKNDVKDAKVIAQLVKDGRYAEPTIPQGVYAELRVAKKIRDLLTEDLQTVQGQVHNWIDRYFPEFLKVFKKWEGKAALQFLKLYALPHEIAVFTEEELLVHLRKSVSRSVGLNKIRELKQAASKSIGLRQGAEMARLELKTILAKYELIQLQFGELDARLDGLLNDIPGVQQMLAIKGVGRDTIAGFFAEVGDLGEYNHPRQIIKLAGLSLKENTSGKHKGKTTITKRGRKKLRALLFRVCMILVAKNTAFKALHAYYTQRPDNPLKKMQSLIALCNKLIRILFSIGKKQFEFNEEKMLKDIPHLALAQKTEMAA

SEQ ID NO: 281329 - protein, 352 aa, unidentified
MMKLKYSICCGLDVHKNVIVATIVTTNKDGISEYLQKSFSTINSDIQRFHNWLIENNCYHVCMESTGKYWIPIFNYLENDIDVCLTHPKYVKAIKGKKTDKKDSKWIADLYKFDLVRCSFIPPKDFRQLRELSRYRFKLVCMKSSEKNRIQNCMTISNVGIASVLSDPFGKTATEIISYLLEHTADSMDEKAVRKLIKKGAKSKSDEIMITQTEVELYVRIKPYYEFVEFVSTMPGMTELSSTIVLAETGVDMDIFDDAKHLCSWCGLSPANNESAGKKKSVRIAKAGDYLKPMMVQCALAAIKSKKQPYFAIKYGRIKKRRGHKKAIIAIARMMMVCIYHMVSEKKPFTPE

SEQ ID NO: 281330 - protein, 436 aa, unidentified
MEEVTDEPLYRDRVCGIDIGKAEMHATIRVPSDKDPARRASETRSFATTRRGVLALADWLRSWQVPAVVMEATSTYWMGPFFRLEAEGFECVLADARQVKNLPGRPKRDPSDSSWLAQCFERGAVRPCFVATKEFRVIRLHTRYRRDLINERSREKNRAEKLLETAAIKLSSVITDLHGVTGRDIMEHLIAGERDPKDLAQLARTRARAKITELQHALEGAEFFTGHHARLLKTMLERIDQIDAQISDLTAVIEELLAPYEEQLAQAESMPGWGRRSAEDAVTETGVDMTRCATAGHLVSWAGRAPLDHQSGKRKGQARHKKGNTYLGGVLGETAVCAGRTQTREGARYRKLARSRGKNKACVAVGNTQLKVYHQLLSNPGMRYQDLGPDYYERRAQNRRKIGYHVRELEALGLEVTLCRIPGPDPGPGQAATPPA

SEQ ID NO: 281331 - protein, 315 aa, unidentified
MTVSPMVGVDVAKDRLDVAVRPSGEAWSEANDDAGVRALVARLRPLGPALIVCEATGGFERAAIAALAAAGFPVVVANPRQVRDFARATGQLAKTDQLDAAILALFAERVRPTPRLLPDAAAQLLDAVLTRRRQLLEMLVAEKNRLGFAPKPLHRGIQAHIRWLERQLDDVTKELAGLIEASPVWRAKDDLLQSVPGVGPIVSSTLLGELPELGTLSHKQIAALVGVAPLARDSGTLRGKRQVWGGRASVRTALFMAAMCGRRWNPTLKVFYERLKAAGKPTKVALIACARKLLTILNAMVRDQSRWMSNVQYSC

SEQ ID NO: 281332 - protein, 409 aa, unidentified
MMKQNIIFGIDVSSKSSTVCVVIDRIKQGETFKITNDSFGYQDLLDRLNQYLITSLVVFEATGVYSLSLQAFLEDYHIKYLKLNPLKAKKLMDNNLRHNKTDKVDAYRLALIQFNAPQKLRAPQPKEYHELQNASRYYEELTQALIINKNQLHRNLQSTFPQIESILSTSSGRVYWTIVSLFPHAQYVLNHNENQVFQSLLAISGIGRQRAHYLTTRLYALARQAYPYDNESSITIRAIQRNIANLLSLSAERDNVINYMEKLAMQANARSLNIYESIPGIAKTTAVRLVAELGDLRRFDTSAQIDAFVGIDPGRYQSGEKDSHLGITKHGNHLARKILYRTITQMETVKATQPCHITDYYDKKKRSSNSRGYKKIAIASVHKLIRTMFALIKHDQLYDYNVATHNQRL

SEQ ID NO: 281333 - protein, 455 aa, unidentified
MAKKGKKNTPTLENMPLIHPHAAGIDVGAEEHWVCVPADRDAQPVQKFSAFTCDLHRLADWLTTCRITTVVMESTGVYWIPLFHILEARGFEVALVNARHVKNVPGRPKTDRLDCRWLQKLHMYGLLAPSFRPPEDICQLRRLLRHRDNLIQMTVKHIQHMHKALDQMHLHLHHVMSDVTGVTGLRMLRAIVAGERDPRTLAQYRDYRITSSPDTIVKALEGDDRPEHVFTLTQSLALYDFTQQHIAACDQEIERVLGTFASLVDLDAHPLPPPTTAHRQPQRHEPAFDLRAHLYRITGVDLTQVPGFQALTIHTILSEVGLDMRQWPTDKHFASWLGLCPDNRMSGGKVLATGSRRVQSRASRAFRMAAQSLRKSPSSLGAFYRRMRSTLGPAKATTATAHKLAKILYHMLQEKTPYRERGAEAYLHKDHERQLRQLRKQAQHLGFALVPQTSH

SEQ ID NO: 281334 - protein, 349 aa, unidentified
MDDRQDIVLVVDYHSENLQFRSLDRATGEEEVFKKPTCASVIEEVVEAARNVAEARGGRVVWIMESTTGWARVKALLGSRAQFILANVLQMPLPPKARRRKTDKLDTARLLREYMYGDLPRSFQPDPWWREVRRVARLREDLVQRQTKLKNYINSYLAHETWHERANLWSKKGMIRLRQWIEGSPDHDAFVLTMKLDELEQIMERVKEVEDRMKGIYDQWPKAQRLVEIRGIGLISAVSILARIGPIERFGDDAEKLVGFAGLAPGIRQSDGTARSGHIGGGGTDTHLRFYLMEISVWARQIPRYKVTYERVAAKRGKKIGRLVVARLLLRSIHKMLRDDVAFDAKIAA

SEQ ID NO: 281335 - protein, 373 aa, unidentified
MKKVRFLGLDVHAETIAVAIAEPDGEVRSLGIIPNREESIRKLVKKLGPAEQLQACYEAGPTGYVLYWQLTALGVKCEVVAPTLVPVKAGDRVKTDRRDATKLARSYRAGDLTAVWVPNQEYEALRDLVRAREAAKQDQLRARHRLSKFLLRHGRRAPAGIKAWTQRYQEWIKEQVHFEQPAQEYTLLDYLHEVEHMGDRIRRLEQAIAEAVKLAPPRMQEVIQSLQALRGIAQISAVTVVAELGEISRFEGARQLMGYSGAVPSEHSSGTRMQRGRITKTGNAHLRRIAIEAAWAYRHRPGIGPGLRKRQEGLSEEVKAIAWKAQHRLHQRYRTLSAAGKEKQKVITAVGRELLGFIWAIGVQAERNSKPVT

SEQ ID NO: 281336 - protein, 413 aa, unidentified
MEVVHERCAGLDVHKKTVVACAIVPGADDRPRREIRRFETMLDDLQALAGWLAERAVTHVAMESTGVYWQPVWNVLEERGGFALLLVNARHVKAVPGRKTDVRDSEWLAELLRHGLVRGSFVPDRAQRELRELTRYRTALIEERTAHVNRLQKALESANIKLAAVASDVTGVSARAMLAGLVGGPAEPAALADLAVGRLRDKLPALERALAGRFGDHHRYLVPRILAAIDFLDGEVADLDARIAELERPFAETVERLDAIPGVGRRVAESLVAELGPTVDRFPSDRHLASWAGLCPGNHESGGKRLSGRTRKGNRALRRALVQAAHAAGRARRTYLGAQYRRLAARRGAKRAAVAVAHSILVITYHLLLDPTSSFHELGPDYSDRRNTDATKRRLVARLEHLGFDVELTPRAA

SEQ ID NO: 281337 - protein, 370 aa, unidentified
MLDTTTFVGLDVHARSIKAVSLDVMTGEVRAATFGYDAGAVAEWVRSVDPRARCVYESGVTGFDLQKRLSGLGVDCAVGAVSKMIKPSADRRRKNDRNDAEFLARMLSVGNVVEVWVPDDECEAARDLTRALEDARDDLSRAKQRLSKFLLRHGLAFDERTPTGRRKGNWTRAHWSWIESIRFAERGDNDVLAYYVDAVRRAAEEKARLEGLVEAEARKPRWRKRVDSLRCLKGVDTASAADLVFEAGEFSRFRNARSFAAWVGLTPSEHSSGESDRRGAITKAGNKHLRKALVEAAWHYLTCSGRPKDLARGQAPDPGARRHAAKGVRRLVERREALLARGVHGNKANVATARELACWVWAVGLMAEEA

SEQ ID NO: 281338 - protein, 419 aa, unidentified
MAKAQPVVRWTGRAIGLDLHREFCEVAICEEGVTRSAGRVSMTPEGIESLAESLLPTDRVVMEVSSGAWEVARRLEGRCQRVVVVSPDDTGIAQARAKTDKLDARTLASLLWRGELEAVWTPDERVRVLRRRLHRREQLVRARTRAKNEVHGVLMRTLQGKPPCSDMFGVKGRRWLEQLRQRLAVEETETLQSALRQIDLLDAEIEQVERTVARQMLDSPEAKRLLTVPGVNVIAAATFLAAVGDITRFRDPRKLVAYLGLDPRVRQSGDQPARPGRISKRGSAQARWGLVEAAWSVVQQPGPLCAFYERIKARREHGKAIVATARKLAVLFWCLLSRGEDYAHQQPSLTAQKLRRLEVAAGVPTRKGKPSGVWATRERMRQAEKQLAEQAQASYERTVRDWQAAGPKKRARAVTPERA

SEQ ID NO: 281339 - protein, 344 aa, unidentified
MQIAIIGIDLGKNICSLAGIDGSGQVVVRRRVRRENVFKIVSQLKPETVAMEACGGAHHLGRLLRDAGFEVRLMSPEYVRPYVKAQKNDDRDAEAIAEAATRPTMRFVELKSAEQLDMQVLHRARDRLVAERTALINQLRAVLMERGIVIPQGRRKLSQALAEILEGGDAALSVRVCTLIKDMRDEWCDLDRRICAFDNEFAARAREDEGARRLATIPGIGVLNATALVAAVGDGQSFARGRDLSAWLGLVPRQQTTGGKPRLKGITKRGNVYLRKLLIHGARAAMTPLSGTNTLLGKWLRGLRARAHVNTVVVALANKLARIAWAILRTGQTFEAREAVALAL

SEQ ID NO: 281340 - protein, 346 aa, unidentified
METIVRIGLDTSKSVFQLHGVNGVEEPVLRRKLRRSQLLEFFRRLPPAFVAMEACGASHYWARELRSLGHEVAMIPPQYVKPYVQRGKSDAADAEAICEAASRPKLRKNFVPIKSPEQQGAQMLARVRNQFIGRRTQLANSIRGYAAEFGFTAPKGLSRLQQLLIDIQADATVPDLTKELVDALAAELARVDGQIAKLDKKLMQLHRSNEVSRRLAAIPGVGPIGATLLSIKVVDARGFKSARNFAAWLGLTPKNHSTAGKNRLGVITRAGDGMLRTVLVAGATAVIADMRRREGRSWPWLKDIIARTPPKLVAIALANKLARIAWKLMVSGEQYRPASSVMPMPT

SEQ ID NO: 281341 - protein, 404 aa, unidentified
MWFTGIDWADTHHDILILEESGRQLTSFRVAHTPKGLTELTSRLEAVCGSHNKAAMACIIETNHGLLITTLLEAGFAVYPVNPKTVDRKRSASGAKTDKIDAYLLAKHGRSELADLRRLEPDSPVVAELKALTRDQDHLIRSQTRLVNQLTACLKAYYPIALSLFYKVQQRSTLRFLQAFPTPQEAMAATPQQIAAVLKTAGYPKAEQAGTKIVEQLHQPHLIADAITTRTKARLLLALIRQLLPVMEEIAAYDKEIERLFLTHADSHIFSHLPRAGKRLAPRLLAEFGDDRQRYQNTASLQALAGTSPVPYESGNYAKPHRRYACIKPLRNALQQFAWQSTQTEPWAMTYYERKRREGKSHSVAVRALANVWVRILFAIWLKREEYQPAVFEQARREHAPRAA

SEQ ID NO: 281342 - protein, 412 aa, unidentified
MQDILTCVMGLDVHRDIIVACLVKGAVDAEPEAETRTFSTLIPEMQKLRDWVIEAECRNIAMESTGIYWQPIYEMLESCFDGEISILVVNARHMKNVPGRKTDMKDAQWIATLLRAGLLKGSFIPDKTFRELRHLTRYRKSVVHDITAQKNRIDKFLQSSGFRFTAFLSDTFGASGRNIIRHLIEHGSIDREALDKCLKTKTRNRIDEILVALNGSLSVHQRRFLNMVFLHLEDLEAHKHTIEDEITEEVLKHTDALNLLCSIPGIDVTAAAAIVAEIGTDMSAFPDSQHICSWAGLSPGNNESAGKRKSVHINKGNPYLKSMLCETAWIMASHRKLYLSGWYWKVKQRKGAKRATIALARKVLSIIYTMLKTGTPYSEECFEQRRQRCERKRANRMVNELQKLGYTVVAPD

SEQ ID NO: 281343 - protein, 338 aa, unidentified
MSLYAGIDLHSNNSVLAVMDEGGKPLLQCRRPNELSRILADFEPYRSELASVAVESTYNWYWLVDGMKAHGYDVRLVHTTAVPQYDGLKHGNDDTDALHLAQLLRLGLLPEGYIYPREQRATRDLLRRRFMLVRQAVQLMLAIQSSFSRSTGKRLSANALRRIAPAELEALFPDLSTRYGVLLQYKLWLTLQEQITNLEQWVRKDLACPGDLARLRSVPGIGPILGMTIALETGPIERFASVGDYASYCRMVESVRLSNGKKKGHGNRKSGNRYLCWAYMEAANFAIRFHPQIRSWYDRKKTKKHRVVAIKAVAHKLARACYHLLRDGTEFDPKRAFG

SEQ ID NO: 281344 - protein, 469 aa, unidentified
MDLFINHLNPKVMIKDAKEKSKKIVAMPLINANAAGIDVGDTQFSVAVPKDRDDIQVKEFGAFTCDLKAISEWLQHCKVETVAMESTGIYWKSLFSILVQDGFEVFLVNAKHVKNVTGRKTDESDAMWIQRLHSCGLLNSCFLPDDQTETLRTLVRFRKNLTQDSTRYILRMQKSLELMNIKTHTVISDIVGKTGTAIIEAILAGERIPENFMPLIDGRIKADKQTLIKSLEGNWRKEHLATLKISYDMYKIFQQKTIECEKEIEETLQYFIAAKNEGVLESVVNTERPNVNNKKKGIKQKNKNSPAFNTRDYIKKIHQVDVMNIYGLNEIGALEILAETGTDLSKWLTENHFVAWLNLCPNNKISGGKLISSSRLKKKPNLASQAFRIAANSLSRSDHWLGDYFRRMKTKGGTKYAIVATARKLAIIYYKMVRYKQEFDPIDLKQYQDRYKAAKINYLERKLAKLKAA

SEQ ID NO: 281345 - protein, 373 aa, unidentified
MDQDTTYVAFDTSKETLAVGIARGGRRREVRFFGTIASRPEAVRKLVEKLARQHHRLAFCYEAGPTGYGLYRQIRAMGYDCQVVAPSMVPVRPGGHIKTDRRDATTLAALFRAGELTAIWVPDAAHEAMRDLSRGRQAAMEGLRRARQQLLSFLLRHGRVYPTRSHWSRAHRRWLSEQRFDHAAQQIVFEELIQAVEQAQSRRDRLEQQMVALLPSWSLREVVAALQALRGVALLSAITLMAEIGDFRRFTNPRELMAWLGLVPREHSSGATTVRGAITKAGNRRARRVLVEGAWTYRLPARVGLELLRRNRALPQAIKDVAWKAQVRLCARYRRLLRAGKPTSVITVAIARELAAFVWAVATTVMPPLEPTA

SEQ ID NO: 281346 - protein, 348 aa, unidentified
MLIIGCDYHPGFQQIAFVDKETGECGERRLSHRQEAEQFYRALLGQKVRVGMEASGHARWFERLLNELQFELWIGDAAEIRSKRVRKQKTDRQDAQLLLRLLIEDRFPRIWVPDAENRDLRQLLWHRHRLVQMRTRVMNQLHVVALNEGLRRKKALWRAAGRQELESIALAPWASRRRQDLLDLLDRLTPKIQQLTGALEEEVEKRPVTRRLATHPGVGPLTALAFELVIGTPERFHCGKQIASYVGLVPTEESSGDRRRLGHISKQGNVLLRFLLVEAAQVTVRSQPEWRNKFFHLAMRRGRKIAKVAMARKLAVHLYWMWRQGHDYGQLQKLGSHAGEPGNPDGGQ

SEQ ID NO: 281347 - protein, 407 aa, unidentified
MVDSTAAGGVFVGVDWGNSHHQLCMLDPVGRVVAQGKFAHDVAGIRELSQRLNRHGPIAGIAIERSEGLLVEALQEHGHRLFCVSPKMSARARERYRLAPTKSDAFDAFVLADSLRHEHRHWRSLAVPSPLLAELRALTRDRERLIWNQRDVENQLRAIVLTYYPSVLHLFSSLDRDITLAFLRDYPTPGHAGRVGTTRMAAFCARHGYSGRTRPELLVDRLRTNLLSASPGTTAGKAFSAALFVDQLDLLNTQIRTITKRIRDLLVTHPDAAIFLSFPGMGHVTAATMLAEMGEDRGRFPTADVLLAETGTAPVTRSSGRSRNVRFRYAANKRMRHAIDWWAFVSVRENDWAREAYQQARARGQLHNRALRGLGARWTRILWRCWTDHTTYDPHTHLKSQPVDISS

SEQ ID NO: 281348 - protein, 425 aa, unidentified
MNFKQNEKINQVTEKTLVVGMDIAKRTHFACFTDDRGRVLQKSFPVSQSHDGFEQFYQRILAALREHGKSEVIIGIEPTGHYWLNLAYFLEDRGFPLVMTNPMHVKRSKELDDNLPTKHDRKDALVIARLVKDGRFSYPRILKDMEAELRAGSTFRSKLTEELGAVKNMMIRWLDRYFPEFTQVFPSFGKMALAALECTPLPVDLHEKEPNELLELYRTVDGLKSPQKPKAIQLIDLAAHSIGVTEGRKMARFEITTLVRRYHQLEQDIEDITQQLVELVQTSVEYEWLKTVPGLGDTTLVDLLAEIGSFSHYEDPRQLIKLAGLTLRENSSGQHKGQKRISKRGRRKLRALLFRVMMPMVRHNEAFRKLHEYYTNRSSNPLRKKQSIVVLCGKLLKVLHGISTKNKAFDAQRMMRDIPSLVEAA

SEQ ID NO: 281349 - protein, 325 aa, unidentified
MEKLYMGMDIHKEKLAGCIMDKDGEIKREHIFPSSKKALEKFLLNIPSTDITIAIEACGMWRGVHQMLSDMGYQVKLANPKKTHDIACKKKTDKVDARILADLLRTHYLPEVWIPDKNTLEYRDITRHKSNLTRLRLQVLGKIRGYLLRKGVKYTKLSTEEALKHLEKQDPDIKNFVQVYRHIKKEEREVMRRIKRISQNKKETMLLMTMPGIAEFSALMIIAEIGDIKRFNSPKTLVSYAGLCPGIYQSGDTTKNVRNNMVNKWLKWITYECSGRASMLTPKFQNYYYKLKEKKGFKTARRATARKMLTIIWHMLANNETYQAS

SEQ ID NO: 281350 - protein, 382 aa, unidentified
MSSITLYLGLDVHKDSITIAIAEPGPKGEIRTFGTITNDMGRLEHALGRIRKAHPQALLEVAYEAGPCGFVIARRLKQLEVPCLVAAPSLIPKQPGAPFKTDKRDACAIARLLRAGELTAVYVPEATDEAIRDLCRARTDAVDDQRRCRYRLKAFLLRHGYRYQGKANWSQPHMRYLRELVLPHPAMKAILEEYLQGIDAAHNRVRRIELSMLALLESWRLKPAVQALMAFRGFQLVAAMITVSELGDIHRFEHPRQLMTYLGLVPTEYSSGPRQRLGGISRCGNGHQRWLLAECAEHYLLPPKISKELSKRQQGQPEAVRQLSWKAQTRLHLRFIKLLSRRLQRNKAKVAIARELCGFIWALLRTLDCYKQTPISQPPAAN

SEQ ID NO: 281351 - protein, 320 aa, unidentified
MTSRGAEKMNNDTIGVDVSKDHLDAYRLADGASRRFANDKGGHKALIKWLAQTPLNRVVFEPTGPYHRAVERALGASGVPFVKVNPRQARRFAEATGKLAKTDRLDAAILARMGALLELQARPAPSEVLLELKELYVAREALVKDRTAAKNRAKILTVPVLKRHNAQRLEQIKRHIAAIEAAIRKQLQADPDLAQRFAILTSIPGLSAITAFALLIEMPELGALEPGQAASLAGLAPIARQSGRWTGRAFIRGGRAEVRQALYMPALVAARFNPDMKAKYAHLIETGKPAKVALTAIMRKLIVLANALLKANRKWQPKCP

SEQ ID NO: 281352 - protein, 373 aa, unidentified
MKKRSSSRPSQKRTMKAKRTQESVTIGVDLGDRNSRYCMLSSDGEILREGQVPTTKAGMMATFGSWGRVRIAIEVGTHSPWVSRLLAGLGHEVIVANPRQVKLITESTRKDDRLDAQTLARLARIDPQLLRPIQHRSEKAQTALMVIRVRAALIAVRTSLVNTARGLAKAMGERLPKCDADQMGVLKAESVPAKLRPLREPLLKEVESLTEKIKDSDREIEQIAREDYPETELLQQVGGVGPLIALSFVLTVDDKNRFQKSRDIGCYVGLRPRRSDSGQRQPQLRITKEGDPYLRTMLVQGAHYILSRRGPDTDLKRWGLRLAERGGKRGKKKAIVAVARKLGILLHRLWVTGEVYEPLRNQNLRELQKKVAA

SEQ ID NO: 281353 - protein, 353 aa, unidentified
MKKVIMCSADVHEKNISVAIAVHREASVAKDYPYTMKGRQKLLSDLKTLAEKNQADRIVVVYEASSLGYGFYDDCRTAGVECYVLAPTRMAKSAQDRKRKSDRWDAKKMMELLRGHVLAGNELPSVWVPDHQLRDDRELVRTRIDIGEKKSAVKAQVQMLLKRTRAKRPPEFKNWTLAYRAWLKKVELPAGTRTALDSLLRQLHYLEEESDQMDAVIETLSQTPRYLELVEALQKVKGVGVLAAIVYLTEMGDLSRFANRRKVGAYLGLAPACYESGEASDRKGHITRQGPSRLRKILCQAVWSRVRCDEQERVVYERIVSRNPKHKKIAVVACMRRLGILLWHKGMEAKAAA

SEQ ID NO: 281354 - protein, 317 aa, unidentified
MTNVTFPPLIQRGCGIDVHLKVVVATIDGVGIRKETRSFDTFTSCLTEMKEWLLANGITHVAMESTGVYWKPVMRVLEADIPNVWIVNARHIKNVPGHKTDKMDSEWICKLLLAGLLKPSYIPPKEQRQLRDLTRYRNKLIQAIAAEKNRMMRVLEDCNIKLSSVVANTSGVTATALIDMLCEGRKLTIEDIESVYHKKLSASPQELLEACTGFVEEHHVYMLQMIRKSIAQTQGLVDELSKRIKEILIKYDNVLELLKEIPGFNTKVVEDLVSEIGLDMSAFPSEKHLASWAGICPGNNESAGKKKAEELLTVTNK

SEQ ID NO: 281355 - protein, 340 aa, unidentified
MKITTAGLDIAKNKFHFYGVNQVGKKVKKRVLTRSEVLPFFSTLEPTLVVIESCGSASHWGRKLIELGHKVKLIAPQYVVPYRRKNKNDFNDAEAIAEAAQRSNMTFVPIKAIEQQDVQMVLRIRDRHIQSRTQLSNQIRGLLAEYGLIISSMGRAALRKELPEFLEDAENDLTSSSRALFSDLHEELRQLELVIKDYDKKLENMVKSNDICLRAQSVVGIGPITAAALYAAIGNGHNFSNGRHFSAWCGLVPKQHSTGGKSVLLGITKRGNPYLRTLLNHGARTVLKYCEAKDDKLSLWAQRLKKEKHYNQASIAVANKLARIVWAVISKDESYQVNYV

SEQ ID NO: 281356 - protein, 355 aa, unidentified
MGEYIAFDSHKRYTLAEREDGATGRVGQTRIEHEPGAIRGYLAACQPGTAVAVEATGNWYWIVEEIEQAGLVPRLVHPRKAKLMMGMINKTDRLDVHGLNRLQRNGTLPTVWIPPGRLRDLRELARTRMVNGRQRTRLKNRVTSTLAKYGLRVEGVSDAFGVTGRQQLKGLVRQLPPETRWNLRLLLKQLDLVERQLTRQERRMEALVQRTADLERLTTLPGVGCILGTVIALEVGRIDRFPSAEHLASYAGTTPRVHASGGKTRYGPLRPDVNRYLKWAFVEAANAVALNHLRQPQRHVSRLYLRLRQRKGHPKAIGAVARHLAEATWHVWSRAEAYRDPALGRIKEGANAMLS

SEQ ID NO: 281357 - protein, 406 aa, unidentified
MSNVIMIGCDLHEESLMLKLAKGQETPETRLWKNTARDRQRMIADLRKRAKAAGHARVVFAYEASSAGFGLYDQLTEAGFEAYVLAPSKIPTSTRQKKEKTDEKDALVLLNLVRAFVLAGNPLPAVWVPDAQTRDDRELVRTRLDVSVKIGLLKNQVKSLLKRNQVRRPPGLGKSWTRGFRRWLLQSLVERVESPLYAGARHALASLLRQLDFLEKEQERLDAAVSALVDAPRYLEAVHELARLSGVGVLTALVFLTEMGDLRRFANRRQVAAYLGLAPSCFESGRTNDRKGHITRQGSSRVRRVLCQASWASVRFDARENAVYTRIVAKNPKKKKIAVVAAMRRLAIRMWHRGLYALDCKPAIPPGLPSIRQPLPQVEVGFSEVSPGCPKGVKKRLGKGKTASRG

SEQ ID NO: 281358 - protein, 345 aa, unidentified
MSYYAGIDVSLEQSSVCVLDGEGKIIREAKVASEPEALIAWFGSLGLAMTRIGLEAGPLSQWLFAAMKQAGLPVELLETRHVRNAFKTMPVKTDRKDARGIAELMRMGWFRPVHCKSISAQETRAILTTRTLIEAKLRDVEMSLRGVLRGFGLKVGKTTPTNFAERIKELVSEHSNLQVIADALLAVREVLLREFRSFEKRVRTMARHDERARLLMTTTGVGAVISLTYAAAIDDPARFKNSKQVGAHYGITPKRYQSGEIDYTGRISKIGDKSVRTALYQAAHIILTRPVKASAVKSWAMQLAKRIGMAKAKVALARKLAVILHRMLVEGKPFDHKLPNQVAAA

SEQ ID NO: 281359 - protein, 402 aa, unidentified
MNAVGIDVSKGKSMVAIMRPFGEIVSAPFEIKHTASDIHSLVELINSVEGESRIVMEHTGRYYEVLAHQLSKANLFVSAINPKLIKDFDNDSLRKVKSDKADAVKIARYALDKWQNLKQYNVMDELRNQLKTMNRQFGFYMKHKTAMKNNLIGILDQTYPGVNTYFDSPARSDGSQKWVDFASTYWHVDCVRKMSLNAFIDHYQNWCKRKKYNFSQSKAEEIYGKAKELVPVLPKDAITKLIIKQAVDQLNNASTTVESLRTLMNETASKLPEYPVVMAMKGVGTSLGSQLIAEIGDVSRFTHKSAITAFAGVDPGVNESGSYEQKSVPTSKRGSSDLRKTLFQVMDVLIKTHPQDDPVYQFLDKKRAQGKPYYVYMTAGANKFLRIYYGRVKEYLSSLPES

SEQ ID NO: 281360 - protein, 404 aa, unidentified
MKGPIVSIDVSKGKSDYQAFKNLNVKYTGSRSIKHTKEGFDEIVNLVREMEKKLETEVCVVYEATGVYHRVLKKVLEDNNIKQFIINPLLSAKTRKNDSLRCPKTDKLDPKSIAKTYYSHSLHNSHKPETIYHELRELSRYYEDILVHIRKDKVAFRAQLDVVFPGYDALFDDLYGPVALAVIEKYPHPEMLQKKKINTVSKVIQNKTCHRQAVSDTMADKAIEYSKTIYSGCDKDDIEVLILQRFIKKLKEDMAEAERTVGEMIKLAQELPDFNIIKSIPGIGDNLAARIIAELGDMTRFKKKNELVAFAGLDPRISESGQNDGNHMHITKKGNKRLRCLLYLAVTCSIRLKRDDNSIKDFYIKKKQQSNPMCSKAAKTACASKLVRIIYSMCKTGELYQYNK

SEQ ID NO: 281361 - protein, 374 aa, unidentified
MTDYSEVFVGIDTSKLRNAVAIAEGGRNGEVRYLGEIENTEAATGKLVKKLAAQHRRLTFCYEAGPTGYGLHRLIKALGHECMVVAPSLIPRKQGDRVKTNRRDALNLAKLLRAGELTAVWVPDARHEAMRDLVRAREAAVDDLKSKRQQVLSLLLRLGRHFTGKRTWTRAHMNWLVSQKLAHREQRIAFEEMLLAVRQANERVIRLERAIVAAVPDWSLAKVVTALMAVRGLDHISATIFLAEIGDLSRFATPRQLMAYLGLVPSEESTGDSVWRGGITKAGNHRARRILVECSWSYRHPPRVGKKKLAKVEAAPSAVQEIAWKAQARLTARYRALARRGKRPTLVVTAIARELSGFIWAVSRAASTPAPSAA

SEQ ID NO: 281362 - protein, 312 aa, unidentified
MPENTQPDYVGVDIAAERLDYCVNETDEGNCPNSPIGRAELITKVKCLPHPRVICEASGGYEKLVVAELLASGIEVCVVQPGRVRAFAYAEGLLAKTDRIDARLLRRYAQKVQLRLAVPVEAVLATLRELLEHRRALTTQLCEVEGRLPLAGATLTKLLGRQRTFLKKQIEQVEKMLRQHIDNDPDLRDKAERLQQIKGVGPVLASTLLAYVPELGKIESSQLSALIGVAPHPRDSGHCHAPRHIRAGRGQVRHVLYMAAVCAARCNPVLAAFYQRLKANGKPPKVCLVAVMRKLVCLMNRLILDPNFTLAH

SEQ ID NO: 281363 - protein, 340 aa, unidentified
MTHHNLVSIDLAKSVFQVCLFTDDIKIVSNKKVSRHKLSQQIAQLSPTTIAMEACYSAHYWGRVFEQYGHTVKLVPAQHVKPFVRGNKNDANDAIAIAEASLRPHMKFVRVKTVEQQDIQSLHRIRERFVGSRTRIGNQTRGLLSEYGLIGGAGFKALNILIQQALESDSLSALFKEEIASVYEELLDLEYRLKRVNRKLKALAEHYPLCRLLMTIPGIGFINATAIYAAIGDGKQFETARHFAVWMGLTPQQYASGEKSYTGKITKRGNRYIRKQLVHGARSLLIRAKGKKDRLSVWANTIRERRGLHKACVALAHKLARIIWAVLTRGEEFKLQTMAA

SEQ ID NO: 281364 - protein, 419 aa, unidentified
MPKSTTSETNSANPENVVISDVRLGSRATGDTYPLECNAPAGVEPKYFIGIDLHSNNIVYCVLTQENGQPKKVKTGKVSCNNTKGIASVAEALRPYCENVPHFAVVEATYNWYWLANLFESEGWFLRLADPCTVSQANLKYSNDHTDAAYLAERLRVHSLKTFPIMGKEYRDLRDLSRSLMVLKQDMARLKITVVNELANHCSVRVRIDSLIREPLKLIRGNEKKPGIYEELDELMSKIVYEFVQLPGTHYMLCSQLRRIVRLTLEVEKLGELLFGKMTDSPTTQALKTIKGCGPVLSTIIATEVGDIRRFASAKNFQSYCRLAPTSKLSNGKSKGRGNAKNGSAYLSWALTELATLMARFNPEVGAEFQRLLARAGGLRVKAIRALAAKISRAIFHMLRNGEVFDVKRCFAPRKTEAK

SEQ ID NO: 281365 - protein, 434 aa, unidentified
MRPTVEAAEGEALMQVLYQRCAAIDIGKDVIAVAVRLPGDGPDHRQTIKQTFKTFYGVLKHAARWLTEQQVTHVAMEATGIYSMPVYHALIEHGEFEKVLVCNAGHVKNVPGRKTDLSDAEWLVHLLECGLLRGSFIPPAQIKAARDVIRYRTKLTESRTSELQRLGNVLQDAGIKVDSVASTITTQSVRAMVEALIDGERRPLVLADLAKGKMRAKIPDLQRALEGRFDDHHALMCQLHLDHLDHLEEMIARLEAQIEDMMAPFCAQRDLLITIPGIGPLTATAIISEAGTDIAETFPSAEHFASWIGVCPGNHESAGKRHSGKPRKGNQHLQHVLVECGWAASRTPGYLQSLYRWHVRKFGGSRNPTAKNKAAVAVAHKLSVIIWHVLATGQPYTDLGADYLARRINPETETRRLIAKLQALGHNVIIQPAA

SEQ ID NO: 281366 - protein, 328 aa, unidentified
MQESKEYVGVDVSKETLDMVVYSTGEMRSFGNDDTGIAKATTWLKQVSPAIIVMEATGGMEVSLYVALQEGKFPVGVINPRQIRHFAKSMGILAKTDRVDAKVLARYAATIQPEARPLPDEETRQLKTLVARRRQLGEMITAETNRAQATRNKDMKQRIHVHIDWLQQELAHIDKDIGRMIKENPAWHAKDKLLRSVPGVGPVLSATLIAELSELGVLNRKEIASLVGVAPFNRDSGRHHGQRSIWGGRPKVRRSLYMAALSATRFNPTIKVFYERLLANGKKKKVALTACMHKLLIILNVMVKHNSAWSYSPPIPDRVCIPAAKTVA

SEQ ID NO: 281367 - protein, 344 aa, unidentified
MTYYVGLDVSLRTTNICVIDDSGTLLAEGKTASEVADILAFLDQLDVAVDRIGLEAGTLTQYLTYGLQFAGFEVICMEARQVNAALSAMRNKTDKNDARGIAQVLRSGWYNRVHIKSIESHQVRALLSSRKAVLAKCIDLEQEIRGLFKVFGIKLPASLGHGAFDPKVRPLIEADDALSHALLPMLDARLALYHSFRELDNRTRHRAHADPICQRLMTAPGVGFVTALTFKAGVDDPTRFKRSRTVAAHFGLTPRRYQSGEVDFEGHISRAGDANVRATLYVAANAMMTRSSKWSPIKAWGMKLAERRGHKRAVIAVARKLAVILHRMWIDDTQFQWSAEAARS

SEQ ID NO: 281368 - protein, 335 aa, unidentified
MQIYGIDLAKEKFDVSFFDLTSKKVSNQPSHKVVKNNFKSIGRFLETLPSDAVLVAEHTGVYGDTLLKCCMDSNVKIAFVGGYVIHRYRATPDRAKTDVLDCALLRDFGERYPDKLKYKTFPEEALYELRQLARHREMLVEQRKQLITADKSEDCRPIRSLAVKRSMDRIKEMLDTEIAETEKEMLKVINGHESIRHNYELVKSVDGVGLITAVELLVKTENFTKITTARQYAAYAGTAPYEKSSGKMDKGAHISKIGNRWSKTLLYICAESARLHNKEIKLYYERRTLIDKKPRHYVLNAIANKLLRIIFTLVEKGEYYDANFIRQDPRVVKYN

SEQ ID NO: 281369 - protein, 343 aa, unidentified
MNKNWFIGIDVSKKTLDASIFVAGEVINRFPHTQVRNDKEGFKELLKWLKERGVRLQDALIGLEFTGYYSDALEQFLTRKKLCYTMLPTTVVKHYQRGTREKNDKVDSAKIADYLFRFQGTECIKQRVLPSKAMQELKVLKSERKFYVRHRTDCENRQKVAKSKDEQKNLQKLIDLYNKEIELIEQKMAEVVTSDDEIYLTYTRLLTIPGIGPVNAINTIANTQNFTAFETARQYAKYVGVAPSEHSSGTSVRWRSRPSPHSDLQAKADLSLAAMRAVEFSIEMNIYYERKLGNRPDDKDVKRKALNAVKFKLIRQMFSVAKQHKNFILMQQAEIHNTDQQVN

SEQ ID NO: 281370 - protein, 413 aa, unidentified
MVFWSVQYLLQHLLVQTQVSHQLLQPLILILQLPQTPQFRHARPGKFFLPVNGMDYFLPLRLTVRNVLTRRITMNIVFLGIDLAKNVFQLCGLNQAGKPVYTKRTGRKELLQTLANIPACLIGIEASTGAFYWQREFEKLGHKVKVISPQYVRPFVRGQKNDGNDAQAIAVALMQPTMQFVPPKSPEQQDIQALHRARQRIVNHRTATVCQIRGLLLDRGIPIGSAVSRARRAIPLILEDAENGLSSRMRRTIAELYDLFNDLGRRIHFFDKEIETVFRQSEACPRIAKVKGIGPKTATAVVAAIGKGTEFKNGRHFAAWLGLVPRQHSSGDRQVLMNMTKKGDKHLRTLFIHGARAVVRVATNNNDGHMNQWVNQLKERRGFNKTTVAVANKNARIIWSMLRNDTGYQVVCN

SEQ ID NO: 281371 - protein, 325 aa, unidentified
MDNCIGIDVSKASINVHISKTKQDFEFVNSLKGFKSLYSKLKKIYKKEIEDIVFIFEPTGSYSEALRKYCSNQNIKCFIINPKQFSNYAKALGVEVKNDIEDARVLSKAIDIAKEGQVKVPVYDEDIERLKELMGYYKFTTKQTTQQKNHLESLTSKEGDFFAIKSLRQSIKESKEKEKRILNQMQGVIDNNEKYRKGYENITSIKGVGQIGGIALLHLFIKYPEANQRQITSLAGLNPIYKQSGTSIQSGYKISKSGSRIYRGSLFMGVMTAIRFEASFKAFFERLIANNKQTTQAQIAVMRKMIITAHSLYKNDRKFEQNFVQ

SEQ ID NO: 281372 - protein, 345 aa, unidentified
MKHCAGLDVSVKETAICIVDETGKIVREAKVTTEPEAIVALLMEAGIEYARIGLEAGPMSQWLVTDLLEAGLPVVCVETRHMKAVLKAQQVNKSDRNDARGIAQMMRVGLYKPVHVKTLASQHERMLLTLRKLLRDKLQDVENDLRGTLRNFGLRVGVVSAGHFEARVRELVMGHPPLEAIVAPLLVVRRVLREQFAVLHKMVLEQVRRDRLCRRLMTVPGVGPVVALTFRATVDQPQRFARSKTVGAHFGLAPRRYQSGDTDYDGRVSKCGDAMMRTALYEAAQVLLTRTQKWSWLKAWGMQVARRRGSKKAIVALARRLAVILHRMWIDGSQFRWRKEVNAAA

SEQ ID NO: 281373 - protein, 389 aa, unidentified
MILHFVFFMLLKKWLIMQIRKIIRTTKTIPTMQRNKKTFKGQNIYIGIDVHKKNWQVAVITESGYTERISTAADAKALFKFLKSHYPDGNYRAVYESGFSGFATHYALSELGVSCVVAHAADIPSSQYELTMKSDRIDAEKLARALRAGLIRGIYVRPKDNLDDRGVLRIRKTIQIQVGGYKTRIKHLLHSNGVELPERFSRSGTHWSRAFIAWLREDVRLLSDTRRSLELLLLQVETLRANLLEATRRVRALSMTDRYREDCALLMGIPGIGLTVAMTILTEVCDIGRFGNERQFASYLGLVPTSHSSGERVSHGEMTFRGNKHIGPLLVEASWVLIVRDRELGRMYTEYRWRMAGQKAIIKIARKLSNIIFAVLKTRKAYEPYRRDA

SEQ ID NO: 281374 - protein, 350 aa, unidentified
MNVPKIVVGVDTHKEEHVAVVIDKLGARMGQLTLPTTSMGYVALERWARTLGEIEAFGVEGTGSYGAGLTRYLRGQGHTVIEVNRPDRSTRRRLGKSDPTDAEMAARSVLAGVARDHPKSGVEEVEMIRMLKSTKDSAMKGRTQAINQMKALVVTAPVELREVLSGLTSSQLVMRCSGWRNGQLDTPTTAAKYALRSLARRYIRLTEEIKGLNKELALLTVAFAPMLIDSIGIGPDTAADLLVTAGSNPERLRSEAAFAALCGVSPIPASSGKTNRYRLNRGGDRRANAALYRIVIIRLRYDVRTRTYLQRRTEEGKTKTEVIRCLKRYVAREVFGILHEIGMRHTLQND

SEQ ID NO: 281375 - protein, 343 aa, unidentified
MYYIGLDIHKKTISYCVKDASGQIHREGKIGSTRCELDSWIKTLPQPRMIAMEATIFTGWIYDHLLPHAEKVKVANPLMLRAIAAAKRKNDRIDAGKIADCLRCDFLPECYMTSTEIRDRRRTLRYRNLVLKQMVQMKNRISGLLMETGVSYNKQRLHKLGYFTELMSGNEEVDESIRPLLKLSRETIVRSQRLDYALVSSLERDPLLGERLERLRTIPGVGPITALTWALEIGDVSRFQSVKQAISYCGLCSAERSSADKLVRMPISKQRNKHIQQTLVEAAKLAPRYSPELALVYERERQRGNRNRATLAVARKMVAYMLAVERRKQDFVLTGKISGTAAA

SEQ ID NO: 281376 - protein, 343 aa, unidentified
MQIRSVGIDLGKTAFHLVALSAAGKVLLRKKFTQKQLITFTANMQTCLIGMEACSGAHFLGRVLREQGHDVKLIPAQFVKPFVKSNKNDFLDAEAIAEAVERQNMRFVPIKTDDQLDLQAMHRVRDRLVARRTSVINQLRAFLLERGMVFAKTPFKLKQAMPEILENADTNLTPRMRNLVSLLWSEWKDLEQQIVAMNLEVEQIASSDPACQRLRQIPGIGPLVATAIVAAIGNGAAFRKGREFSSWLGLVPRQHSTGGQARLFGISKRGNCYLRKLLVHGARSAVLRVKRERSPFGPWLDALERRSPVKVVITAAANKLARVAWAVLSSGEEYRPPTALMPS

SEQ ID NO: 281377 - protein, 313 aa, unidentified
MDHDSAFVGIDVSKNKLDSFVSTTGQVEQFSNTQEDIQRLAKHLKAQEPVLVVLEATGGYERLAAAELCAAGLPVVVVNPRQVRDFAKATGRLAKTDALDAQVIAEFAQAVKPEIREMPDEHARELADLLTRRRQLIDMIVAEESRLKQAVFKALRRDIKAHIVWLQKRLKSTDDDLHEAIKASPAWKANYDLLREVSGVGNVLALSLLAMVPELGKVNRKQVAALVGVAPFNCDSGLYKGRRRIWGGRAEVRSVLYMAVLSSKSHNPVIERFYNHLLAAGKTKKVALVACMRKLLTILNAMVRDQKHFAEMA

SEQ ID NO: 281378 - protein, 419 aa, unidentified
MKQIQTKKLKVVNEKTLIATVDVSKDKHTGYCRCSNGAETKPFDFSNNIHGFNEFWECITRMKEAHNMEEIVIGFESTGSYAEPLIHYLRKRPVKLVQVNPMHTKRLKELNGNSPSKTDYKDPKVIADIVELGHSLTVVIPEGSAACLRRLIHARERAIQRRTALFNQLQDMVFLIFPEFLQVMKDIKGKTAKYLLRHYPTPESIVGCGLLGLTDTLRRVSRGKLGKDRAEELFKAAKTSIGIKEGQSSILLEIKEMLTIIETTDHFIAKLEAEISYHLKEIPYSRYILSIKGVGEITAAGIIGEVGDFGSFDTIPEIEKLAGLDLYEISSGRHRGRRRISKRGRPLMRKLLFFAAINVVRKGGILHEWYQESLKRGMQKIKALVAVSRKLLRIIFALVRNHSEYVTGYLKPKELKMAA

SEQ ID NO: 281379 - protein, 429 aa, unidentified
MNYNTQNAKIASITEKTLIVGIDVGSETHYARAFDWRNYEYSKKPFAFNNDEAGFAAFKAWMEDMADKHGKEAVIPGMEPTGHYWLNLGAYLQEQGMKPVHVNPHHVKKSKELDDNNPNKNDRKDPKTIAGLVNEGRFSYPYIPTGIYAEIRNLSNLRIQTQEELTRIKNRIARWFSIYFPEIKDVYKNPDAVSGMMVIKKAPLPCDIKELGVDGVNQVWRDVKLKGAGLKRARTLVSAAEHSIGSTEAPGSARIEIRNLLNDYEVYKNRMDDLMREIEAKLSEIPYIDKLMEINGIGLKTVSCFIAEVGDIRRFDNPKQLQKLAGYAIVADSSGKHNGESRISHRGRKRLRYALYEAAISVIGKNKEFREIHDYYRTRKQNPLKKMQSVIAIACKLIRIFYTILTKGVDYDGQKMLSDIVRPETIMAA

SEQ ID NO: 281380 - protein, 422 aa, unidentified
MLEESNDTEELIGRIAALDIGKAELVCCVRVPRPDTPGKRLQEVRTYATMTRSLLVLADRLGELGVTRVVMEATSDYWKPVFYLLEAQGFEVWLVSARDVKHLPGRPKTDRLDAVWLAKVAERQMLRPSFVPPPAIRRLRDLTRYRADLVGVRTAEKQRVEKLLEDAQIKLSVVASDIFGVSGRDMLAALIAGERDPKALAQLARTRLRAKRSQLEEAFTGHFSDHHAFLLARMLGRIDQASADIAELEAKIDQEVAPFAPAVDRLDEICGVGRTAAQVIIAEIGLDMGRFPTPGHLASWAKFAPGVKQSAGKTKGKATTGHGNPYLARVLGEAAVAAGRTDTFLGERYRRLAKRRGTKKAIVAVGRSILIIVWHLLADPTARFHDLGAGFYDTRINPERAKRNHVRQLEALGYKVTLEPAA

SEQ ID NO: 281381 - protein, 453 aa, unidentified
MVPLPAGEVSADGWWDDAPVSAALLGSCQESSGFDGDCRGSGEGPGVIFAGVDWAEAHHDVHVQDEQGRRLAGGRLPDGIEGIARFHEMVAAHAGDAGEVVIGIETDRGLFAGALVAAGYQVFAVNPLSVSRYRDRHSVSGAKSDPADAKVLADLVRTDRHNHRRVIPDTDLAEAVKVLARAHQSMIWNRRRQLNQLRSALREFYPAALAAFDDLASADAIEVLKVAPEPRLGAALSKTQIGAALRRGGRTRRIDQRTAQIQAALRAPQLQPPPVIAAAMGAAVAAQASVTGEMSRQIAVLEQQLAADFEQHPDAEVVRSLPGLGTILSARVLGEFGDVPDRYADAKSRRNYAGTSPVTRASGTRRVVLARHVRNRRLADAIYLWAFSALSISPGARVFYDQRRAAGDTHHQALRALGNHLVGFLHGCLTKHTVYDEQTAWAHRPRPELKTAA

SEQ ID NO: 281382 - protein, 465 aa, unidentified
MGAGKMNRKQRKELGRRLQSANPGLEVVHPRAAGIDVGNGAHYVAVRPEQDAEPVRRFECFTADLHRMADWLEACEVKTVAMQSTGVYWIPLYEILEQRGFEVYLVNARHTKNLPGRKSDVQESQWLLKLHTHGLLNNSFQPSAEIRVVRTYWRQRGEHVRGASTCIQRIQKVLTQMNVQLANVISDLSGLTGQAIVRAILAGERDPRKLAELSHPRIRAGREQIAKSLEGNWRSELLFVLKQEMEMYETYQHKIAECDRELEATLKQFAVAERVSTEQPKIPNAKKTKRIQRNAPGFNLTSELHRITGVDLSRIDGVNAIVAQTIISEVGLDMTRWKTEAHFASWLGLCPDNRISGDKVLARGTRHVINRAATALRMAATTLIKSQSYLGAQYRRLRTKLGAPKAITAMAHRLARLVFRMLKYGQEYVDKGTQYYEQKHREQQLHLLKKKAATLGFQVVETGVA

SEQ ID NO: 281383 - protein, 301 aa, unidentified
MQRNKISFSGQKIFVGIDVHKRKWSVATITESGFQRAHTQNASAQELIDFLRRHYPDGDYMAVYEAGFTGFSTYYSLAEAGIGCMVIHAADVPTTQYENVMKTDKIDCVKLAKSLRAGLLKGIYIRPKDSIDDRGVIRMRRAVIKDLSRYKIRVKHLLMSNGVEIPEQFDKRKGNNWSGAFIQWLKSDVKLLSETRRTLDMLIVQVERMRQAQLEATRELRKLSRIERYAANYDLLCSIPGIGGIVAMTLLTEINDITRFNNEKQFASYLGLVPTSHSSGDKTIHGEMTFRGNKDNYDSEI

SEQ ID NO: 281384 - protein, 349 aa, unidentified
MLADELDYVIGVDTHRDQHTLAVVAAPTGAVLAQAVVRADGRGYGEALRFAARHASDARAWAVEGAGHYGAGLTRYLAERGETVLEIGRQPRSERRLRGKDDPLDATRAARSGLASEALTLPRAGEHQEALRVLLLARRSAVDVRRVALVQLRSLIVTAPEGLRQQLRLLPLGQLLRRCSRFRRSDSRPADQLALVLTLRSLARRIEAATTEADELERQIATHVSATVPDLLNEPGVGPIIAAQLIVTWSHQGRLRSEACFARLAGVAPLPASSGQTIRHRLSRGGDRQLNRALHTVILHRRHHDPATRDYIARRVAEGKSARDATRILKRYLARHLYRVMQNAEPAMT

SEQ ID NO: 281385 - protein, 402 aa, unidentified
MRVIGMDVHRAFAQIAILEDGKVIDEQRLDLVQDKVVAFGRRLRLDDEVVLEATGNTAAIERLLRPFVSRVVIANPRMVRAIAYARVKTDKIDAITLARLQASGFLPEVWAADEDTVRRRRQAAERMGLLDETVRLKSRIHAVLHANLIPKYKGALFGPAGRRWLAAASLPEHERLILDRLVNELQHTTEQLAALDRELACLALADERAVRMMTVPGVGPVVATMVLSAIGDISRFESPQKLASYFGLTPKVRQSGEGPARHGRISKQGNGSVRKMLVEAAWSAQSAPGPLRAFFARISAKRGAAAAIVATARKLTVLIWHILAKGQVYAFARPAFQAMKLRKVALKAGAPREYGKAGPGRDYWIKEIRHREMDYVKRAEDAYAKMVDAWRQVPPKVRKKTC

SEQ ID NO: 281386 - protein, 400 aa, unidentified
MTTRHARIWVGIDAGKGHHWAVAVDTGGETLFSTKVLNDEAQILTLIDTAREKADEVRWAVDIPGRASALLLALLIAHGQQVVYIPGRTVNRMTGAYRGEGKTDAKDALVIADQARMRRDFAPIETPPELVSTLQLLTGYRRDLIADRVRLINRLRDLLVGICPALERAFDYSAAKGPVLMLTEYQTPAALRRIGVKRLTTWLERRKVRGAGELAAKAVEAAQSQLTALPGEKRAAKLVCDLAHQLLALDERIKDNDREIREAFRLDERAEIIESMPGMGPILGAEFVAIVGDLSGYRDAGRLASHAGLGPVPRDSGRRTGNYHRPKRYNRRLRWLFYMSAQSAMMRPGPSRDYYLKKRAEGLIHTQALLALARRRVDVLWAMLRDKRLFTSVPPVTQTA

SEQ ID NO: 281387 - protein, 392 aa, unidentified
MEVQDETGRRLTKARLPEGISGIARLHALVGRFLLEDGAAAEVKIGIETDRGPWVAALVASGYQVYAVNPLQSARARQGNGVSGAKSDAGDAHVLADMVRTGCHQLRTVAGDSEQAGAVKVLTRMHQTLIWDRTRQVLRLRSSLREFFPAALEAYENLAFPDVLELLTKAPEPSRAATLTRAQITAALKRAGRRDRDAKATAIMSALRSEHLTQPPLIAAAYGATVRALAAMITTSNEQITALEGPVEACFGRHPDAEIYLSQPGLGPILGARVLAEFGDDPNRYQGARARKNYAGTSPITRASGKKKVVLARYVRNKHLADALHQQAFCSLKRSPGARAYYDALRDRDISYNAALRQLGNRLVGILHGCLKTHTLYDEAVAWNEPAQQVAA

SEQ ID NO: 281388 - protein, 481 aa, unidentified
MARAREQVRRATPAGQADAGTQGSSVAQVADLVITHRHAAGIDIHAAEHFVAVASEDMAAGFVNPDRKLPAGVRKFGTNTADLEAIADWLRACGVTTVAMESTGIYWIPLYDLLASRGFEVLLVDPRQTKHAPGRPKTDVVDCQWIRRLHSYGLLTGSFRPGDEIVRWRGFQRQRETLIRYAAQHVQHMQKMLEEMNVKLPEVVSDIVGMTGMKIIKDIVRGERDPLKLAKHRHESCKRTEAEIAAALYGNWREELLFGLKQALQLYEFYQKQLRECEVQIEACLQNLKDKSDGRPLPPSLRKRKPEKNEVRFGARALLFRMSGVDLTQIEGISETTALVILSELGIDLSAFPHEKNFVSWLGLCPQHRGSGGKIFKRRTRRGANRVARALRMAAQGCHHAHNALGAFYRRIQGRSGGGKAVVATARKIAERIYRMLRYGQEYVRQSAERYEQAYQLRLVKSLAKRAATMGYKLVPETATT

SEQ ID NO: 281389 - protein, 414 aa, unidentified
MLKIVYRVCCGMDIHKSFVVACIASTNEQGVTTYKRKRFSTFTGDLRRCAVWLAENNCKDVCMESTGKYWIPIYNILEPTCNIVLAHPKYVKAIHGKKTDKRDAKWIADIFKHDLVAGSFIPPADIRQLRDLVRYRWKLTNFTTGEKNRTQNCLTVSNLKLDDVFSDVFGKAASAITARILENPTEKITDVSGFRTKGMKATNEQVLAAVDGVMCEEQAEKLRIIRSHMDSLELCKLNLESLILSVAEKYLPQLGLVMTAPGIQSFAAIGIISEIGVDMSVFPTSKHLCSWAGLTPQNNESAGKKKTTRISRAGAYIKPLLVQCALSAIKAKKFPEVRNRYLALKKRRGHKKAIIAIARMLLTAIYNMLKKNESYNPELYRKGEPPPAHREVSVEEAIFILQRQGYLVTAPPTT

SEQ ID NO: 281390 - protein, 312 aa, unidentified
MDKPTMIGVDVSKDWLDFAVAGGGPIERIANTPEAVARLLDDHGPALVAFEPTGGYERVLQNALRDRGIVFVRVHPNDVIAFRKSRGIRAKTDRIDAGLIAAFAADELVRRGLRPNIAGDQRLRELVARRRQLVDMLQAERCRLELATAAAVRQSLSLVVDAITNSLEALEQEFLAHVAANPDLAQLKGLLQSVKGIGPITATTLIADLPELGLLNAKEIAALVGLAPNTRQSGKMRYRERTGHGRPAVRRVLFNAARSAIRHPSPLRTFYLRLVEQNQRPGKVALTAVMRKLLVTANAIARDRQPWKLNTA

SEQ ID NO: 281391 - protein, 339 aa, unidentified
MGGRYVGIDLYRRRSVIYVMDADGEKLSCVRIANDPWVLLEQVTTAGADAEVVIEATYGWYWAVDLLRDAGFRVHLAHPSGNDWGKRRVKNDERDARDLADLLRLGRLAEAWIAPPAIRELRELVRYRAKLVRLRSGLKAQVHAVMAKEGVLPALDDMFGPGGQRLLDQMELADAYLTRVTSLRELIEVYDRQVASLERQIHQRLRHDRGYQAIQALHGVGRTIAAIFVAEIGDVARFRSAAALCSWAGLTPRHRESDTKVTRSGITKMGSPLVRWAALEAIARYKGGSELQAEFRRIAERRGTNKARIAVARKLLTLVYYGLRDGEIRCLRDDEAEAA

SEQ ID NO: 281392 - protein, 458 aa, unidentified
MSKSVKKATPIRFHEGLQQLRKDAGGMDIGASEIWVDVGLENDSEPVRRFETFTADLNRMAEWLIDCGIKSVVMESTGVYWIPACQILEDKGIEVLLVNPRYAKNVSGRKTDALDCQWLRTLHCYGLLPASFRPAREIASLRSYLRHRQMLIEYAAAHIQHMQKAMTQMNLQLHHVISDITGLTGMRIIRAIVGGERNRKKLASMRHERTHANEATIEKALEGDYRTEHLFALKQSLEAFDHYQKQILECGQQIAQHVRSLETKADRSLKAPSKAMQKRRNRMKFNVREEAFRISGVDLTQIDGINESAALGLISEIGIDMSPWQTEKHFASWLTLCPNNKISGGHVLKRRTRKSANRARNILCFCAQSLLRSRSALGAFCRRMCSRLGKPKGLIATAHKVALFIYRMMKYGRDYADIGQEQYDKTIQATDPEIFGTQSQRSRIPTRFHLRESGSLGY

SEQ ID NO: 281393 - protein, 347 aa, unidentified
MNFYTKQHQYYCGIDLHAKSMYLCILNQEGEIVLQRNIRTHSEVFLKTIERYRDDIVVAVECIFTWYWIADLCAQENIPFVLGHALYMKAIHGGKAKNDKIDAHKIAVLLRGGMIPMAYVYPQEMRSTRDLLRRRMHLTQKRAELLRHIQNTNYQYNLPDIEKKIAYKANREGVAEHFPDESVSKSIELDLNLLDYYDQLLPRLEHQISLIAKAHDADSYFRLRSIPGIGRILGLVILYEIHDIRRFPTVQDFVSYCRLVKSAKESAGKRLGSSGKKIGNVHLKWAFSEAAVLFLRRNPEARKYREKLQKKHGKAKSLTILAHKLARAVYYILKRKEVFHMNTFFER

SEQ ID NO: 281394 - protein, 393 aa, unidentified
MTATHSVNSTASVSPVLYVAFELSNGQWKLASTTARGQRARLVSVPARDTARILTEIARAKSRFGLPQSAKVFTCYEAGRDGFWLHRFLHQQGISNAIVDSSSIEVNRRARRAKADSLDAVSLVGLLVRYREGETDVWSTVEVPDPADEDQRHLHRELDQLRRERTDHSNRVRGLLAAIGIKIPSKCTLPCDLDSLRQWNGEPVPTGLKRRLTHEFERMELLARQIRAIETEQAEEINNDQTRHVDKVRALMGLKGVGQTSATILVYEFFGWRQFANRREVGALAGLTPTPYQSGESNHEQGISKAGNARVRWIMGELAWSWLRFQPESSLSQWYYRRFGRGTARMKRTGIVAVARKLLIALWRYVEQGEIPEGARESDWKAKLKRVLGRRSA

SEQ ID NO: 281395 - protein, 344 aa, unidentified
MNQIYIRMDLHKNTSTFAVKDKDGQVIDECKIATEPSAIKGYLKQYPDSSLAVEPVSQWYFYGDLIQGLDIDVHLANPLKVKAIASARVKTDKIDASALCDLLRSNLLPEAYFASADARYWKEMVRYRSSLIRLRTQIKNKIHSILFRNGLRHDFTNLFGVGGRKWLDSLDLAEHFAFNLKHYLGLIDAFGQLIKEADERIEKVVGDNQPAKLLTSIPGISYVSALTIMAEIGTVERFASAKKLQGYAGLVPSTYASGDRMVHGRLTKQGSRWLRWTMIEIAQRQLLCKKKPGFDWYYQRIKQRKGSGAAAAATARKLLAVVWRILKDNRPFEIIPPRVGSPGC

SEQ ID NO: 281396 - protein, 402 aa, unidentified
MNCVGIDVSKGKSMIAVMRPFGEVVVSPFEVLHTDNELSKLAELLKSLDGETRVVMESTGNYHAPVAWLLHDAGLYVSVVNAMLVHDYGNNSLRRAKTDKKDAVKLANYGLDHWLTLPRYVPEEDTRLMLKTCYRQYQQYSKVQTMLKNNLISLLDTAFPDANRLFTSPPRADGSEKWVDFVAAFWHCECVCGLSKKAFTTKYQKWCRKHGYNFSEDKALDIYASACRHFGVIPKTDTAKLLVEQAISQLRATSAALAALKQEMQSLAASLPEYPVVMEMFGVGPALGPQLMAEIGDVRRFHSKKALVAFAGIDAPPYQSGQMDVRSRSISKRGSASLRRTLFLVMGVLLQCAPMDEPVYQFMNKKRSEGKPYRVYMMASANKFLRIYYASVKAYLESLEHD

SEQ ID NO: 281397 - protein, 401 aa, unidentified
MNAVGIDVSKGKSMVAIMRPLGEVVAAPFEVGHTATELNELAKFILKISGETRVVMEYTGVYFEPIAMALYDAGLCVCVMHAQLIHNYGNNTIRKVKTDKADAIKIANYALDNWDKLKPYTPIDEIRRQLKAYSRQYRKFNKLKTMLKNNFIALTDSTFPGVNELFSSPPRKSDGHEKWLDFAMKFWHAECVCSLSQKAFTERYRKWCHKAGYYFLESKVEDIYAAACGHIGLLPKDENTKQLVQQTIIQLTSICSSLSVIEYKMTELAVLLPEYPVVMEFHGVGRILGPQIMAEVGDVLRFKKKESLVCFAGLEAPPYESGKFESHNRTISKKGSPHLRAALFQVMDCLLKTQPVNDPVFQFIDRKRSEGKHYYSYMCAGSAKFLRIYYARVKEYLTALD

SEQ ID NO: 281398 - protein, 350 aa, unidentified
MLIIGCDYHPGFQQIAYVDTETGEMQERRLGHRQEGEEFYRALKQQQIRVRVGMEASGQARWFERLLAELEFELWIGDAAKIRTKRVRKHKTDRQDAQLILSLLLENRFPRIWVASWENRDLRQLLWHRHRMVQMRTRLMNQLQAVALNEGIRRKKGLWREAGRKQLETVALAPWASRRRRDLLELLDRLNPTITDLTQLIEQEVEKYPTAQRLMTHPGVGALTALAFVLIIGEAERFECGKQIAAYLGLVPEEDSSGESRRLGHISKQGSGLMRFFLVEAAQVTVRSDPEWRNKFFHLAMRRGRKIAKVAMARRLAVRLYWMWRKQWDYEQLKKFGPHAGQPGTGVGVQ

SEQ ID NO: 281399 - protein, 346 aa, unidentified
MTIIRIGLDTSKHLFQIHGVDENETPVLRRQVRRLAVAEFFAKLAPARIGIEACGASHHWARVLRGLGHEVVLMPPQYIKPYVKRGKNDAIDAEAICEAMSRPTMRFVPIKTAEQQAALTMLGARNLLVKQRTMLINAMRGHAAEFGVTAPKGPQQIAELQRRLAADESVPALAREMLALLADQLEGLNAKLKTIEARLTAWHRQDQTSQCLATIPGIGPIGGVSFALKVPDPRAFRSARHFAAWIGVTPREASTAGKSRPGKISRQGDEDLRRLLVLGATAVIGAANPRVKPAGQGPTGRASAWLLELLARKPKKLAAVALANKMARIIWAMMVSGETYRRPKEA

SEQ ID NO: 281400 - protein, 353 aa, unidentified
MRVYVAVDFHAREQTISWCDTADGEVHRRKLRHQHDDVRKFYEQFKGEVMVGFEASGYSAWFEQMLAELGHTVWLGNAAEIRRKAPRKQKNDRRDADLMLDLMLKGDFPRVHTFSAESRTVLRQLRYRHKLVKVRTIAKNSVHAIGINAGLPLRGRLLTQAGLEQLQALPLTPVLSQQRDEWLALIRLMNKQIGAVEESLEQRAQDDAAVELLRTHPGIGLLTALALRYTLDPISRFTSTRCVVGYAGLDCVEDQSSERRRMGSISKQGSRLLRFLLNEAGQTAARKDPQLQQFYKRLLRRRDKPKAKVAVARKLLVRSFIMLRDQIDYAEFVRRGVAARVARETHSPKVTDL

SEQ ID NO: 281401 - protein, 408 aa, unidentified
MSKLLLIGIDAHSKNNVACFLDQDGHTIIKSIEFENNLPGAQILEEKICALMESGHYDSLKIATEAASLYHVHLLDFLSSSEKISKYDVEIYQLNPKLTSGFKKAYADKNKTDHIDAFIIADRLRFGRLPNPYYYNQPYIPLRRLTRYRFHLIESITREKNYFLLHLFLKYSSFSTLKPFSNTFGATSLAVILEDFSLDDFANKSIEDLVDFVSHHGKSHFNDPDKIAKKVKQVAKESYRIRPALANSVNLILTTSWQNIKTMTKSLKEVDKAIAVELKAFPNTLESVKGIGPVYSAGIFAEIGNIKNFASHNALAKFAGLTWRQNESGNFKAEITKMTKTGNKYLRYYLLQASNLLRVHNKEYQKYYYSKLGEVKLHRHKRAVALTARKLVRLVFSLLKNQQLYKCC

SEQ ID NO: 281402 - protein, 348 aa, unidentified
MEAYDGPQIVGMDLHRRRSVLVRMTPDGRRLDKAQITNTPEELRREIAQAGEHPKVVLEATYGWYWAADTLAEAGAEVHLAHPLGVKAFTYRRVKNDEKDAADLADLLRMGRLAEAWIAPPEIRELRELTRYRQKLVRARTSVKDQVHAVLAKLGVPVTCSDIFGVWGSSWLDGLPLGQPYAGKVASLRKLAGELTGEITLLDMVLADLLEGHDGYRALQALPGIGPVLAAVIVAEIGDIRRFSCPGRLCCWAGLTPRHRESDLKVARGHITKQGSPLLRWAVVEAIQRQPDGPIRDVKDRIIVRRGKEARNIAKTAAARHLLTCVFYAMRDGQARSLAMRTAARDAA

SEQ ID NO: 281403 - protein, 349 aa, unidentified
MIVLGADTHKSSHTVAAVDAATGQVLGEKTIAVGARGFGALVVWARGLAGERAWALEDCRHVSGALERFLISRGERVVRVSTRLMATSRRSARERGKSDSIDSIAVACAALREGLDELPAAQLDGPELDLRLLVDHRERLVRQRVGLNNTLQWHLHDLWPELELTGGALFSRKWSSRIGRRLARAEQTMRVRIARDELRRLRELTEAIKALEAEITGLVAHVAPQLLAEPGFGPLTAAKLVGEIAGADRFATDAKLARAAGLAPIPVSSGRTNRHRLDRGGNRQVNAAIHRITVTRARCHPETRHYVERKTAEGKTHREAIRCLKRHLARRIWHLLREPHPIGGTPPSP

SEQ ID NO: 281404 - protein, 414 aa, unidentified
MEQVHDRVAGLDVHRDVVAACVRVAGPRGGVATEKERFQTTTVALERLGGWLADRQVSLVAMEATGVYWKPVYYALESRFEVWLCNAHHVKNVPGRKTDMSDAEWLADVAAHGMIRPSFVPPPPIRELRELTRYRKTQTDARAAEIQRLEKVLQDAGVKLTSVASKVLTQSGRLMVQALIDGQRDPAELANLAKGKLRPKIPELTEALAGHFGAHHAVAARRILDHVDFLNATIAALTEQIDARTEPFQAAKQLLSSVPGFDRLVIDTVIAETGADMSRFPSPGHLAKWAGVCPGNHESAGKRRRVGITPGNSWLRRALIEAARAAARTRGSYFGAQYRQIAKRRGPNKAAVAVAHSLSDLIWHQLTTGECFHDLGDDYFQRRRDPERETRRLVAQLQQLGFQVALTPSRDPAA

SEQ ID NO: 281405 - protein, 459 aa, unidentified
MSKKRRRQGRLQVVNPDCAGIDIGKDVHYVAVPGDRCDDPVRSFPGFTRDLHEMSQWLQSCGVRTVAMESTSVYWIAVFEVLDRAGFDVVLVSPRATKQISGRKSDVLDCQWIQQLMSYGLLRGAFRPDDEVCPLRSYVRQAKRLSEDRARSVQHMQKALTEMNVRLDSVISNIMGKTGEAILRAIVSGERDCHRLASLRDGRIRASVETIATSLEGTWREEHVFVLEQALHRHDFLTAQLDACERRIAAAVDNLTPPYDPETGEVRDNDDSGGDPAPHTDATLAHALHRMMGVDLTRIPTIGATTALTVAAEIGPDFSAFPSAQHFCSWLGLAPGTRISGGKKLSGRGPSVVNKVARALRMAAVTARRSQTFIGARHRSRLARLDKPVAVNATARELACLIYMMVTRGTEYVERGMEAHERNRTSRVMTSLTRRARQLGFALVAIDENQPTHAAVTTA

SEQ ID NO: 281406 - protein, 387 aa, unidentified
MPQPNDLSRSLVALDQNNTIIAVIEMSQSSWLVAGMLPGIERQPCKKLEPRPERLLGLLHRWRYEAVRAGRTITRIALAFEAGRDGFWLARWLAARGIEAHVIHASSVAVSREHRRAKTDRLDTELLKRGFLGWLRGERGHCSMARVPTIAEEDAKRPNRERDSLVGERTRIVNRIKSTLARLGIRNFKPILRKAAERLATVHTPEGMPLPPNTLAELQRDMARLGFVVSQIREIEDARQKRLEQQSETGPHAMVRLLARIVGVGVETADMLVHELLSRPMRDRRAVARYAGLTGSPDESGAQRREQGLARAGNARVRRGMIQLAWRFLMFQQESALALWYRARTADSRSGTRKTMIVALARKLVIALWRFVTTGEPLEGVVLRPAS

SEQ ID NO: 281407 - protein, 426 aa, unidentified
MRVLYDRVAAIDVHKDMVKVAIRVPGAKRGTRKTDVLEFRTFYGVLQAMARELRGRGVTHVVMEASGVYTDPVYYALRELDFEEVMVINPAHAKALKGHKTDAKDAIRLLDLYECGLLSGSYIPDPDLREVRDLARYRMKTVQARTSEIQRLQKTLETAGIKLSSVVSDVTGTSATAMIEALISGERRGTVMAGLAQTRLRAAGKMADLSMALTGRFTEHHALMCRLHRDRITIFDDAVKDLDAKIAPLVARYAREADLLKSLPGFGDVIVAGWLGAIGPAPHQHFATASRLASWATLCPGNYMSAKKSKGGRTGDGGAYIKPLLIQAAWAAVRVPGRLQARFGRLVRKFGGPRNKGAQKRAITAIAHTLLKIAYGVLKTGTPYADLGADFYTRRESPDARQDYLMRQLQKLNPGCVITITPTEAA

SEQ ID NO: 281408 - protein, 391 aa, unidentified
MIFVGIDVAKDKHDCFILNSEGTVLADVFTIANNRIGFETLLSRIQSCSQGESKIKVGLEATGHYSYNLLGFLLDSGLATYVINPLHTNLYRKSLSLRRTKTDRIDARTIAMMLMSDVDLKSYSNTAYHNEELKSLTRYRFDKVKERAKLKSSVARLVNILFPELEKLVSSLHIAVVYALLSNYPGASYIANANTEELAETLCTASKGRYTKSKTAEIQVAAGVSIGSKMPAKSMELKHTIALIRELDKEISEVESAIDKITSQMDSPIFTIPGIGRHMGAMILAEVGDFSNFASADKLLAYAGLSPSTYQSGQLQNCYAHMEKSGSRYLRYALFNAAKYVCLWCPTFSAYLEKKRSEGKHYNVAISHAAKKLVRLIFAMQRSGKAFLADY

SEQ ID NO: 281409 - protein, 324 aa, unidentified
MMFIGVDYHPSSQTIAFLIEETGECGDQELNHSSGQAEKFYRDLKQRGICVRVGMEATGYSRWFERLLAELGFEVWMGDPAEIKAKRVKKRKTDREDARLLLRLMLENNFPQVWVPGPENRDLRQLLWHRHRLVQMRTRIMNQLQALAMNEGYRWKKKLFSEQGRAQLEKLALAPWASRRRQELLELLDRMNPTIEELTAAVEREAKKRPEALRLMTHPGVGPLTALAYVLIIGTPTRFERGKQIGTYVGMIPCEESSAGKQRLGHISKQGSSLLRFLLVEAAQAAARVHPAWRRRYIRLAMRRHKSIAKVAMGRKLAVRLYWM

SEQ ID NO: 281410 - protein, 421 aa, unidentified
MKRAETGKVRSVKDDTLIVAIDVGMEMNRGYCTTPDGRDIKPFKFDNSREGLDKLWGMVMASKNRFKCNEVIIGYESTGPYGEPLVHYLVKKPVKMVQVNPMHTKRLKELNDNSPLKTDDKDPRVIADIVKLGRALSIVIPEGDAAYLRRLNNSRERHVRERTALVNQLQQLVFLLFPEFKKVMKDIKCRTPLYILKKYPTPEAISVLDKHVLGEEMRKKSRGKFREPHAEMLINLAKNTIGIKEGVSGLSMDIRHILLQLEMLKSLIAEAEGEMEMALGRVSYSSKLLSIKGLGVVSVAGIIGEIGDFKNFKTRSEIMKLAGLDLYEISSGKMRGQRRISKRGRSLLRKILYYAAIQTIRKNGILHDYYTRLTDRGMKRMMALVAVSRKLLGIIYAIVRDDSEYSVNFESTKRQVIKKAA

SEQ ID NO: 281411 - protein, 378 aa, unidentified
MTERHRRTVAHPSFTEILPGPRSRVRRHADVLELGDEATWAIDLPDGYASLVITLLVSHGQRPLYIPGRAVNRASGSYRGEGKTDARDALIIADQARMRRDLSPLRAADEAMAELKFLTARRTDLVCDRTRASNRLRGLLAGIFPALERELNLANLGPLTGYQPPGTIRRLGASRLEKWLRGRGARWSAALARTAVEAASHQHTAVPGEQAAARLVQALALELIDLDRKIAELDEEIAKAFRSHPYAEIVTSMPGIGPLLGAEFLAATSGDMALFGSADRLATYAGLAPTPRDSGRVSGNLYCPTRYHRGLQRVFYMSAMSSIHYCPESRCYYQRKGAEGKRHTQAVLALARRRVNVLWALLRDGRRFEPAHPAAGTA

SEQ ID NO: 281412 - protein, 403 aa, unidentified
MNAVGIDVSKGKSMVAIMRPFGEIVAAPFEIRHTTSDINSLVELINSVEGESRIVMEHTGRYYEVLAHQLSEANLFVSAINPKLIKDFDNDSLRKVKSDKADAVKIARYALDKWQNLKQYSVMDELRNQLKTMNRQFGFYMKHKTAMKNNLIGILDQTYPGVNTYFDSPARSDGSQKWVDFASTYWHVDCVRKMSLNAFIDHYQKWCKRKKYNFSQSKAEEIYGKAKELVPVLPKDEVTKLIIKQAVDQLNSASVTVEELRSLMNETASKLPEYPIVMQMKGVGPSLGPQLMAEIGDVTRFTHKGAITAFAGVDPGVNESGSYEQKSVPTSKRGSAELRKTLFQVMDVLIKTMPQDDPVYQFLDKKRAQGKPYYVYMTAGANKFLRIYYGRVKEYLSSLPESE

SEQ ID NO: 281413 - protein, 422 aa, unidentified
MEGIAYARTIGLDVHQKMIVCCFTAVQADGKIIKETAEFETFKRGLKALASWCAERKPDVVLMESTGIYWKAPYVYLERAGIIPAVVNARHIKNLEGKKTDIADAEWLAVVARGGMFCRSYIPKEAYRNLRVLSRHLLGVTKSRQQYKNRISKILADGGARLNVVFSDISGVNAQRCVKGLIAGMKPEDIAATLDYTHLKATREDIVAAMECELSPAHLATLDELVAIVDFLTEQIDKGRKTLLEMLPEESREMLLILQTIPGIQETAALELIVELGGDNLEAFATADRLASWVGLCSGNNESGGKRRPAHTRKGNIYLRRILCEIAHAAAKTKGSTFQSKYKSLRMRKGAGKTIVAIACKIIKLVYTLVKKREGYRDPHIDYEKMRLQKNPKRHIQNLFKLEDWKIKAVNTKTGEVLESTP

SEQ ID NO: 281414 - protein, 371 aa, unidentified
MGESSKTLYVGLDVHKDSIAVAYAPEDRGAEVASLGSIGTRQCDIDKLIRKLQSKGATLVFVYEAGPCGYWLYRYLTRKGLSCHVVAPSLIPKKPGDRVKTDRRDAITLARSMRSGDLTAVYVPQIEDEAIRDLSRGREDAMRDLKATKHRLKAFLLRQDIRYEGRANWNAAHLRWLSEVVCPTRAQQIVFQEYVRAVTEQHERLQRLETELHEEVKGWRLYPVVEAIQALRGVELTGAVIVIAELGDLTRFDTPRKLMSYLGLTPSEYSSGERRRQGGITKAGNSHARRALVEGAWAYRYPAKVSRHLQLRLEKLPAEVQAISWKAQVRLCKRYRQLTARGKHVNQVVVAIAREMAAFAWAIARTVPLAP

SEQ ID NO: 281415 - protein, 338 aa, unidentified
MIHVGVDLHQRFCYMTALDARGKKLQAGAVSNERAALRRYFRQFAGQGVQVAVEACGFWPAFREVVEPAVERLVLVHPQRVKAIAWAKLKNDRVDAETLAHLLRCDLLPESWKADRATQARRQQVRLRATLVRQRTRLKNQVHAVLHQQGLRSPVSDLFGRGGRQWLAQAKLPPRARETITVCLRLIDGYSQEIEEQNRQLSVEARGDARVRWLTTIPGIGMYSAMLLLAEIGDIRRFRDQQALCSYAGLVPRVRESAGKAARGGITRQGSPWLRWIMVEAAQVAERSSPAAQKYVLRLRRKKHPHVARVALARKLLVAVYALLHDGVEFEEEKFAAV

SEQ ID NO: 281416 - protein, 339 aa, unidentified
MFDIALDLHKENTYGVVLDDKSGQIIWEGNFASNIKAAKEVLEPYFVHGTKVAIEATSCFYPMHDGLKAIESISVFVVNTARLEKPAVKTDRRDALRIAHLLRRDELPTAFIPDKELRLQRELCALRMRYVHSSTQCKNRISSILHKEGKRVFGVKDTFSQKGLAQLESMDISRKDELEEELDLLKIFKIKTARVEEQIKQAIEKYPKLKKSVELIDSIPGFALTLSFVCAVELGPISRFQSAESVAAYAGMYPCIDSSGGRTKHGSMRRSGRRLFRWALVEGAHCAGRTKSPIGNYYHKKAKQKKSNHAAAIATANKLAKLIYEILSKEKPYDPGMEQ

SEQ ID NO: 281417 - protein, 344 aa, unidentified
MKITTIGIDLAKNVLQVHGADERGKAVLRKQLRRDQITTFFANLEPCLIGIEACGSAHHWARQLEALGHTVKLIAPQFVKPYVKSNKNDIADAEAICEAVGRPSMRFVPIKTIDQQAVLSLHRARQGFIKARTAQANQIRGLLAEYGLVVPQGISHIRQRVPALVENAAADLPGMFRALIVRLLEHLKMLDQQVDEIEAQIKAWHRSNEASQRLGQIPGIGPLTATAMVATVGDARNFKNGRELAAWLGLVPRQHSTGGKPTLLSISKRGDVYLRTLLIHGARSLAYSIIKKATLDHWLCKLIDRRGTNVAVVAQANKTARIVWAMLSHSRDFQPDYSLAKANT

SEQ ID NO: 281418 - protein, 312 aa, unidentified
MNTTSVFVGIDVGKDWLDFAVAGNNEIVRFGNHEEGIKKLVGKIHLLQPRLIAVEASGGYELAFVNACMLKAQQVAVVNPTRVRALARARGLLAKTDEIDAYNIATYAEMIKPEPKKPQDDLEIRIQALIVRREQLVVIRSAEGNRLGTCHDSTKADIREHLDWLQRQIAILDAEIKQLVKSSEEWAKQTELLKTMPGVGFITAVTMTANMPELGELNRQKIAALAGLAPYNRDSGKKRGKRRIFGGRQSVRRVLYMAALSAIKHNPVIKKFYERLIGKGKPFKVAITACMRKMITIMNVMVKNQTVWRYSG

SEQ ID NO: 281419 - protein, 378 aa, unidentified
MKKLSKPRNPERRLALSNYIFVGCDSHDKTLVNRIAVNREEGQKKNFAANRSGRRKLIEHLKKGSELAGGAEVVVVYEASGNGFVLCDELKAAGLQCHVLAPTKIERSSKQKKNKNDDVDARRLLDIVRGHYLAGTTMPAVWIPDLQTRDDREPVRARQDLTQKQTVVKTQVQTLLKRQGIEKPEGSGNSWSKAWRRWLQALTTDTRQGWGVRTTLSSLIRQLEFLEQEIDKLDEAMQQLSDTPRWKPVVQAMMKQKGVGLMTALKYSTDISDFSRFRRGRQVGAFYGLAPSSDESGDNPDRKGHITRQGSPSGRQVLCQSAWSRVRYDEQEREVYRRLVQKNPKKKKIALVACMRRLAVRLWHVGLEAQLEMQRNLQ

SEQ ID NO: 281420 - protein, 421 aa, unidentified
MDVIYERVAGLDVHKRTVVACVRRMSGHQVSRECRSFATTTAELLALRGWLSESGCTHVAMEATGVYWKPVWNILSDGGFVLIVANAAHIKNVPGRKTDLNDAMWIADLLACGLIKASFVPPEDLQELRALLRARKQLVREQTSHVQRIQKTLEEANIKLDTVISDILGASGRRMIAAIIAGVRDPRQLAGLADRRLKATPKQLYDALHGRVRDHHRFLLQLHLAQWDALDAAIRAVDREADARIAELDDEEDAGQAPFCEVIVRLSTMPGVSVLAARTIVAEIGRDMSRFPTAGHLVAWAGLCPAQNESAGKKKSTRLRKGAPWLKTMLVQCAWAAKRKKGSYYQAQFFRLQSRRGPQKAICAVAASLLTAIYHMVKNGTLHRDLGAAHFDRRSSEAQAHRLLAQLAKLGFQVQLQPAAA

SEQ ID NO: 281421 - protein, 340 aa, unidentified
MNATTYGLDVAKRVMQMYWVDAQTGEIVNRRFGRDDLLAFLARRPAGRVALEACGSGHWWARKIKALGHEVVLLHAKFIRPFVQTNKTDAADARAIWTAVQQPEMRTVAAKTEDQQAMLSLHRMRALLVKFRTMQVNQLRGLLYEFGATFRAGRVAGLAEIRARMAELEDALPGAVIGSLQDQLRRIDGLEQEIDQLEQRIGTWHKQEAACRAIAEVPGIGRLTATALVATMGDAKTFKSGREFASFLGLVPRQSGTGGRIRLGSISKRGDPYLRTLLIHGARSVMYHAKVPTPWQTAIQARRPANVAAVALANKMARTAWAILAHGQAYQKDYVSVKPA

SEQ ID NO: 281422 - protein, 323 aa, unidentified
MENDRITLGLDVSKLTIDACLLFANGKKRKLKFANCNSGFIELLRFLQELPLEHIHACMEPTGRYSRKLAVFLAEVGIKLSMVNTNTVKDHGRSKNIRNKTDKIDAYLLADYCLMHNPQQWNPPSQNRMVLRDLQNRIANVEELIRQEENRLEAGFESVVVEEDVKESLGRLYVRKKMLIASARKLIQSDPVIARNFEILHSILGLGETSVIVLLSMIDFQHFQNGRKVGAYAGLAPIFHDSGTSIHSKQRISKAGNTRLRGALYFPAMAAMQHNPQFREFAQRLKAKGKKGKVIICAVMRKLLVLASTLIRKQAFYDPSYSL

SEQ ID NO: 281423 - protein, 324 aa, unidentified
MSTRSTKTSRRSFIGIDVSKQFLEVAVHKNECHFRCPNDPKKFPTLIAELIALRPARIVLEATGGLERPLLHALRRAGLPVVLINPRQVRDFAKALGLLAKTDRLDARVLAHFAAAIQPPLRPIKTAEDTELDALMGRRNQVSDMLAAEKNRRGSAATEAARADIDAHIEWLEQRLKALDKQLKDQLKRSVAWQQKDKILQSVKGIGFVTSVSLLADCPELGQLNRHQIAKLAGVAPLNRDSGKQRGTRHIFAGRAPVRAKLYMATLTAIRCNPVIKAFYQQLIARNKLKKVAIVACMRKLLTIINVMVRDNKVWTVKAQPVSA

SEQ ID NO: 281424 - protein, 336 aa, unidentified
MDKSTNFKYFIGIDVSKKTLDLSVLKGKDFEFHVQIDNSIDGLNDFLKLLKKQKINISNCLWCAENTGVYNEHLKKICETNEMFLWIEKPLQIIRSQGIIRGKNDKIDSKRIALFAYKNQDTAVKWLSPRNIVIRIKRLISLRRNLMNNLKQVKLAVNEKTFLGSDIELLCKSCELSVNALKQDVKNIEKEILKLIQEDAKLNHMYKLITSIDGIGMFTAVEVIISTNEFKNFDNAKKFACYCGVVPFDYSSGTSVFKKARVSPMANINLKTLLHMSALSSVAMQGEMREYFTRKVSEGKNKMSVLNAIRNKLILRIFAVIKKDQSYQKDFSFSFA

SEQ ID NO: 281425 - protein, 342 aa, unidentified
MGEVSIIGVDLAKNVFQVHGAAADGSVLFRKKLSRPQFARFMAEQPPCRVAMEACASAHHWAREMSPHGHEVRLIAPHYVKPFIKRQKNDAADAEAIVEAALRPTMRFVEPKSADQQARAVAFRTREQLVKQRTEAVNALRSHLYEFGHVAPEGIGYVPRLAKVVEDPDTGIPDLARDICHILLEQMAHLTKRIDALKARIAALSNEADLPRQLQTMPGVGPITALAVETFAPPMEQFRRGRDFAAWLGLVPKQHSTGGKQRLGKTSKMGQRDIRRLLVIGATAVIRWASRRGAPKGSWLARMLERKPIPVVAVALANKMARGIWAMLTRGESYRGPVLIGA

SEQ ID NO: 281426 - protein, 453 aa, unidentified
MSRKKTKLQSVSEPPTIRTDAAGIDISPEVIYVAVDARKDPKPIRHYGTVTGELYRIANWLKACGVRTVAMESTGVYLIPLCQVLDERGFEVYLVNARHYKNVPGRKTDVCDSAWLQYLHAVGLLQGSFRPADEICAFRTVMRHRASLVEGASKHVQHMQKALDQMNVQIHRVLSDITGVSGLAIVEAILNGERDPQKLAKLRHGRVQASEENIVAALEGNYRIEHLFTLKQSLESYRHYQKLIAECDRQIREQLEALEGRSGGKEAPEARKNMRTRSDEELRKEFFRVLGVDLTAVPGINVGTVQVLLAEVGPDLSRFRSAGAFSNWLSLCPNNSITGGKVQSSKTKTTGNRLTAALRMAAEALSREKSPLGQFYRRMKMHLSGGAEAVTAAAHKLARIIFAMVTRRLEYDETHFAEIEQRNRQRARLRFIKQAEKFGFRLTPIQPAAQFVS

SEQ ID NO: 281427 - protein, 420 aa, unidentified
MEMLWTGGEEIVSIIAVINRTMDLPMRKPRPRNRSQRKPNDLSRSLAVLDMDRTLIAVIEMSASTWLVAGIVPGVERQPLKKLEPDEHALLALLQRWRGEAERSGRTITSIAVAYEAGRDGFWLARWLLSRGIEAHVIHASSVAVSREHRRAKTDRLDTQMLKRAFLGWLRGERDHCKMAAIPTLAQEDARRPGRERESLAGEASRIVNRLKSALARLGVRKFNPKLKKASERLTDLRTPEGEPIPPNTLDEMKRDMERRQLICAQIRKIEQERLKHLVQAPDTGPHAMVRLLARVIGVGIETADTLVQEALSRHLRDRRAVARYGGLTGAPDSSGSINREKGLSRSGNARVRRCMIQLAWRFLRFQKDSALAQWFFHRTGNARGMRKTMIVALARKLLIALWRLVHEGVIPEGIVMRPA

SEQ ID NO: 281428 - protein, 355 aa, unidentified
MTVTIVEEARPVTCRAAVTGGVDTHADTHVAAALDPVGGLLGVAEFPATTAGYARLLGWLGGFGTVCLVGIEGTGSYGAGLARYVTATGIRVVEVDRSDRQDRRRQGKSDPLDAVSAARAAQSGRASGAPKGRDGAVEAIRALMVARRSAAGERTRTVNQARALVLTGPDDLRARFAKHKPAALITGLAALRPRPGDVAGHATRIALRELGRRAQFLDGQLVRLDELIVPLVTARAPGLLAVYGAGPRTAALLLIAAGDHPERLRSEAAWAHLCGVAPIPASSGKVTRHRLNPGGDRQANHALWRIVFTRLGSDAATRAYAERRTAEGKSKAEIIRCLKRYVAREVYRQLRPAAG

SEQ ID NO: 281429 - protein, 416 aa, unidentified
MKHKTNQFAAFVGIDWADQKHDVSVSADNDAPVHQVIPHTPEDLTEWLGDLHQQYPDGKVAVCLEQSKGSLIFHLLGYDFLTIYPINPKSFARFRETFTTSGAKGDPSDADLLRELVAVHNERLRPWEPDDEQTRTISFLAEGRRKTVGERTRLTNRLRSTLKMYFPQAIELVGDSLHSTMTLDFLRNWPQLPDVQRAKEKTVHTFYSTHNSRSPERIKERMELIRSTVPLTNDQAVIKSCLITVKMLIGQIAQLNSAIVEFDRELKAFYDHHPDHDIFDSFPGSGDVLGPRLLAAWGTDRDRYDSSDNMQKYSGTAPITRASGKSKSIVRRVACPKFLLQTFHEFANCSRRFSVWAQAYYEMKREQGKSHHMAVRSLAFKWIRIMYRCWQDRIEYDEVKYIQALKRSNSPLLKFI

SEQ ID NO: 281430 - protein, 342 aa, unidentified
MQITTIGFDLAKNVFQLHGIDVKEKVVARKQLRRGQVMAFFKALPPCLIGMEACATAHYWARELTKLGHEVRLMPAKDVKAYVKRNKNDAADAEAICEAVRRPTMRFVRIKSAEQQGQLMQHRTRDVLIRQRTQIINALRAHLAELGIVAAQGDAGVNELKAIVADERDTRLPIDARASVIVLAAQLEALQTLIGSIEKRIKMQHRSNETSQRVETIPGIGVLGATAIVATAADPTVFRSGRDFAAWIGLVPRQDSTGGKQKLGPISKQGDRYLRRILVVGAIAVLRRAQENPGKYPWLTQLLARRPFKVVAVALANKMAAWALMVLVHGGTYRAPELAEAA

SEQ ID NO: 281431 - protein, 379 aa, unidentified
MKKRITWVGLDVHQEEIVVAMLEGSSRRLTEFRVGGDARGVRKLVCRLSELGDSGTVECAYEAGPCGYTLQRRLEAEGIACAVVAPSLTPVKPGDRIKTDRRDAKKLAEHLCAGLLTAVYAPSEEQEAVRDLCRCREDAREDLMRGRHRLSKMLLRRGWVYRAGSNWTHKHRRWLLALSWEPGAEQTVFGDYLQAIEHLEERLRGLDAALQAQAERDPYREPVGWLRCLRGFDTVNAMTVVSELHDIVRFGSARKLMAYLGLVPSEHSSGGSRRQGGITKSGNRHVRRALVNAAWNYRHRPGVGAGLRKRREGQPAPILALADRAQQRLHRRFVHLALYRGKPSQKVVVAVARELVGFVWATLVAYPMIQEQETTHSTP

SEQ ID NO: 281432 - protein, 312 aa, unidentified
MAELSFCGIDVSKDRLDVVVLPAEYVFSAGNNLTGLVELVSKLRCLSVATIGIEASGGYERSAVRALLAAGFSVRQINPFKLRQFAKASGVLAKNDRLDARLIAMFVATMPTRPVQRNAATERLAEILMARRQLSEQKVAAENASRLFEDVVLMRLYRRRIARLEADIALLNKRLTELVAADSALAQRYALLISMPGVGPVLAITLIALLPELGQMSRKQVAALVGVAPYDFDSGKLRGVRCIRGGRAPVRRVLYMAALIASRCNPALKLFHDRLGSAGKRSKVVMVAVMRKILTMLNAMVRDNIGWRPKSA

SEQ ID NO: 281433 - protein, 363 aa, unidentified
MWSERTSVGLDVHARSVVAAAIDAVTGEVVQARLSPSSEQVRGWLAGLSGPVAVVYEAGPTGFGLYRDLTAAGIGCQVAAPSKLQRPAGDRVKTDARDALHLARLLLLGQITPVAIPSVEQESARDLVRAREDARGDLMRARHRLSKLLLRHSIVYDGGETWNGTHDLWLRRQAGPRLAGQATRAAFESDYEAVLAVKARRDRLDAAIEQMAADSEFTPVVRRLGCLRGVSTLTGFALAVEIGDWRRFTGNSIGTFVGLTPSEFSSGTSRVLGPITKTGNGHARRLLVEAAWHHRTRYLVGQPLRRRWDLVGPAVRARGDAGNRRLHARWVVFTERRKKPTVAAVAVARELAGWCWSLATMDD

SEQ ID NO: 281434 - protein, 343 aa, unidentified
MQTVTTIGLDIAKSVFQVHGVDAAGQVLIRRQLKRRYVLAFFGKLPPCLVGIEACASSHHWSRELQALGHTVRLMPPAYVKPYVKRQKNDATDAEAICEAVGRANMRFVPTKAPEQQSGLVLHRTRHLFIRQQTSVINAIRAHLAEFGIVAPVGRRGAEELLNVVADPNDKRVPEMARACILALGAQLRRIKEQILQFDRMITAWHRSSETSRRLDDCPGVGPALATALVATVADPRAFRSGRNFSAWIGLVPKQHSSGGKDRLGSISKQGDRYLRGLFVAGALAVIRYAKIHGTKHRPWLTALLARRPAKVAAIALANKLARMAWAMMAKGERYKEPVALAA

SEQ ID NO: 281435 - protein, 369 aa, unidentified
MKKNSKNSKENARRKALQARSGQTRLTVGIDLGDEWSQCCFLDDKGEIVEECRVKTTREAVKARFGELKPALIAIEVGAHSRWVSQLLSELGHEVIVANARELRAITGSDRKSDRVDAEKLARYARVDPKILRPLRHRGEPAQVDLLVLRGRAVLVKTRTQIVNSVRGMVKSFGYRMPTCSTEKFAQLKGLVPLLIKESLAPMMEALEQVQKKIEEYDERVKKLATEKYPETKVLRQVWGVGEITTVSFVLTIEDKERFSKSRDVGPYLGLRPRRSQSSESDPELRITKAGDCFLRSLLVECAQKILSEKAPDTALKQFGKRIEARGKKKAKKRAIVAVARKLAVLLHKLWVTGEVYELFPGAKERKAA

SEQ ID NO: 281436 - protein, 429 aa, unidentified
MSYRIAGIDVHKKMLAVVVSDVEMESEYQFERRMFGSSPEQLRSLAAWLLEQEAEEVVMESTAQYWKPVWGALERYWKPLREKREGARRRSGTLHLAQAQSNRGPRGRKKDFPDAERLVKRLVARELTLSFVPDAEQRLWRTVTRRKYQLTRNRVRLQNQLESFLEEAHIKLSSLVSDLLGLSARRMLKALADGETNPAALAALADQRLRATPAQLCDALGACAELSPVYRRLLKMALEELRLIDEQIGQLDQEMANLLSQHQDAVKRLAEVPGLGVDSAQQIIAEVGPTSATFPSEKCLSSWVGACPGDDESAGVNYSHRSPKGNRHMRRLLNQAANAAARTKGSIFEIVYRRSVPRLGHNQAIGTIAHRQCRLIWLILHQGVRYEERGPAVTKRSKQLRTSKMLRQLRSLGYRIEPPNPQPSQAQVQ

SEQ ID NO: 281437 - protein, 356 aa, unidentified
MTEHNTVTIGMDLGDKRSHLYVLENLTGEELEQTDIATTEKSVIRYFSKLEPATVVLEVGTHSGWISRLLDKLGHKVLVADPRKVRRLAGNDNKDDELDAEFLARIGRIDAKMLKPIKLRSEQTQVALGLIRSRDSLVKARTQLINHVRGMVKMVGKRLPSCSGQRFGKLEQQIPEQLREVLRPALQSIQTLTEQIRCYERLIEEKSEHEYPETKLLREVAGVGAITALAFVLVIEDPGRFSHSRTVGAYLGLARRKYKSGQSDPELRISKQGDRLLRRLLVNCAQYILGPFGPDSDLRRWGLNYAAGGGKNAKKRAVVAVARKLAVLLHRLWTTGEEYEPLRNSGRSPQGAAEAA

SEQ ID NO: 281438 - protein, 369 aa, unidentified
MGNRSMFVGLDVHKETIDVSIAEGDRHGEVRHYGVIASDLEPLDKVVRALRAPNRTLHFVYEAGPCGFGIYRHLTTRGEDCMVVSPSMTPKRSGDRVKTDRRDSLALARLHRAGELRPIYVPDDTDEAMRDLVRAREDAVAVGIQAKYRLKAFLLRQGRRCPGREGWTLAYRRWLTDLSFPRAAQHIALQEYRDTVDETERRQERLTEQLRQLAPTWRWAPVVAALQALRGVKFLTAVGLIAELGDLRRFRHPRELMAYLGLVPSEHSSGPSVRRGAITKAGNPHVRRLLAEAAWAYQGIPRIGRQHAYRQEALPKVVCDIAWTAQLRLTGRFRRLIARGKAKPKVATAIARELTGFIWAIAREVSPAQ

SEQ ID NO: 281439 - protein, 298 aa, unidentified
MTIIAIGIDLAKNVFAVHGVDETGKAVLVRPSVKRDALVELVAKLPPCVIGMEACSGAHHWARQFQAHGHTVRIIAAKFVAPYRLSGRKGKNDAADAQAICEAVQRPHMRFVPIKSEHAQGQLSIHRVRQGFIETRTATINRIRVLLSEFGVVLPQKAVVVRREAGLRLEALPGLANTAIGDSLSELHHLDERIAEYDRHIEAMAKADDRGVKLMAMPGIGAKTASALLASVGNGHDFKCGRQLAAWLGLVPGQYSSGGKQRLGRITKAGDSYLRTLLILGARAVVAAGKNKTDRLSR

SEQ ID NO: 281440 - protein, 349 aa, unidentified
MVYYIGLDVSLKQTSICVVNQAGSVVREGVVDSDPEAIAAFVRSKAPGAVRVGLETGPTATWLWSELKQLGLPVICIDARHARAVLKMQINKSDRNDAAGIARIMQTGWFKEVRVKGLDSHSVRALLASRALLVKIKRDLENQIRGLLKNLGLVIGRAKFNVFAMRAEELIEDRPELIAAVRPLLEARKAIEQQVGDLDRKVLKLARYDAEVRRFMTVPGIGPITALCFKATVDDPTRFKRSRSVGAYVGLTTRRHASGEIDWTGRISKCGDAMLRSYLFEAAGVLLTRVPKWSALKAWGMRLAKRNGLRKATVAVARKLAVILHRMWIDLTRGSYLSAPVFIHCLCHE

SEQ ID NO: 281441 - protein, 446 aa, unidentified
MPIEDSAVAIGIDAAVVANHHIVVRRPEPGRPGQIVDDFVTSPTLAGMDKLTKRLTKWPGALAVAEPTSMTWLPLAIALGEAGVDLALVGNRHSARLRSALAGKDKSDPIDAGVLSRAGEFFDLGPARIPSPDELALRRAAQRRGKVMVDANRCLRRIISQARWAFPDVWNACAGSRSTALAVLRRWPHLEHLAKARTSSIIQVVAKHTRGVSDVEKRATEIRVAARSWSTFWDDHLDLDALAWETAELLDELEAAEARVERASDRAREFWEGLYGDDPLLLSVPGMGPRTAPTVRAFLGCANQFNTAKEAQAYVGLNPSNWSSGQMNSPSRAITKEGPPVLRLAFYQAANVARSHDPQLAAFYRRLMVERGHCHTKANCAVARKLVGRTWATLTSGTLYELRDVDGAVVTRREATALAAAANVPGPVRSRTRAHSAATHRARLTH

SEQ ID NO: 281442 - protein, 360 aa, unidentified
MAYYVGLDVSQKQTWICVVDDKGKVVAEGCSLTRAADVYGWLGNRVERADIVKAGLEAGNMSSWLYSGLTKLGLPVVCLEAFQAHRFLSTQRNKTDKNDARGLAQLTRMGEGFLKLVTVRSQGNQEARALLSMREHLVRQKVDLENHISGILKPFGLVVARGNVVPETFRERVVTALCLAEDHGVKIKAMVLPPLDLYRSACMELAVLTKQVEAIANADPVCRRLMTAPGVGPVIALSFMSAVDYPERFKKGEDVGAYFGLTPRQFQSGQTDYMVGISKRGDPMVRHHLVTAATVMMTATKRWCPLKAWGVRLAKRQGFSKARVAVARRLAIILHKMWITGQDFQWKAVPEEELAAAKAA

SEQ ID NO: 281443 - protein, 482 aa, unidentified
MKPSQQNKPQKASCRPEQGSWQQMNRKQRREMTRKMHAEDLSLEVVHPHAAGIDIGNEAHYVAVPPDRDNKSVRRFGCTTAELKEMAAWLKQCGIRTVAMQSTGVYWIAVYDILEAAGLEVYLVNARETKNLPGHKSDVQESQWLMKLHTYGLLRNSFRPSQEIRTMRTYWRQRNDLIRSAARHIQRMQKALTQMNMQLANVLSEVSGVTGQAIIQAILAGERDPRKLAAFRDKRVKAREEEIARSLEGNWQEDQLFMLKQEQDGYEFCQKQMNECDERLQQYLQQREDRSKGAELPKENRKERLRKNKTNKPRFDLRAELFRMTGTDLTQIDAIDVRTAATVISEAGWDMSKWRTEDHFVSWLRLCPDNRVSADKVIGKRRLPMNNRLSVGLKIAASTLRQSNTYLGAQFRRLKTRLGPPIAIKAMAAKLARLVYRMMRYGMRFVDRGAEFYEAQHRRRQIDSLKRKAANLGLKIIAAPAA

SEQ ID NO: 281444 - protein, 414 aa, unidentified
MTNLFIGIDVSMKDFKVQFMDDHGETVSKRKRFLNDQPGMDSLVELIMDIRQSKNTNRIVVGLESTSVYSWHLQMGLATDHRLSPYHCQVYSFNPKVVANFKKAYVDLPKDDWTDAWVIADRLRFGRLPESCQVDFRYLPLQRLTRFRYHLMQTITREKNYFLTNLFLKFNTLQQNEVFSNLFGATSEAVLNEFLSPDEVAARPLDELIDFLMEKGHQHFSNPKATAEALKNAARNAHRLKGNLMEPVNLILATSLETIRCLEKQVKTIDKAIAKELDHFKHTLGSVPGLGPVMCAGLIAEIGDIYRFNNDSALAKYAGLTWRGYQSGEFEADEAPLTKTGNSYLRYYFVQAANLVRQFEPEYRLFYNRKYRESKTHHHRRALVLTARKLVRMVDALLRSNQLYMPQGQRSDLA

SEQ ID NO: 281445 - protein, 349 aa, unidentified
MNPVIGLDVSKGQSQGQVFFDKGQPYGKSFSFLHTQEGLHDLLNRINEVSTLTGHSPTVILESTGHYQAAVVQFLEEHSIIFIVVNPLISNQAKKSSSLRKVKTDAVDAYQLYELYYKEEFEAYKQRGIYLLNLRHLTRQFESLTDMYVQAKLQFHAVLDQVFPEYHGVFGDLFSKISLLLLREFPTAESILAAGENTILERIACICTSRSERWAKEKAELIMAAATRNPFQKTAFKSHLVSLELYISLLLQYQEHLSNLEDQIDALAEEVEEYEIIQSIPGIGKKIAATILSEIGEIDRLTHAKKLVAYAGVDPSVYASGKFTATANRITKRGSKRLRHALYLAVLCG

SEQ ID NO: 281446 - protein, 342 aa, unidentified
MQITTIGLDIAKNVYQVHGIDAAEKVVVRKQLRRSQVLGFFKALPPCLIGLEACATAHYWARELTKLGHQVRLMPAKDVKAYVKRNKNDAADAEAICEAVRRPTMRFVQIKSAEQQGRLMLHRTRDLLMRQRTQVINALRAHLAELGTTSAQGREGLKELLKIVASDADERLPADAHASLVVLAAELQAMQTLIGSIEKRIVTQHRENKASKRLLTIPGIGIIGATAIADTVTDPKAFRSGRDFAAWIGLVPRQDSTGGKQKLGPISKQGDRYLRRILVVGAHSVLRRARLNPQKHPWLTQLLARRPFKVVAVALANKMARMAWALLAKGGAYRAPALAATA

SEQ ID NO: 281447 - protein, 342 aa, unidentified
MLYVGIDVAKNKHDVTALNVPGKTVLKPLTFSNNKAGFELLDLSFRQLNQDCLIALEDTGHYAFNLLNFLHEQGYKVYTYTPLLIKEFAKSLSLRKTKTDKKDAHGIALKLLSDPNREQFQHDNRQVELKILARHIHRLKKKQSDWKVQYTRCLDIIFPELDKIVGKHSEYTYQLLTCYPNPQKRLEAGFDKLIEIKRLTASKIQDILSVAPRSIGTTSPAREFEIIEIIKHYKRLIDKAEKCVNDLMAEFNSVITTVTGIGGRLGAVILAEIRNIHAFDNPAQLQAFAGLDSSIYQSGQIDLAGRMIKRGSPHLRWALIQAAKACARFSPAFKAYLKTKLE

SEQ ID NO: 281448 - protein, 317 aa, unidentified
MALQRIFVGIDVSKDWLDLWLEPVKRFERVSNDAVGWVATIGLLNSLGVEAGLVVAFEATGGYERGLRQALLEAGFEVRRLNPLRVRLYAKSLGRNAKNDRIDARVIARYAAAAETMPETLDPARERLAELVSHRRRLVDERVALGNQTDMLGCRLLQAQNRKRLALIERHIEQTDTLILEAIGQIPGLLAKVELLKTLKGVKDVTAIALLALLPELGRITRRAVAALVGLAPFDHDSGKLKGTRSIAGGRTAVRTALYMAARAAARSKSPLGDFYKRLIAAGKTPKVATVALMRKMLVTLNAMTRDNQAWKHAKAC

SEQ ID NO: 281449 - protein, 325 aa, unidentified
MFYLGIDVAKVKLDCELLNTSTGKVKAKVVPNTADGFRKLLDWLRKHDAASAHLIMEPTGVYHESAAFFFSDAGLAISLVNPAQLRKFAQGIGVKTKTDKADAKVLARYGEMQKPEVWQPPPLSVRTLKALLARRDAVADDLLREKNRQEKLEATETPQLVTESVQSSIKFLEDELKRLQKCIDDLIDDDPDLREKKELLTSIPGVGDRVSDHMTALLAGRDFATAEQLAAYLGLVPVHWESGSSVRGRPRMSKAGPAHLRKLLYMPAVVAIQRNAHVKALYERLLERGKSKMAAIGAAMRKIAHLCFGVVKTGRAYDKNFAIQS

SEQ ID NO: 281450 - protein, 431 aa, unidentified
MKNGVNRNLDEITEGTLIVGVDVAKTVHWARFVDDRGREIGKAVSFRSDRQGFEAIVAEIRQRRNNKFLPKPFTKVLIGMEPTGHYWKTFAHYLKNKGFRVVGVNPFHTKKAKELDDNSQTKNDKKDALTIARLVKDGRFFDPYLPQEIYAELRVLTNARVSILKRSNAVKNTITAILDEYFPEICTVFKKPLRGKASRQILRGCPFPAFILALGELGVLAELKKAVKKSVGVKKVRLLLETARRSVGVDYGLESAKLRMALLMEELDLVERQLTQVESAMEKMLEATGYAEQMLSVKGIGIITAASFLGEVGDPLRFQNPRQIANYAGYNLVEDSSGKSKSGTCISKRGRGKLRSVLYQMAFNMLGNNPEMKRLYKHLTTRKDNPLKKKQALVVVSKKIITVIYNLLKKQQTYQPELVFGPVRQEMLLAA

SEQ ID NO: 281451 - protein, 413 aa, unidentified
MTEEETISWFAGVDWGSERHQVCLLDARGTTVGEREFPHSGEGLAELGDWLLSMGAASTVAVAIEVPHGPVVDALIDRGFVVYAINPKQLDRLRDRFSVAGAKDDRRDAYVQADSLRTDRRLFRRLQVADPRLIELRAWSRLAEELRAERVRLSNRVRHQLWRYYPQMLKLTDDLAAPWFLELWAIASTPAKAGRLRKSTVERLLKQHRIRRMDAETVLRILREPAIKVAEGVAEAASIHMRSLVARLRIVNRELREAERKLDELCTAISEIEQTSGEGLQRRDVAILRSMPGIGRINLGTLLSEASGPLSRRDYEGLRTLSGAAPVTKRSGKSLIVVRRYAAHVRLRDTVYHWARVASQRDPKCRARYTALRKRGHSHGRALRGVADRLLALACVLLQRQTLFDPCFGRSTA

SEQ ID NO: 281452 - protein, 340 aa, unidentified
MKKVSTIGLDLAKNVFQAHGADASGAVIFRKKLRRAHVLEFFATQPACTVAMEACGGSHFWGREIGNYGHRARLIPPAYVKPFVKRQKNDAADAEAICEAAQRPTMRFVAVKSEAAQGAAVVFRTRDMLVRQRTQIINALRGHLAEFGLVVAQGPAHVAKLIMAVQDPKQPLSEAARPILCVLVDMLGLLDQRIKLLDIAIARRAKEDEVARRLMSIPGVGPVIATAMAALAPPAETFKRGRDFAAWLGLTPLQHSTGGKQRLGATSKMGERTLRRLLIIGASSVVRWAARKGAPAGSWLASMIARKPAMLVRVALANKMARVIWALMAKGGTYRAPVVA

SEQ ID NO: 281453 - protein, 341 aa, unidentified
MDNYAGIDVSLECSSVCIVDANGKIVREGKVASEPEALTAWLGSAGLRLTRIGLEAGPLSQWLYAAMRKAGLAVELLETRHVRDAFKAMPVKSDRNDARGIAQLMRLGWFRAVHCKSMGAQETRAMLTARKLLQKKLGDVEASLRGTLRGFGLKVGKTTPKRFAGRVKELVVGHASLEAIAEALLAVHAVLLREFNGFERRVRTMARHDAKAQLLMSTPGVGAIVGLTYACAIDDPARFKSSKQVGAHFGMTPKKYQSGETDYTGRISKNGDKGVRTALFEAAHVILTKPVKGSALKSWAMRLAKRAGMKKAKVALARKLAVIMHRMLVDGTTFDFAAAAA

SEQ ID NO: 281454 - protein, 425 aa, unidentified
MLKDTEDQEEIIARVAALDIGKAELVACVRVPSDTAAGKRMQEVSTHTTMTRSLLALADHFRCLGVTRVVMEATSDYWKPPFYLLEAAGFETWLVNAKDVKHLPGRPKTDKLDAVWLCKVAERQMLRPSFVPPPEIRRLRDLTRYRVDLVNACTAEKNRAEKLLEDACIKLSSVASELFSVSGRDMMRALIAGQRDPKVLAQLARSRMRGKISLLEEAFVGHFSDHHGFLLNKMLTRVEAIEADIADVETHIEAQIAPFASAVERLDEIPGVGTATAHTIIAEIGLDMSRFPTPAHLASWASFTPIAKESAGKKKGKNSTGHGNTYLARSLGEAAVGASKTRTFLGERYRRIARRRGAKKAIVAVGRSILVIVWHLLFDPDTRYHDLGADFYDNRINPERSKRNHVQQLEALGYTVTLNPIPTAA

SEQ ID NO: 281455 - protein, 369 aa, unidentified
MNRVFVGMDVHKEKIVAVGLPEEGNHPVMREEFGGNDLSRLVKRLRQLAKSHRVEACYEAGPCGYGLTRTLLQAGVECRVAAPSLIPRRPGDRIKTDGRDARELALAFRANTLSFVRIPSREEEEVRGLIRCREDIAKEVRRIKHVIAHWLLIHEQRPPKGVKGWTQAHWRWMRDLELSPLDRTVLDHYLDVLHLLAERLKQIEQQVVTLAETAPYRERVTRLRAFKGFSPLAAMRVIAEVMDFRRFPRAAAFMKFTGLVPSEYSSSDRIRRGRITKAGNSHLRCVLVEAVQRGTRNAHMGRDLLKRMACVSGPLREVALRCLTRLHHKFWKLTRRGVAGGKVKVALARELAGFVWAMMTLPETADAAA

SEQ ID NO: 281456 - protein, 383 aa, unidentified
MHTQETQGNVTDVVLAVSLELAAAKWKVALHDGHRESPSIHTVAQTDPAARLQAVLTLIATQKQAWALPDNTRIVVSYEAGQDAFWIFRALQARGIECYVVDPASIPVQRQKRRAKTDRLDVTKLVINLRAWLGGERDRMRAVHVPSAQDEASRHLMRDRGQLQKEVLQHRDRMRKLLATVGCWENVNSRKFATRLACREVCCHDGAPLPDELHERLLRECERLALVEKQAAALEKAYHLHLPERARERIDHLTHLRGIGPVSGSRLALELFWRHFANRRQVGACTGLVPQPYDSGETQIDQGISKQGNRRVRALLIETAWTWIRYQPGSLLTRWFNERTKGTGPNRRARRIAIVAVARRLVIALWRYLKDGVIPEGAELKMR

SEQ ID NO: 281457 - protein, 360 aa, unidentified
MQAKVNEKLFDGQSIYVGIDCHKKNWTVTILTEEFEHKTMSQNPDPEILAAYLRRNFPGADYHAVYEAGFNGFYSCRKLRELGIDCNVVHAADVPTGNKEKIQKLDPVDSRKLARSLRSKEFRPIHVPESSMEADRALVRQRFRVMKDVTRIKSRIRSLLFQFNINIPDRFTNSQTRSWSNIYINWLKELQVGHESLRQTLDNYIRIGELQRKELLLVNRQVRILSQTNAYKDNYNLLISLPGIGFLTAMTFLTQIGDIKRFKQLDDLCDYIGLVPMMKGSGSKLYTGKLINRGRKELKIMIIEAAWDAVRMDPALMAKFNELKMRMNKNKAIIRIARKLVSRMRHVLLSQEPYRLGITE

SEQ ID NO: 281458 - protein, 323 aa, unidentified
MTEEEVVCVGVDIAKHILDVAVSNLNETRQFNNDDKGITSAVRYIAGLKTTRIILEATGNYEMPLAASLQSNCLPVIIVNPRQVRDFARATGVLAKTDRIDARILALFGLQVKPEVRPLPDKQAREMRSLLTRRRQLVEMLTSEHNRLLQADEGIRPGIEIHIQWLEEAISAVNDNLDRQIRSSPAWLEKDNLLKSVPGIGKVVSTTLLIELPELGQLNRRKIAALVGVAPLNRDSGTMRGKRTVWGGRVKLRAVLYMAALVATKCNPVIATFYRRLLDAGKVKKAALVACMRKLLTIINAMMRTMTVWNPGLINQYVVTEAK

SEQ ID NO: 281459 - protein, 415 aa, unidentified
MNAVGIDVSKGKSMVAALRPMGEAALLPQEFLHTEVGLEQMAYAIIALGEDTRGVMEATGRYHEPVAAALHEYGIYVCVLNPLYIKQRGGGSIRKVKTDKADAMKIAKYGLDNWVDLREYTPMDTVRQQLKLCSRQYNLYMKTVVSLQNNLISLTDKTFPGVNELFSSSERADGHQKWVDFVMTFWHCDCICRVSEKAFTERYRKWCKRKGYHFSTEKALDVYAGSCGHFTTLPKNDNTRLLITTAAQQLLAGKTTLAALRAEMTRLAKQLPEYDTVYAMYGVGETTAANSWLRSAMCAVLNEGSLWLPRRSSIVGFAGVDPAVDQSGKHEAQSTPTTKRGSPHLRKTLYQIVYTYLRKAPEGEPVYQFLDKKRAEGKPYFVYMTASQNKFLRIYYARVKECLEAFDARQAIPQG

SEQ ID NO: 281460 - protein, 344 aa, unidentified
MSSPTPRYQLYVGVDIAAKTLTAAWMVPGATPGRPLTVDQTPQGFTALQDRLLATGHPAAAILVVMEATGSYWVGLATTLAQAGFVVSVVNAAQAHHFAKALLKRAKTDAIDAQTITQLAARLEPAPWTPPPAIYTELQQRLAQRDTLMTLRQQVRNQRHALQHLPVVIASVLERMEALIATFDAQIAAVEQEIEQVLSQDAGWATTATLLLSITGIGLLTAAWLLVTTLNFTICATAEEATAYAGLAPHPYESGTSVRGRAAIGHGGNGRLRTALYLATLSAAQHNPHIKPFYARLRAAGKPKKVARCAAARKLLHLAWAVATKGVAFDPTYQTQHACSGSST

SEQ ID NO: 281461 - protein, 410 aa, unidentified
MEVLFDRVAGLDVGKASVSVCVRTPGARRGRHSETRTFKTTTGSLKVMRAWLLEQGVTIAAIESTSTYWKAPFYCLEDVMEVWLLNAAHMKAVPGRKTDVRDAEWIAQLLEHGLLRPSMVPPPAIRQLRMLTRYRVQLMGDRTREAIRLEMMLEDASIKLSSVASSMTTVSARAILQAMIDGERDPLALAQLAKGRMRSKIPDLAQALDGHFDDHHAQMARAILGRLDLVEQSLVELDAVIAAKCTPWQHEIDLLQTIPGVGEKVAQVIVAETGADMSRFPSAAHLAAWAGVAPGIHESAGKRTPTSKRHGNKWLTAMLVEAAGSVARMHQSNYLSAQHARIAKRRGTGRAQVAVAHSILVSAWHMLTKDEPYQDLGADWLARRNDEAHARRLVAQLERLGHTVQLDPVA

SEQ ID NO: 281462 - protein, 345 aa, unidentified
MVLTGEDTMGKHSDTQCLVGIDVSGKTLQVAFQARDGLIRDFEVPNDAEGHKVLVAEMTKEGGSARVCVEATGNFSLDLSLTLSRHARIELMVLNPKAARKFAEAQMRRAKTDTVDARSLLDFLKCMPFAPWAPPRRVLLELRAIARRASALTTDKTAEENRLAAARATGETPTVVLEDIQASIDALATRIDALLDAALAVVATDVELTQALRVLTSVKGIANRSGVVLVAELMMLPKDMTPREVVAHCGLDPRPRQSGMRDGPRSISKIGNSVVRSALFMPALTAVRWEPTVKAFYESLVARKKRKMVAVVAVMRRLLQALWRMLLANEAFDGSRFASKHAKAA

SEQ ID NO: 281463 - protein, 344 aa, unidentified
MFYAGIDAHVKSSTIWIVDGKGRKVSSATVVTSAEGFAAGLGRWARRGLKAAVEASGITPWICQLLKDLRVKVVVVNPNRVRLIAESRKKADRVDAETLAELLRLGGLPEVHQPSIEARRLRTELSVRRQLVRQRTGLINQARGLLRGWGVLLPARFFQGRGGWKDLEAKKLPEYLHPLLDTMKEVYEQLTRGIRQVEATLKERETRDERVTRLRTIPGVGPVSALTLVAAVDKITRFARAKQLTAYNGIVPTVRSSGEREQQGPITRQGRSEVRAVWIQAAHSLVRSRQPAARPLQKWFWKVARRRGIRTGIVALARKMLSLAFYLLRDGTQYEPLRLRQAAA

SEQ ID NO: 281464 - protein, 336 aa, unidentified
MLIIGCDYHPRFQKIAMLDTATGEIKVNRLEHENGEAKKFYASLPKGVLVGIEATGSTQWFERMVSECGHELWVGDPAEIRARRVRKQKTDERDALHLLDLLTTNRFPRVWVPSPENRDARQLLQHRQKLVGMRTSVKNQLHGLAMGQGLCRKQKLWSESGRKQLEALELGMWASRRRQELLTLLDELNPQIAELDQGVEAEAARRPEVARLRVQKGVGPVVGLAFVLTLGTVERFPRSRQLVSYLGLNPREDSSGPHQYLGHISKQGNSMMRWLLVEAAQTAARLDPELGRVYKRLKYRRGANVAKVAVARRLAVKMYWILRQAPEAAPAGSHVR

SEQ ID NO: 281465 - protein, 344 aa, unidentified
MGSKLEQLLERPSRPTPRAGPAWPARIVQAGVIYHVKEQLVYCGVDIAKSHLDAAIGKEKRRLPNDATGHRQFIKWIKQIEAQVQVICEPSGGYERRLIQALVGAQIKVSLVQANRVRQFARAAGILAKTDTIDARVLCAFGEAMRPQTFSASALEQERLRELESQRRHLTHLLVMEQNRAARVSEVLVRRLNRRLIHQIKKQIEQLDLLIQEHIEASPELSHKASKLTAISGVGERTAALLLAQMPELGQLNRREVAPLVGVAPFNRDSGKWRGKRAIFGGRRFVRHGLYMAALVAARHNPILRPFYQRLRVAGKPAKLALTATMRKLLIVLNSALKPQTIYA

SEQ ID NO: 281466 - protein, 386 aa, unidentified
MAKPYDLSKPLVALDHDSTLVAVVEMSGTSWLVLAIVPGIDRRPLQKLPVDENRLFRQLEIWREEAGRAGKVMRRIVVAFEAGRDGFWLARWLRARGVEVYVIHPASVAVPREMRRAKTDRLDTHMLMRALLGWLRGEPDCCRMVAIPTVAEEDARRPGREREHLVRERTRVINRIKATMARFGIRGFKPGLKNAVARLQELRTPEGETIPSHTRSELLRYLERLQLLKKQIATIEQRCKEVLSEATPDRANAMVQLLAKVRGIGIETAEMLVHEVLSRNLRDRRAVARYAGLTGTPDESGRRRREKGISRAGNGRVRCGMIQLAWRLLMFQQESALARWYRERVAGARGSGKKTFIVALARKLLLALWRYATLGEIPEGFVLKSA

SEQ ID NO: 281467 - protein, 351 aa, unidentified
MRKLTRIGMDTSKSVFQLHGVDDDEQPALRRKLRRQDLNKFFASLPRLRIGMEACGASHHWARELQALGHDVVLIPPQYTKPYVDRGKNDAADAEAICEAMSRPKVQRRFVPVKTLDQQALQMLMMVRNGLVKRRTQVCNAIRGHAAEFGLVSPKGLYRVEELLAKVEQSQEVPELAREMFKVLAGQSRHAEAQIREIEATLMALHRDNEVSQRLAAIPSVGPIGAMAMAAKIGDANRFRSGRDFAAFIGLTPKDHTTAGRKKLGGITRAGDEMLRSHLVCGATAVIHQLKTGRGHNSLWLKELVARKPEKLAAVALANKTARIAWKLMISGERYCTKYAETSLNSGSPRG

SEQ ID NO: 281468 - protein, 391 aa, unidentified
MVCVGIDVAKDKHDCCILDSEGTTLVDCFTIPNNMDGFKSLLQTIQDCSQKSDKIKVGLEATGHYSYNILGFLLDNDLPVYVMNPLHTNLYRKSLSLRKTKTDRVDAKTIATMLLSDVDLKSYTDTAYHNEELKSLTRYRFDKVQERAKLKQSVSRLVTILFPELEQLVSSIHGTSIYALLSEYPGAKQISEAHLTRLANILVKTSRCHYRKDKATHIRDAARTSIGSVMPAKSLELKHTIKLIQELTSEINEIEDAIRKIMDELKPPILSIPGMGFHSAAMILAEVGDFSNFNSPDKVLAYAGCSPSTYQSGKLTNCYAHMEKRGSRYLRYALYTATKYVCYWNPVFTEYLTKKQAEGKHYNVALSHATKKLVRLIYALQKSGKAYLAVT

SEQ ID NO: 281469 - protein, 392 aa, unidentified
MYIVGIDIGKNHHEASIVSPEGKQIGHSLRFATTHKGADSLMSFIFNNIGNSSCIFGMEATGHYWYPIYSFLKARGYTIYVINPIQSDSLRKMYIRQTKNDSIDSFLIAEVIRFGQFTTTSMADENILAIRQLCRYRDSIISSRTEIKLRISTIMEQIFPEYEKQFSSLWVSTSMGILEKYLTPENIENAPIDELFEIIKDKSHNRLTRAKAISIKEAAADTFGIKIAQDAFSFQLKQLIDRMNFLDKQIEALDCQILEYYEKFDCYLHTIPGIGMIAAATILAEIGDINRFKSSSALVAFAGIDPTVRQSGEFSSTHNHMSKRGSPYLRHAIFLAATTCSFHNSPLNAYYKKKRDQGKHHLTATGAVARKLTTIIYAVLRDSKPYEPKKFC

SEQ ID NO: 281470 - protein, 437 aa, unidentified
MFHLSDDDPLPDMEEHAMEHHEHFAALIGLDWADQKHDLCLVDTASGSRELSVIAHTPEALNEWARSLRARFNGTKVALCLEQSRGSLIYALMKYDFFVLYPVNPQTLAKFREAFTPSRAKDDPTDAGYLVELLIHHRERLKAWTPDDERTRTLQLLVEHRRRLVGDSTRISNRLTALLKGYFPQVLQWFPDIRTKMVCDFLLRWSSLDALAGVRRATLLKFFREHNSQRTETVEKRLAAIKAAVPLTTDKAVINSSVVMVRALVSQMKATLAAVKEFDAQIEELCQTHEDFELFASLPGAGKVYASRLLTAMGSNRERWTSADELLCFSGVAPVIERSGKSSWTRWRYFCPKFIRQAFVEYAGESIWHSEWAKAFYASQKAKGKSHQAAVRALAYKWIRIIWKCWQTREKYDEARYVECLRKKGSKLFGDLASAEA

SEQ ID NO: 281471 - protein, 376 aa, unidentified
MNNVRFIGLDVHAETIAVAVAEPDGDVRSVGVIPNRPESIRKLMKKLGPAEQLRVCYEAGPTGYVVYWELTALGVTCEVVAPTLVPVKAGDRVKTDRRDALKLARSYRAGDLTAVWVPDAAHEALRDLVRAREAAKKDQLRARHRLGKLLLRHGRRPPTPMKPWTQTSLAWVKTVHFEHAAQEATLVDYLHEVEHMADRITRLERAIDDAVKTAPERMRAVIEALQALRGIAQVSAVTVVAEIGELTRFAKPRQLMGYSGAVASEDSSGDRIRRGAITKTGNAHLRRVVIEAAWAYRYRPAVGPALRKRQASVSQEVKAIAWKAQHRLHARYRHLTAQGKCKQETVTAVGRELLGFIWAIGVQVEAHGRNPQSAAA

SEQ ID NO: 281472 - protein, 342 aa, unidentified
MKYIGCDFHPSFQQIAMLDKETGEMVERRLLHTEEARAFYEGLQGPVIVGIEASGNTHWFESLLASCRQQLWIGDAAAIARQEGRKQKHDRRAAALILKLMLENRFPRIWVPTVEERELRQLLMHRHHLVRMRTQVKNQLQHIALNQGWQKKRKLWSEAGLELLRNLKLGPWTQRRRDTLLEMLKDLEEKIRPLDQAVAKEAEQREAARRLATHPGVGPVIALATVLTMGEVNRFADSRRWVSYLGLNPSEHSSGQSRRLGSISKQGNPFLRQLLVEGAITATRGDKDLARTSARLKAKKHHGVAKVAVARKLAVRLYWIARTGKSYPEVVRMQGSQSHPRG

SEQ ID NO: 281473 - protein, 339 aa, unidentified
MDITTIGFDLAKTVFQVHGADGEGRPVLRRKLRRGKVLAFFAGLPSCLVGMEACASAHYWARELQALGHEVRLIPPQYVRPFVKTNKNDAADAEAICEAVTRPTMRFAPAKSAEQQSVLMLHRARELLVRQRTMVINALRGHCAELGLIVAQGASKVEELVAIIEDPGDVRLPPLAREALVSLVEQLRSAQAQIKQLEAALLAWHRSNQASRRLATIPGVGVITATALVATIGDGAQFRSGRQLSAWLGLVPRQHSSGGKDRLGRISKRGDGYIRRLLVHGARTVLRWRRAKPGTHPGWTDRLLERRPTNVVLVAMANKTARVAWALLRYERIYQPTPA

SEQ ID NO: 281474 - protein, 430 aa, unidentified
MLKNYSTQREKTERITEKTLIIGIDIASRRHYAQALTWRKVEVTKGLYFYNERQGFEEFLEWVNHAKQKMGASNIIVAMEPTGHYYFALEEYLEKLGIEVVIVNARDVNQMGQYYHNHRSKSDPRDAMLIGYLCSEGRYAVTTRPKEGPYAELRELTVRREQLVKKQMASINELHCLFTQLFPEHKQIKESGISEALLVLFLELQTLEAIQAAGWEGLYDILKRHKKYQIGKDKVKQIHALSISSIGIKRKIKATQTVLTSVIEEYRFYQQQIKAIDDDIIAQLNEMDVAKKLMAIPGIGPIITATFLAEVGDIANFKSAKQILKLAGYAICTNESGNHKGTRRTSKMGRKRLKKIIYQASLATISNNDDINQIYMYYTQERKEPLKKMKAVIAIGCKLVRIFFSLLKYNHHYDGQKMLSDIKRPQGQMA

SEQ ID NO: 281475 - protein, 413 aa, unidentified
MQVVYERCCGIDVHKQTVVACVIVPGPDGQPLKETRTFGTMTADLEALADWLAGLGVSHVAMESTGVYWKPVYNLLDGRFAILVVNAERIKALAGRKTDVQDAEWIADLLRHGLLKGSFIPTEVLRELRDLTRYRTKLGDERKSEVNRVQKVLEDANIKLASVASDVMGVSGRAILAELVEGQTDAATLAALAKGRLRDKQDLLLKALSGRVRPHHRFMLAQHLSHIDFLDEAMAQLDQQIAEQMRPFATALATWDSLPGINQRIAEIIVAEIGADLTPFEDADHLASWAGMCPGNNESAGKRKSGRTRKGSPWLRRALIEAAHGAAHTKHKYFQALYRRLASRRGTQRAAVAVGHSLLVTGYHLITRQTAYEDLGGNYFDERDREAVKRRAVRRLEKLGYRVELAPAAVPAG

SEQ ID NO: 281476 - protein, 341 aa, unidentified
MQVTTIGLDLAKQVFQVHGVDANGKAVLRKRLRRAEVLGFFEDLDPCLVGMEACATSHHWARELTGLGHTVRLIPPAYVKPYVRRQKNDAADAEAICEAVGRPSMRFVPVKSVEQQAVLMLHRTRTLLVRQRTMLANALRAHLAEFGIIVAQGLRSLGALIERISAPDADGVPRLARAALAPLVGQFLALEPQIKALEAELVAWHKTSEESRRLQTIPGVGVLTATAIAATVSDPAHFRSGREFAAWLGLVPRQNSSGGKERLGRVSKMGDGYIRSLLFVGATATIRSARTKISAQAAWINSLLARKPAKLVAVALANKMARIAWAVLARQKSYSPPALAA

SEQ ID NO: 281477 - protein, 339 aa, unidentified
MKLYVGIDLHSNNNTVVVINEQDQVIYRKQLNNELTVVLQALEPFRAELAGVVVESTYNWYWLVDGLEAAGYRVHLANTAAIQQYQGLKYSDDSSDATWLAHLLRLGLLPEGHIYPKETRAVRDLLRKRGQLVRQRTGNILSIENLTSRNQGIRITGNAVKKLRAQEVESQYENPDLALAVTSTLSIVEALNWQIEKIEKRVKEKIRLAPSFEGLKTVSGIGDTLALTIMLEAGNPSRFPSVGDFSSYCRCVSSQKLSNGKKKGRGNVKNGNAYLSWAFIEAAHFAIRHDPIIRRFYQRKKAKTLSVVALKAVAHKLARACYYVMRDQVSFEVEKSFGH

SEQ ID NO: 281478 - protein, 340 aa, unidentified
MKHSVVGMDIAKRVFQLHCVAADTGEIERIKLRRDEVLPFFAQRTSSLVAMEACGSSHWWARQLRALGHEVRLLAPKSVRPFVRSNKTDAADARAIWTAVQQPEARLVGVKSEQQQAILALHRVRAQLMKFRIMQTNALRGLLYEFGEVLPEGSVALAKALPLALAAVSERVPRMLIDTLHEQWARVQSINAEIATIERRLASALRESEACRQIAAIPGVGLLTATAAVAAIGEANSFASGREFAAWLGLVPRQTGTGGRVRQLGLSKRGDRYLRTLLMHGARAVIARGKHSPWVAGLLKRRPYSVAVAALANKLARTIWALLAKSRAFDPAVFNVSPQA

SEQ ID NO: 281479 - protein, 414 aa, unidentified
MSVGINKACGLDIHKRFLIATILGRVGEIAQKRFERNDQGILELKSWVIEKQCDVVACESTSDFWVPIYDTLISHVTVIVGNARDMKAYSHKKTDKIDSEFIAQLALNDMVKPSRVFPKFHREFRSYVRLRHNLVRKKTDVKNQAHAILSSEMFHLNDVLTDIFGKNGQMILSGICSGKNFDQIVDKLSPNVRKKSEQIKEILEREMSQSAAVRLRTCLSLIQQIDEQISNLETQIFNYVYKHHKHEMDILMSCPGIGEISAATLIAEIGDFNDFSSGDKLASWLGIVPNVYQSADKYHNGRITKRGSKVARWILTQVAQAASRKKFSKLKEFFNRKKETIGYQKAIIALARKIVTIIWHLITNNEMYEDETGYQKGNVQKRKIVEIAEISIDERISIISEMFAIVNKKNTDVT

SEQ ID NO: 281480 - protein, 374 aa, unidentified
MGHHSEAFIGIDTSKLRNAVAVAEAGRKGEVRYLGEFDTSTAATRKLVAKLAAQYGKLTFCYEAGPTGYGLHRLIESLGHTCMVVAPSLVPKKAGDRVKTNRRDAEGLAKLLRACELTAVWVPDERHEAMRELARARDAAREDLTRKRQQVSSMLLRMGLHYPGIKTWGARHRTWLANLKLEHGEQRFVLEELLQTERQSGERIARLEQAIRAAVTDWSLAAMVPALMAMRGVDLVSAVTILAEVGDLTRFKNPRQLMAYLGLVPSERSTGDTVKRGPITKAGNGRARRVLVEAAWAYRHPPRVGYEKQALVAAAPRAAREIAWKAQVRLCKRFRALSRNGKKSTVVATAIARELAAFIWAINREVGTTPASAA

SEQ ID NO: 281481 - protein, 377 aa, unidentified
MDESSKTLYVGLDVHKDSIAVAYAPEDRGAEVVSLGSIGTRQCDIDALIRKLQSKGATLVFVYEAGPCGYWLYRYLTRKGLSCHVVAPSLIPRKPGDRVKTDRRDAVMLARLMRSGDLTSIYVPGIEDEAIRDLSRGREDAMRDLKATKYRLKAFLLRQDIRYEGRANWNAAHLRWLAEVVCPTRAQQIVFQEYVRGVTEQHERLQRLEGELHAEVKGWRLYPVVEAIQALRGVELTGAVILVAELGDLTRFDTPRQLMSYLGLTPSEYSSGERRRQGGITKAGNTHARRALVEGAWAYRYPAKVSRHLQLRLEKLPAEIQAISWKAQVRAERSTDILITISSHRRRRGPGIGAIFERVMRPRSSSLERSRRRDGHK

SEQ ID NO: 281482 - protein, 346 aa, unidentified
MTIIGVDPHKSLHEACALDSDVITRLRMTSSRTGYQKLITWAQSFPERTWAIEGAHGLGRHLAQFLVARGERVVDVPAFLSARVRELGRSGNRKTDQIDALATALAARDAIDLHPVQPEDTTTVIAMLNERRDNLIAARTRTANQLHALLCDLTPGGLPGELTALRVARMLRSIRPEGLAAEQRKQLARDLLGDIKTLDRQLADLDKRLDAALLEHGTTLTDLGGVGVVLAARVLAHSGPITRFASPAHYASYAGVAPVEVASGERTRHRLSRAGNRQLNCAIHLIALQQVRHNRDGGRVYYERKIAEGKTAREAMRCLKRRLATRLYRVLHDDHQRRLTTREPAA

SEQ ID NO: 281483 - protein, 343 aa, unidentified
MIFVGMDVSSKEFVIHAIDQRQQKVFEGRIAPSRAGLRKLVKDLGVGPKLFVFEAGNQMKWIALMLMKQEGVRIHVVHPNEIKWINQSSGKTDKVDARKMAQLARGDLLPRQVHVVEGKSRQLRELVSARGQLQSKRVALINTVRGYMKQEGVSLPEKFFQRVDWKGALGEKSLGDTQKLIVKSFMDGIDGLERAEEEITGKMKGIQDSRCELLETIPAIGKIASRVLVGALDDASRFDNKKCVANYGGLAPTIYQSGDVTHLGRINRDGRQEVRKVLLQCAHTIQRTATHDAAPIREFFERLEKRRGKKRAVVATARKLLTIAYGVLKSGVPYDPMRLRAFA

SEQ ID NO: 281484 - protein, 392 aa, unidentified
MDSPPPRHHSATVAFEEANGSEGETMKKHSSKHDSLSSTDVELCTTICVDLAKQVFQLAGEDATGRVIYEDRIKSRQAFHDFLLKLPTTVAVLMECGPGAQAWARLLQAKGNPVRILPAQRVAEHRSGAKNDRNDCYAILRAGRDTSIASIPIKSTTALAIQALHRIRRGNIKRHTALGNQIRGLLLEHGVSMPQGDAAINKHVPQALEDASLPLPDLLRELLDELLMDWLSLGERITMLSRRLEATAQEDKVAQRLITIRGVGPIIATAIVAKQTDPSRFASGRMYSAFFGIVPDQHSSGNKIRLGKMSKRGDGYIRSLLIQGAHSVLSQLRPDSDQPDDRRLLRWLSRLGRKEAAIRLANRNLRIIWALLQNDQVYQRKPNEKPEAAMSL

SEQ ID NO: 281485 - protein, 357 aa, unidentified
MTGVRIAQRTERVVVGVDTHADLHVAAALDSLGRMLGRLEVGTSARGYAQLLEWAHTFSPTTTFGVEGTGAYGAGLARFLVDAGCEVIEINRPDRRARRGHGKSDPIDAEAAARSVLAGGPLCIAKRDHDRVGMIRTLRVARRSAIKMRTQVGNQMRALVVTAPDSLRHQLRELSLDKLVAVTAAARPGTVTTPSAASKLALRSLAIRHQALTAELIVLDRELGRLTMEAAPALCDLTGVGPDVAGALLVAAGDNPERLRSDAAFASLCGVSPVPASSGKTNRHRLNRGGDRIANNALWRIVMVRLTCDQRTTTYVARRTAEGMAKRDIVRCLKRYVAREVFHALLATAPALTRMSA

SEQ ID NO: 281486 - protein, 467 aa, unidentified
MSPSILYRAVPVKTAPLRFLKHVARRSTVHVGIDIGKNKLYVVIRWTAPRAKHATYEQPWFVENPNDLAVLMKKLLKIAKQNSTVVGIESTGSYGDPLRQALADAGLTVYQVRTKATHDYAEVFDGVPSQHDGKDASIIAELLAQGKAKEWNFREPTEEENEMKYIVAKLRDSHKDIQRLQGKLEGLLARHWPEITKILPLTSLTLLKLLKQYGGPQKIRTDREAVAAIRRFSFGMITGERADRIIDCVKSTNGVRQMTWDCRYVMDVAARMLDIHKDISRHKKRLTELVGMSCVELQRMSKLLGAATAAVVWCNIGAPHFYHCADAWLKAMGLNLVEKSSGEYQSNVRISKRGDAETRRWLYMSALRWVQESPVKQWYQRKKEQTGKKIRGAENKRTGGKAVVAVMRKMMKGIWHALVHGHAFEMEKLFCEGSSKKKDARPGSKRFRKRHKNKSVSKTSISTVKQQ

SEQ ID NO: 281487 - protein, 338 aa, unidentified
MKVYAGIDLHSSNNYIGIINEEDRRLYQKRLPNRLDAVLSALDPFREELEGVVVESTYNWYWLVDGLEGAGYKVHLANPSAIKQYEGMKHTDDKWDSFWLAHMKRLNILPEGYIYPKEDRHVRDAFRRRLLFVGHRTSHILSLQSAITRNLAYKKSVREIKNLEESDADRLFNDPFLVLTSRNNISVIRFMSDRIKEIEKAVTSHVKLKPDFEYLLTMPGIGKILGLTIMLEVGDINRFPKVGNYSSYCRCVKSERISNNKKKGKGNQKNGNKYLGWAYVEAANFAIRSYPEFQSFYNKKKAKRNGVVAIKAIGNKLAKASYYVMRDKVPYDASKMFR

SEQ ID NO: 281488 - protein, 337 aa, unidentified
MQATTSGLDIAKSVFQVHGVDARGRVVLRKRLARAKVLEFFANLPRCVIGLEACGGAHYWARELARLGHDARLMPPQYVKAYVKTNKHDAADAEACCEAVQRPSMRFVAVKTEAQQATLMLHRVRDQLIGQRTATINALRGHLAEFGIVAAQRQAGLRQLLEILAELEDERIPPLAREVLQLLVAHLRDLADKLAELDRRLVTMARTDETCRSLAEVPGVGPVIATAFAATVPDARAFRSGRHLAAWLGLVPGQRGTGGKERLLGISKRGDGYLRRQLIHGARALVRVSRGRTGKLWTWIEALRARRPFNVVVAAVANKLARILWAMLSRGEAYRAA

SEQ ID NO: 281489 - protein, 358 aa, unidentified
MLKLVSVPETSQAAVADQVVSVGIDLGRSKWAFAVRWGGQLQRRFATPGALRHLAALVEQYQHGPLQVTYEACGFGYEIAWYLQERGIPVTVVAPVTLERAPGARVKTDRIDAAALALKLERGLLKGIYVPSRRQHEERQLSRTYGKALKARQRAQVQIRALMQEQGRIGPSPRDGWAAYTAWLKAQRDVPAPVQRSVNELGALREAGAQSAQRLKAAVLKLAACPEYASLVAALRRQPGVGPFTAIRLLLEIGTMERFRTAASFAHYLGLTPGEYSSSATVRRGHILKCGPGYVRSWLLECAWKSLRPGQDAALRACFERLAPRIGKKRAIVAVARRLALRLRARWIEALQPPAQAA

SEQ ID NO: 281490 - protein, 343 aa, unidentified
MQSISTIGVDIAKSVFQVHGVDAAGQVVLRRQLRRRHVLAFFQKLPPCLVGIEACASSHHWSRELQALGHTVRLMPPAYVKPYVKRQKNDATDAEAICEAVTRPNMRFVPTKTVEQQSCLMLHRARHLFIRQQTAIINSIRAYLAEFGIVAPVGRRGVEQLLEVVADKAEDRVPEVARMCLAALGGQLRALKAQILEFDRRIIAWHRSNTTSKRLDAIPGVGPALATALVASIADPKAFRSGRDFSAWVGLVPKQSSSGGKDKLGSISKQGDRYLRSLFTAGALAVIRYAKIHGTDHRPWLTRLLTRRPTKVAAIALANKLARMAWAMMARNERYQEPAALAA

SEQ ID NO: 281491 - protein, 420 aa, unidentified
MKVVYQTCCGVDVHKSFLVATIIQTTSGVEPSYQKKRFSTFNNSILQFKHWLIENQCRDVCMESTGKYWIPVFNLLEDEINVTIANPKWVKAVKGNKDDTKDSKWIGDLFRLGLVPGSYIPCKPIRILREFTRYRYKLTSCRTSEKNRYQNALTVCNVALDSVVSDIFGKSATSVIDYLIEQSDNSINHEEIASSLFRSLKKKSDSVIESIEGYQMTDSPKYRMRLVRAHLDYITSTINDIDTMLDSLIAPYENAVQLLCTIPGVDRNSAITVISEIGTDMTPFSSSKRLCCWAGLTPGNNESAGKKKSVRITRAGVYLKPALVQVAHAAVKSDKSPYYKKKYERIMKRRGKKRAIIAIARMILTAIYQMLSAGETWNPTDLYKIDMPEPLKEKQKEKAIKQAKKLLISEGIISESQLAS

SEQ ID NO: 281492 - protein, 338 aa, unidentified
MKTHVGVDLHQRFCYLTAVDASGKLCRQGQVVNQGEPLRAWLRQLPGPRQVVVEASGFWPAFTRSVAPEVERLVMVHPQRVKAIASAKLKNDRVDSETLAHLSRCDLLPEAWMADAATQQLRLRVRLRITLGRERARAKNQLQAVLHQEGFKKPVTDVFGKRGRAWLAGLELSAAGRLVVDTWLREVDHLDGELAEQTRELERLAKADARALCLQTVPGIGAYAAMVILAELGDVERFGSKRALASYAGLTPVVRESAGKRKRGGITHQGSNTLRWMMLQVAQVAARCSPGARSYYAGLRARKPAQVAKIALARKLLTAVWALLHHGECFDEERFARG

SEQ ID NO: 281493 - protein, 393 aa, unidentified
MILVGIDVASNKHDIFIMNALGEVFNKHFTIDNTRQGYKKLLEQISLAKEFFKDSNVRIGLESTGHYSRNILHFLILEGYDVMFINPLLTNMDRKASSVRKTKTDSIDAKAICMFLIRNQNDFKPYTLSSYHIDELKILVRQRKSLKKQLNQITNQLHAFLDQAFPEYHTVFKNILSNASLTLLSSYASLSELKRVRVNTLSELLRKASKGKHGVTKAELIKTLVKDSIGIDSESLSLSIKQSVQTIRTIQSQIDQINQLLEHHITESKTTLLTIPGVGIQTGAIILAEIGDINRFKSDDALLAFAGLDPSVYQSGNYEGSFKISKRGSSILRWAIFQAAKVAVIHDPVFNAYYEKKKSEGKHYLTIIGHVTKKLLRVIRSILKNNSVYTVSR

SEQ ID NO: 281494 - protein, 261 aa, unidentified
MKARSSEVFIGVDVSKERLDVAVAPSGETISFANSEDGIALLSEFIKPQAPVLVLFEATGGWEMNAVHHLAAQRLPLVVLNPRQVRDFAKATGQLAKTDAIDARILAHFGQAVRPEVRPLKPEELRKLDALITRRRQISGMITAEQNRRVSAPEWIRPDIEELIKILQKRLAAINRQLSKLIRKSPLWREKDKLLQSFPGVGPVTAASLIAELPELGSLNRRQIAALVGLAPLNCDSGTHKGKRKIWGDGPLFARLSTCVP

SEQ ID NO: 281495 - protein, 413 aa, unidentified
MHTSPQEKLTTQTRTLYMALELSATTWKLAFVDRLCRRPRVRSIPAGDFDQLQEEIQRAWRAYVLEPDAPVVSCYEAGRDGFWVHRCLVAQGVESHVVEPASIEVDRRKRRAKTDRLDAGRIVMALLRYRAGDRLACRMVRVPDAEDEDARQLNREMRTLKAEKTSHTNRIKGLLATQGIVLKQIDRHFLQLLQGLKGADGAPLLEGLTARLRREFDRVALVVDQIRELQLLQATMLRTAAQEVERGDTAGRAPRHVVIAHRLTELAGIGPVTGWTLATEVFAWRDIQNRRQLAALAGLTPTPFASGSEEKEQGISKSGRGELRMLMIEIAWGWLKHQPDSELATWYRHRFAEGTKRNRKIGIVALARKLLVALGKFVRHGEIPAGARSRKEMKFTYLPSLRKREHPSVVTAA

SEQ ID NO: 281496 - protein, 413 aa, unidentified
MEVVHPRCCGIDVHKKMVVACLIVPGSGAQPTKEIRTFSTMTDTLTQLVEWLVAAECTQVAMESTGVYWKPLHNLLENVLEVVVVNAQHIKAVPGRKTDVRDCEWIADLLRHGLLRASFIPDRAQRELRDLTRYRTALVQERTAEVNRVQKVLEDATIKLAAVATDIMGVSGRAMLAALVQGTTEAATLAQMARGSLRAKIPQLERALCGRVGAHHRFLIAQQLAHIDALDALIERVSTEIGDRVRPFAAEIELLDAIPGVSRRTAEVLVAEVGVDMSRFPSAGHLASWAGMCPGNHESAGKRKSGKTRKGSPWLRSALVEAAHGAGRTKNTYLGAQFRRLLPRRGKKRAAVAVGHSILTIAYHVLTTREPYTDLGVDYFDTRNREAAGRRLVRRLNALGYEVHLEPRDAPAA

SEQ ID NO: 281497 - protein, 346 aa, unidentified
MEQYIGLDVSLKLTAICVVDRTGKIEREGVVHSDPEAIAAFIKSCAPHVARIGLETGATSTWLWTELNKLGLPVICIDARHAKAALKMQINKSDRNDAVGIARIMQCGWYKEVRVKDLDSHAVKALLVSRALLVKIKRDLENQVRGLLKNLGLVIGPAKMNAFALRAAELIENRPELAVAVTPLLTARVAIEQQIADLDRKIMKRARNNAQVRQFMTAPGIGPITALCFLATIDDPGRFRRSRSVGAYVGLTTRRYASGEIDWTGRISKCGDKMLRSYLYEAANVLLTRVAKWSALKAWGIRLAKRSGLRKAKVAVARKLAVILHRMWIDGTEFKWSSKETANQTG

SEQ ID NO: 281498 - protein, 435 aa, unidentified
MTARNRLQVGIDFGQKNADLSLLFPDGQPLEPHVPFANSLPGYSLAKQLLLDTLDEYAFDGIDVSGEATGYFWLPFFLQLAADPDLAPYDLNLFLLNPRWVKWFKKCFAEDDKSDQKDPFYIAERTRTRRPSATWSPPDCLPLRFYTRLRFHLVQNLAREKCYFSAFLFLKASSYRRLKPFSDVFGATSRLVLTQYPSLDQLAALPVEDLALHLQQLSGNHLSDAFENARKLRQVARESFSLNDTLTVPVQRILDLTLEHIRFLETQIDQVNGWIATELESYPIISQLATIPGIGLVFSSGIGAEIGGVQRFLQGQKWDRKRKRYRPRNLRDAEDAVAKIAGLWWPRASSGDFEAEDRHMAKSGNRYLRYYLVQGADRMRRHIPEYTAYYARKHKEASKHHHKRALVLTARKSVGLIVGLLHRNEPYRSKEDRRT

SEQ ID NO: 281499 - protein, 377 aa, unidentified
MLSAVPMGACRPCPISPEGTTLESMTAPAAPVTVGVDTHLDLHVAAVVDQAGRLLGTKEFASSTRGYVALVTWAECFGAVERVGVEGTGTYGAGLARFVRAYGLQVVEVNRPDRSLRRRRGKSDPIDAQAAARSTLAGVAVTIPKTREGQVEMIRVLRVARRGAMKARVAAAEQLYGVLYSAPEELRQPLLGLKTKALVGICAAMRPGPLTSPMAATKTSLRTLARRWQQLQAEIDRLDVQLRLLVTSAAPALVALPGVGVDTAGQLLVTAGDNPHRLRGEAAFAHLCGTAPIPASSGRTHRHRLNRGGDRQANHALWRIALVRMRCHPPTRAYVERRTKQGLSKLDIMRCLKRYIAREVYHHLTSLPPSATAACPK

SEQ ID NO: 281500 - protein, 387 aa, unidentified
MLLDHPSDGQTAIRTQFGAIFVSLELSRSTWLVTSLSPGNSEKMSKYSVKAGDLPELLKLFSELKQKALARRGESYRIVTIQEAGLDGFWLHRALQQEGVESHVVDPASIATPRRRRRAKTDRLDGETLLRSLLAYKRGEPRVCAMVVSPSPEEEDRRRLCRERRTLIAERIVHLNRIKGLLFAQGIFDYVPLRRDRRAALDLLRTGDGRVLPTHLKVQIRRELDRLELLLEQIATVEREQDALLAASRPADGTERSNPVAMLLDLKSLGPNFAAVLWTEAFWRQFANRRQVASYAGLAATPWRSGGIEREQGVSKAGNPRLRTMMIQLAWLWIRHQPQSALTQWFNANSPRGRKRTIVALARKLLVALWKYVTAGVVIEGAVMKSA

SEQ ID NO: 281501 - protein, 343 aa, unidentified
MYYAALDVSLRSVSVCIIDEEGKIRFERSVSSDVPDIVRCLHTFGHPIHQVGLEAGTLTQHLTYGLREAGFEVVCMEAHQVSAALSAMRNKTDKHDARGIAQLLRSGWYSRVHVKSIESHYARALLTSRKAILRKCIDLENEMRGLLKIFGVKLPMHLAKAAFDAAVRPIVEQNAALSHALLPMLEARRVLYFNFIELDRRVKRIARDDVICRRFMSIPGVGEIAALTFKAAVDDPARFKSSRTVGAHFGLTPRRYQSGETDNPGRISHAGDADVRTALYCAANTMMSRSLKWSRLKAWGMRLMKSKGRRRALVAVARKLAVILHRMWIDGSEFQMGSKEAVA

SEQ ID NO: 281502 - protein, 341 aa, unidentified
MEEVTIIGLDIAKQVFQAHGADGSGAMVFSRRITRQKLVAFFASQPRCVVALEACAGAHHWGRELQRMGHEVRLIPPAYVKPFVKRQKNDAADAEAICEAAQRPTMRFVPVKSEAQQASAAVFRARDLLVRQRTQLLNALRGLLAEHGWVAPKGLFHASAMMAKIEDPSCELPASARDVFLVMIASARALDERIHLLDREITKRAREDETARRLMTIPGIGPITAAALLALAPPPESFRKGRDFAAWVGLTPLQRSTGGKTKLGAISRMGDRTLRRLLIIGASAVVLHVARRGAPQGSWLAQMMARKPRMLVTVALANKTARIVWAVLAKGEDYKAPVAAA

SEQ ID NO: 281503 - protein, 368 aa, unidentified
MKKVSITATMQSGNFFVQQKLTIGLDLRDRNSWYCVLDEVGKVQLEQRVGTTAKALREVFGAMPRSRIALETGTHSPWISRLLSELGHEVIVANAGKVRLIGESRKKDDRLDAQTLARLARIDPQLLCPVKHRGAQAQADLTVIRARAGLVRARTGLVNTVRGLVKSHGERLRGCNVRNMNAEKAEGVSPELQRALEPLLSAIEELSERICEYNERIEALAQESYPQVALLKQIKGVGTLIALTFLLTLEDPHRFGKSRDVGCYLGLQPGRRKSGQSEPQMHISKEGDPYLRTLLVQGAQHILGPFGIDCDLRRWGLKLAERGGRNGKKRAIVATARKLAVLLHHLWVSGEVYEPLHNSSPMTVATAA

SEQ ID NO: 281504 - protein, 408 aa, unidentified
MEVLYPRCAGLDVHRDTVVACARIMTEGRIEQHVETFGTTTSELLRLLEWLSRHRLTHAAMEATGVYWKPVWHVLEGHFELVLANAMHIKKVPGRKTDVNDAMWIADLLAHGLIRGSFVPPTPIQELRGLTRTRKQLVREKASHVQRIDKVLQDANFKLGSVLSDIMGASGRAILEAIVRGESDPERLVELVDRRVRAGRDLIVEALRGRPGGHHRFLLKLHLTQVDALDTAIAEVDLEVGEAIRPFRVAAAQLTSIPGVSDIAAAAIVSEIGVDMSRFPTPGHLISWAGLCPRSDESAGKRRSTRLRKGAPWLKTMLVQAAWSTARAQGTYLRAQFLRLKSRRGPKKAIVAVAASMLTAAYFILKRGVRYADLGPDYFDRTDRVRTANRLVRKLSELGFEVKIHQAA

SEQ ID NO: 281505 - protein, 345 aa, unidentified
MLYAGVDTHKKYSKVVVTDGTGNRVAEASLANDLSSFQEFFGHSEEPVKAVVEAGRTWGVIYDILESIGVAPVVANPLKTRAIAEAKIKTDTIDAHTLADLLRADLIPLVHVPSREVRAQKNLLRQRLWLVGLRTMVKNRIHHILDRNHVILSPCSDIFGASGRSQLDQAEIASPDNLLLKAHLELLDNIHDQIKDAEKWINQALSHHSGMAISRTIPGLGKILSALVALEVDDVHRFSHPGKLCAYAGLVPSTYASGGKVRHGHLLPTCNRWLRWAYVEAAWIAQRTSPYCHNYFERIKRRKGANSANSALARRLCEITWYCLKENRAYEERELARLPSKVLGR

SEQ ID NO: 281506 - protein, 347 aa, unidentified
MKRTTIGLDIAKHVFQAHAVCSETGAVTRTKLRRAEVLMHFAQLLPSIIVIEACGSSQHWARELAKLGHEVKLVAAQFVRPFVKTNKSDAADAQAIWTAAQQPEMRVVAVKTEEQQAVLGLHAVRERLKKSRTAAVNQIHGLMGEFGVELPRGWRVMLPRAAAALDEATSRVPALLRGQLRRQLDEVRGLTAQIDDVEQQLASWRRRQEDCERIAAIPGVGLLTATAAVATIGDARAFRSGRHFAAFLGLVPRQRGTGGRVQLLGISKRGDGYLRSLLIHGARSVLVRSAARQDPNTWLGRLVQRRPHNVAAVALANKMARQIWALLAHGRIYEPARSLPPQTLMPA

SEQ ID NO: 281507 - protein, 339 aa, unidentified
MEKLIRIGMDTSKQFFQLHGVDAAEQPVLRRQLRRRELLPFFKRLEPTLIVLEACGGSHYWARELAGLGHAVKLIAPQRVKPYVPRGKNDAADAAGLCEAASRPTMRYVPVKTAEQQAALMLAGVRDRLVRNRAQLANTIRGYAAEFGLVAAKGMARIEGLLSSAQTDETLPVLARELFTGLGREYARLDTELVAIEAKLLAWHRASDLSRRLAAIPTIGPVIASLLVMKTPDPHAFGSGRQFAAWLGLTPKDHSTAGKQKLGAITRAGDETLRSLLVVGATAVIWQTRRGKGRNPSPWLVELLKRKPPKLAAVALANKTARIAWKLMATGETYKQAAA

SEQ ID NO: 281508 - protein, 375 aa, unidentified
MTDATIAQTEPVLVVIDIAKARHEVLIAIPGKKRRRRLTVLNQLGDAGFEVKLVSSVALARTREALNNSWDKNDPKDAPVILHMMQIGNEQFYQDPMLCGTNDLQELSKTHDIVSRSKTELWHRVLTHYLSLYWPEAERFHRSSRSDWFFAFLERYPSPHFISAMGQEAFIADAWKVVGRKVSKERLLADIYQTAMSSVGLPIAPDSDAARMFRLVLSEGRSLIAQRNEIEDRAVELLKDNIDYQLLTSIPGIGPINALTILAEAGDLRRFQHHRQFLKFCGMELATIQSGTFRGQTKLSKYGNARLRRTLWMAGQVAIMQRTNSFRDKFERYISKDRQNTHLRRKAYTAIAAKMARTVHGIIKHGEPYRPFFEG

SEQ ID NO: 281509 - protein, 341 aa, unidentified
MKNKSFIGIDISKNVIDVSIFCEETPIKDFSHDVFNNSRKGFGEMCTWLKKNHVVLSNCLFGMEFTGSYSMELEKFLTARKYQFCMLSTHTVKHYPMGPKDKNDKIDSAKIADFLYRYNGTECVKPYKMPDKTMQRLKTLMNERKFLVEQRTCFMNRRQLCTTKEDTQLYDGYIKKLSRDIENIELEEQKLLATDESLLTTYRNLLTIPGIGSVNAINVIVITRNFTAFETARQYASYVGVAPHFRTSGTSVRWRPRPSARCDGQAKADLSMAALITVQYDAELQSFYNRKLGGKQDSDTKRKALNAVKFKLILRMFAIGKQNRKWETLDSMSNNEILAIS

SEQ ID NO: 281510 - protein, 334 aa, unidentified
MKKRYFMGIDVAKATFDFCLLSRSGACLWRGQFSNDARRIERFVHQLRAHGWKLEQIHFALEATGVYGQKLIAALHQAGLVVSVLNPAQVKYFALSVLRRTKNDTVDAEIIARFCRERKPLATQPLRPIETQLELLVRERESRVVEQTRERNRAKKDPYQIELPKLISRQRHQRLAQLKKELAQLDAEIDSLIASDQRLKTQSQLLCSIPAIAKLTAAKLLAELAGKEFQSARQLGAYAGLTPAESRSGYTLYGKTRISKIGNAFLRKALYMPAAVARRWCKPFQLWIAMLQSRKLHDLAIRGAIMRKLLHIVFGVLKHQQPFNPMLASIPKTV

SEQ ID NO: 281511 - protein, 419 aa, unidentified
MDSSKTQRVKRINPRTMIVAVDIGKGFHVGYFRAPNGEEGKPFLFANSAKSFNEFWHSAQEFSRKHDLEEIVVGFESSGPYAEPLFHYLRKKPVTLVQVNPFHTKRVKELTGNSPNKTDRKDPRVIADVISLGHALTLVVPKGPAAHLRRLTQARERAIKRRTAALNQIQDLIFVIFPEFLKIMKGISTKTALDLIKKHPTAESVVALGLESLATIIKTTSRGKLGLQRAQELFHAAQSCVGVQEGKRSILLEIEYLVSQIGADNRFVGSLEKQMEEHLEEIAYSESILSIKGIGKVTTAGLIGEVGDFRQFGTISEITKLAGLDLFEISSGQHRGRRRISKRGRPLLRKLLYFAAINVVKTNGILHEPYQWMHRRGMPKVKALVAIARKLLRIVFALARDNTVYKEDHCHGHHLKLAA

SEQ ID NO: 281512 - protein, 389 aa, unidentified
MSYGSESGRPVGQRDTDHCRATLYVSLELSPSKWLVTSLVSGTDKLSKHFVRGGDCGALLQLFTALKAKAEKQSGMAVVVVTIQEAGLDGFSLHRLLEANGIESWIVDAASVAAPRRARRAKSDAIDGETLLRTLLAYRRGEPRVCSMVHPTSPHDEDRRRLTRERRTLMRERIEHTNRIKGLLMSQGISGYDPLRKDRLVRLDELTTRDGHRLPPRLRAEIGREIDRLELLARQLKQVEAERDALISHVADVADSPATQLMRLKGIGVETATLLWLEGLFRPFANRRQLAAYAGLAPTPWLSGRIQREQGISKSGNPRLRTAMVELAWLWLRNQPASALSRWFADRVRDEGGRKRRITIVALARKLLVTLWKYVNRGEVPDGAALKPV

SEQ ID NO: 281513 - protein, 371 aa, unidentified
MDESSKTLYVGLDVHKDSIAVAYAPEDRGAEVVSLGAIGTRQSDIDKLIRRLESKSATLVFVYEAGPCGYWLYRYLTGKSLACHVVAPSLIPRKAGDRVKTDRRDAMTLARLMRSGDLSSIYVPGIEDEALRDLSRGRDDAMQDLKRSKRRLKSFLLRQDIRYEGRATWNAAHLRWLSEVVCPTPPQQIVFQEYLRAVSEQQERVQRVERELHEAVKGWRLYPVVEAIQALRGVELTGAVILMAELGDITRFESPRQLMSYLGLTPSEYSSGARRRQGGITKAGNSHARRALVEGAWAYRYPAKVSRHLQLRLEKLPAEVQAIGWKAQVRLCRRYRQLTARGKHVNQVVVAIAREMAAFAWAIARLVPLAS

SEQ ID NO: 281514 - protein, 341 aa, unidentified
MDTVSLIGIDLGKHCFHLHGQDASGRMVFRKKLTRSQMFTLLGNFPRCIVVMEACAGAHWIARRLQALGHEAKLISPQFVKPFRQGNKNDFADAQAICEAAARSSMRFVSPHNEAQQIVSALHRVRERLVRDRTGTINQIHAFLLEFGISLPRGMAVIRRLPAVLEAESLPPRLVVVLERLQAHFRYLDEQIHQLERELLTQLHEDERSERLLEIPGIGPMTASVLMSELGDAQQYGSARQFAASVGLVPRQYSTGGKPTLLGISKRGDKELRRLLVQCARAIMQRIEHRTDALGVWIRSLLARRHSNVVACALANKLARIAWAILAKGTHYRSIEAVPSV

SEQ ID NO: 281515 - protein, 358 aa, unidentified
MGHSNVLAKNGKRIQVGAQDEVFVGLDVHTRHVNVAVRLNGRQVAGWMSPPASATVARSLRPLGAALRKVVYEAGPTGYSLYRTLRAQGMPAEVWAPGKMPRPANRSNKTDRKDAATLAEYAQKDLGEPIAVPTLQEEADRQVMRTRNQLVNKVRRLKQQIKSFLHMHGIAPPAGLERWTGTAVAALGKLSLGPELEFCLGLLTEQLVHLEGLKKRVEKKLRELAGTRRHAAAERVLRSHPGVGPLTAMNFLLEVYQPERFEVDRQVSTYLGLVPRVSQSGQRRTEGPLIRSGRPALRSMLVQAAWQWAGQGREGSALYRRLLGNSGCAQKAIVGVARQIGVDLWHMLRRGEPYRPGG

SEQ ID NO: 281516 - protein, 397 aa, unidentified
MYIVGIDIAKRKHEAAVIDGEGTVIIKPFSFTNNCSGYNRLLAMLTKAKLPLDEVSFAMEATGHYWLALFTRLQKEGFRVQVINPVQTNSIRSFYIRQAKTDPRDALLIAEVIRFGHFSESTLHPENIYELRELCRGRHAIVSMQADVKRKVVALLDQVFPEYETAFTNMFSDTSMAILQNCPTPKELSEMPLEELCHLIEVSSHKRFRMAKAQELQALAHNSFGFAMAGDVFSTMIRLYAKHLDFLKQQVREMDRKIAEIMDTLDTPITTITGIGPTLGAYILSEIGDISRFSSAAKLAAYAGIDPTMRQSGEYNGVRNRMSKRGSPYLRHAIWLAASSAVLHDPALKLYFQKKRDEGKPYMASVGHACRKMVSIIYAVMRDNKAYTPCIPNEISV

SEQ ID NO: 281517 - protein, 327 aa, unidentified
MNLSVAALGVDIAKLKFDVCLIKENGKAKHKVFANTAHGFGQLVVWLSSHRAGSLHACLEATGTYGEALALHLFNAGLTVSVVNPAQVKAFAASRLTRTKTDKVDAELIARFCLAHAPQAWQPPAPEVRGLQALVRRLESLIEMRVSEENRLSSGVSIEAVRDSLEEHIAYLVAEIKQTELLIREHINNHPNLKQKSDLLDSIPGIGATTAARLLAEITDFTQYQSARQVAAYAGLVPRERRSGSSVRGRTCLSKIGNARLRKALYFPAMTALRSSGFFQQWASGMRERGKSKMAVIGAAMRKLIHLAYGVLKTGKPFDPEWTTKIA

SEQ ID NO: 281518 - protein, 349 aa, unidentified
MILVGCDLHTRKQQVALLNTDTGELREQELSHVGDDVERFYAALSSPVTVGIESTGYSLWFHALLQRLGHTLLVGEAAKIRAMVVRKTKTDRRDARHLRDLLKDDRFPVVWIPDPTTRDLRALIQHRLRLVRIRTMVKNGLHAIALNQRLALGPSLWSRQGLAQLQALVLLPHTRRRRDDSLELLQWLNCHIDALDLHVATAAAADPDARRLMTHPGVGPVTALATVLVLGPVGRFPGSKHVVSYIGLAPAVNASADKYRLGHISKQGSALLRWVLGQAAPLATRGDAGLKRIYFAVLRRRGRPKAKVALARRLLIRLYVMLRDQIDYDEFCRRGRARRGGLELAGTPV

SEQ ID NO: 281519 - protein, 335 aa, unidentified
MKKNTIFGLDLAKHIFHLVCLDGKRKKLRRGQMLPYFAQLPQSVIAMEACASSNYWARELISLGHEVKLIPPQHVKGYLRGQKNDYNDALAIAEAAEHGRVRAVPVKTVEQQDKQTLLRSKRRVSVERTRLVNHVRGILTEYGITIPKSVPAFRRHLCEIIDEESHLLSSTLMRLIDRYYQQFLALDEEFKWHDKQINEQVKLDKDCQRLQELPGFGPIVSYAFKSWLGSGKQFKRGRDASAALGVVPKQHTSGDKQRLSGITKKGDAYLRSLIIHGARSVLRRVEKKDDPLSQWINRLIVTRGKNKAIVALANKMIRIAWVIVARQEKYHPKAA

SEQ ID NO: 281520 - protein, 414 aa, unidentified
MKAFRLGEALDWAAGQARAKGFASVAVACEPTGPRWLQVQLLCAERGLPLVCVQPLVTHIAREQQDYTSHKTDEADCVMIARLAAELHCYLPEELDETWAHLRHLGRRRAALITSATASVQRIQDFLSVAWPTVTETCAQPVQSTTWLAALQVVTSRCGGQPGTLAAMGLEAFTALVRDAQHGWGGQRARASICRGVFAALTGTEGVVVAHRRGLLRRCADELGDLRRTRAQLREVEADMVVVLSELGLARLADIPGLTATGAAALLAETGDPRRYDSSSSLVKHAGLSPSENASGAFRGEAHISRRGRPSLRLTAWRAVWPMLIHNPVMAARYAAMTEAADAAAAAAGDAGTGQVTAAAATARARRAKARVACAASLLRWIYSIVVHNTSRDPAVASGAASSQHAARCQAEAA

SEQ ID NO: 281521 - protein, 342 aa, unidentified
MTIVTVGIDLAKNVFAVHGVDAAGKPALVRPSVARSNLLELIATLPPCLIGMEACSGAHHWAREFEKLGHTVRLMAPKFVAPYRLSGKRGKNDAADAAAICEAVTRPQMRFVPHKSIEQQGQLMVHRTRQGFVEQRTATLNRIRGLLSELGIVLPLKAATVRREALARLEELPGWANTVIGDLLSEVTRLDERITEYDRHIALMARHSTQAQQLMQLGGIGQTTAMALISTVGNGHDFACGRSFSAWLGLVPGQYSSGGKQRLGRITKAGDAYLRSLLVMGARAVLAAAMNTRTPKQDPISRWARSLAERRGYWRAVVAIAAKNARMCWAVLQRGEAFKMPA

SEQ ID NO: 281522 - protein, 330 aa, unidentified
MQKVQHIIGADLSKKTIDLFCHLKETHLKIDNNLQGFKKLLKWINQQQINLFELIIVMEHTGLYSFCFEKFLHGQQIFFTKVNALTIKHSIGLVRGKSDKIDASRIAAYGYEKKDKLAAEPPTSKELQRLQLLYATRERLVKQKVGLLNVVKEYRNVGLLQNDPILQSQYRLIKNYEKEIAKLEAQLDNVFKSNPSLQKNHLLLQSIKGVGKVLATATIIKTRNFTRFTNARKFACFCGTAPFEHTSGTSIKGRTRVSHLADKKMKTLLDLSAKTAIQYDKELREYYLKRTQNGKPKMSTINVVRNKILYRMFAVIKRQTPFIENYVQAA

SEQ ID NO: 281523 - protein, 433 aa, unidentified
MQDVQDEPLFAERVAGLDIAKTEVEVTLRVPSDTTAGRRQQETRTYGTTRRELDSLADWLRCWAVTRVGMEATGDYWKPVFFLLESRGFDCQLYNAGQVKALPGRPKTDRADSIWLAKITERGSVASSFVPPEPVRRLRTHTRYRRHLTQARTAEKQRVEKLLEDGHLKLSSVISDIHGVSGRAMLEALAAGQRDTKALAQLARGRLRGKIRRLEEALDCSFFTAEHATVLAMMLAAIDCHTAQIEALTARIETLIEPYLRQVEQLDEIDGIGAICAQDIIAEIGADMTVFPTASHLVSWARWSPQVKQSAGKRKGSNATGRGNPYLGAALGEAVICAGRTQSYLGAKYRRLARRMPKKKALVATGNSMLTIVHTLLSDPAASYQDLGADYHEQRMHARRQARNHVRSLERLGYQVTIQALNPDTGELLTPAG

SEQ ID NO: 281524 - protein, 401 aa, unidentified
MNAVGIDVSKGKSMVAALQPGGKLLARPFEVLHTKSGIRELISFVRSLDGDTHIVMEHTGRYYEPMLQWLADSDLFVSAVNPKLIKDFGNNTLRSVKTDKADAKKIARYALDNWYDLPQHTGMDTTRTQLKTMNRQFAFCMRQRTACKNNLIALTDQVYPGANTYFESPARADDSQKWVDYVSAFWHVDYVCSMRLSTFTERYRKWCHRHGYNFQSDKPRMLWEKAKDLIAMLPMDKMTKSLVQTAVAQLNVLSKTVETLRTQMIELAEKLPEYPVVIAMNGVGATLASQLIAEIGDITRFPRRGSLTAFAGVDPGAKQSGTMQRNKTSKAGSPHLRRALFQIVSGLLMRAPDDPVYNFMAKKRSEGKPYYVYMTAGANKFLRIYYGRVNEYLAGLSKEQE

SEQ ID NO: 281525 - protein, 354 aa, unidentified
MKTYYVGMDVHRASIVIVVKNGAGKVVERITLQTSATAVRSYLQRLKGKVYVTFEEGTQAQWLYDLVRVLVTEVIVCDPRQNRLLAAGNKSDAVDAEKLAELLRNRSLKAVDHADHGMRALKELVRIYDSLVQDSTRVMLRLKALYRGRAIDCRGHDIYRQDRRTQWLKKLKERGAKQRAEFLYRELAALKPLRHEAKLLMVREARKQAAYPWLLSVPRLGAVSVAQLLAVVGTPHRFRTKRQFWTYVGLAVVTRSTADQEVVNGVLRRSRRPVATRGLNRNHNHLLKRVFKMAATSACHSEPFQAGYEARRQQGMDPALARLTIARQLAAITLSLWKRGEKFQVERMKKQPAA

SEQ ID NO: 281526 - protein, 403 aa, unidentified
MAAVMIGVDPHRGPHTAVVISRAEEPLGELGVRASAGQAGKLVGWAAAWPERTWAAGGAAGLGRLLARQLVAAGERVLDVQPKLASRVRLLQAGDTNKNDPSDALSVAVAALRSTVCREVIADDYRVVLKVRAERHRDLARTRNQVACRLHSVLCDLVPGGHQKEISAAHAARILAQATPSGAVALARAELAAEFLADLRHLDGQLRDTRKKLAAAVRASGTTLTQVFGVGPVIAGTVIGDVGDVARFPGRDHFASYNGTAPVEVSSGNRKIHRLSLRGNRRINHAIHMAAITQLRHKHSEGRAYYDKKVAEGKTHKEALRSLKRKVSDAIFARLQADARQARESGPGGQPGNGSDSSAASSHPERQLFGPATPGPDTTIRPGTTAGTPSPSKPALKKTRPAT

SEQ ID NO: 281527 - protein, 366 aa, unidentified
MNSVRYVGLDVHRDTISAAVLNESGRLLQQSILATRAAAILDFIGGMRGTLHVTFEEGTHSAWLYDLLLRRVVRLVVCNPRKNALLKSGNKSDAIDARKLAELLRADLLSAVYHGEKSAQEVQHLARSYAMLTEDTTRVMGRLKAVFRSHAVPCAGKKLYGRKHRDEYLSELGAGGLRRRAECLYEELEALQRLRRQAKRDMIVECRKYPETKLLCSVPFLGPVRAAVLIGRVQTPHRFRTKRQFWAYCGLALEMRDSGEYRMVDGQVERRKRPAQIRGLNWNHNHELKNLFKAAATSASACDGVFREFYLGLLKKNMQPEMARLTLARKIAAIALKIWKKGEAFQRGTLEATSNLSAWLARRRAE

SEQ ID NO: 281528 - protein, 352 aa, unidentified
MEMVGGLDLHRSQITFRTVDLRTGEVQRGKIHPGAREAVREWLERFEAGTDAHFALEGTTGWRFVVEEIERRGFTAHLADPAELNTLRGPKRRAKTDHADCELMVNLVLEGRLPESSIPPAHILELRALVRLRKTLVDQRIEWQQRLQAQLFHQGVVPGLHLCNPEDRRRLAEMQMSPAGRQTMGTGLIMLDDFDAQLNPLSAQLVALAKSQPGCRALEHELFGVGWLTAVAIVAELGDCRRFHSGDQAVRSSGLDITVHESNGRRPGGHLARQGPAVLRWALFEAAQCAARKASPDHAYYVRVRDHIDHNRACLSVARKICRRACHILKDLGDAAMAPPRPPSVSRDPKAA

SEQ ID NO: 281529 - protein, 400 aa, unidentified
MLSIGIDVSKGKSTVCGMKPGGEIVYTPFEVQHTREGMSELVSLLRGSGEEVRAVLESTGSYHCPVVAALLENGIFVSVVNSLRMKRFCSQSIRKVKTDRIDAMQIALYGLAYWQELQPTRLPEDTYRELQLLARQYYQMTSLLIKAKVDFNAICDQVLPGMQELMSDHAGRHKLSDFVLRYRHTTHILEMGETRFRKDYCKWAEKKGYRNCERMAALIFATAQNGIPVLPNAPSTQIVITEAIRVLHTVEASRDAILTQMQALAKTLPEYSLVREMPCIGDTLAPRLIAEIGDVRRFHSKRALIAYAGIDAPPYQSGKFCANNRHISKRGNRYLRKTGYEVMQSYVMHKPANDPIFTFIEKKRGEGKSGKLAMVAGLNKFLRVYYGKVTELYRSLPAIE

SEQ ID NO: 281530 - protein, 355 aa, unidentified
MEQHEVILGVDTHLDVHVGAVINETGKLLGTLSVSTDTAGYLKLLAWAWAWAWACSFGHLRRAGVEGTGTYGAGLTRVLRDHQIEVLEVNRPDRAARRSRGKSDPTDADNAARAVLSGRATAIPKEQSGAAEAMRAVLVARRSAVQAKTQAVNQLRALLVNAPQEVRERLLKAKMEDCIECCVRIRSLGSTTMLQTLAATLRLLAKRWKALAEELKTLDVMLDSLTKKHANRRRERFGVGPQTAAELIAVAGDNPERLKSEAALAALCGTSPLQASSGKTIRHRLNRGGDRAANNALWTTAMVRMRSDPRSRAYVDRRTKEGMSNKEISRCLKRYIVRELYPLSLADLADSRRNN

SEQ ID NO: 281531 - protein, 481 aa, unidentified
MSQKQSKTETAVGPSGKTPKGSRKGRRKGMCLQDRPVLEPNAAGADIGAREIFVGVPSDRDAHPVRSFATFTEDLKKMAVWLKECGITTVAMESTGVYWIPLYEVLEAHGIKPCLVNARNMKNVPGRRTDWHECQWLQYLHSVGLLRAAFRPEAEVCVVRTLMRHRQELVLMANQHIQHMHKALTQMNLQIHHVISDITGVTGLAIIDAILKGERDPIALAGLRDRRIQADVGTIRKSLEGTWQPEHLFTLQQARDSFQHYQNQIARCDREIETRLAQFSPRVDPQQRPLPADRKKAQRRSKSKTHNLQTGFDLRTEAYRLFGVDLTQAPGLAKNIFALFTEVGRDMSRWPSTAHFASWLGLCPDNDISGGRVLWRGQRQIKHRAGELFRLAAMGLHHDQSPMGDYLRRMKAKLGPAGATTATAHKIAIIFYTMVKNQVEYDATLWSQRDAQREKRFEDKLRRQAQQRGYKLVPIEQQPAA

SEQ ID NO: 281532 - protein, 352 aa, unidentified
MVSAVLEGAAVRVIGIDSHEATLAGCAVDELGTPVDERTLGNDRAGHVALADRARSLAVDRIGIEGSGRYGAAAARRLAAAGFDVRDVPPHLSHRERLRTHRPGKSDPTDALAIARVAAREQALPPVRLADRSEDLGLLVTARDELVAEATQLRNRIHADLVVLLPGYGDRVPNLVARRHRRGVALELATLSGVRAELTRSRLSRLEETDAATRLLERRLAALLVGHPLLALPGVRVLLAARILAETGDVRRFRSADAFAMFSGTAPIPASSGQTERMRLNRGGDRQLNRALHAMALIQGRYHDRAKAYLARKRAEGKTQREAIRCLARKLARVVFEVLRRSTLATADALAA

SEQ ID NO: 281533 - protein, 405 aa, unidentified
MSITAHRSEAPSAVRVDLSAIFVSLELSQSKWLVTSLSPGNGEKLSKFTIAGGDIAGMLARFAELQRKAQACTGQCFPLVVIHEAGLDGFWIHRVLEAEGVESHVVDPASVAVSRRKRRVKTDRIDGEMLIRTLLAYKRGEPRVCAMVRAPTPEEEDRRRISRERKALTNERIRHVNRIKGLLFAQGINGYEPIRRDRRKRLDALTTGDGRPLPAHLKAQISRELDRLELVMEQIKACEQTRDALLTAPQPATLAEPASPVQAGEPGLATPSVPAMLLELKGIGPETASVLWLEGLSRRFDNRRQVAAYAGLAPSHWQSGKIDHDQGVSKAGNPRLRTALVQLAWLWVRHQPDSALTIWFKTRVAQNGGRQKKTTIIALARKLLVALWKFVNAGVVIEGAIVRAA

SEQ ID NO: 281534 - protein, 314 aa, unidentified
MNTNTLQNINVGVDTGKTQLDIYIRPLDIYFNVTNDEKGIKQAVRTIAKYHPERIVIEATGRLEMPFILACEKANLPYVIANPLHIKKFSGALGNKAKNDRLDAALIAHYAEAIKPKLTQLKSENIRLMSDLVTRRNQLLSMQTMEKNRHQILPQSLASSIKPILTALKNQIAKVENRIEKLIETCPDYQAKNEILKSVPGIGKIAAASLISNVPELGYITNKQAASLIGVAPITRESGSFKGKRMIKGGRMQVRTVLYMAMMSAMQCNPVFKETYQRLLAAGKPKKVALIACVRKMVVILNSMLRDGCMWNGR

SEQ ID NO: 281535 - protein, 343 aa, unidentified
MVYIGMDVSSKEFVVHVIDQRKQKVFEGRIAPSRAGLRKLIGDLGVGPKLFVFEAGNQMKWIALMLMRQAGVRIHVVHPNEVKWISQSNGKTDQVDARKLVHLAWGNLLPRPVHIVEGKTRQLRELVSAREHLQGKRVALINALRGTIRQEGVRFPAKFFQRSDWKTSLEKLPLGSTQQLILKSFMEAIDALKRSEEELTAKMLEIQDSRCDLLETIPAIGKIASRVIVSALDDARRFDNKKCVANYGALTPTIYQSGGTTNLGRINRDGRQEVRKVLLQCAHTIQRTTNHPAAPIREFFERIEKRRGKKRAVVATARKLLTIAYGVLKSGVPYDPERLRAFA

SEQ ID NO: 281536 - protein, 355 aa, unidentified
MTESSDYESVQVFIGVDVGKDTHHAVAINRSGKRLFDKALPNDENKLRSLISDLKQHGQILLVVDQPATIGALPVAVARSEGVLVGYLPGLAMRRIADLHAGEAKTDARDAAIIAEAARTLPHALRTLKLADEQIAELSMLCGFDDDLAAQTTQASNRIRGLLTQIHPALERVLGPRLEHPAVLDLLQRYPSPEKLASLGEKKLALQLITLRKQRDEVALEVEQRVLAHPLYPVLTSMPGVGVRTAARLLTEVACRAFASAAHLAAYAGLAPVTRRSGSSIRGEHPSRRGNKALKRALFLSAFAALRDPLSRAYYTRKMSQGKRHNQALIALARRHCDVLFAMMRDGTFYTPQGS

SEQ ID NO: 281537 - protein, 341 aa, unidentified
MIYSFGFDMAKDQFEVCLQQYQLDQQTGHILARNTFDNTPAGYKRWIKWARSRASDPQLPWRVTMEATGVYYEPLALFIQQNHPDIHLAVVLPSRAKKYINSQGFRSKTDKIDAQGLALMGAERRLAPWEGIDPYWRELRSMTRTRADLMDQRTQLRNQLHALTHSGRPCEQVVRSIQACITTLSEQIKQLTQAIYEQLNARDELRPVLAYLLSIPGVGRLTVATLLAETNGFAAFHSISQLISFNGYDVVVKQSGRWTGKPKISKQGSKYMRRAMYMPANAVIRSKKGPLYDYYQRLLDTHNVAMKAHVAVQKKLLTYVYVLWNKQERFDPQHIYSQRAA

SEQ ID NO: 281538 - protein, 403 aa, unidentified
MYAVGIDVSKGRSTVAVLEPLGKTVAKPFEVRHTKSGMNDLVNYLNTLDGECRIVLEHTGRYYEPMIRWLSSAGLFVSAVNPKIIKDFDNNSLRRVKTDKADAKKIGRFALDKWYKLRQYTAMDNIRTQLKIMNRQMSFYQKQQTAYKNNLIALMDETYPGANKFFTSPKRPDGSEKWVDFIEKFWHVDCVCTLSLTSFTEKYQKWCKKHGYNFQPDKPAEIYNASQELVPILAKDDMTKLFVQQAVTQLNAISKAVEELRQQMDSLASKLPEYPVVMSMFGVGPTLGPQLIAEIGDVHKFTKRSQLTAFAGVDPGVNESGDYSQKSVHTSKHGSPYLRKTLFLIMDVLIQKQPKDDPVYRFMAKKRDEGKPYYVYMTAGANKFLRIYFGKIKEYLSNLPSEE

SEQ ID NO: 281539 - protein, 383 aa, unidentified
MEALLYCCCGLDVHKDLIEACILRGEGMEPEIIRCSFGTTKPELKRLTLWLSKNDCYSVAMESTGVYWKPIFETLELCSEYLEKIWVVNANHMRNLPGRKSDVGDAEWIATLLRHGLLEKSFVPPAAIRDLRECSRLHRSFVQERCRYVNRLEKFLQAHGFKFSSVMKDILCLAGRKLLNILQDTGSLNELDVIENCRRLRHSTKEISAAVCGNLTVAEQRLLKHLLHKLDSCQEDISSILEDMRLLSQQFQEQLAIIDSVPGFDEESAMEIIAEISAAPQEHFSSGEKLCRWAGVTPRNDESAGKVKSRKTLHGNPYVKAILCQAAWAAVKVRNSPFHVWFWTHQHMLGQKKAIVAVSRKLLMLIFLLLQTGQLYRPPNQAA

SEQ ID NO: 281540 - protein, 437 aa, unidentified
MRRKKNKASKSVNLQVLPVVHPNAAGIDVGAKEHVVAVPCDRDPQPVRTFRAFTPELHEVAAWLKRCGIQTVALESTGIYWISLYEVLEQYGFEVRVVNARHVKHVPGRTKTDVLDCQWIQKLHSFGLLNGSFRPDQQIRRLRTYMRLRDNLVVASTQAVHHMQKALFEMNVQLSNVISDIVGETGLAILEAIIAGQRDPIQLAALCSSRIKAPRETVAKSLHGNWDSALLFALKVALETYRFSQIKIRDCDGCIQHHLAQFESRAEVNNSPKTLKLQLQRVCGVDLTKIPGIKEQSAQIIISEVGLDMTKWNTEKQFCSFLGLCPNNSISGGKVLRRATRKVYNRAADTLRLCAQSLTHSKSALGAKYRRLKARLGAPKAIVAMAHHFARLVYRMLRYGQNFVEQGIHQYELKFRLQRIKWLKKEARSFNFQLVPA

SEQ ID NO: 281541 - protein, 342 aa, unidentified
MTVFVGIDIAKASFATATCVDGTSQTLGVFPNTRAGFEALVAQLREAVRSRESAVQVIIEPTGGYEVPLARFVLEHGWQVSMPNPRHVRDWAKSQGRRAKTDAQDALLLARYGAEQPVRPWRPLPAAVSELESLLQRRDDLEQLIGQERNRQHALGHRPDVAPAVDASVAAILHALEASLSTVTRAINEHLEQQPRLREGVRLLRTVPGVGERNVLWLLVLLHRWQTLTDGEGLGKGLVAYLGLDPQPFESGSSVRRRARISRMGAAHLRRRLFMSALGGTRGHNALRQFYLRLVGRGKPKKVALIAAARKVLVWAWAVFRTRTAFDPTRIPRRPPMLPASP

SEQ ID NO: 281542 - protein, 347 aa, unidentified
MRFYTQSHRYYCGIDLHARWMYLCVLDPQGEVLLHRNFRACPEAFLKAVEPYRQDLVVAVECIFSWYWLADLCAQEGIEFILGHALYMKAIHGGKAKNDRIDSQKIAVLLRGGMIPVAYVYPPQMRSTRDLLRRRTYLMRKRAELLVHVQNTNSQYNLPEIGKKIAYRANRSGVAERFSDPAVQTSIAADLSLIDFYDTLLNRLELFITSQAKQQDHHSFYLLRSVPGIGKILALTILYEIHDITRFPRVQEFVSYCRLVKCSRQSAGKNYGFSGKKIGNVHLKWAFSEAAVLFLRNNPEGQKLLARLERKHGKAKALTILAHKLARAVYFILRREKTFDLTQFLAA

SEQ ID NO: 281543 - protein, 323 aa, unidentified
MYHTFIGIDIGKKDFYLAVYGENKVTPYSNNKKGFALMVKLLKAQLPDSLVVLENTGGYESELISYLIARDIKVHRADTRKVKYFIRSTGKLGKSDNIDAVGLARYAKERHHELDLYQELEENAKRLLMATNRREELKQMLVQEKNRLKAPDNEHVKDSHITLIHFLEQEISKVEHVQKSLIALDKQLQNKVNLLKDEIDGVGEVTAINLISTLPELGKLNRRKIASLAGTAPHPYESGNKIGYRNVRGGRGNVKRILFMAALTASRSKGHLGEFYRRLIANGKKPMVALTALMRKIVVIANAKIRDMMRKTQPQSSTNERAA

SEQ ID NO: 281544 - protein, 351 aa, unidentified
MIIIGVDYHPSDQYIAFVDTETGEYGERQLNHSAGEAEKFYRELAARGVSIRVGMEATGYSRWFERLLTELGIEVWIGDAAEIKTKRVRKQKTDREDARLLLRLLRENNFPRIWVPSPENRDLRQLLWHRHRMVQMRTRIMNQLQALAMNEGQRRKKKLWSEAGRAQLEKLTLGTWASRRRKDLLELLDRMNPPIQELTGAAEQEAEKRSEVLRLMTHPGVGPLTALAFVLIIGTPERFQCGKQIGSYVGLIPEEDSSAGHQRLGHITKQGSSLLRFLLGEAAQAAARCDADWRRRYMHLAVRRQRNIAKVAMARRLAVRLYWMWRNGWEYAEWVKFGSHAGQLGTGHGVK

SEQ ID NO: 281545 - protein, 349 aa, unidentified
MEEYISFDSHKHYTLAERENRQTSRTVQQRINHAPGAIRDYLRPCEPGTPVAVEATGNWYWIIDEIEQAGLLPVLVNPRKAKLMMGMINKTDKLDVHGLNRLQRNKTLPDVWIPPGSLRDFRELTRGRMVLSKQRTQLKNRIQATLSKYGLTMSGFSDAFGKAARKVMALRVAQLPEHTRWSTDLALDQMDALTLSLFQIESRLKGLLKQTHVLQRLATLPGVGVILSAVIAFELGQIERFANAERFASYSGTTPRVHSSGGKTRFGRLRPDVNRYLKWAFVEAANVVCLHHKRRPDRHVSKLYTRLRQRRGHPKAIGAVARHLAEAAYYVLKRDRVYRDPVLGLATKA

SEQ ID NO: 281546 - protein, 355 aa, unidentified
MMQSQIIATPKLFIGMDIHKKSWSVHLRTDLFDHKGFSMPPDSLKLVDYVTSHFADHEVSLTYEAGCCGFSAARYFLNMGWTVKVVNPNDVPRSDKQLYQKTDKLDCRNLCKQLQQQQLHGIYIPTEPEEQLKSLLRQRNQVVKQLRKTKSHIKALLLFHGITIPEQFENPNWSKDFQSWLKNIPWQHSTGTACMNSKLRILELLNNEYSQTSNELRAYCRKYHKKDYYLLKSIPGIGGLLAAAIIAELGDIRRFNNEKEFSSCIGLVPGIHQSSETDLKMGLTPRCKSLLRSYLIESSWVAIRTDPEIQAYYRKHMGKNPKNVIVKVAHKICCRILSVIKNEIPYQVNYKNIKK

SEQ ID NO: 281547 - protein, 388 aa, unidentified
MTHLPVLYPVPATPDYDRTLVLAIELSNKSWVLAAQVPGLPRVKAKRTIEPTAEALLTAIQGYRERAKAAGRQVERVIATYEAGWSGFWLARWLSTHGVETHVVQPSSVPVDRRARRAKSDGIDAELLLRTLLAWLRGEPRVCSMVPIPAEADEDARRCIRERTELVAERVALVNRIGAVLATLGVGDYNPLLRNRRERLDALRTAQGTPLPPHAHAKISRMLDRLDLVRTQITALEQERDAVLEDEVPDRAGAMIQQLATLRGIGVQSATVLVREAFVREFANGKALGSYAGLAATPYSSGGTEREQGISKAGNRRLRTVMVELAWLWQRYQPGSAEVSWFRERVSGTGARMRKVMVVALARKLLIALWRFATQGVVPGGAVMKPAS

SEQ ID NO: 281548 - protein, 356 aa, unidentified
MFTNKISRISNKNNSSLTLTDSYDHYIALDWSERNMAIARMSKKDAEPKIIDVPSDLKELKIYLGNLKGKKILTIEETTTSQWLYVELYDYADKIFICDPYRNRLLSDGPKNDKIDAGKLCKLLKNGMMKEVYHSTNELYELRKLVSYYDDEVRSGVRLLNQKSALYRAEHKSWKKKEQIEDSRINRFIVSQLDEKISSYHEKKKRYEGEFSRVSKKNKVIKSLQSIPGLGPISSVTILSIVIDGKRFKSSNHYLSYCGLVKHEKFSGGRSYGRRIPRYSRRLKGVYKSAAVRVTSTENPLREYYEYLLKEKKVAEHNAKHAVARYIAKISLGIIKSGEKYKPYRWRENKKEKEAT

SEQ ID NO: 281549 - protein, 349 aa, unidentified
MRFYPGQHRFYCGVDLHARTMYLCILDQAGQVVFDRNLPATAAAFLQAIAPFRDGLVVAVECLFCWYWLADLCAREKIAFVLGHALYMKAIHGGKSKNDQIDAGKIARLLRGGTLPQAYVYPAGMRETRDLLRRRQYLVHKRAEAIAHIQNTNSQYNHPPFGKKLGYAANRDELDIADRFTDPSVQKTVQIDLALIDRYDELLGDVELYLTRTAKVDDPQAYFRLQTIAGVGKILALVLLYEIHDIGRFASVGDFLSYARLVRCDHISAGKIKGSGGKKIGNPHLRWAFSEAACLFLRRSERAKKWMQRQEKKRGKPKALGVLAAKLGRAVYHVLTKKVAFDEQRFWNS

SEQ ID NO: 281550 - protein, 400 aa, unidentified
MVSDFIKGYNLMKIFVGIDIAKLNHFAAAISSDGEILIEPFKFTNDADGFQLLVSKLESFDKNSIIIGLESTAHYGDNLVRYLVAEFYQVCVLNPIKTCQMRKNNVRKTKTDKVDTFVIAKTLMLQDDLRFITFFDLDMMDLKALGRFRQKTIKQRTRLKIQLTTYVDQVFPEIQYFFKSGLHQNAVYALLKEAPSPKEIASMHMTHLANLLKVNSHGHFTKEQAKELRVLAQKSVGANDSAISIQITQTIQQIELLDSQLEKIEAEMTDIMKFNDSVIMTIPGIGYINGGMILGEIGDIHRFSNPNKLLAFAGLDPSVYQSGNFQAKTTRMSKRGSRVLRYALVNAAWNVVRNNATFKAYYDAKRAEGRSHYNALGHCSGKLVRVIWKMLTDNVEFNLK

SEQ ID NO: 281551 - protein, 440 aa, unidentified
MGKHKDRVCGADVHKDLIVATITDRDGSYLQESFGTSPPELERFKEWLEINKCEQVAFEATGVYWLPVHEVTSQSIDTIVANPYQIKSLPNDKSDAKDADRIAEYCLNGQIKRSRVFSQENRDLRTLTRARSGYVRTRTQIKNRIHKHLSSNGIKLSSCIEDIFGKSGRHILDGLAHKRKTSDIIKGIPSGQIRKKSDLIGVSINNGLDETSRTIVKDLLELLDITESKIDKTANMVANKMLTKSEDLAIVMSIPGIGFTAGATILSEIGDIRDFKTPESMANWGGLIPGSYESAGKKKSFGITKRGPKQIRTVLVEVAHVIARTGDSRLHRFFQRLRARKNYNVAIVALARKLICLIHHLLTNREPYQENDCEKKNPETSECDVDSSSLTEESLEDRVAAIVDAIYHLKDRSRKRIQRKRTAKTHEYKRLPKWLSDGGG

SEQ ID NO: 281552 - protein, 356 aa, unidentified
MQTQVTKKIDFKGTDLFIGLDVHKKSWSVTILVEGMEHRTFTQPPDPRTLYNYLQKMFPGGTYYSAYEAGFCGYGIHRELNDLGIKNIVINAADIPASQKDQLQKRDPVDSRKIARALEKGLLRAIHIFDRDMEELRSLNRTRFYLMRDFRRSKNRIKSFLQYYSIYIPQEFDNNQWTLKFIDWLKQIKMKTSSGQDAFSNLIRSFEYHREQILILSRQIRIRVREYDKELYNLLKTISGIGPLTSSALITELGDINRFPHINHLSSFVGLIPRVKQSGETSYNGGMTFRCNEYLRTLLIESSWQAIRQDPALMHYYQQHVINNKGQKVIVKIARKLLNRVRYVMKNRQPYVTGVA

SEQ ID NO: 281553 - protein, 324 aa, unidentified
MELHTIGIDLGKTVFHLVGLNLRGEVVVRKKCSRKQLLQFTANLKVELIGMEACGGAHFLGRALREQGHEVRLIPAQYVKPYVKTNKSDYIDAEAIAEAVGRPRMRFVPIKTDDQLDLQSLHRVRERWVMRRTAVINQVRGLLLERGITLRKGRCHVDAALPGILEDADAKLSGALRVLLAQLKLELDHLEMRIDQADAVIKTTAGENEACQRLVAIPGIGPVTATAVIAAIGNGAAFHKGREFAAWLGVVPGEHTTGGKQKLLGISKRGNSYLRKLFVHGARAVLQQSAKQSSGLNAWLAQLTARTHRNVAAVALANKLARMA

SEQ ID NO: 281554 - protein, 343 aa, unidentified
MDHFAGLDVSVKETSVCIVDDTGRIIREVKVASEPEALLPVLTSDTYHFKRIGLEAGPLSQWLFSALAEAGLPAICVETRHMRAVLKAQINKTDRNDARGMAQMMRAGIYRPVHVKTLRSQKLRMLLTHRKLLQSKAIAIDNDLRGTLRNFGLKVGMVGRVKFEARIKELVENLPDLAVLVEPMLIVRRVLREQIGILHRRLLAIVRNDEVCRRLMTVPGVGPVVALTYRATVDVPARFRKSKSVGAVFGLTCSRYQSGESERSGRISRCGDEMMRVMLYEAAQVMLTRTNKWSWLKAWAMQIARRRGKKRAIVALARRLAVIMHRIWVDGTEFRWTRDLATA

SEQ ID NO: 281555 - protein, 339 aa, unidentified
MNKIITIGLDIAKKVFQVHGIDGAGAILVQRSLRRAQVLGWFAAQPACLIGLEACATSHYWARELSKLGHTVKLIPPAYAKAYVRRNKNDPADAAAICEAVSRPSMRFVAVKSEAQQAAAGLHKVRAMLTKQRTMLMNQLRGLMAEFGIVVGEGPQHVAKLVAILDDPADGRIPAPLHEALVALGQGLRGLALRIAALDRQILDWGRDNATYGHLLTIPGYGPILASAMAAMAVDPTAFRSGRGFAASLGLVPRQDGTGGKVKLGPISKRGNGYLRRLLVNGAMSVLGAKRAKQDPWLVKLLATKPRKLAAVALANKMARIGWAIMRRQEDFRALPAAS

SEQ ID NO: 281556 - protein, 400 aa, unidentified
MIDTGDIDVFLGLDVGKGEHHATAVTPAGKKAFDKRLPNTEPKLRELFAKLQAKHGTVLVVVDQPASIGALPLAVARDMGCPVAYLPGLTMRRIADLYPGEAKTDARDAFIIADAARAMPHTLRAIDGEDETIAELEMIVGFDDDLAGEATRIANRLHGLLTQIHPSLERVLGPRLQHPAVLALLERFGSPAQIRKAGRRRLVTLLRPKAPRTAERLVEEIFAASDEQTVAVPGTEAAALIVPSLATSLTAVLEQRKLLAGRIEELLEAHPLSKVLTSMPGVGVRTGARILIEVGDGSTFPAAGHLAAYAGLAPATRSSGSSIRSEQPSRRGNKQLKRAFFLSAFAALSDPASRAHYDKKIAQGKHHTQALLRLARRRADVLFAMLRDGTFYEPQPVKAA

SEQ ID NO: 281557 - protein, 340 aa, unidentified
MTAIRIGLDIAKNVFQVHGVDDKGTVVIRQRLRRPDILRFFASLPPCLIGIEACSASHHWARELIQLGHDVRLMPARYVKPYVQRGKSDALDAEAICEAVSRPTMRFATIKTPEQQAVLTLHRSREILVKQETMLANLVRGCLGEFGIVAPLGIRRVAELIAVIKDEADPRILPEARIGMRAVADQLCDLQKRIKQIEQAIRAWHRSNDASRRLATIPGVGSITASAIVATVANATEFKSARHFAAFLGLTPKQRSTGGRQRLGRISKQGDVYIRRLLVLGGTSLVRYARGAGGSVWAKQLLARRPTRIVTVALANKAARIIWALLTRGEVYRAPQPQAA

SEQ ID NO: 281558 - protein, 326 aa, unidentified
MTASSSSDNNFVGIDVGGASLDVAWHRGGRAHYANRPDAIAELVQRLGAGPQLTRIAVEPTGGYEKPLVKALRQAGLPVEIVHTSRFAAYRTLIGQNAKSDTSDARLLAAYAASPDEIRGRKPDHVELEQDPVREALHECASRRDQLKQMIHAESCRLATTRLAEIRQAIEQHLDMLRTEDKRLQQMMQTLLRQSADLVAAQRLLTSIKGIGVTSATALIAMVPELGRVDNKAAAALVGVAPFVRQSGTMTAPARIRGGRAAVRHILYMAAVAASRHNKILRPFYERLIADGKPVKVALIAVLRRLVVFANAVLRSGQPWKGASPT

SEQ ID NO: 281559 - protein, 353 aa, unidentified
MSNIKYVGMDVHKSITVIVVLDAAGQVESRSQVKTKAENLRDFFRGISGKVNVVFEEGTHSAWLYKLLKPLVASVTVCDPRHNKLIEDGNKSDDEDAETLARLLRLGAVKAVYKGDDQQQQLKEICRAYDNLVEDSTRVQNRLKALYRGRGIDCSGHALYRTDQRSDWLEKLGEEAARFRAESLLEQLESISQLRKQAKQRLVAQARAHADYRLLVELPGFGPVRVAQLIAEVGTPHRFRTKRQFWPYCGYAVVTRSSADYQFVEGKIVKQRKKVSTRGLNRNHNPQLKQVFKGAALTALRHEAVKAYYQRLIDSGARPELARVSVARKLASIALTIWQRREEFDAKKAFAQD

SEQ ID NO: 281560 - protein, 340 aa, unidentified
MEVATIGLDISKHVFQVHAVDAQGQVTGRQRLRRSEIVSFFFSLPPCLVGIEACATAHYWAREIQRFGHDVRLIPPAYVKPYVRRGAKNDAADAAAICEAVTRPNMRFVPIKSVENQGFLMLHRARGLLVRQRTMTACAIRAHFAEFGIIVGQGRQRVDGLVELLDDEEPALPANARTALAILVNQLKELDLQVDAIERELAQIQRVNPMAKLLSSIPGVGPITATALAATVPDPSMFRSGREFAAWLSLTPKQNSTGGKDRLGRITKRGDSYLRHLLVIGARNVVRYPKARSRVGGGWIEALLERHRPMVVAIAVANKLARIIWAMMTTGEFYRAKAAG

SEQ ID NO: 281561 - protein, 414 aa, unidentified
MSETVYRRCCGMDIHKDTIVVCVLPADGTTAVVVRKTYRTFRNDLTRMRGWLKLLKVTEIAMESTGVYWRAVWNVLEDQGFRLLLVNPAQVKALQGRKSDGRDAKRIAEFLQDGRLDPSFVPPPEIRALRQMLRYRLSLLHQRNEVHNQIRDLFETASLKLSSVASDLLGVSGRRIIEAMIAGEDSPELLSWKVRGSLRKKEKLVRESLKGYFNDFHRGMLRMHYRHYEFLSGQVQELEAEIAGRMAPYASQITALDSIPGVDHIVAWHLIAEMGADMSVFPDADHCASWAGVSPGSWESAGKSLRSRTKKGNKYLRRILTQAAWAVSHTKDGYLRAFFYRVKARRGWGRAIIAVAHKILVMAYCILKTGIPYQDLGGNYFDKLHPERAAKRLVQRLQHLGLDVIVTPSKPLSA

SEQ ID NO: 281562 - protein, 504 aa, unidentified
MASVEVTRWDEFYTARSATTMDENGSRRQFPVARRVVQRSSALLVLKKPEDEFDPGRALAQRTVASSREESTRGRFTLSARPGSHVDGGVVMDVLHPRCCGLDVHKSSISACILLREAGRVQKHQRRFGAMTQDLQDLAEWLRQFGVTQVAMESSGVYWKPVWNILEGQFTIVLANAQHIKNVPGRKTDQKDAEWIAQLLQYGLLRASYIPSEIIRDLRDLTRMRASLSQEASRISSRIQKVLEDANVKLGSVATNVLGKSGRAMLEDIICGEDDPEHLASLALGHLRVKIPQLKLALAGKIRSHHRFLLRRLLDQVQFVEHEIALLDERLEEIAQQRPELSQAVTRWDTIPGIDRVAAWALLAEIGDNMAQFPTAEHLASWAALCPGNHESVGKRLRGTTRQGSPWLRRMACQCAWAAARTKNTYLSSQFKRLAARRGKKRAIIAVAHTLIVIAYHLQKNQSNYDDLGGNYFDRIHSDGLKRYLVKRLQQLGNKVTLEPMEAT

SEQ ID NO: 281563 - protein, 323 aa, unidentified
MSSKATKKRRSFIGIDVSKQLLEVGVYQSDYHFQCPNDPKKYSTLITELISLRPARIVLEATGGLERPLLQALQTIGLPVVVINPRQVRNFAKALGLLAKTDRLDARVLAHFAAAVQPPVSPIKTQQETELDALMGRRNQLTEMLTAEKNRRGSAATKTTRHDIEEHIEWLEERLKELDEKLKQQLECSAVWQRKDQILQSLKGIGFVTSMSLLADCPELGQLNRHQMAKLAGVAPLNRDSGKQRGTRHIYGGRAQVRCKLYMATLAAIRSNPVIKSFYKRLVDKGKLKKVAIIACMRKLLTIINVMVRDNKLWNVKAQPVAA

SEQ ID NO: 281564 - protein, 406 aa, unidentified
MRGPVITVDISKGSCHYQPFLENGKPLRKPKVLHDTIEGFNQLMETIEMTREKSSGEKVPVVFEATGVYHRCLQKYLDDNGISYYIISPLLSAAYRKTNLHSNKTDPLDCAHIAKAYYCEGNLLPFPQQEDIYVKLQKMNRYYETELIHLKKRKVSFRSFMDIVYPRLDKSFGSNATLYDPIPMEVLKKYPHPSLLLKHREETIVKAIEKKVNHDKRFIEKIVHKMYECASHCYSGAEIEDIEVIKLPEMIEELQDQIKLCDSILDGLICEAEKIPYFNCIVSIVGIGRNLAARIIAELGDMSRFPNRRAISAFAGLNPKILQSGDVDGIHLKISKKGNRHLRCLLYLGATCNFRFKKHDPLYEFNQKKRQQANFPLKPKAANTATAHKLLIMIYAMSQSGESYRF

SEQ ID NO: 281565 - protein, 452 aa, unidentified
MCLDDRPIRELNAAGIDIGAREIFVAVPPDRDENPVRVFGTFTESLQEMAQWLVQCGITTVAMESTGVYWIPPQDVLEQHGLKVCLVNARNMKNVPGRRTDWHECQWLQYLHSVGLLRAAFRPEGEVCAVRSLMRHRNDLVSMANQHVQHMHKALTQMNLQIQHVISDITGLTGLAIVDAILEGERDTAVLAELRDRRVKASEETIRKSLVGNWRPEHLFTLKQSRQMYQNYQEQIAACDEEIEKQVVSFEPRVNPDDRPLPPDRKQKQRRSKKKTVNPKTGFDVRSESYKLFGVDLTQVPGLAMNVLVLFTEVGRDMSRWPTAAHFVSWLALCPDNDISGGKVLWRGTRHRHNRAGQLFRLAAHALHHDQTPMGNYLRRMKSKLGPKGATTATAQKIAIIFYTMLKNQVEYDDTLWAQRDAQREKRYQQKLQRQARQLGYKLVPIEEMPAA

SEQ ID NO: 281566 - protein, 417 aa, unidentified
MQYAPVTLSDQPVNGLTCGIDWARDDHAVAIVDSGGRAVYRGVIEHSARGLADLIVVLNRAGATEVAIERPDGPVVDALLEAGLTVVVINPNQVKNLRSRYGSAGNKDDRFDAFVLADTLRTDRARLSPLTPNGPQTAVLRALVRARKDLVIHRVAVANQLREHLKRVYPGPIGLFDALDSPISLRFLTRFDCQDRADWLTPKRLGAWLATMGYRGRTDPAVLHARLTASPRGATGTQGCAHAGISRALVATLSTLGDQIGLLAVQIGEQLADHADAHIFTSLPRSGTVRAARLLAEIGDCRGKFPTPDALACLAGVTPSTRQSGKMRSVSFRWACDKQLRDAVCDFANDSRRANPWAADLYTRARARGHDHPHATRVLARAWLHIIWCCWQTNTPYDPGRHRALQTLLTQQPHAST

SEQ ID NO: 281567 - protein, 365 aa, unidentified
MFLSASQTRTASKPCWLLPALALRPEKPTTQPEFTSMDDATQSLHLGIDVAAESFKAALLADEQIHHKSFRNTTAGFKALLRWLNRLTKNQPLTATQVCLEASGGYEEALALFLYEQGLLVSVVNPRQIKAYGDVQLRRSKSDRADAALIVRFCQREQPQLWQPPSPHQRQLRQLTRALDALKRDRDRLRNRHRRSEGPAQVAHEAVLETLEAQITALDQAIEDHVQAHPDLAADRDLLVSIPGIGAQTAASVLAELGVLERFTSARQVAAYAGLVAQHHSSGTSVHRRSRLSKVGNARLRRALYFPALSALRHNAAVKALGDRLAQAGKAKMTIVGAAMRKLLHICYGVLRSGQCFDESLHIAT

SEQ ID NO: 281568 - protein, 338 aa, unidentified
MNYMGIDHHKQYSYITLMDDVGEVIKSGKVSNYRSEVEKFLVGTRDIEAVVEAGRSSYTMVDLLDEIGIDVTIAHPKEVKAIARARIKTDKRDSYILAHLLRADLIPEVYKRTRENRLYQRILRQRAFYVGSITRVKNRIRALIAQQGEGVREEASRVKNLFGTKGMKVLVGLDLPESERKLLGALVKTYRHQDESRKETNGLVEKLYLEIPEAKHIHTVPGFGVFLSVLVAVEIADIGRFENVGKLHAYAGVIPSTHSSGERSYHGRIIKEGNRWLRWAVVEAVWPAIRADFDIRCYYERLKKRKCSNSAKVATARRLLTIIYRMLKENRAYIPYKR

SEQ ID NO: 281569 - protein, 339 aa, unidentified
MQVTTVGLDLAKNVFQVHGIAENGEVVFNRTIRRAQLLAFFEDLPTCLVGMEACGSSYYWARQLSALGHDVRLIPANYVKPYVKRGKSDAVDAEAICEAVTRPTMRFVAIKSEEQQGVLFLHRARDLIVRQRTQLSNMLRSLLTEFGIVVAQGVGSAVKFAKGVLDGNVPNIPEVAVDVLANLSNQLVALHLRVRWYEMRMQLQAKSDPRIPRLRTIPGVGPVTASAIVATVGDARQFKNGRQFAAWLGLTPLNRSSGGKEKLGRISKMGDRHVRRLLVTGMTARLRQMKTHPDRVDPWTFDLLARKPARLATVAMANKTARIVWAVLTRNEHYRPHTA

SEQ ID NO: 281570 - protein, 410 aa, unidentified
MALQIVYPICCGIDVHKSFVVAVIAHTNDEGITEYIRHRFSTFTNNLKELAQWLEYHSCFDVCMESTGKYWIPVYNILEASCNICLAHPKYVKAIRGKKTDKKDAQWIADLYKHDLVSGSFIPPLKIRQLRDLFRYQMKLTQLQTSEKNRYQNVLTWSNLQIASVVSDVFGKSAQSMITSILDNPEEPLDIQVHMKKNMKATVEELTLATDCDITHEQADKLRVIKSHFDAITFCKNNLDELIRELGQEYEKQQKLVQTVPGFKNPETALRVLSEIGVDMNQFPTVGNLCSWAGVVPANNESAGKKFSTRVSKGGQYLKPLLVQVANAVVRSEKTPEIRNKYLQLKKRRGHKKAIMAICHRLLVAIYHILKNNEPYNPELYSKVEYIPPDKTITIQEASRYAQSHGFKVI

SEQ ID NO: 281571 - protein, 447 aa, unidentified
MDLIDQLVDADPGEEEILERVAAIDVAKDSGMVCVRVPHQTQPGKRDTSVWSVPARTNSIIALASQLAEQGIQRVVLESTSDYWRPFYYLLDARGLTVWLVNARDVKHVPGRPKTDKLDAVWLAKLNERGMLRASFIPPVEIRQLRDYTRLRFDLTRDRSRQVQRLEKLLEDALIKISSVATEMMGVSGRAMIEALIAGERDPRVLAELAKGRLRLKHAALIEALTGRFDDHHAELAALLLEQIDGLSAQIEHLDARIEQLIADIPAAQAPRPGSGQDSDAAHVPLDAVDRLDEVTGIGPHAAQVIIAEVGLAMAVFPTDAHLVSWSKIAPRTVQSGAKSHPGKTGKGNPYLKSVLGEAAASAARTNTFLGARYRRLARRIGKQKAQVAVARSILVIVWHLLADPTSRYRDLGPDFLDTRIRPERRKQNHIHQLEALGYKVTLEPAA

SEQ ID NO: 281572 - protein, 416 aa, unidentified
MEYPPDALAAVPPGGVTCGIDWANDDHAVCVVNMAGQVVQRFTVEHTGEGLAELVRRLRKAGVGEVAIERPDGKVVEAVLAAGLTIVVISPNQLKNLRGRYGSAGNKDDRFDAFVLADTLRTDRARLRPLLPDTPATVTLRQACRARKDLVGHRVAVCNQLRAHLKAAFPGAVGLFYELDSPISLAFLARFDCQDRADWLSPRRLAAWLASQGYCGRKDPAILHARLTAAPRGATGGDGAAKAHITRALTAVLTSLAEQIKALEAQIAEQLARHADAHIFTSLPKAGTVRAARLLAEIGDCRARFPTPEALICLAGVAPSTRKSGKTTFVDFRWAADKQLRDAICDFAGDSRHASPWAASLYHDAIARGKDHPHAVRILARAWLYVIWHCWQHHTAYDPARHKALQRILAEEKPAA

SEQ ID NO: 281573 - protein, 468 aa, unidentified
MLREGPLSDGGNGVCMSRNYNQKKGKGHQAMLPVMRPDAAGIDIGATEIFVAVPAERAVENIRCFPTFTQDLYALADWLAECGVKTVAMESTGVYWIPLFQILEERGLEVCLVNARHVKNVPGRRTDVSDCQWLQFLHSVGLLRASYRPEQEICAVRSLLRHRESLVQMAATHVHHMQKALDQMNLQLHHVISDITGQTGLAIVDAILGGERDPQVLAGLRHERIKASEEVIAKSLVGDYRAEHLFTLRQSLAAYRGYQTLIEECEREVRRCLEDVQSSPPSSGTTQDEAKSKRSLSHDGIVHSQLKRVFGIDLTKIPGIRIGVAQTLLGEIGPNFTKFRSASAFASWMGLCPDNEISGGKVLWAGTRKVNCRAATALRMAAQSLHHSKSALGDFYRRMRAKLGAPKAITAAAHKLARIIFHLITTRQEFDDSHFAADQLRHQKRQEIKLRAKAKALGFELIPLQPAA

SEQ ID NO: 281574 - protein, 397 aa, unidentified
MYIVGIDIAKRKHEAAVIDGEGTVIIKPFSFTNNCSGYNRLLAMLTKAKLPLDEVSFAMEATGHYWLALFTRLQKEGFRVQVINPVQTNSIRSFYIRQVKTDPRDALLIAEVIRFGHFSESTLHPENIYELRELCRGRHAIVSMQADVKRKVVALLDQVFPEYETAFTNLFGDTSMAILQTCPTPKELSETPLEELCHLIEVSSHKRFRMAKAQELQALARNSFGFAMAGDVFSTMIRLYAKHLDFLKQQVREMDRKIAEIMDTLDTPITTITGIGPTLGAYILSEIGDISRFPSAAKLAAYAGIDPTMRQSGEYNGVRNRMSKRGSPYLRHAIWLAASSAVLHDPALKLYFQKKRDEGKPYMASVGHACRKMVSIIYAVMRDNKAYTPYIPNEISA

SEQ ID NO: 281575 - protein, 342 aa, unidentified
MEHTTIAVDLAKSVFQVAVSHRAGSVDDERRLPRDRFLAFFAQQPPATIVLEACGSAHYWARQLQPLGHAVRLLPPHDVRPYVRRNKTDRTDAKGLLEAHRNEDIHAVPVKTIEHQAIASLHRLRSTWLATRTSRLNTIRGLLREFGIFIPVGATRVVPQVRALLQDSTAVPIALQTTLAAACDEIAGLEENMHAVERQLAALATTLPDVELLQTVPGVGLLTATALVALVADICRFPSGRHFASFLGLTPREDSSALRRRLGAITKQGDVYVRMLLTHGARSVVWHAKAATHPTPLQQWAAETERRRGRNVAAVAVANKLARIVWAVWRHQRPFGAEHRAG

SEQ ID NO: 281576 - protein, 320 aa, unidentified
MESKAAVVYAGIDVAKACLQLHLQNRQSEFANSPAGLGQLLKQLQTMPGVHVLCEATGGYEQAMVKALHAANIPVSIINPARVRAAARARGQRAKSDPIDAQGLSDYGQRYQPAPTSPTSATQDQLVALTQWLKQLVQGQAMAKTQAEHHRHPFVRRQHAKLLAHLNAQIEAVEKQIEALLEQDAALQQRVNCLDNIEGVGPRTAWLVLAHMPELGQLNRRQVAALAGLAPWNRDSGTMKGMRCIGGGRPEVRVALYMAALSATRSNPVLRALYQRLRAKGKLAKVALTAVMRRLLIYMNHQLKDLLSKTKSQNIVQAAA

SEQ ID NO: 281577 - protein, 415 aa, unidentified
MSVLFRWVGRAIGLDVHRDFCVIAICEDGVVRSAGRVPSTPEAIKTLAESLLPSDRVALEVTGSAWEVARILEPHVERVIVVSPDDTGIVQARAKTDRLDARALARLLWKGELESVWRPDERCGVLRRRLARREQLVHARTRAKQEIHAVLHRRLQGKPPSSDLFGVKGRQWLASLELPLEESESVDAALRHITFLDYEIGEVERLIAQQAITWPEIRRLMTIPGVNLICAASFMAAIGDVNRFLTSRKLVAYLGLDPKVRQSGEAPARSGRISKRGSASARWALVEAAWTTVRQPGPLHAFYERTRGRRGHGKAIVASARKLAVLFWCMLTRGEDYAHQQPSLTARKLRKLELKAGAPKYTKAAAGISTVNRAMRDVERQLAEQAEISYKRLVQDQQAGAPAKKVGASATPERA

SEQ ID NO: 281578 - protein, 465 aa, unidentified
MKKKTSKSEKEKGKTSIHEAWEKINPDAAGIDIGSREHWVCIPPGRREKTVRKFGTFTCELEALADWLQECGVKSIAMEATGVYWIPVFQILEARGFHVLLVNARQTKNVAGRKTDVQDCQWIQRLHTYGLLQGSFRPGDPYCVLRTYLRYRDELIGARSTQCPHMQKALQQMNLQLAQVLSDVTGLSGLAIIQAILEGQRHPAKLAALVDVRVRATQATIQKALVGDYRKEHLFELKSAFELYHTYEQKIQACDEQIVAETAGLPDKVDLSSKPLPARKQGHPAHKDKMAGQDMREWVYKKLGADLTAIEGIGITTALVILTEVGPDLSRFPSEKHFASWLGLCPDNRISGGKVLSSRTRRVVNRVSDALRIGATSLERSQTAMGAFYRRMKAKLGAAEAVTATAHKLARIVYRLIKHGEAYVRQGTVEAEKKYQERKLYALRKTASALGFELIAKQQVTQGVS

SEQ ID NO: 281579 - protein, 408 aa, unidentified
MSVLHPVCCGLDVHKKTISACLINTNTNGEQEYEIKEFKTFTHDLLLLKEWIVSNNCSVVAMESTGVYWRPVHNVIEGIVDVKLVNARHIKNVPGRKTDIEDSKWLAGLLRNGLVKGSFIPDKAVRQWRDLVTLRKSHTKTVGDYKRRVHKLFECANIKISSVVSDLFGVTSRNLMSMLCDENASIDFATVEKCARGSLKKKVPELVLSIEGFFENHHCIQLKSMLAVIDHHNHEVAAITKRLDCLMSDHLELLNRLDEIPGIDKLASQSIISYIGTDLNAFPNEAALCSWAGLCPGNNESAGKRKSGKSPVRKHPFKTLMVEIAWAAIKKNGSYYKEKYYRLKSRRGAKKAIVATAHTILKAIFHIIKFGKTFKEPGEDFFVKRNKAKKLYSLQKQSEKLGFKLVPM

SEQ ID NO: 281580 - protein, 312 aa, unidentified
MSEFVGIDVSKLQLDVCLHSGGTAFSVPNAEEGFKQLCERLRTLAPQLVVLEATGGYERLCAASLAQSGVPVVIVNARQVRAFAVATGVLAKSDRVDARVLAHFAAAVQPQVRALPDEQRQALDELLRRRRQLVGMLVQEKNRLAQSHTSLVKKDVKSLIVVLEKRVHGCDGELQQVIHASPVWKAQEDLLLSFKGIGPVNARTLVAELPELGRLNRKQIAALVGLAPFPRESGTWRGKRRIQGGRGQIRHALYMATLAAVRFNACIRTFYQRLLQAGKPTKVALVACMRKVLTILNAMMRTNSPWHEPIAG

SEQ ID NO: 281581 - protein, 351 aa, unidentified
MGKSITDLSSVTTIGLDLAKHVFQVHGVDASGRVVVAKAVRRNKLLEFFASLSRCLVGLEACGSAHHWARELIKLGHDARMMPPAYVKPYIRRQKNDAADAAAICEAVTRPSMRFVGVRSLENQAALMRHKAREMLVSQRTQLLNGLRGHLIEVGVIAAQGPRHARELAELIEACDETIPFEVCEALAPLVVQLRTLDEAIARLDRTITKLAQRDQTARRLMSIPGFGPITASAMAATIQDTSSFAGPREFAAFLGLTPKQNSSGGKQKLGRISKMGNRNLRKLLVVGAHAVLFHRKPHTDPLRMWAKKLIEKKPFKLVAVALANKMARIAFAIMRGETVYREFSGVRSAG

SEQ ID NO: 281582 - protein, 355 aa, unidentified
MNDAKYIGLDVHQATISVVVLDSTGHLVMESVIETKAATILQLIHGLRGSLHVTLEEGTCAAWLHDLLKPHVASVLVCDPRKNALLKAGNKNDRIDARKLADLLRTGLLSPVYHGENGIRTLKELAHSYLALNRDVTRVMNRLKALYRSWAIPCAGQRVYAPRYRSQWLAKITEAGVRQRAEIYYQQLDSLRSLRQQVRRDLLAESGKHGATKLLRQIPSIGPIRAALLIALMQTPHRFRTKRQLWAYCGLALKTSTSGEYRFVEGQLRRSKKFLAIRGLNANHNHDLKNIFKGAATRAAAVPGPFQEFHAALLARGMKPPMARLTLARKIAAITLIVWKKGVRFDAEYLKQQAA

SEQ ID NO: 281583 - protein, 313 aa, unidentified
MIISSRCVGIDVSKHHLDIFDEAVGVSERIDNATHAITQLVARWRCDALVVFEATGVYDLELREALHRAGIRFARINPARARDFARASGQLAKTDPIDAQMLAAFARAMKPATEQAATPARNALAKLAKRRDQLVAMRAQEKNRRSEAEDRAMAERIARLIEVLNDEIAEIETEINALVKAEPELADDAQLMRSVPGVGPVACMQLLTQMPELGRLGPKEVAALAGLAPFNVDSGAYRGKRKIGGGRKRVRDALYMAALNAIRRADRFKAFYDRLRQAGKPAKLALIAVARKLLTILNAMLRDRKIYKVAPST

SEQ ID NO: 281584 - protein, 341 aa, unidentified
MDIVVLGVDLGKNSCSLAGLDAAGRVVLRRRVRREGLERFVEGLPRCTVAMEACCGAHHLGRVFGAQGHDVRLMSPEYVRPYVKAQKNDDRDAEAIAEAATRPTMRFVPVKSVAQSDVQALHRARERLVAERTALINHLRALLLERGITVPQGRGKLAAELCTFADDEDSRLTPRMRLLIEDLRREWRALDQRIAAFDAEFTALAREDEAARRLMTIPGIGTINATALAAAVGDARAFGRGRDMAAWLGLTPRQRTTGGKPRLLGISKRGNRYLRKNLIHGARAVLPRLADQHTPLGRWARALLARAPRNVAIVALANKLARIVWAVLAHGRAYEVDHAVA

SEQ ID NO: 281585 - protein, 351 aa, unidentified
MFFAGIDAHTRYVVVIIINSTGERVAGPTRVKVGQPARLLEVLAPYRPLDAIMETSSSWPWLHELLSSAGVHFVLAHARRLRAIAEANYKRDDIDAELLARMRLAGLIPEVYPTPVAQREWATLLRHRTTLVTQRTALVNRIHAQLHLRGLHLERGRLLTRAGRQWVRTEAWPHLGLEQRALVRSHFRVMAGLRPLIRALDRHIAQVAATIPEAQLLTTIAGIGPQRALVICAEALPITRFRTPGHLASYAGLVPTSKQSGERPVRHGEIPVAANRWLRGALVRGVVAHVRHAPDSWLTQYYQTLKARVGWPTARVAAARKLARAIHAMLRTNSCWKNDPVRSELEEAPAA

SEQ ID NO: 281586 - protein, 335 aa, unidentified
MPMLAETVDAVVGIDTHRDIHQAEIASPSGTPLATISVGNDSAGFAELLGWIVDHAPGPQVAVAIEGTRSYGIGLTRALAAAGLAVIESEQPSRGQRRGKGKSDPIDAHLAVLAALRLDAARLPTPRADGDREALRILLGARHELTVASTAQTNRLRALLLGGTDTDRDTARGSLTDTVLARLVRRRPPAQASRHLLVRHAEISRLAAALRQARAELKANRTQLQAIITDLAPALTDRLGIGPVSAAQVIVSYSHPDRWPNEAAFAALAGTNPLPASSGQTVRHRLNRGGDRALNNAIHTIAVTRMRACPRTRAYLTRRTTEGKTPREIRRCLIG

SEQ ID NO: 281587 - protein, 354 aa, unidentified
MAKSIETAVAVIGIDIGKNSFHVVGLDRRGAIVLRQKWSRGQVEARIANIPPCLIGMEACVGAHHLSRRLKALGHDARLMPAKYVRPYSKGQKNDFRDAETIAEAVQRPTMKFVATKTVEQLDLQALHRVRERLVSQRTGIINQIRAFLLERGIAVRQGRLSLRLALPQILAAPPDVVSPRMLHIIEGLAGDWRRLDERIQALSGEIEAIARQDVGCERLMSVPGIGPIISSAMVAAIGTGDAFSKGRDFAAWLGLVPRQISTGDRTILGKISKRGNRYLRVLFVQAAWVVLVKRKSRERLGLDRWLEAAKKRLHHNVLAIALANKLARIAWSVLAHGRSFAAGNVAEATGQAT

SEQ ID NO: 281588 - protein, 357 aa, unidentified
MGKSISNFSSVTTIGLDIAKNVFQVHGVDAKGAAIVARSVRRGQLLRFFASLPPCLVGMEACSSAHHWARSLIELGHEVKLIPPAYVKPYVRRNKNDAVDAAAICEAVGRPNMRFVPVRSVENQAELMRHRARELLAGNRTRMLNAPRGHLAEVGIVAAQGAQHAYGLKRLLTDGCDENGEIVVADCVRKALAPLVQQIDAIDEEIEAIDDHIKAQVKADDTARRLARVPSIGPITASAIVATIRDPSAFASGREFSAFIGLTPRQSSSGGKERLGRITKMGDRYLRKLLVVGACATLSHRKGRHDALRVWASSLLERKAVKYKFKLAAVALANKVARLVFAILTRGGQYDERPVAA

SEQ ID NO: 281589 - protein, 343 aa, unidentified
MNSTTIAVDVAKAVFEVAVSEHAGQVRERHRFSRERFRRYLGEQPPATILMEACGSAHYWGREAQTRGHRVVLLPPHAVRPYVVRNKTDRTDAKALLEATRNDEVRPVPVKSETQQALAALHRLRSTWLATRTARINTVRGLLREFGVVIPIGARHVVPALGLLEDADGGVPSLLRPALAEAAREIRELEGRIRTVEHQLDAVAEQTPVVSRLCSIPGVGLLTATALVAAVGDVQRFPSGRHFASYLGLTPRERSTGQRRQLGAISKRGDAYLRMLLIHGARAVLCHAKTKTAPTPDRLRAWALHLERFRGHNKAAVALANKLARIAWAVWKYDTDFTAAPTA

SEQ ID NO: 281590 - protein, 405 aa, unidentified
MPVKSLCGGVFVFYVGIDIAKNKHEASVIDADGKPLLESISFSNSKQGCEKLLTLFERLDVSKDSVLIGMEATGHYWLSVHAFFFELGYDVKVINPIQSEAFRKMYIRQTKNDSKDAFIIAQIMRFGQFSATKLSEERIVALRQLSRYRLALVDSCGDCKRRIIALLDQVFPEYDRLFSDTFGVTSKEILLKYPTPEDMLAVSTRKLATLLAKSSRGRFGEEKAEQLKNAAADSFGVSFAKDAFSFQIQQLMEQILFLEKQVAELELKISALLEQMDSFITTIPGIGETLGAIILSEIGDIYRFDSPGKLVAFAGLDVKVNQSGEFTGTKTKISKRGSPYLRRAIWLAASRAAFCDPILSEYYQSLRARGKHHLTAVGAVARKLCNIIFAILRENRPYLPAPPKS

SEQ ID NO: 281591 - protein, 350 aa, unidentified
MKKIVKQVVGIDVAQKALVLCLGRMYDDWSPELYANKTFANTVKGIEALILWLKKQTVQHIAVRFVMEATGVYHETLAYFLEEKGYEISIVLPNKISNYMRTLDVKTVTDNTASQAITMFGLERKLDIWKRPKEIYRKLRQLTRERDQLVGERTMVKNQLHAEQAEAYPNKSSVKRIKDRIKMLEKQEKEIMKEVAAMIAQDRELQKMIVIICSLPGIGLLTAAIVLAETNGFDLIRNRRQLASYAGFDVIEKQSGTSVKGKPRISKKGNRYLRKAMHCPALTAIRHDERFKAIFARIVSKHGIKMKAAVAVQRKLLEMIFILYKTGKRFDKDYLMKTKVQKSEQELIKN

SEQ ID NO: 281592 - protein, 333 aa, unidentified
MLQPDKFVGIDVAKKDFYACFEENSESKKFNNTTTGINSFLRHLTKNNFQIQNTVIGLESTGSYHLRLCLQCSTIGFPIKVINPLIVKKQNQTNLRRVKNDQKDASLIRYCLTTGAGYAFTETPDTLLLKSLVRQRNSLVNIKFKNKRQQSDIAYKEDCLKIKFNSVYQELSDILSQKIKELEIQLKQYQPKTQKLLQSIPGVGPITAVSFIAEINDIKRFKQPKQLVAYIGLDSRVHQSGTSVRGKGYISKRGNKILRTRLYNATHVAVLHHNLFQNFFQKKRSEGKPYKVALVATMHKMINVIYSVWTNNKPFVDYTKMNNQSTINNSKEA

SEQ ID NO: 281593 - protein, 312 aa, unidentified
MNTQQIFVGIDVAKAWLDIHVLPGGDSRRITNTPAGHRALVRSLTARRAARVVLEASGGYERAVVAALRGAGIPVDVANPRQVREFARGRGVHAKTDAVDARILALFARQDPVHATAVPEPARDKLREYVAFRDWLGQELIALGNHLEHLQDRDLRTDLEERRHQLRAKIKKIELRLLQLVRAAPALARLYRRLCAVPGVGLITACTLIARLPELGRLSHRQIAALVGVAPFPRESGNWHGKRMISGGRAAVRKVLYMAALVATIHNQTIKARYRKLRAAGKPPKVALVACMRKLIVSLNAIIRDDAAPKTV

SEQ ID NO: 281594 - protein, 367 aa, unidentified
MQKVSTAATKQSRNISRQGLTIGLDLGDRNSWYCVLDEAGQIQLEQRVRTSAKGLQEVFGAMPRSRIALEIGMHSPWISRLLSELGHEVIVANARKVRLIGESRKKDDRLDAQTLARLARIDPELLYPVKHRSAQAQADLMMIRARAGLVRARTGLVNTARGLAKSYGERLRGCNVRDMDPEKAEGLSPELQRALEPLLSAIEELSERLVEYNDRIEALAQASYPQVELLKQIKGVGTLIALTFLLTLEDPHRFGKSRDVGGYLGLQPGRRKSGESEPQLHISKEGDPYLRTLLVQGAQHILGPFGIDCDLRRWGLKLAERGGRNAKKRAIVATARKLAVLLHHLWVSGEVYEPLHNSCRVTVAAAA

SEQ ID NO: 281595 - protein, 316 aa, unidentified
MATYIGIDISKDTFDAATSEQKQSIIFKNTAAGYKKFIAWISKLNEPHVCMEATGKYYLGLATSLHEQGISVSVVNPLRIKRYAQSGLNKVKTDSEDAKVIAQFCKTEKLVLWAPDKPVIQELQEWYKLKDLLTRQQTQLKNQLKSGLNSRVRKVQEKQIQQIEKSIKAVVAKIKECIQSDKELCQSVKLLESITSIGEKTAMDLITFIKDIKRFDKAKNLASFAGLTPQIIQSGTSVNSSRLSKMGNANLRKCLYMPAINAMAYNVPLKRFADGLRAKGVASGKIKAAVMRKLIHIVFAVLNSGKPFDPEYKMCV

SEQ ID NO: 281596 - protein, 360 aa, unidentified
MQTKVSENLFKDQPFYVGIDYHKKSWKVTILSETYEHKTMSINPDADLLVGYLHRNFPGGTYHAVYEAGFSGFGTCRKLNQLGVNCMVINPADVPTSQKEKLQKTDKADSRKLARSLRSKELRAIHIPDQKLEADRALVRQRFRVMKDLSRTKNRIKSLLYQFGIYIPDRFTTAQTRYWSGAFLGWLIELPIQQESLKRTLDNYILIGKMQRENLLMLNKQIRELSQTDDYKENYLLLLSIPGIGVITAMFILTQLGNIMRFRRLDELCDYIGLVPSMYGSGDKLQTGKMVHRGRKELKIMLIEASWEAIRNDPAMMAKFNELTRRMPKNKAIIRIARKLLNRIRRVLVTREKYELSIVK

SEQ ID NO: 281597 - protein, 325 aa, unidentified
MERTLQFVGIDISKTRMDLAIYPQDAVESVSYDESGIGQVVNRLQALQPTSIVLEATGGVERGLVRALAAAQLPVIVVNPRQVRDFAKATGQLAKTDTLDARVLARFAEAVRPARRPVPDVAMDEARALVARRRQLIDMLTAEKNRLERAVPHVRQRIQAHLTWLTAELKRVDAELDESIQRSPIWQTQQALLQSVPGVGPVMSRTLLAELPELGTVTPQQMAALVGVAPLNHDSGTLRGRRHGGGWARVCPSGTLYGGLSGHEVESGHPSVRPPPARGRQSAEGGTRRLYAQVAGHAQCHAQTPDTMESRPRALGLTRKTVAHA

SEQ ID NO: 281598 - protein, 341 aa, unidentified
MEHIAIDLGSKESQVCVRTSTGEIVEERRCSTKELGRWLSTRAPGRVIVETCTEAFRVADLAQHHGHDVRVVAATLVRALGVGQRGLKNDARDARLLSEASCRMELPSVHIPTPVSREVKALCASREALVKTRTSLVSRVRSYVRSRLGKPLRATPESLPRKVTRALLEDVDGLPAHLERVLVVLETINQQIALADKELHALAADDERTRRLMTVPGVGPVTAVRFVAAIDRVERFAHASCVASYLGLIPGERTTGFRTKRTGLTRAGAPQVRWALGQAAWSMYLRRPEDPMVQWAKRVAERRGVQVAIMALARKLSHVLYALWKHQTAYDPTRGAQRAVA

SEQ ID NO: 281599 - protein, 344 aa, unidentified
MKRYLGIDLHTNSFTCCYLHADGHETIRTWPLQGGGLEQFIQGVHAGDEVALEATGNAAYFCKTVEPFVARVVVIAPWQFEVIRRSVKKTDKHDARAIALFLSKDMLPEARIKSEAHVQLASLITTRDQLVKLRVSLLGKVHGLFVRHGLKVRREVLTSQAGFTREVAGRNWSPLECAELAVIDDQMQSLHRNIKRLEKEIAAFAKTLPGYDNLISIKGIGPLSVAVMLTHIGAIEDFKNTGKLAAYFGIVPRVSQSNETSNSGHITKRGNKLARTTLVQCTLIAIRYSPYLRGFYESLKTRRGTGKAIIATARKLLNTIFHTLKNNWVFEDFPNFKLLACNQS

SEQ ID NO: 281600 - protein, 377 aa, unidentified
MKRIKFVGLDVHAETISVAVAEQGGEIRSLGVIPNREESIRKLVKKVGPVEELRFCYEAGPTGYALYWQLTRMGAQCEVVAPTLVPVKAGDRVKTDRRDALKLARNYRAGELTAVWVPDAAHEALRDLVRAREAAKKDELRARHRLSKFLLRHGRRPPMGVKAWTMKYLEWVKREVHFEQLAQEATLLDYLHEVEHGAARIARLDGAITEAVKSAPPQMRAVIEALQALRGIAHVSAVTVVAELGELSRFSRAKQLMAYGGIVPSEDSSGERRRRGNITKTGNAHLRRVVVEAAWAYRHRPSVGATLRKRQEHVSEEVKEIAWKAQQRLHERYRKLLAKGKNKGVVVTAVGRELLGFIWAIGIQVETAQKESLQRAA

SEQ ID NO: 281601 - protein, 313 aa, unidentified
MAMEANQFIVGIDVAKAELVIHFQSSGTQTSLTNNKPEIKQWLKQQPANTALCVEATNVYHLDIVEMAHEKGFKVYVVDGFQLSNYRKGIGGRSKTDASDAALLARYLEREGRELRAWTPPPAVYGKLQSLLRRRAALVTMRASLNQSWKNESLLKTEFKSLTQHMDKLDLLVQRKLKDLLKEAGLVEQVARCQAIEGIGFLTATALVMAFMRGEFKTSDAYIAFLGMDLRIADSGEKTGLRRLTKRGCSEVRRLLHNAAMSASRSAAWKETYEHYRNKGKATTEALVILSRKLARIAFALMKTKTNYVSKTA

SEQ ID NO: 281602 - protein, 370 aa, unidentified
MKNAITYVGLDAHKKDIYVAMLLGHERVPVTWQLANEPTAVRRLVRKLERETSGPVRCCYEAGPCGYALQRQLTSERVSCQVIAPALIPRKPGDHIKTNRRDARKLAELLRAGLLTEVAPPTAADEAVRDLARARDDAREDLLRARHRLSKLLLRRGLHFAGPSRAWSQSHRRWLRSLTWDYAADRRVADDYLLAIEQLEARLAELDAALTEVAQTEPYREPVAWLRCFRGIDTLTAIIIVAELHDFGRFLSARAFMAYLGLVPSEHSSGEHARRGRITKAGNTFVRRVLIEAAWHYQHRPGVGRALRGRQEGQPARVIAIADRAQQRLCRRFRRLVAAHKPTPKVAVAVARELAGFIWAALQRPLPVAA

SEQ ID NO: 281603 - protein, 406 aa, unidentified
MSVYIGIDWSEKKHDVLFMNPAGATLAKLVIAHTPDGFAQFDQQCRRLGFPPAECQIALETAHNLLIDFLWSHDYQQVYVVPPSQVRANRGRYSASQARDDPRDALLLADILRTDRSRLQPWHPDGLLVRQLRAKISLHRHLLGQERRLANRLRAILLCYYPAAVTVFSELTAQIALQFVRSYPTPAAAQALSYADFERFAQTHSYSHPKKLPACYARLQAKQPTPAPETVLVYQAEAVQLAELLLPAGEAKRANLREVVKLFAQHPDAAIFTSLPGAGDYLAPGLLAKFGDDRQRFPNAASVQTLAGTCPVTDQSGKHRAVYFRTGCDHEFRHIAQQWALASRDESAWAASYWQEIRPHCQSDSHATRCLANRWLAVAWKLWHSHQTYDEAYHMRQRLARRQPRA

SEQ ID NO: 281604 - protein, 355 aa, unidentified
MDSVKYIGMDVHKEAISIAVLNSSGKLVMECVIETKASTILQFIQGLSGSLHVTFEEDTWATWLYDLLKPHVTKIVVCNPRRNALLKEGNKSDRIDARKLAELLYLNKLKPVYHGEHGVRALKELSRSYLTISGDLVRVMTRLKALYRSWAIPCAGKQVYAPRYRALWLGKITEAGVRRRAEFYYQQLDALSSLRQQVRRELLAESRKHKASKLLCQIPSIGPIRAALLIAIVQTPHRFRTKRQLWAYGGLGIETHSSADHRYVDGQLQPSKKQVSLRGLNRNHNHELKNIFKGAAIIAATKPGPFQEFYADLVAKGIRPEMARLTLARKIAAITLLVWKKGVCFDAKHLKPQTA

SEQ ID NO: 281605 - protein, 430 aa, unidentified
MKSNTQNAKIEAITEKTLVLGIDVGSETHYARAFDYRGIEYSKKPFKFSNTEAGFATFKEWILDLKERHEKDKVVPGMEPTGHYWFNLGKFLQDNEMKPVLVNPHHVKKSKELDDNNPTKNDRKDPKVIAGLVREGRYMIPYLPDGVYADLRTASNIRFQLQAELTRIQNRISRWFNIYFPEYKTVYGKPDAKSGMLILKAAPLPEDILTLGIDGVNQIWRDAKLRAVGKARAKTLIEAAEHSVGSKEGAVAARMEIRMLLEDYESRSIRLQEVMTLIEGLVKQIPMAEKLLEIKGVGIRTVSGFLAEVGDISRFNNPKELQKLAGLALVENSSGKHKGKTTISRRGRKRLRYLLFEVAMSLVAKNPEFRELHNYYTTRRLNPLKKMQSLMAIAAKLIRVFYAMLTKGVDYDPKKMISDIKRPTVYLQAA

SEQ ID NO: 281606 - protein, 394 aa, unidentified
MAATQLQYSDRQPALYVAFELGWSEWKLAFATAPADAPRLRTIGGRDTRAVLREIAKAKQRFGLPDEVPVYCCYEAGRDGFWLHRWLLAQGLDNIVVDSASIEVNRRQRRAKSDRLDAAKLVRMLLRYHNGEKKVWSVVHVPSAVDEDRRQLHRDLLELKAERTQHVNRIKGLLAGCGLAVALIGDDFPTMLAGLRQWDDTPVPAALQQRLLREFARHQFVDRQIKDVENERARKIRTADDAPTQKVRKLMNLRGIGANSAWLFTFEFFSWRGIRNRKQLASLAGLTPTPYASGDSSREQGISKAGNRRLRTMAVEIAWCWLHYQPQSALSQWYAKRWGSGNSRQRRIGIVALARKLLVALWQYLEKDQMPAGAERPAWKIKKLGRQRPAPAPV

SEQ ID NO: 281607 - protein, 370 aa, unidentified
MNRLFVGMDVHKEKIVVVGLPEEGNHPVMREEFGGNDLLRLVKRLQRLAKTYGIEACYEAGPCGYGLARALLRAGMECRVAAPSLIPRRPGDRIKTDGRDARELALALRANTLSFVRIPTKEEEEVRGLIRCREDIAKEVRRIKHVIAHWLLIHEHRVPKGVNGWTLAHWRWMRGLELSSLDRTVLDHYLDVLHFLVERLKQIEHQVVALADTDTYRERVTRLRAFKGFSPLAAMRVIAEVMDFRRFPKATSFMKFTGLIPSEYSSSDRIRRGRITKAGNSHLRYVLVEAVQRGPGNASPGRDLLKRMACVSGPLREVALRCLTRLHHKFWKLARRGVLGGKVKVALARELAGFVWAMMTLPETPDVTAA

SEQ ID NO: 281608 - protein, 403 aa, unidentified
MHDPTGRYGGVDWATDTHAVCIVDNNGVEVVAFDVAHTSDGLVELCHRLHDARVVRVAIERPDGPVVAALMEDGFEVVVVSSRSVKALRERYHAAGNKSDRSDAYVLADCLRTDGHRWSSLKPDTPATVTLRAHVRARKNLIETRVATCNQLRAHLRVVFPGVVGLFSDLDSAISLRFLERFPSASRAAWLSEKRLGAWLRTNGYSGRKTPAELYARLTTAPHGVIDDGGTRAAVALAYVAVLKTLRAQIDELDRRIAELLDHHPDTHIFTSLPRSGTIRAATLLAEMGDCRDRFPTPETFVSLAGAAPSTRASGRHRVVTFRRAADKKLRDALCDFAGDSWRANPWAETRYRQLRAAGKTHPHATRILARSWAHIIWRCWQDHTAYDPAKHTALQRLTPQAA

SEQ ID NO: 281609 - protein, 279 aa, unidentified
MNSIQYIGMDLHAATISAAVINDAGKLNMEATVATQASAVLDFIGGLQGTLQVAFEEGLHAAWLCDLLRPHVAQVVACDPRQLPRRKGGSKNDKIDAQQLAQWLRLGVLQPVYHSSTGLRTLRELVRSYVTMVSDTTRVMNRLKAIYRGRAIPAQGTRVYSPRFREAWLKQLREPGVHRRAELLYRQLDLLLPLRHPAKKSMIAESRKQPAQKILLSIPTLGPVRVAVLMAAMQTPHRFRTKRKLWTYVGLGLVTRSSADYRIVQGQLRPSRKPALILG

SEQ ID NO: 281610 - protein, 388 aa, unidentified
MPRPQDDLSRSLVALDQHTTLIAAIELSLASWLVGGIVPGLSREPLKKLVPDQEALLKLLHRWRDEAIEAGHKIKRIVVAFEAGRDGFWLARWLRARGIEAYVIHPSSIPVSREQRRAKTDRLDIGLLKRSLLGWLRGEKKHCTMAAIPTLEEEDAKRPNREHEHLVGRRTSVINRMKAALVRLGIRGFNPKLRKAPERLETLRTPEGCPIPPNTLAELQREMAQLRFINEQIKRIEKARLEQLEQAPQQSSNAMVLQLQRITGVGIETADMLVNEVLSRNLRDRRAVARYAGLTGSPDESGRKRREKGLAKAGNARVRRGMIQLAWRFLMFQKDSALAQWYKARTEGTKGVRRTTMIVALARKLLIELWRLVTTGKIPEGVMLRQAA

SEQ ID NO: 281611 - protein, 370 aa, unidentified
MRKNITETPKKNRSIRGQLTGSLTVGIDLGDRSSRYCILNQEGEVVTAGAVATTKKDLSRVFGALRHSRLALEVGTHSPWVSRHLQALGHEVIVANPRRTRLIAESSNKQDRLDAETLARLARIDPKMLFPIRHRSEAAQADLTMIRARAALVEVRTRLINTARGLTKSFGERLRTCDARYVDGRMAQDLLPALRAAIEPLLEQAAAVSARIQQYDERLQQMARQRYPESALLTAVGGVGVLIALTFLLTLEDPHRFAKSRDVGAYLGMKPRRRQSSGSDPALGINKEGDVYLRKLLVQGAHVILGRHGSDSDLRRFGQRLILRGGKGAKKKARVAVARKLAVLLHHLWVTGEVYEPVHHSQTAPVPAAA

SEQ ID NO: 281612 - protein, 351 aa, unidentified
MDIMGCDLHTRYQVVAWMEKETGEIRTRRLEHESEEVRTFYGGWPRGAVVGVEATFPALWFERLLSECGHELWVGDAARIRASVVRQQKTDTRDAEHLLDLLRTDRFPRVWVPSLEERDLRQLLVHRSKLVRTRTTVKNQLHALAISQGVCRKGKLWSARGRAELDRLALLPWAARRRKELLEWLQQLDGSVAELDQAVEEAAAGRAEVERLRTHPGVGPVVALAMVLTLGPVERFGNSRKVVSYLGLNPREHSSGGRQRLGAISKQGNSMMRWLLVEAAQTAARFDPELRRTYQRLKFRRVSGVAKVAVARRLAVRLYWMLRARMNYAQLVRMSGSPSSAVAPSGSGSKV

SEQ ID NO: 281613 - protein, 366 aa, unidentified
MKKPSTKTVGRMGKLQDQQLFIGLDLGDRSSFYCVLNGAGEVIVEERVATSPEAMKKTFGKMPRSRIALETGTHSPWVSRVLSDLGHEVIVAHARNVRLIGESRRKDDRLDAQALARLARIDPQLLSPIQHRSAQAQADLSVIRARYALVRARTALVNSARGLTKSFGERIRGRNPKGFRPATSEALSPQLQVALAPLLSALETITARIREYDAQIEELAEESYPDVALLKQVKGVGTLIALTYILTLEDPRRFRKSRDAGCYVGLQPGRRNSGQSQPQLHITREGDSYLRMVLVQGAQHILGPFGEDSDLRRWGLKLAERGGKSGKKRAIVAVARKLAVLLHHLWISCEAYEPLHNTRKRRLAAA

SEQ ID NO: 281614 - protein, 426 aa, unidentified
MRVMYDRVAAIDVHKDMVKVAIRVPGARRGTRKTDVLEFRTFYGVLQAMARELRGRGVTHVVMEASGVYTDPVYYALRELDFEEVMVINPAHAKALKGHKTDAKDAIRLLDLYECGLLSGSYIPDPDLREVRDLARYRMKTVQARTSEIQRLQKTLETAGIKLSSVVSDVTGGSATAMIEALISGERRGTVMAGLAQTRMRTAGKMADLSMALTGRFTDHHALMCRLHVDRIKIFDDAVKDLDAKIAPRVARYAREADLLKTLPGFGDVIVAGWLGAIGPAPHQPFATASRLASWATICPGNYMSAKKSKGGRTGDGGAYIKPLLIQAAWAAVRVPGRLQARFHRLVRKFGGPRNKGAQKRAITAIAHTLLKIAYSVLKTGQPYADLGADFYTRRESPDARQDYLMRQLQKLNPGCVIAITPTEAA

SEQ ID NO: 281615 - protein, 365 aa, unidentified
MEEKKKAVTRYVGIDLGKRTYEIAIVGKGGKVSKSNGKTFPAARQALYKKLQPTDKVALEAGNLAFTMAKEIEAAVGCKVYVLNPSNLALIYGSMKKTDKEDSLKLAHILEDFNEERLPVVPVPSDKEMRRRKMLSNYRRAQQERNSYINRLHALFVSQGITTKVRADLADSDSRKEAIKELCDIERDEAEHLVVILELCERRIEVLSKQMAEEAKGDEVIERLQSVPGVGPTVSFAFAAYVAANRFGNASQVSNYLGLVPRVYISGETVKYGSITKRGNGYLRALLVQASWSMLRSKKGGKLKELYQYMTIEKSKSKKKAIVAIARRLAELLYLLMRDEVRYVSMPFIREKEGSEIQTQLKLCA

SEQ ID NO: 281616 - protein, 374 aa, unidentified
MAEFDAYVGLDVHKDSISVAVAEAGRDGEVRHWGVVRNTPDAVTKLARRLVERHRTVEFAYEAGPCGYTLHRHLTAAGLTCRVVAPSRTPRKPGDRIKNDTRDAVTLARLLRAGELTFVRVPDEVHEAMRDLVRARQTAANDVRQARAHIQMFLLKHGIRYLGKPWGFRHRVWSADRRFPHPAQQLALQSYLNRLDQAESRKRQLEQQLAELVPAWSLAPVVTALQALKGIQLVIAATLVAEVGDFSRFTSPRQLMAFLGLVPSEHSSGRRIRPGGITKAGNVAARSLLFEAAWSYRLPAKVGQAMWLKQRGVAQAWRDISWKAKVRLSSRYRRLVGRGKRSNVAVTAVARELLGFVWAIATSSMPAPPKASPM

SEQ ID NO: 281617 - protein, 371 aa, unidentified
MQTSITYVAMDTHKKQHQVAWGHPETGAIQQFSVPNTPREIERMVKRLRKQTPGEIHVCYEAGICGFVLQRQLQRLGCVAKVIAPSLVLRKPGERIKTDRRDARKLLSQFAAGQLTAVVAPSVAQEADRELTRCRESAQMDLKRARQRLNSLLVRHGYIYTDGNLWTGKHQQWLRGLSFDQPQLRTVFEEYSSEVEHCFQRVQSLDQQVQQLAQSEPYRAAVAALRCFRGIDTLTAITLLTEIFEFGRFDSPRALMAYLGVTPSEDSSGERRRPGAITKTGNRRVRRILTETGWHYRHPPHVSKALQARRQGQPAWAVDLADRAAKRLSRRYRHLIERGKAAPVAVMAVVRELIGFLWALLRQLPGSNPAA

SEQ ID NO: 281618 - protein, 359 aa, unidentified
MRIIGCDLHARQQTLAMLESTTGEVVKATLKHEGNMVREFYDQLPRPVRVGIEATGSMHWFVNLMEELGIECLVGHPAEIRAAEARKQKHDRRDANLLQSLLVEERFPAIWLPTKEQLDLRALLRHRHQWVGLRVKIQNALQAIALANGLRRGSSLWTRAGQQAIASLPLSPHAAYRRSELQAMYVQFEREIEKLNQRVEQQAGERFGARLLMTHPGVGPITALATEVFLGDPARFAGSKELASYVGMIPGEYSSGKRQCLGGLTKQGNPLLRFLWSEAAIHAVRRDPELKQFYRRKLIQKGLGKARAAVARKLGIRMWIMLRDRIEYNEFCRRGQMQQRSGDACAGMPAARYGAKVTD

SEQ ID NO: 281619 - protein, 338 aa, unidentified
MWYSGIDLHKRTIALHTVDADGTMIRQAQIPARPEVLAAYFATLPGPHQAVVECTGMWYWVRDLLDAQGVDLRLGHAKYLKAISYAKVKTDAVDAATLAQLLRAGLIPEAHMVPAGTRETRDLLRSRLVLVTRTIRCHRSIGALLEKYNVGAPGDLPDLPRLQAALHAEQEALLKIQVRRIEHELRDRVLTTPNAQRLVWIPGIGKMVAYTLLLEIDDIRRFPTVRRFHSYCRLVPGANDSGGARRHRRSRDGNRYLKIAFHHAAVRAIQYFEEIRTEYRRLLRRKGKAIARALVAKELATIVYAVLTKEQAFNGQFRGHVLSRTKDRQWPRLANPPA

SEQ ID NO: 281620 - protein, 393 aa, unidentified
MNKIVHYIGMDVHKESIAVSIAPQNSAEIRRYGVIGGTLDAVDKLIKRLTQPDVELRFVYEAGPCGFVLCRHLRSKGIHCDLVSPSLIPRKASDRVKTDRRDADQLARLYRAGELTPIHVPDQEDEAIRDLIRARTAAVNDQRQARNRLKGFLLRQGFRYTGKSSWNDAHKRYLSGLLMPQPAQQIVFQECIHAIDDATERLERLTQAVEEALPGWKWEPVVRALMSLRGFQILNAMTIVAEVGDLSRFTDPRSLMHFLGLTPSEHTSSDKRVLGGITKCGNAHGRRVLTEAAWHYRLKPLVSEAMQKRQEHQKKEVRLIAWKAQQRLHKRFKQLAVRKKSVVAVTAIARELAGFVWAIALQVKPAPREATPEIIRTCRGKVYTLKPVKTLKK

SEQ ID NO: 281621 - protein, 411 aa, unidentified
MADDYDLYVGIDWATEAHQVCLLDATGGLLDEQPVAHTGSALAALADALTRRVPDVSRIAVAIEIPRGAVVDTLLERGLHVFVLNPKQLDRFRDRFTVAGAKDDRRDARVAADALRTDRAAFRRVHAEDPRLIQLREVSRMHEELAQEHVRLSNRLRDQLLRFYPQALEWCPAADEAWLWTLLDQAPTPAAARRLSPAALRALLRTHRIRRFTADALHTALQAAPLRVAPGTAEAASEHLALLVPRLRLVHDQHARCGRRLEALLAALAAPAPGDPREHRDVEILRSLPGVGSVVTATMLAEASQPLAARAYQTVRAQTGVAPVTRQSGKRAGVLMRYACNHRLRNAMYHWALNSLRGDAACRAHYDRLRQRHSYARALRSVADRLLRILIAMLRAGTLYDPTRHAAKIPA

SEQ ID NO: 281622 - protein, 339 aa, unidentified
MMNFSNHLLNRKSKVMKNIIIGIDISSKTLDICIKEDAASHFSIENKVPIIKRFLKKYSKGNVIIAMENTGRYNWNLCEVLEGFNFQVYIINPLHLKKSIGLTRGKNDKIDALRICNFIEKNYQEMTRWKACSQSIKKIKILLTERASRIKLKKQLTTQQHDYKLMKGISLDKQLLSLNMKLIKNIETQIKIIEDDIEDIISNDEKLNKQHKLIKSVPGVGKVLSWTLLSKTEGFTTITDPRKMACYSGVVPFDFQSGTSLKKRPGVSMLADKGLKTILHLAAMSAIRLDNDLRSYYVRKVQDGKNKMSVLNAVRNKIIHRVFAVIKNQIPYQKDLVLS

SEQ ID NO: 281623 - protein, 489 aa, unidentified
MSQGKRSVPRAASSKVKAEARPKAASCPGGAPAGALTVLNRNAAGIDVHSDMHMVCVPAERTSPEGEGASGDLPANVRKFGANSCDLAAIAAWLAACGVTTVAMEATGVYWIALFELLEARGFEVYLVEPGQLAHCGARPKTDVLDVQWIQRLHTYGLLRPSFRPANSIVALRGYHRQRQMQIRYAASHVQHMQKALEQMNVKLTEVLADITGLTGRRIIEAILAGERDPRKLAALRNVQCHNDETTIAKALEGTWRPQHLFALRQAYDLYRFHHQQIAECEQMIKTELAQLPNRAGDKPFSPKPRKGGRKQNDLTFEACGPLFKALGVDLTEIEGIDVRTALVILAELGVDVSRFPTEKHFASWLGVCPRQYESNQNKKKRGPRKGKNRIAIALRMAAQGLGKTKSPLAMYYRRIKSRIGGKGAITATAHKLACLVYRMLKYGKEYVTQSMEEYESRIKQQLERSLRRKATALGYELVAKPAPEPAPA

SEQ ID NO: 281624 - protein, 333 aa, unidentified
MLYAGIDHHTQTSHLTLIDEEGKVIKQKEIPSKRKALKEALAGYSEPIKATLEASYNWGKMYDWLDQVAEEVILAHPLKVRAIAEARIKNDRIDSWTLAHLLRADLIPEAYACSAEIRGIKRVLRQRMFLVRIQTMLKNRVQALLHQHDRERPNLTDLFGTTGRKWMSNLSLPDPDGQILSEDLVLLDVVQERIASTEGLIKKLSRGDQAVKWLRSIPGIGDFFSALIRNEVGDISRFRSPEKFVSYTGLIPSTYASGSKIYHGRITKQGNKYLRWAFIEAVTPAIRVSPELRSYYERIKGRKGTKDARVATARKLAELAWHVWTEERPYEMR

SEQ ID NO: 281625 - protein, 351 aa, unidentified
MRTSQKITGIVTTIGIDIGKNTFHLVGFDQRGAIILQQKVSRGQLERRVANIPRCLIGMEACSGSHHIGRQLAEIGHDVRLIPAQYVKPFLKGHKNDYRDAEAIAEAVQRPTMHFVTIKTPEQMDLLALHRVRSRLVGRRTGVINQIRGFLIERGITVRQGPMPLRKALPEILSSDTGALSPRMVGLIADLAQDWRRLDERIAAVSTEIEALAEQDDSCQRLMTVPGVGPIISSAVVAAIGNGTGFKQGRDFGAWLGLVPKQESTGDRTILGKISKRGNKYLRTLFVQAAHVVLERRPSAAMRGLWPWVEQASKRLHRNMLAIALANKLARIAWAVLARGGTYQPRITHAA

SEQ ID NO: 281626 - protein, 363 aa, unidentified
MKKIAYVGIDYHQSFLAVVVLPEGASQPEDKAKLENDPKKIKKYMEKLSGRFDIQTCYEASSCGYVFYRQMHAWGHVCQVIAPSKIPTKPGDHVKTDFKDAENLAYQLRNGSLSFVHVPQEEEEAVRALVRCRRALKEDSKRVKLRIFALLKTQGCHYQEGSLWTKKHEVWLNTLELPPLVDRTFYEYRTHLEYLNNRIADLDQEIQRLSETGPYVESVRALMSLRGIGTLSAMTLISEIIDFTRFPTAKALMGYLGLTPSEYSSSTSKQYGRITKAGNSACRRILVECVQHYRKKPVPTVTLRKKWKGQPAERVRVAMNCMQRLHKRYWMLEKRKPKNVALVAIAREFVGFIWSLMQKPCVV

SEQ ID NO: 281627 - protein, 387 aa, unidentified
MAQVNDLSRSLTAFDPISTLVVVVEMSKASWLVSGAVPGVERQPLKKLEPDATALLRLIERWRNEAVRAGRPISRIALAYEAGRDGFWLARWLIARGIEAHVIHSASVAVSRERKRAKTDRLDAAMLMRVFLGWLRGERGHCGMVVIPTMEEEAARRPSRERESLVNERSRITNRMKSALARLGIRGFKPHLRKAPERLAALRTAEGTGLPANVIEEFRRDMARLALVREQISSIEKTRAERLERAPDTGPHAMVRLLARVIGIGIETADMLVREVLSRKLRDRRAVARYAGLTGSPDESGLKRREKGLAKAGNARVRRGLIQLAWRFLMFQKDSALARWYRTRTEGPSGARKTTMIVALARKLLIALWRLVTTGEVPDGVKLRPAL

SEQ ID NO: 281628 - protein, 424 aa, unidentified
MENTAARKRKQVPEGYLVVGVDPHKKRHAAVAITQDFTTQAKFKFDNTREGLEIMLDRAKVEMVKSGCRGVIFAIETGGHYWRNVAYFLDKKGIPYRFINQFTLKRRREGKDLNRRKNDYRDGEVAAQLLCTGEFTESKLPQGVYAELRTAHNAYQRLVKERTRITNLVKGLLDALFPEFTRVFKDPGGLTALSVLSTCPIPRVIAGMTEDEFEATIETRHKGRRLMRKKLRALHYLAKTSIGIDAGARSVSSEIAFLVDKLQMIRRQICIMEGTLIRLVDETEEGKYLLSIRGLNYIAVAGLLAELGCFKAYRSARQMIKMAGTNPTESESAGKKKSRTPMSKQGRPVLRYCAWTSVIPMLRFNPDFRAWAKQRRERPVHANPLGGREVVGAALNRLLRLAFALVKNQSYYQDVKPVLTPIAI

SEQ ID NO: 281629 - protein, 408 aa, unidentified
MNTLYVGIDVSSKSNVIYLMLPNGDKHSNFSVANSHEGSTQLVKRILSALTSHSLDTVLIGLEATSVYGDNLVYFLREDATLAPFNRKIHVLNPKQVKKFHDTYNDLPKNDYVDSFVIADCLRFGRINKEVYMGDYRYKALQNLTRARFFAVQNLVKEKQRFMNVLFKKYSTMTQEKVFSDAFSTTALAVYDEFESAEALANMDLHELTDFIIEKGKNRFPDPDAVAKAIQKAARSSYRLPKTVNDSVNQVLSISITSMKALESQIKEFDKAIIALMELLPNVLISIPGIGPVYSAGIMAEIGDINRFDNQASLAKYAGLAWKQHQSGGFEAEVTRLIPSGNRFLKYYLCEAAFSLVRCDKEYSDFYRLKYKEVNRCQHKRALALTARKFVRLVFRLLKDNRLYCPAK

SEQ ID NO: 281630 - protein, 340 aa, unidentified
MESFAGADLHKRVTQLAVLRDGQPPSQFRFSNDPKTVDGVLKKLPRGTKIALEATGSWWWFVEKARELGHEVSLSHPKQTKAIAHARLKTDKVDAVMLARLLKADFLPTVWIPGEKERYVRELLAHRVRLVRTRTAVINELHAVYAKRNIEVPGMIWHRIRPIAWRAEELSGYAPRIVSENAELLKLINQQIQNLDKELAKAGQEDPQAKRLMSIPGVGVATAVAVSCWIGDIRRFPSAKKLVSYFGIAPKVRQSANRETHGHISKEGSGMVRWLILQAALVGIRMSKGPGRGQYLGVSRRRGKKIARIAVARKLLGTIYHMMKEEIDYEEFVRRGSNAQ

SEQ ID NO: 281631 - protein, 366 aa, unidentified
MPYFRGLDWGGTGHAVCVVDHTGAVLLSLEIRHDADGLAELRTRLAKLAPAADIPIAIERPTGLIVDALVEAGHPVVPIHPNVVKACRPRYRAAGGKSGPGDAFMIADILRTDGHRFRALRPCSDEIKALRALVRGRDDLVAERVCLANRLGEKRLKAFLASHSYPGRRSPADLLDRLRAAPTGLAGEAEAEAKGEMVRALAAVLERVVSEIAKLTARIEHAVAELADGQIVMSIPRAGRICAAQNLAELGDVRERFPTADQLAAESGASPVTHASGKSRGVVFRWACNHRLRAAIICFADNSRHSSPWAADVYKRARNRGCDHPHAVRILARAWIRVIWRAWTDGTLYDHELYHAAIEHNHALAA

SEQ ID NO: 281632 - protein, 353 aa, unidentified
MKPRMKSNTSSAVVIGVDIGKDIFHLVGFAADGKTAFRRRIRRLGLKDAFEKLSPCIVAMEACLSAHFVSRTLRALGHEPRIVPAIYVKPFVKGQKNDYNDAEAIAEAALRPNLRFVQEKSQDQLDLQACHRVRSRLVSRRTATINQIRAFLIEQGIAVRIGPRVLRKSLFAILENRKDEISPRTAKLIRGLYEDWCCLDERIETVTSEIEALSRAEAKCRQLMSVPGVGPLISTAMVAAIGSGEAFERGRDFAAWLGLVPRQYSTGGRSILGRISKRGSKYLRTLLIQAAKVLLMRPYNWARYSFGPWLNSASERLHRNKLAVALANKLARIAWSVLRHDKAFDTHLEAAAI

SEQ ID NO: 281633 - protein, 401 aa, unidentified
MQENQQHSSVDVFVGVDVGKGHHHAVALDRRGKRLYNKALPNDEAKLRALITELKTHGQLLFVVDQPATIGALPVAVARDEDVLVAYLPGLAMRRIADLHAGEAKTDARDAAIIAEAARSMPHTLRSLRLADEPLAELTMLCGFDDDLAAQITQTSNRIRGLLTQIHPALERVLGPRLDHPAVLDLLEQYPSPAELASASEKTLANRLTKLAPRMGKSLAADIVQALSEQAVIVPGTQAATIVMPRLAQQLASLRKQREEVASEVERLVHAHPLWPVLTSMPGVGVRTAARLLTEVAHKAFASAAHLAAYAGLAPVTRRSGSSIRGEHPSRRGNKVLKRALFLSAFAALRDPISRDYYARKVQQGKRHNQALIALARRRCDVLFAMLRDGTLYQPKSAPTA

SEQ ID NO: 281634 - protein, 340 aa, unidentified
MKIIGCDLHAAQQTIAMLDRETGEVVEKTLKHEAQAVREFYAALAAPVVVGLEATGSMGWFLQLLDELGITYRVGHPATIRKAETRKQKHDRRDAALLLQLLTENRFPAIWIPSTELRDLRALLLHRHHWVRLRTRVQNALHAIMLGYGVQRGHALWNRDGQAMLTALPLPPHTAHRRDELQALYRHLDEQVDRLDDRVKYVAGQRPRATELMTHPGVGHVTALATEVFLGDPSRFANGKALASYVGMIPSEYSSGRRQRLGGLSKQGNPLLRFLWGEAAMHAVRRDSELQRFYRRKLQQKGLGKARVAAARKLGIRLWIMLRDQINYDEFCRRNPRRQS

SEQ ID NO: 281635 - protein, 532 aa, unidentified
MISRALPALEGFVLVGGVAVVLFVGDDWAEDHHDVEVQDHTGRRLGKARLPEGVAGIVGFHELIAGFLGEDMAEDTDAEQVLVGIETDRGPWVAALVAAGYQVFAVNPRQVARYRERHGTSGAKSDAGDAHALADMVRTDAHQLRPIAGDSPLVEGIKVVARAHQTMIWERHRHMLRLRSSLREYFPAALEAFDDLTAADTLDLLGAAPDPQRAARLSRSRIAGALKRARRRDVEAKAERIQALLRADHLNQPPELVVAYAATTAATVAVITAFTAQISALQGQVEACFGRHPDAEIYRSQPGLGEILGARVLGEFGDDPDRYQGARARKNYAGSAPITRASGKKTVVLARFVRNQRLAGPLQWQAFCALRASPGARAYYDQIRARGAGHQAALRQLSNRLVGILHGCLKHRTCYDEHTAWGHHQNSRSTSSGLTSNVMGCLTACSTYWVVDPKGTNSTERRRDDHGRTGQTRGHRGPGAWAARRTHGHPHPSAGRPCRARPVDRPGWMNRGARRNRLCDDPRRQPPIWTQR

SEQ ID NO: 281636 - protein, 339 aa, unidentified
MLYVGIDVAKNKHDVTALNVPGKTVLKPLTFSNNKAGFELLDLSFRQLNQDCLIALKLLSDPNREQFQFLHEQGYKVYTYNPLLIKEFAKSLSLRKTKTDKKDAHGIALKLLSDPNREQFQHDNRQVELKILARHIHRLKKKQSDWKVQYTRCLDIIFPELDKIVGKHSEYTYQLLTRYPNPQKRLEAGFDKLIEIKRLTASKIQDILSVAPRSIGTTSPAREFEIIEHYKRLIDKAETCVNDLMAEFNSVITTVTGIGGRLGAVILAEIRNIHAFDNPAQLQAFAGLDSSIYQSGQIDLAGRMIKRGSPHLRWALIQAAKACPRFSPAFKAYLKTKLE

SEQ ID NO: 281637 - protein, 415 aa, unidentified
MTSSPLIAGVDVHRKTNTYCLMTQDGREVVPHFTLGNNRPGAQALIEKVRQVMEADDFTELRLAAEATGWYWFHLFETLQNDPGLQAWPHELFLINPRLTANFKKSYVDLDKSDPIDAYVIADRLRWGRDIQTPYRYDEKLLALRFLTRYRYHVVHQLASEKAYCTAILYLKASEYSNDDKQAFSNLFGAASRAVLQEFASMEEVAAMPFDELVEWLDVHGKRHFSDPAENAKRLQRIARDSYPLPEPLQPAVNLVLSLSLKNISNLEALSKRLETAIVEQMEDIPNTLTTIPGFGLVLAAGIMAEIGGVERFDCNEAKVAKFAGLKWRKSGSAEFQSEETRLTRTGNSYLRYYFCEAAFSVQRCDSEYGAYFQRKFKEVRKHQHKRATVLTARKLVRLVVRLLATNQPYQPRRP

SEQ ID NO: 281638 - protein, 418 aa, unidentified
MKSMEITAVGIDVSKSKSTVAIRRPGGVIVARPFDISHSNHDLEKLVSILKTTGGDIRVVMEHTSNYWKPIALTLKEAGFYVSVVNAMLIHDFSDNSIRKLKTDRADSLKIANYALTFWNELPPFNDEDETRLVLREQSRMYERLASTATSLRNGLIALADQTFPSIDQAFGHAIKNADGHEKWVDFFSIYWHRDCVLRLSIEKFTESYRKWCLRRNYKFRTNTAHKLYALAQDAVPTLPKNNGTKALVLQACKSLNAVCEAKQSTQEEMNRLASLLPEYEVVMQMEGTGPITGPALMAEIGDVRRFKNKKALVAFAGIDAPPFQSGNFESKSRHVSKRGSPHLRRAVFLVANIILTLSHKDNSVFCFMDKKRAEGKHYYVYTIAGSAKFLRIYYARVTEYLRTQKIPVAASCLNGNS

SEQ ID NO: 281639 - protein, 456 aa, unidentified
MPDYFFGIDASKGYSNFVMLDSLKHYVEDDFQLDDTFDGHQKLYSILSEFCVRHPKANIFSAVESTGGYENNWFDALVRFQTHLPIRTARLNPCGVYNNSKAELNRNITDKISAENVAKYMIEHPEKVQYRQQDPLAPLRKQWGFIKMLKKQKTQMLNQLESNLYTANPEILAYCKDNTPAWVLSLLQRYPTASKLAKAKKSSVALIPYVTPQKAKKLVETAKQSVASATDETTSQIIKAIVQQIRQLSKTIDAQTKAMADKCSIPEVELLKTFIGIGNDSAVGLILEIGSIERFKRAKHLASFFGLHPVYKKSGDGSWGFHMSKKGRTVPRQILYMVAMVAIQSNPLIREIYEKHTEKGMEKKAALGVCMHKIIRIIYGMLKHNQPFDPEIDKANRKKQNPQDEKKVGLDKSRRYQAYDVKAPISRRQAKKREERKQSQSVNNAKCGIKAPVPVL

SEQ ID NO: 281640 - protein, 339 aa, unidentified
MVEGTKGSHHKEGSTKMSKHSMVCAGIDTGKHKLDVALDGRSDQLAVDNTADGHKTLSAWLRQHQVKRVGIEASGGYEQAVVLQLRQDGFVVIVFQPAQVRAYAMFHLQLAKNDKIDAALIATCAAATRKIHAPPDPRLAPYAEHLTLIDQITEDIALIKTRRASCRNARIRSLWKDEITRLKRLQNAELKALVKAIRQHPDLAKRLDLIESVDGVGLPTAVAILVRMPEIGRVTRQEVAALAGLAPYDNDSCSQIGARHIKGGRKRIRGRLYSAALPASFRWNAQLIALYQRLIAKGKSHKTALIACARKLLIFVNAVIARGEPWTEKPIRPAHIGAM

SEQ ID NO: 281641 - protein, 343 aa, unidentified
MKLSRVGIDLAKNVYQLHGVDRHGKTVWTRRLKRHQWFRVLLDTVGPECEIGMEACAGAHHWGRELQSRGYTVKLIPPQFVKPYVKSNKSDARDAEAICEAMSRPNMRFVTVKRVEQQDIQATHRIRAELMTQRTAKANQIRGLVAEYGLVAPKHLSSLRVAIPCWLEDAENGLTGDFRALLQGVWADLLLLDDRVGEMDQTIKRLADNNEDCVRLQQLRGVGPMTSTAMIATVGDARQYQKSRQMAAAIGITPRQHSSGDRDRLLGISKRGDVYLRTLMIHGARAVVAGAKHRDDRLSRWVTNIANKKHPNVAAVALANKTARMAWAMLRHETDYDPDFAIR

SEQ ID NO: 281642 - protein, 319 aa, unidentified
MNKSTLFFGIDISKDCFDVYGDLLGHKSYPNTKEGFKSFLKVLNTASYCVMEATGCYHHRLSMFLYEKGIALSVVNPVIIKRFIQMKLKRVKTDKSDAFMIYNYACEQALEQWQPEATYIVRSKELLSLMQTYSRQSTALKNKLHALENRGHSKSVLITSIKRQLRHLKKERLLLEDELETLIKSNEPTLFSRLTSIPGIGKKTALLMMVSTSNFKAFDSYKQVSSFLGLAPSERSSGSSIRGRSRISKTGDGLLRNHLFMCSFTACVHNPQCKALFDRIVAKGKSKKLALIAVCNKLIKQAFAIAKSGLPYDPNYALN

SEQ ID NO: 281643 - protein, 355 aa, unidentified
MDSKKYIGMDVHKESISIAVINSAGKLVIECVIETKASTILQFIQGLSGSLHVTFEEGTWAAWLYDLLKPHVTRLVVCDPRKNASMKQGNKSDKIDARRLAELLRLNHLNPVYHGEHGLRTLKELVRSYLTITKDLGRVMTRVKALYRSWAIPCTGKQVYAPQHRAEWLAKITEPGVRRRAEFYYQQLDALRSLRREVRRELLEESKKHQAWKRLCQIPSIGPIRAAVLLGILQTPHRFRTKRQLWTFGGLGIETYSSADHRYIEGQLQRSKKPALIRGLNENCNHDLKNLFKGAAIIASTKPGPFQEFYAALLDKGMRAEMARLTLARKIATIVLIVWKKGVCFDAQHLKPQTA

SEQ ID NO: 281644 - protein, 366 aa, unidentified
MTASEKKTRIVRSSAPRSSALRLDTGEVAHVGVDVHKASYHVAVVTNLRGPVATWTQPASPDLLIERLKPLCTQVAQVVSEAGPTGFSLVRRLRAAGFCAEVIAPSKTPTMPGPEAKSDRLDCGRLAVFAQKGLLRPVRVPDEPEEADRQVVRLREQLARKLRVIQQQIKALLLQHGIAEPAGLTHWTAASVNALRKLPRGAELRFCLDVMLDERQHAVEQVARATRRLEELARTDRHREAVATLRTVPGVGPITAMTFRVELHEPGRFRDGGQVARMIGLAPQVLQSGPTRREGRLLKSGNARLRTVLVEAAWRWVADDEAAKAKYRRLVASTGSGKKAIVGMARRLAVLLWRLSLSGEPYRAAA

SEQ ID NO: 281645 - protein, 391 aa, unidentified
MIYVGIDVSKDKHDCYIVNSDGVVLADVFSVENNLDGFDLLLQRLKSVAPDLLNVKVGLEATGHYSYNILGFLLDKGLATFVLNPLHTNLFRKSTSLRRTKTDRVDARTIAAMMSSGIVLKSYTAISYHNEELKSLSRYRFDKVRQRAKLKQAVSRLVTILFPELEKLVPSLHIASVYALLAELPGAKQVASCQLTHLTNLLSAASKGHYDRSKAVELRNAARRSIGSAMPAKSLELQHTIRLIRELDAEISEIEAAIKQIMDQIASPILTIPGISYRMGAMILAEIGDFARFDSPDKILAYAGLSPSTYQSGKLDNAYAHMEKRGSRYLRYALYNAAKYVCHWDASFCAYLAKKRAEGKHYNVALSHAAKKLVRLIFALQRSGQPYCPTA

SEQ ID NO: 281646 - protein, 461 aa, unidentified
MGALTVKRKKSKLGPKVPKLEALEQINFNAAGLDIGDEEIYAAVPEGRGEVSVRVFRTFTVDLYALADWLENCGVDTVAMESTGVYWIPIYDILETRGFEVYLVNARHIKNVSGRKTDILDCQWIQQLHTYGLLQASFRPAEEIRALRALVRHRENLIKSMTREIQHMQKALQQMNVKLTNVISDVTGVTGMLIIRDIVAGERDPRKLAQHRNEHCAKSEDEIAKSLQGHYKPEHVFELKQALAGYDFYQRQIKECDTEIKRRYTDLAPGNDGDAGSLPPPKRKRSKTSKNAPDFDLRLHLYRWAGVDLTQIDGPDVLTVQKVLTEIGVDMSPWPTVKHFTSWLGLCPHNDKTGGKVIKRSTKKTQNRAAAALRMAAQSLVHSKSALGNYHRRMRAKLGKPEAVTASAHKLARIIYAMLKNQTEYVDPGPDYYDEQARQRALLRLKRSAKTLGFEIVPSAP

SEQ ID NO: 281647 - protein, 411 aa, unidentified
MPKIVYPICCGIDVHKSFVVACIAMTNENLVTTYSNPKRFSTFTGDLRRLAEWLSQNNCRDVCMESTGKYWIPVWNILEPTCNLVLAHPKYTKAIKGKKTDKRDAKWIADVFKHDIVNGSFIPPADIRQLRDLVRYHFKLTGYTTGEKNRAQNCLTVSNIKLDDVFSNVFGKSASAITERLLESNEPFDVEPYVSKKCKTPISEIQAAVDGTMCANQAEKLRIIRSHMDSLERCKANLESEILSLAEKFLPQIDLVSTVPGIGAFSAVAIIGEISTDMSVFETSRHLCSWAGLTPQNDNSAGKKKTTRISRAGVYIKPLLVQCALAATKSNKHPEVRTRYNAIKKRRGHKKAIIAIARMLLTAIFNILKKNEPYNAELYRQADKLPVQREVSIEQAIFILQRQGYLVSAST

SEQ ID NO: 281648 - protein, 345 aa, unidentified
MEIHTIGIDLGKTVFHLVGVNPRGEVVVRKKCSRNQILRFTANLHVSLIGMEACGGAHFLGRALREQGHDVRLMPAQYVKPYVKTNKNDFIDAEACAEAVGRPRMRFVPIKTDDQLDLQSLHRVRERWIGRRTAVINQIRGLLLERGITIRKGRCYIEESLPGILEDSENKLSGALRVLLTQLQLEMQYLCRQVEESDKLILRIAGEHEACRRLVAIPGIGPITATATIAAIGNGAAFKKGRGFAAWLGVVPGEHSTGGKQTLTGTSRRGNKYLRKLFVQGAHSVLLQKTKQDAGLSTWLAQLTSRKRIQVATVTPANRTARMAGEELYKGDAKRPPMLPATARA

SEQ ID NO: 281649 - protein, 334 aa, unidentified
MLYAAIDIHKSVLQVALLEPATGEVSDARMPATREALRGWALPLRGSVVAVALEATSGWRWVWRELSVLGFEVQLAEPAQARALRGRKRKAKNDRLDARWLALLLAKQMLPQSWIPPEEIQRLRDLTRLRQALRHDRTRWLQRLHAVLAHEGWPCGRGELTSASGQRWLAGLKLDPHVRALVDAQLAMVRASAEQINAIDVELRRLARSDRRLLALQTLPGVGPVLACHLLAELGEARRFRRARQLVRAAGLDPVVHDSAETKRRGKLSKQGSPQLRWALVQAAHGAARRAGSDEQRRQRALTPRIGSQRAALTNARAIARHAYHVLAAAETAA

SEQ ID NO: 281650 - protein, 352 aa, unidentified
MTVTTLARSITGGIDTHLDVHVAAALDDRGTLLGVESFATTEGGYKKLLGWLSDFGPVELVGVEGTGSYGAGLTRHLQAERIRVVEVDRPNRQRRRRKGKSDPQDAISAARAALSGDACGEAKTRDGNVESMRVLRVARASARKGRTQALNQMRNLVSTAPDPIRAELRGLSVFNLLERASAYRPGAKRDVVSLTKLSLRMLARRAITLEEEISEIDAILKPLVRETAPKLVATLGIGTDAASALLVAAGDNPGRLRNEAAFAHLCGASPLDASSGKNERHRLNRSGDRQANSALWHIVLTRMVYDPRTTEYIHRRRTEGLTKKEAVRCLKRYVAREVFSLLPHDKLGLDSP

SEQ ID NO: 281651 - protein, 430 aa, unidentified
MNSNTQNKKIEAITEKTLVVGIDVGSETHYARAFDHRGIEYSKKPFKFSNDEAGFASFKAWILEYKEAHDKDKVVPGMEPTGHYWFNLGKFLQDNDMKPVLVNPHHVKKSKELDDNSQTKNDRKDPKVIAGLVREGRYMIPYLPDGVYADLRTASNMRFQIQSELTRILNRISRWFNIYFPEYKTVYGNLDAVSGMLVLKTAPLPKDILTLGVDGIDKIWRDAKLRAVGKKRAQTLMNAAEHSVGSKEGAIAARVEIRMLIEDYESRNARLQEVMALIEELVKKIPMTEKLLAIKGVGIKTVSGFLAEVGDISRFKSPKELQKLAGLALVENSSGKHKGETTISRRGRKRLRYLLFEVAMSLVSKNREFAEVHNYYTTRKQNPLKKMQSLMVVAAKLIRVFYAMLTKGVDYDPKKMLEDIRRPLISLKAA

SEQ ID NO: 281652 - protein, 360 aa, unidentified
MAKARTLVGLDVHATKIVAAVLDAETGEVQWFTLSGDVVQAAGLCAGLPRPVRATYEAGPTGYGLARELERRGVQCVVAAPSKIPRASGDRVKTDRHDAEHLVRLLLAGKLQAVRVPGPEEEALRDLVRAREAVRGDLMRARHRLSKLLLRHGVRFDDGPAWTQRHRAWLAEVQLGWPAAQATLLDTHGAIDALVHRRDQLEREITRLLPGSPWQVQVGRLRCLRGVDTLTAVGLCAEIGDFERFAKAEQLFHYLGLVPCENTTGQQRRLGSITKTGSGHARRLLVEAAWHYRPRPRIGKALAERQDGQPAEAVAVAWSAQQRLHRTWTRLEARAKRRTIIAVAAARELSGFCWAIARIE

SEQ ID NO: 281653 - protein, 358 aa, unidentified
MVQRKELNFEGQNIYIGIDVHLKTWHVSILTESGCLKKHSQQSSAQALFEHLKKHYPNGNYLSAYEAGFSGFSTYYSLLDFGIECLPVHAADIPTGQYESVMKTDAIDSTKIARALKSGLLRGIYIPKKEVLDDRNVMRLRITLKRQLSGYKSRVKHLLYNNGVIYPECFQNSKSHWSKRYLKWVHEDVQLLSESRNSLDLLLRQVELFRKSLLEITRLVRTLSRNGRYGEAYENIVSIPGIGMITGMCLLTEIGDIHRFRNERQFASYLGLVPTSHSSGEKTSHGEMTFRGNKRLGPLLVESALVAIRQDRALAAAYGEYCKRMLPQEAIIRITRKLSNRKLIILKSGKKYEHDRCY

SEQ ID NO: 281654 - protein, 345 aa, unidentified
MKKRIEAVTVYGIDIGKNTFHVVGLDSTGKPMLHSKFKRDRLLAHFANTPAALIGMESCPGSQWLARKLQASGHTVKIIPAQFVKPYVKSNKNDMVDAAAIAEAVTRPTMRFTQIRQPEQSARQALHRVRDRYMSQRTGLINQMRGFLLEFGIAIRQGAGVFRLDIPRVLGDEDNELPPSMRTLLGDLWNDFKLLENRIEELSKQIQRSVQYSDTARRLMTVPGIGPLAASALEASAGNGHQFVNGRFFAAWLGLTPREYSTGGKTTLLGISKRGNTYLRRILIHGARSCVQTCDRQRHPLGAWITKLEQRMHRNKVIVALANKIARVAWKILTKPEEIYRWADA

SEQ ID NO: 281655 - protein, 365 aa, unidentified
MLHRLNSAVTLIQRTTTEAPRQHMYYIGLDVHKKTISYCVKDVSGRIQQEGKVGSTRRELDCWMKTLPQPWSVGMEATMFSGWIYDHLLPHATQIKVAHPLMLRAIAAAKKKNDQIDASKIADCLRCDFLPESHMMPREIRDRRRTLRYRHLLVRQMVQMKNRVSGLLMETGVEYNKRRLHKVSYFRELLSANEEVHPSIRPLLKLSRETIERCQKTEYVLVSSLQRDPVLADRIRRLRTIPGVGPITALTWALEIGDISRFRTIKNAISYCGLCGDERSSADKAMRMPLSKQRNKHIQRTLVEAAKLAPRQSHELAVIYEREKQKGNGNRATLAVARKMVAYLLAVDREQRDFIPAEERRTAAA

SEQ ID NO: 281656 - protein, 332 aa, unidentified
MFQVHAVDAEDRVIVRRQVRRPQLVKFFAGLPPCLIGMEACAIAHYWARELIALGHEVRLMPPAYVKPYVKRQKNDAADAEAICEAAGRPTMRFVAPKSEQTQAAAVVFRARDLLVKQRTQIINALRGHLAEFGIVAAKGPARVPQLMRAVEGPDEPIPELARPILQMLIETLHGLDEQIARLDHEIAQRARENEAARRLMTIPGVGPVTAVALAALAPPAETFKRGRDFAAWVGLTPLQRSTGGKQKLGATTKMGERTLRRLLIIGANSVLLQVARHGAPAGSWIARMVARKPPMLVRVALANKMARIVWALLREGRSIGLQPRRRKPSRM

SEQ ID NO: 281657 - protein, 341 aa, unidentified
MKKNLFFIGLDIAEADFAASIYQTPDQPIVTKEVIPNNPEGFDLLLLWLKEHHIDKINSRICMEATGVYSQAIAYYLLFAGFPVSIEPPLKVKRAFDPVGHKTDPVDSKQIAEYAYRFQDELTSWRPRDEILEKIRQLLSIREQFTKQKVALKNAIQAYAKQRVQVALIKKAHQETLAQIEKQIARIDKELSKLIKQDPEIFQKANNLDSIPGYGMLLAAHLLVITENFTKIQQHKRLAAFIGIVPYQHQSGTSVFRRPRIRHFGPKSSRKLLRLAAQSVATHDVTFRRYYLRKLAQGKDKALVLNNIANKLLKVACAMIRNNTRYIKEHRSIHPMYLKSA

SEQ ID NO: 281658 - protein, 323 aa, unidentified
MPDVTTSPASAGIDVSKRTLDVAVTGSAERFTAPNDAAGHTLIAERLQGLGVQRVGLEASGHYEAAVTQHLRQHGFVVLVLDPGQVHGWRRFQKRRAKTDPIDAVLIAEATAAIDVPRPAPDPRLAPLAEHLTLIEQLAEDIARLKTRLERYSEAASLRFLKAEIQRLTRCRARQLARLIGRLRAAPDLARRLDVLLSIPGVGDITAATFVVRMPELGRLSRAEAAALVGVAPFNADSGEHAGQRHIAGGRSRLRRAVFLAAFAAAQHWNPTLQATYKRLREAGKHHTVATVACTRKLVAIANALIARNATWQPEPPARRVIA

SEQ ID NO: 281659 - protein, 355 aa, unidentified
MKNQAIQYLALDVHQATIVASVRGETGAVRMRATVPTEARAVVGLIKGLGPRVHVVFEEGAQAQWLHDLLTPHAERVVVCNTRGKSETKIKNDRLDADDLSERLRLGTLKTVYHGSPGLATLKELVRCYMNLVDDSTRVMLRLKAIYRGRAISTSGEAVYRPSQRKLWLAKLNTAGARARAASLLTQLDVLLELRQKCRTAMIAEACRQPGWKILRSVPFFGPVRVAIILAVIATPFRFRGKRQLWPYVGLGVITRTSSEKEFVDGKLRRKKRAPLTRGLNRNHNRQLKNVFKGAATAAAAKPGPLKDIYDRCVAGGVPREMAKLTLARKLASVALRLWKKGELWDPDKLTMQAT

SEQ ID NO: 281660 - protein, 348 aa, unidentified
MRFYTGQHQHYCGIDLHARTLYLCILNAEGNVLLHKNLPCDRTRFLEAIEPYRENLVVASECIFNWYWLADLCAEHDIPFVLGHALYMRAIHGGKAKNDRIDALKTASLLRGGLLPMAYVYPAQMRSTRDLLRRRTHFVRKRGELMAHIQNTFHQYNLPRPPGRLVYKYQRAPIPDAFDDPMLKKSVETDLALCDTYDELIRDLEKTVVRQARVHDPQTLLRLNTVPGIGEILSLTLLYEIHDIGRFASVQRFASYARLVKCEKSSAGKRIGTSGHKIGSVHLKWAFSEAAVSVIRHLPQSTRLHDRLKRKYGKGKALSIFAHKLGRTVYFMLKRNQAFDADRFLANA

SEQ ID NO: 281661 - protein, 384 aa, unidentified
MNRIVKIGMDVHSANYTLCAMEPVLDGEDRIFANIKVTPDYKNVIQFISKLKNKLGASDAYSIECGYEAGCLGYSLYHQLTDAGVKCTILAPTTMLTPQGKRIKTDKRDALMIAQCLSYGGYHAVHVPDEKDDAIKEYLRMRDDHKLVLKKIKQQINAFCLRHGHFYDGNKWTIKHREWLKTLKLSDLYRETLDEYMVTCEEQESKIERLDSRIEELAFDSAYKEKVKKLGCFLGIKTHTALSLIVETGDFKRFAKGNTYAAFLGLAPGESSSGDNVNRTGISKAGNSHLRTLLIEGARGICKGKIGHKSKDLRLRQAGNSAEVIAYADKANVRLRSRYYKFMRREKKKNVAVAAVARELACFIWGMMTDNISIVPERGKQNVA

SEQ ID NO: 281662 - protein, 292 aa, unidentified
MNYSHFVGLDVGKKTFDASLMSADEKELSHKSFDNTPTGIQSLLDWIAGYHLSLSKLLFCAENMGSYVTELSVSSVSMGFSLALVCPLTIKKSIGLQRGKNDRIDAKRIANYAVLHYRKLELYKLPDKDLVRLRGWIIIRDNLVKQKVSSIKLLETFSQMAKLADVTDSISFLEEQLKSIKERILEVEEDMEQLIAASCSLCTNYLLLRSIKGVGIINAIVLLCVTNNFQRFDNPRKFACYCGVAPFEHTSGISIRGKTQTSSLANKEVKVYLTRMEIPDRKSTRLNSSHRT

SEQ ID NO: 281663 - protein, 349 aa, unidentified
MRIIGCDFHPSYQQIALLDSVTGEIVEKALSHERKEEVRAFYAGLEGPTRVGIEASGQSQWFEQMLAELGHEVWIGDAAKIRASCERKQKTDRRDAELLLRLLAEDRFPRIWVPTAAERDNRQLLLHRHKLVRMRTQVKNQLQAQALNQGVQRKRKLWSEAGRKQLESLPLLPWASRRRAELLQLLDQLEASISELDRAVAEQASALPAARRLMTHPGVGPVTALAFTLTMGPAERFQRGKQVASYLGLIPSEYSSGGRQQRLGHISKQGNPFLRGLLVEAAHSAVRCEPEMRRAYQRLAQRKCRAMAKVAMARKLAVRLYWMLRLQVNYAQLIQGSHAGQPGTFCGRG

SEQ ID NO: 281664 - protein, 413 aa, unidentified
MSDEVRWFVGFDWASEQHHVCLLDTEGKPVAERVIRHDGAGLLELCAWLVETTGAQPQAIAVAIETPRGPIVEALLERGFEVFSINPKQLDRFRDRFSVAGAKDDSRDAHVLGHSLRTDRHAFRRLAADDPRVIELREWSRMHDELQQERNRLTNRLREQLWRYYPQALELTNDLAADWFLDVWDRVPTPAKAARVSEQAITRILKAHRVRRLDAAEALRILRQKPLWVAPGTTEAASAHIRAVAARLRLINQQIKDTERRLDELCTALEAPGQVCEQRDVAILRSCPGLGRINIATLLAEAWPPLRQRDYHVLRTLSGVAPVTRRSGKTKIVIRRYACNDRLANTVFHWARVAIQHDPYSRDRYAALRRRGHSHARALRSVGDRLLYVLCTLLEHQTLFDPAYKASRLAAAA

SEQ ID NO: 281665 - protein, 352 aa, unidentified
MMIIGCDFHPSFQVIVFVDTETGEEQTRRLNHPVEATEFYRSLAGQVVRIGMEATGSFRWFQRLVAELGFELWIGHPSEIRATMPRNQRTDKRDAEGILRLLLEDRFPAVWVPPAEEEGLRTLLTHRCRLVRLRTRVNNQLDGMAKNEGLLGVRVGTSRGRQRLQQVELAGWQEQRRADLLALLDDLDARIAPLDKAVAQAAQAREDARCLMTHPGVGPIVALAFLTAVGHWERFKRGRNVASYFGLIPSEESSGKNRRLGHVSKQGNSMVRWLLVQAATIAQSKDAAWHRQYARLSMTKHHGVAKLAIAHKLAVRMYGMLRSGQNYLQIMERGSHARQSECPTGRETMPKL

SEQ ID NO: 281666 - protein, 379 aa, unidentified
MKKPCIAIDVSKGESHVEAYLGLNNLFIKATKIKHDVEGFNYILDVVKKNEEKASEKPVVLFEATGVYHRTLEFFVTEHKLEFFVINPLHSAKFRKRELRSVKTDKRDCSNLARMYYNGLLKESYKEEEIYNELRQLNRYYETQVSHLVKCKVSFNEKLDIVFPGYNELFSKLYSDISLLIIKKYHHPKNIVSKEIYDIAKYLEDKTIHTKIYCMNLAEKLINFSKQCCPGCDKKSVDVDILLGLINELEYYQDLCEKTLNRIINLAKNLSYFNILHSIPGIGENLAARLIAEIGDITRFENTKQLTAYAGIDPIIYQSGQMSGEHLKMSKKGNKRLRRLLYLAITCMLRNKSDNNSIRDFYKKMRLELLNFSKFSNLL

SEQ ID NO: 281667 - protein, 353 aa, unidentified
MKHYIGSDAHKKYSIFVTVNEKGQASSPERVPHEKDLYRKYLATLPSESPIALESVGNWYWMIEAMERAGHQPILVNPRKAKLLLGNYNKTDKLDAKGLAMLNLNGSLPAVWIPPAELRDQRELSRMRMSMVAVRTKFKNRIQSTLAKYAISFDEEVSDVFGKKGRLLIEKMIQELPPETRHSVEEQLILLDQVSAQIEEIEKHIRQVVEVTPMMQLIKSLPGVGDILAIVIALEIGSVERFGSGEHLASYSGTVPRVNSSGGKTYYGRVKPDVNHYLKWAFIEAASCIGLQQKRMEGRHVVDLLKRVQKQKGYAKAAVAVGRHLAEATYHMLKRNEPYHEPNLKKAVSSSQG

SEQ ID NO: 281668 - protein, 349 aa, unidentified
MEHIAIDLGGRESQICVRNDKGEILEEKRHLTSRLGPYLAKREPGARVLLESSAEAFAVADLARHHGHQPHVVPASLVRALGVGDRGLKNDKRDARKLSEMDCRMEVPSIHIPSAASRDRQARVTARQALVGVRTKLVNTVRSFFRTMAQPPVKATPNTLAKNVREQLLKSPEGVPDYIEMLLATLETLNGQIDRADEALKELAREDPVCKLLQTMPGIGPVTSICFASAIDEVGRFESASKLTSYLGLTPGEDTTGFKTKRTSMTKAGSGRTRWTLNQAAWTLVRTRPDDPLVQWFQSVAGRRGRKIAICALGRKMAGVLYAMWRDQQPYNPKHEAKKAMTAPKLLTA

SEQ ID NO: 281669 - protein, 331 aa, unidentified
MKNVDDSVGIDVSKQTIDVYVHNLKIHQVFANKKSGFVEMEKWLRKQGLSPSNVLYCFENTGWYSITLSFYLHNLGRKYVCENALEIKRSIGLKREKSDKADASNIAHYAWLRREELACSVPPSKKLIELQRMMSLREQLSKQIVSLKNVRHGMLPVTSSPSTDRTIAILDQSLASLVKQIKKIEKEMEVLIDGEVKMKRNYELILSVRGVGKVLATQLILHTHNFTCFENARQFSAYCGLAPYPFQSGTSIKGRPRVHSIGDKKMKSLINTCAVSAVQHDKELRAYYLRRIEEGKPKMLVLNIIRNKIISRAFATIKRGTPFVEINQFAA

SEQ ID NO: 281670 - protein, 430 aa, unidentified
MDQVNRNRLEEFRQLRKEVRHSEEYLIVGIDIAKDRHYAFFGTATGKTLLKRIVFSNDHEGFRKLLDQAEALRVWHGLKKVVYGMEPTANYHKPLGEYLINLGRTVVLVSGVTVARNRESLDGRWDKHDGKDSANVADLISQGKCLYYEHPSAELRGLRGLLSLKKRLKKQEHGYRVRIRNHLLAQYFPEMDRDYERLGAEGLSIVRWCLPASQIAQLDIDPFIERVTSRRIRMEKRRRLEEVWEKAGESIGCEEVPGVNHEAKIMVEGLKQIREMIKETEDQIKELCEQFPEYHYILTIPGFGPDVSAKVLGAVGDPDRFQNGKQVLKMGGLDLSADRSGKNSDKAIPEISKRGKADLRYALYQAALVASLQNRDVMIYYTNKIRGREREKGIHIKMRVKLAAKLLVIAWTLMKKKEPFNPACLSAELN

SEQ ID NO: 281671 - protein, 361 aa, unidentified
MRFYLCTHRFYCGIDLHARTMHACIIDDNGEVVVDRSLGTDPKAFLKLIAPYRDGIIVGVESIFCWYWLGDLCREENIPFVLGHALYMKLIHGGKSKNDRIDAAKIARLLRGGTFPLAYAYPKGMRETRDLLRRRMFLVRQRSGLLTHIQIVNSQYNLPAIDKELCWQSNRAGVAERFGDPSVRQNVAVDLRLINQLSQLIVELEQYLIRTARVEDQQTYERLQTISGVGRILALVLLYETHDWSRFATVGQFLSYARLVRCSHESDGKKVGSGNSKIGNAHLKWAFAEAACLMLRVSERARRWKQRYQQKRGAGKAMSVLAAKLGRAVYHMLRKEEAFDEDRFWNGGSKSKNPVSAAVPS

SEQ ID NO: 281672 - protein, 415 aa, unidentified
MSLKIVYKICCGIDVHKTFVVACIASTNDKGITSYESHRFSTYTSGLKTLLQWLLNRNCKDVCMESTGKYWIPVYNILENDCSIVLAHPKYVKAIRGKKTDKKDAKWIADLFKHDLVAGSFMPPADIRQLRDLMRYRFKLTCFQSSEKNRLQNCLTVSNIQLGNVVSDTFGKSAQAILDKLLENPADTSFDLEPLVYKSLKKKLPELRDAIDGYINPEQAGKLKVIKSHYENLESRKAELEELILALAAPYQQELAILQTAPGIRSDFTAIGIISEIGTNMEAFPSAKHLCSWAGLTPTNNESAGKKKSVRVSKAGCYIKPLLVQCANAVVTSKKHPEIRNRYLRLKKRRGHKKAIIAIARMLLTALYHMLKNGENYNAELYRKSYLPPVDREITVEQAIIIARNQGYKIKSATA

SEQ ID NO: 281673 - protein, 409 aa, unidentified
MMVHASLVSSMTVVIAVDVGKNEFAVSVTDATRNRLLGPVTGCPMTASSLRDVTARITGLLPDQAEVRVGIEAAGHYHQPLLAPSAWPDGWQVLELNPGHVTEQRKVMGRRTIKTDAVDLEAMTELLLAGRGLPVTHREAVLVEIAAWAAHRNRRVQIRTATKNQLLGQLDRTFPGLTRALPDVLGTKVGRLVAAEFADPTRLVALGSSRFVRFGATRGLQIRQPVADRLVAAARDALPMPDAVVARMVLAADLALLVDLDTQIATAAAELARLLPASPYAVLLTVPGWGPVRVGNYAAAVGDPGRWPGAKQLYRAAGLNPIQYESAGKRRDSSISREGSVELRRALIDLGMGLWLNDPAAKAYAAGLRARGKKGGVIACAMAHRANKIAYALVRDQADYDPARWSHLA

SEQ ID NO: 281674 - protein, 358 aa, unidentified
MNRKAGMSAGQVIGTVDGQQVFGLDIAKSVFQVHTVDMGSGEIVNQQLKRAKVLTYFANRTPCLIGIEACGGAHHWARKLTAQGHSVRLIHAKAVRPFVGGNKTDAADARAIWLAIQQPGTKFVGMKTLEQQATLVLHRQRELLMKMKAMQSNALRGLLYEFGATFARGKNALFAEIETALEALVGDIPQYVADSLREQVKRVKDLAKDILAIEGRLAQRLRDDKDMQRVAQMPGVGLLTATAAIATMGQASAFKSGREFCAWLGLVPRQSGTGGKVKLLEISKRGDTYLRTLLIHGARSVLTHTKEPGPWLEQLKARRPANVVIVAQAAKMARAIWAVTAKQQDYQRGYCSVKLKAA

SEQ ID NO: 281675 - protein, 417 aa, unidentified
MKCFVGLDVSSTKLDVCIMLSDTTTPFTASLPNDLTGAQEIKKQILELNDTYSFERIVIGMEATSLYSFHPAMFFHEDSDLKALKVEVMVEQPNKIKKYREAFEESKNDTIDAFYIADYFRIERFSPAFLKEEKYLALQHLTRTRLQLIEQLTKTKQHFIENIYYKCNTLSTEIKNENLSTNLWSSTIISLMTEDYTLDELATVPLKDLADFIQKLGRGRFKAPEKLAKAIQAAIRGSYRLPKLQQDSVNVILGLLAREIRNLEQMIKDIDKAIEDMVEVIPEYQCLTSVPGVGKVYAAGIIAEIGQIERFKDHPQVAKYAGLNWKQYQSGNTNSQNTELVKRGNRYLRYYLVEAANSVRRHDSEYQTFYMKKYQEVPKHQHKRAIVLTARKFVRLVDALLRNRQLYTPPRRLMEDR

SEQ ID NO: 281676 - protein, 321 aa, unidentified
MTHVVGIDVSKAKLDVALRRPDGKLRSKVVENSPSGFVALTAWLGTHGVTQVHACLEATGTYWEAVAEYLVDAGHTVSVVNPAQIKAFGGAGLVRTKTDRVDAKLIAAFCVAQQPPPWQAPPPAVRALRALVARRDALDAMRTQERNRLGVAADTVRPGIEAHLTYLEQALADIEAAIRQKIDDDPGLGTQRALLDSIPGLGDKTIPTLLAYYGGPLRFDTAKQAVAFAGLDPRQHQSGSSVRGKPRLSKVGHSRLRKALYMPAMVATTRTAWGRALKVRLAAAGKPPMLILGAMMRKLVHVAYGVLRSGRPFDPALHQMA

SEQ ID NO: 281677 - protein, 352 aa, unidentified
MLRPLLFDLAKDVFELAFADANHRVVERKRLTRNAFARVLENREPLHVVVEACGSAHYWGRRFERLGHRVTLLPAHQVRPYVLRRKTDRTDADGLLEAMRCSQNRAVPIKTPEQQGVQGLHRIREHHKAQRTAAINLIRGLLREFGITIPAGADKVRPAVLTALEDGENELPMALRDGLAEMLDQVTHAEAAMTAIEAHLNDFLRRDARSQRLQQAGGVGLITATAMSASIGDLNRFASGRHLSSALGLTPREHSSGNQRRLGRITKRGDVYLRTLLIHGARSMLVAATAARKKGASLDRTQQWALDLADRPGHNKAAVALANKTARRLWAAEHHGSRFDPNHQSSRVVTTH

SEQ ID NO: 281678 - protein, 350 aa, unidentified
MQVAIVGLDIAKYVFQLHGTDRDGRVVLRRRLRRQEVLPFFANLTPCLVGLEACGGAHYWARRLSAAGHTVRLIAPQFVKPFVKSNKNDANDAEAICEALGRPNMRFVPGKSVEQQDIQLLHRVRSRLVSCRTQLANQVRGLLMEYGIILPRQIGQLRHGLPEILEDESNELTSLSRRLLVSLYHELVDLDSKIEQMEKELRVLYAASETCQRIAAVEGIGLLSATALIAALSDGRVFQNGRQFAAWLGLVPRQHSSGGKARLFGISKRGDPYLRTLLIHGARSVVYRACRKKDVRSVWIADKQRRLGTSKACVAVANKNARIVWSLIARGQHYRVPGVVSSCDLETRAN

SEQ ID NO: 281679 - protein, 448 aa, unidentified
MPKSKIRYVGLDVHKDSISIAFADKGNSDACFIGKIPSDWASLHKKLLKIGDGFSLRICYEAGPTGYQLYRRLQQEAYDCIVIAPSKMPRKPGDRVKTDRRDAIQLALNHRSGYHTPVTVPDPETEALRDLERCRENAKKQEIAVKNQLNKFLLRYNIIYNNGSSWTQKHFIWLRQLKFELESQQIAFLDCLEAVESANARVDRLTAEIERMLPKSSLAPLATALKALRGIQTVSAAVIVAEIGDLRRFPTADQLMAYVGLCPSQNSSGARVRTGSITKTGNQRVRRILVEAAWHYRTNSIVSKVHRTRLDTVSPGVRKIALSALRRLHLKYNHLTRDRNKNSCVATVAIARELVGFIWAIGHEQHLLANQAAQPPEEKDNEPQRALKKPVSVSKSDARTTLPVKSPSIKKGIKPPLEDSQAEMKSRIRKEQSGRDDRQKSKRLQTQT

SEQ ID NO: 281680 - protein, 352 aa, unidentified
MTMTTMPPAITGGVDTHLDVHVAAALGPTGALLGVESFDTTPAGYARLHDWLCSFGELERVGVEGTGSYGAGLTRHLHAEGVKVIEVDRPNRQKRRRRGKSDTQDAISAARAAQSGDSSGEAKTRDGNVESMRVLRVARSSARKARTQCLNQMRSIISTAPEPIRAELRHLNVHRLIERASAYRPGHKRDVTSLTKVSLRMLARRAAALEAEIGEIDAILGQLVNETAPELIARPGIGVDSASTLLVAAGDNPERLRSEATFAHLCGASPLDASSGKQEHHRLNRGGDRQANSALWRIVITRMVYDQRTRDYIDRRTKDGLTKKEAFRCLKRYIAREVYNALPRPELALDGP

SEQ ID NO: 281681 - protein, 383 aa, unidentified
MPRYWGLDLHAQYVHVCEWRPETQKEKHSRFPNTPDGWARFLQRLSPDDRVALEVTGNAFEVYDWLSPHVAQVLLANPVELRRLGSGRHTDRVDAARLAKMLAVGTLPTVWVPPQPVHELRRLLRYRERLLNVATRWRNQIRAVLRRYGEQPPRGVDLGAFLTPERLGAFASGDRAIVVSALRQLQCTQEECTAIEAEIAEHLARTPEAQVLLTMTGVGPITAAAIWAALGDPRRFRTPKQVARYAGLDPSAYQSGETYFHGKISKNGNPLLRTYLIEAAHILARFDNGPLGQFYHRKRRQLGHKRAVVALARKLLIVAWRMLLTGESYRYQRPKTVQNKMSQLRGLRRHQRNWEDVMVTVLAKPQERARQSRMKGYQTEVPA

SEQ ID NO: 281682 - protein, 355 aa, unidentified
MNEAKYIGMDVHQATISVAVRDSRGNLVMEAILETKAETILQFLRGLRGSLYVAFEEGTWAAWLHDLLQPHVARVLASDPRKNALLKAGNKSDRMDARKLSELLYLNKLSPVYHGEQGIRTLKELARSYITITRDLTRVMSRLKAIYRGWGIPCAGQQVYASRYRAEWLAKILEAGVRRRAELYYQQFDVLVALRQGTRRELLAEARKHPAMRLLRQIPAIGPIRAALLIALIQTPNRFRTKRQLWAYCGLALRTYTSGEYRFVGGQLKRSKKVLAVRGLNINHNHDLKNIFKGAATRAAATTGPLQDFYQACVARGVKPHLARLTLARKIASITLLVWKKGVRFDAEHLKQQAA

SEQ ID NO: 281683 - protein, 324 aa, unidentified
MMYFLGCDVAKSKLDVSLVNEQGVEQWVDKVPNEASKLAESLLAVTGHYGAGTLTCVVEATGCYHHALLDACEAVSIPCRVYNPILTKQGIKSSVRGKKTDKTDALLIARLGLRGEGRIHTPEPYRTTRYAARAQQRLGELSGAVKRYQTHVESVLGDELTTAAQELLAAIQTQFAAARKQFVTDTSASAPEGLVRRLQTIPGIGPYVAASLIGEVQTMDRFRTAKAFIAYAGLDPKIRQSGHSLNSTGRLTKRGSSYLRRSLFIAASSARRYDPYFKALYDKKRAEGKTYKIAVCVVARKMATVVRAVWLSEEDYDVTRWTEE

SEQ ID NO: 281684 - protein, 391 aa, unidentified
MVCVGIDVAKDKHDCCILDSEGTPLVDCFTIPNNMDGFKSLLQTIQDCSQKSDKIKVGLEATGHYSYNILGFLLDNDLPVYVMNPLHTNLYRKSLSLRKTKTDRVDAKTIATMLLSDVDLKSYTDTAYHNEELKSLTRYRFDKVQERAKLKQSVSSLVTILFPELEQLVSSIHGTSIYALLSEYPGAKQISEAHLTRLANILVKTSRGHYRKDKATHIRDAARTSIGSVMPAKSLELKHTIKLIQELTSEINEIEDAIRKIMDELKPPILSIPGTGFHSAAMILAEVGDFSNFNSPDKVLAYAGCSPSTYQSGKLTNCYAHMEKRGSRYLRYALYTATKYVCYWNPVFTEYLTKKQAEGKHYNVALSHATKKLVRLIYALQKSGKAYLAVT

SEQ ID NO: 281685 - protein, 343 aa, unidentified
MRIVEVTGGVDTHADTYVAAAVDHNGGLLGVESFPASEAGYEDLLVWLVGFGELVRVGVEGTGSWGVGLSRFLTDHDVTVVEVDRPNRQTRRKQGKSDSTDAVSAARAVLSGTATVTPKSRNGPAEQIGVLLVARRSAREQRIQSLNQLRHLVFTAPEEIRVRFKDRPKTGLITEAANMRPRKGSDPIMYRTNLVIKSLARRIKSLDAEMRTIDQTLRSLIEETAPTMLELYGVGVDTAATLLATAGDNPDRLKSERSWAHLCGVTPLPASSGKVTRHRLNRGGDRQANAALYRIVLTRMSSHEETRRYVTKRRTDGLSTPEIMRCLKRYVARQTFKQLPHMI

SEQ ID NO: 281686 - protein, 344 aa, unidentified
MRKYFVGLDVHWSHTNACILDARGKKVKQLRVRGPWTMVADELAKLKGRLFVCYEASCGYGQIYDLLLRVAQRVVVAHPGQLRLIFRAKRKNDRVDAEKLAKLLFLDEVPAVYVPSQDVRAWRQLLQHRVRLVDKRTRAKNACRALLRSVGILSPGRFGLWTKNGMQWLRSLELPNTLFALQRDMLVTEIEMFNKQIKLAEKELKRYSTRNPAVQLLMTIPGVGLRTAEAVVAYLDDPARFHNIKAVGAYLGLVPCQDQSAKTNRLGHITREGPALVRRMLCEASWQAVRRSPTTRRYFERIQRGRKDRKKIAIVATAHYLARVMLSMLQSGEAWRETELRRAA

SEQ ID NO: 281687 - protein, 449 aa, unidentified
MREPQEIEDEEHEQVLERVAAVDVAKASGMVCMRVPHPCRAGKRLSRVWEVGATTGAIIGLGEQLVAQGIERVTVESTSDYWRGFYYLLEAAGLSVQLVNARDVKNVPGRPKTDRLDAVWLAKLTERGMLRPSFVPPAEIRQLRDYTRLRVDLTHERTRYWQRLEKLLEDALIKVSSVASTLETASTRDMLGALIAGERDPKVLAGLARGKMKAKHAALVEALTGRFDAHHAELARMLLDQIDALSAQIGTLTTRIQQLLQAIPAAQGVDADGTTGPGAGSGPGAAVLPAAVRLDEVTGIGPGAAQVILAEVGLDMGVFPSPAQLVSWARLCPRTIQSGAKHHAGKAGKGNPYLRGVLGEAAAAAAKTDTFLGERYRRLVKRRGKLKALVAVARSILVIVWHLLADPAARYHDLGAGYWADRIDKGKKARNHIRQLEALGFTVTLAPAA

SEQ ID NO: 281688 - protein, 348 aa, unidentified
MKNKSFVGIDISKNVIDVSIFREDTNIKMFPHEVFNNTRKGFGDMCSWLKKSRVVLSQALFGMEFTGCYSLDLEKFLTSKNYSFCMLSTRIVKHHPMGTIDKRDKNDSAKIADFLYRYDGTECAKPYKLPSKAMQQLKQLVNERKFLVEQRTNFMNRMQMFETKEDSAMYESYIKKLNHDIEKIDQEECELMSKEKDVFDTFQNLLTIPGIGFVNATNIIAITRNFTAFDTARQYARYVGVAPCSHTSGTSVKWRARPSAHCNGQVKADLSMAALRAVEYDVEMQMFYNRKLGGRKDSDTKRKALNAVKFKLIRRMFAIGKQKRKWEVLNTSDGRKNLHIEKSKASEL

SEQ ID NO: 281689 - protein, 355 aa, unidentified
MKRDHFVGVDVHSQFCEIAVLTAAGQLVRRDRCATTIVALREVLEAVPRPRHVVIEEGPLAGWLWRNLRSVADALVVSEPRRNRLIAQEGDKDDDLDAEKLAQLMRGGYVKEVHQSETAERAVFKQLVALYHHRVRQRVREAHRMTSLLRQHGVVVRERDYLAAADRPTLLTRVPKEGLIRSLVTDLWTSYDATVVAEAAWRRRLVAAAKEEEVVGRLQALPGVGWIRAATLYAYLDTPWRFVRKAALWKYLGIGLERKRSGNGPEHLGVPKRAHRLLKGTILGAALSAIAQGENPFAEQYRRWLNEGLPPKLARRNVARSLAATLWGLWKNGTAYDPAWVGVAAAALRDRSVIA

SEQ ID NO: 281690 - protein, 317 aa, unidentified
MDIKVAVGIDVSKDTLDLNTLPEGNPRQFGNDEKGIAELLTYLEQQNAQGAIDRIVLEATGGYETRVSVALAGAGLPVVVVNPKQVRDFAKACGILAKTDRLDAWVLARFAQQIRPAVRPLPDEAQREFADLLDRRSQLVVMRAQEKARVATAPPVALKSLKEHIAWLDARIKSLDIDMTHTLRTSEVWKNKVDLLDSMPGVGKVSVFTLMGRLPELGKLNRQQIAALVGVAPFNDDSGKRRGQRYIRGGRSEVRNVLYMAAITAIRHNPAIRSFYERLTAAGKPFKVAITACMRKLLTVLNAMVKTGQTWQNRMPT

SEQ ID NO: 281691 - protein, 326 aa, unidentified
MTNADELIFVGIDVSKATLEVALDDSAKTRTLGNDEAGLKALVGELSAMRPRVAVVLLEATGGLERAAATALCASGFAVMVVNPRQAHDFAKALGYLAKTDSTDARALSHFARTLYHSDRRERLLHRLPTPEQELLLAMVTRRSQLVGMRVAESNRLSGAHPSQRKSIQAMLKQLDRQIGQIDDDADRHLKHHFKDKLDLLKGLKGVGPGTQTMLMAALPELGRLGQREIAKLVGVAPLNCDSGKFKGKRTTWGGRANVRSALYMAALSAVRYDPCLKAFYERLLQAGKPKKVALTACMHKLLTIINAVIRSGKPWQAGYPQVAGA

SEQ ID NO: 281692 - protein, 411 aa, unidentified
MELVHPRCAGIDISKKDAKVCVRVAGAGRRKTVETVTTWGSMTNRVLALRDHLIAEQVTCAVMEATGDYWKPFYYLLEDAGFELLLVNARHVKNLPGRKSDVSDAAWLAQLGAHGLVRGSFVPPEPIRQLRDLTRTRTSITRERSREIQRLEKLLEDAGIKLSSVASDLTGVSGRAMLEGLIAGQRDPGQLADLAKRRLRSKIPALTEALTGRFTEHHAFLTRTHLNLIDQHTQAIAELTARIEVVIEPFQGFRELICTIPGISIGIADVIIAETGADMSRFPTAGHLASWAGTTPGSNESAGRVKSTRTRPGNPYLQGALGTAAMAITRSNDTYFAAKYRRIAARRGPVRAIVAVQHAMLIAIWNMGTTGTLYDDPGADFFTRLHPERAKTRALEQLRSLGYQVTLGRTG

SEQ ID NO: 281693 - protein, 317 aa, unidentified
MSSPQTFVGIDVAKVHLDIALRPAGTRWTVANDDAGIADLVTQLQGVCPTLIVLEATGGLQRTVVAALTAAALPVVVINPRQARDFAKATGQLAKTDALDARALAHFAEAIRPEPRPVPDAQTEELRALLARRRQLVAMRTAEQNRLGSAPRRLQADIEAHIAWLNTRLAALDDALDTTLRASPVWRAREDLLRSVPGIGPVCARTLVLDLPELGTLSRQHLAALVGLAPFHRDSGTLRGARTIWGGRAQVRTALYMSTLVAVRYNPVLKAFYQRLRAAGKLAKVALIACMRKLLTILNAMVKHQTPWQPQEEFIAA

SEQ ID NO: 281694 - protein, 336 aa, unidentified
MEAMREVLGIDVSKSKLDIELLRNGKVKTKVLQNTPAGHKSLLEWIDKSKASRSLLHVCMEATGVYHEALALTLYDAGIKVSIVNPACIKGFGHGENIRNKNDEIDAGLIARYCLAMNPELWTPPPLEQRQLRGWTLRVQALKDIRQQEENRLEAHTIGGMDDVAMNVKTHITWLDIEIKKLEKEIDDHIDRHPGLKNDAQLIASIPGLGTTTIARVLGHIGDIRRFKNAKAFAAFLGVTPKQRTSGSSVRGRTVMSKTGSSSLRAALFMPSMVARRHNPILRQFADRLLATGMVKKAVIGAVTHKLAHLIYGVIRTGKPFDPNFSSNRLAIQDGI

SEQ ID NO: 281695 - protein, 334 aa, unidentified
MNNVTTVGIDLAKNVFAVHGVDALGRVVLRRTVRREKLLELIAQLPSCLIGMEACSGAHEWARQFAKLGHTVRLMAPKFVAPYRKSGKNDDNDAAAICEAVARPNMRFVPLKTLEQQAVLAQHRIRQGFIEERTASLNRIRGVLAEFGQVLPQRSSELRRGLAGCLEQLPTRVAAALSDLLAHVRSLDERIGAYDRELKQHAHSEPNARRIQQLAGIGPITASAVVASVGDAQEFRNGRQFAAWLGLTPRQYSSGGKTRLGHITRRGDAYLRTLLIMGARAVLQSATQHTDRLARWALALKARRGYHRTCVAIAAKNARILWVLLARGERLRMT

SEQ ID NO: 281696 - protein, 366 aa, unidentified
MQKSSTTRRTASKIFKGRQLTIGMDLGDRWSFYCVLDESGKVILEEKLPTTPEAMKQTFVKIPRSRIAIETGTHSPWVSRLLTQLGHEVIVAHAQKVDLITKSTRKDDRHDAKTLARLARIDPELLSPVQHRSAQAQLHLTEIRARAGLVSARTALINAARGLVKSYGERLRKCGSFQVSREITSGLSAQLREALHPLLQEVESLNERIQEYDRRIEKMAKERYPEVGLLKQVKGVGDVIATTYVLTIEDPHRFRKSRDAGCFVGLQPGRRNSGESEPQMHISKQGDEYLRMLLVQGAHYILGPFGEDSDLRRWGRKLAERGGKNAKKRAVVAVARKLAVLLHRLWVSGEVYEPLRNSHKAMSAAA

SEQ ID NO: 281697 - protein, 345 aa, unidentified
MPIASIGIDLGKTSFHLVALGERNKVLLRKKFSRPQLLAYTANLPALLVGLEACAGAHFLGTALREQGHQVRLIPAQFVKPYRKSNKNDFIDAEAIAEAVTKQNMRFAQLKTQEQLDWQAMHRVRDRLMRRRTALINEIRGFLLERGITFAAQPIHLRKNLPTVIEDAEQNLSPRLRWLLDCMWQEWKQTETEIQQITDEIERMSNEDARCRQLRQIPGFGPLVSTATVAAIGNGSAFRRGRDFAAWVGVVPRQYSTGGKQKLYGISKRGNVYLRRMLIHGARSVLFRVKYDTGGFGQWVRRLAQRAAHNKVVVAIANKLARIAWAVLSSGQDYRHPPLQQRAAA

SEQ ID NO: 281698 - protein, 345 aa, unidentified
MKHYVGLDVSLKFTHVCVMNQDQKVVAQAKVETDFEAIALYLHDLKLTYHRVGLETGTTAQWLYAGLARAGLPVFCLDARKVKSFLKLETTNKNDRNDAKGIARMMVFGTPHVVHVKSEHAQRMRALLAARKTVQSKMIDMELFVRGNIRQFGLKLGVVTRPKWEERVRELIAEDEFLSALLEPVLLCWRTMRAQLAVLQKQILRITRDDPTCRLLMTCPGVGPVVSLSFKSAIDIPERFTSSQSVGAALGLTPKQNQSGEINVNGRISKAGDEALRSLLVEAAMTVLRGPRNSWLRAWGLQVAKRRGMQRAAVAVARKLAVVLHRMWMDNTEFRWARDQEMVAA

SEQ ID NO: 281699 - protein, 397 aa, unidentified
MIAVGIDISKAKSTVAVIDSDGTVLASPFTMAHTQPEMEAFVTYLKGLGEPTTILMEYTGHYHYPVLKKLQDEGFPVCIVNPYQMKKYGDVEIHKAKTDKKDALRIAAYALEKSYKLVPYSSMEQKYEDLKFLSRQYSQRITYVAKLKVQLIALLDQTMPGITRILPLNSRNPEKCALLLFIKRFKSFDEIQRIGKARFLASYDVLAKKASERSASSKGLSIYELAVDSITTRGEGPYIWLSQNQCVDLLSATQNAADEIISQMRNIAETIPEYKVLRAMHGVGDRLGPIILAEIGDVHRFHSGKALNSYAGNDAPPYQSGQFESRNRHISKRGSSTLRKACYEVMQALKLTKPQDDPVYLFMLKKEQEGKPFNVAKMAGVNKFLRIYYARAMELYK

SEQ ID NO: 281700 - protein, 413 aa, unidentified
MKVFCGIDWAEDHHDIALVDPGGHLLARRRISDDAAGLAALAGLLAEHGDGAEDPIPVAIETPRGLLTACLRATGRKVYPINPMAVARYRDRHSVAGRKSDHGDAVVLASILRTDAHAHRPLPADSELAQAIAVLARAQQDAVWARTAAHNKLRSHLREYYPGFLAAFADARGGITRPETRAILAAAPTPAAAATLTTSQLQALLKRAGRKRGITAEAARLRQAFRVSQMRQPPLVEQAMGRQALALLGQLDAACTAAADLEQAVIDSFNQHPDAGIITSFPGLGPLTGARVLAETGDDRSRFADAKGLKAYAGAAPITRASGKTTAVLHRRVKNNRLADAGYTWAFAALTASPGARAHYDRRRHAGDRHAAAQRNLFNRLLGCLHHCLATGQHYNENTAFPPPAPTAHAKAA

SEQ ID NO: 281701 - protein, 450 aa, unidentified
MAQRSGLTRGDRRRNDRIEGLRRVVTPDRAILAIDLGEDKQVAALLDHDGRVLGRRVARDKAHALGGLVRWAAEQACRHGFVGVVVGCEPTGHRWRSVMQLADAAGLGFVCVQSLRVHLAREADDYTRDKTDHKDAVLIGKLIARLDCYLPERAEEDWARLRHLGQRRFRLVGEMVACRNQIDDLLSCCWPAALECAVKPFDSTTWLACLAVTVDRCNGNPAKLRRLGRDRFSAAVRRELPRFGAQRVCHKVADRFFAALTDGRGVTAQRRGALERVGMLIDDWRSAIARLGEVEARMLAVLDGLGLTTLVTSVPGVSAVGAAVILAETGDLSRFATARSVVKHAGLNPAENTSANFRGQTRVSHRGRPALRAAAWRAAWGALPHNPVLGARFTHLTTRERDRLAPGQARVACAATLLRWLYAIVTRRESWNPDRAAGIRAGQAGEPVAA

SEQ ID NO: 281702 - protein, 351 aa, unidentified
MTVYVGMDVHRKRSQIAVLDAAGDEQRNRNVPNDPVKLVPILGVLPPGTPVAFEAAYGWGWLVELLEELELEPHLVHPSRCKAIASARLKNDKVDARTLAQLLRADLLPEAWVAPPEIRDLRALLRHRASLVRLATGLKNRVHAVLADRGITPPSSLWATPGRAWLAALELPPTPRAIIQDCCGVLDTLATPIARLEGEIAALAKPDPRVQALMALPGVGKLTAMTLLAEIGDIGRFPTARKLCAWAGLTPQVRNSDRKVRHGHITKQGSPWVRWILQEAAQTAKRSPLFADTYGQLARRRGTNIATVAVARRLLARSFHILTRLEAAPAPEKTRPGALASLHEPATRPLS

SEQ ID NO: 281703 - protein, 405 aa, unidentified
MFMTPQACLEAGTEYPRYKLFVGFDVGKRFHAAHARTGSGRRVLALRVDNDEAAVDAFVARALEAAGCEPGACLVVVDQRRNIGTVVVRRALAAGCDVAYITGKREKKARELFPGVAKNDAKDAEVIAAAAAGMPQSLLPVPREDDGLEGARRLRSQLAFSVKQSTQVKNRIRAALVESNAAFERLVDFSRPWQLDVLERLGGPWQVLDAGKGRLARVARGAGEEELAGLWESLSRATRPTEEQVRSEARTIPMLARRLRAIEADVDELSDLVAKEVEGDETYRCLLTVPGVGRSTAAQLVAAVQVGAFAGNDKLASYCGLTPRDTRSGATISSTSPSPEGNRCLKNLLIFTCLSLVRSDNEFGRYYRACRSRGMRHTAALKATARKRLKVIYAVMRDVRPYEPR

SEQ ID NO: 281704 - protein, 386 aa, unidentified
MTVQAQYLNFNPRQFDIFAGLDVDKRRMTTTFSNHQGTLFQSQSFPYSSQQLLNYVRKHFPDQRVAFVYEAGPTGFGLYDDLVANHHTCLVVAPSMVPTAPGQRVKTNRLDSKKLSIGLRGGQLSGIHVPNQAYRELRHLVQLRDTQVGQLRATKCRIKSLLLYEGIPFPDDTGRWSGSVLRELETLPCNPTVRFKLDQLIDALGFHFQSAAKVQKQMRQFCNQDPELRQCISLLMSLPGIGAITATHALARLGDWREIKNVRQIAGFLGLVSSEHSTGDKQNRGSITRSGDSHLRNKLIQCAWTAIRKDPELREFYRSVYQRQPKKIAPRKAIVAVARKLTTRMYAVLKQQRPYVIRENSSIAPLTIEETTGPRERLDAAQSGQP

SEQ ID NO: 281705 - protein, 298 aa, unidentified
MRFYTTQHQYYCGIDLHARSMYVCIQDQSGKILLHRNYRAGPDALLGAIDQYREDLVVAVECVFTWYWIADLCSREGIAFVLGHALYMKAIHGGKTKNDKIDSNKIAALLRSGMLPMAYVYPQGMRSTRDLLRRRLYLAGQHAELQAHIQNTNTQYNLPYFEKRIDRNSNRAGIAMRFTDPAVRTSVEVDGALMDALHQQILAIERQINAQVPEHDPVALHLLRSIPGVGKTLALVILYEIHDISRFPAVGNFISYARLVKCTHESGGQAQDRPKQQDRQCPPEMGLQRGSLPVSPEK

SEQ ID NO: 281706 - protein, 355 aa, unidentified
MKRFHFIGIDMHSQFCQIAVMNSAGKVVQQERCDTTIPALMAVLDQVPRPCSVVFEEGPMAGWLWRNLRGRVDDVAVAEPRRNRLISHEGDADDDIDAEKLALLHRGGMIKLVHQVESLEQAVFKQLVSVYHYRVRQRVREAHRITHLLRQHGVVVREKGYATGEDRKKLLARLPANNILRQMVRSLWLSYDALVKRERQCRRRLARAAQQIEVVRRFEELPGFGWIRSATLYAYMDTPWRFHSKEAMWKYLGIGLERKHSGKGPVYLGVPKITHRLLKCTILGAAKSAAAKKDNPFADLYRRWLQNGLSRQLARRNVARRLSATMTGMWKNGTAYRPELVVVATTATTAAKGSR

SEQ ID NO: 281707 - protein, 398 aa, unidentified
MTRKNTLTSLDSHRQYAVIGLDLAKYDVSVAAIPMDNLSPTLVERMVYSDLMELASIVSPTLFVMEPCNGYSLLCLELQALGHETKVISGKAVSMWINTHMSGQKTDINDALALARLAFDCDLQPIREKTLEESRMMTLQATRRQLLTQRTKTLVCFKGLCQQWGIRLKAGRRSLKKMRLAVEAKTALLSESVVHALIQLLERIRDLDHQIAELDKALEAILMQDERGQLLDKVFGIGPQIATRFITVVGDIRRFPSPRSLVAYIGCAPRNIITGHRNLPKIKKNGAPDLSHKGQGKISRHGDKYLRSLLIQGAASIYMQYSKGQLKDCALKDWIKKQIDSRKPYGKILVSLAAKLIRIMWAVLTYKEKFDIDKAGVSRSVLASMEKKRLTDEAVESA

SEQ ID NO: 281708 - protein, 313 aa, unidentified
MTNVSKVYIGVDVSKNKLDIYIHPLGKFFKIANTEEEITKLIKELAKYDVAQVACEATGGYEKMLSQILKNNLYNIWIVDPRRIKGFIIASGCKTKTDKIDAQKIAEFATKNSRGYETFYKTKNEDKLLALVNRKGDLTKFLAAEKTRLKHPSHTLYLASINKLIKTLESEIKIIDKQIQNLIQQDDDLNTKSKFLESIPGIGKASAATLLSFVPELGKLSNRKISALVGVCPYDNESGKYKGKKYIRGGRITPRNTLYMCALTTIKYNLIFKNFYDRLIANKKPFKVAIVAVMHKLIILANSLLKKGELCKV

SEQ ID NO: 281709 - protein, 400 aa, unidentified
MSGLKGNVNSYVGIDVSKDKFDACGITGEEAKLFQFSATMDRKGFEKLKGHLGTISVSSVLIGMESTASYHVNLFSYLVSEGYRVILINPLLISNYVKMQLRKTKTDKKDAVVIAQFLLANGDTLIQRATPSLISDLRDLSRQRESLVDEMTSLKIEIKQLLNITFPELEHMVGIFTKSIIKLLQQYPSAFALRDADLNQLSQMLIADSYGHKREAFAAALIKAAHSSIGTKSPAKEMILKQKIALLLHLEEALQEITAMLIEMARKLMGEDINIMTSIKGIGDKTAANFLVEMGGDINQFERSGKIIAMAGLDPAVYQSGKHEGKGRITKRGNRHLRRIIWMMTTRVIQYSDVFKVYYLKRRKEGLPYKKAVLATAHKLIRVIYAMLTQRTTFCPQGNS

SEQ ID NO: 281710 - protein, 309 aa, unidentified
MTIHEDYIGCDVSKDHLDLFDPKSSRHWQIDNRAKAIHTALQKFKHRSVFFVFEATGSYDQALRYALASLQIPSVRLNPLAVKRFREALGKRAKTDLLDACLLSRFGQALAPQADPDISPQLEEICAFNQLRDQLVEARSKEKTRLKEACYPDIVSLHEEMIALLNDKIKAVEKKIEALVRADDQLKKTSDLLQTAPGVGPVAATTLISLLPELGTVNEKTIASLVGLAPFNHDSGKLKGKRAISGGRNRVRKALYMATLSIVQRKSRYQDLYQQFLERGKAKKVALVAVMRKMLTHLNAMIRDQKEWA

SEQ ID NO: 281711 - protein, 424 aa, unidentified
MKHRGWPSKEGVLTERYRFFVGIDWAWDEHTICVLGSDGEVIDQRTIPHSGAGLAQLADLLVKVSSGNPSSVAIAIEMPRGAIVEYLLERGFAVYSLNPKQMDRFRDRHTVPGAKDDSRDAFVMADALRTDLHLFHKARLDHPDILRIRELSRSEEDVQQDQLRAGNQLRNLLNRYYPQMLQLCPAVDQAWFWDLLEMAPLPAGGAKLSKSRIEKLLRSYRIRRFDADEIHQTLSVPALQLAPGAAEAASEHVLLILPVLRLLDRQRAEIARRIQLLLEKMSEDEQVVEHRDVKILLSLPGVGRVISATMLAEASQPLAERDYHAIRSYAGAAPITRQSGKRKIVVMRRGCNSRLRNALYHWSRVSTQNDPRSKEHYAALRAKGHSHGRALRGVADRLLAVLMAMLRNGTPYDPNHQAAAMPST

SEQ ID NO: 281712 - protein, 396 aa, unidentified
MYYLGVDIGKNKHVASMIDEEGKSVFKAFSFTNTTEGGESLLAKMSSCAVAPCDVEVGLEATGHYWLAIYSYLHDRGYKIHVINPIQTDGWRKGVEIRRRKTDTIDSVLIAELVRYGGFIESGLPDEHLISLKNLTRFRSYLVDSIADLKRKVICVLDQVFPEYEDVFADVFGKTSKEILLHFSTPAELEDISPDDLANMLATLSRRRHGKFTAQKLSDAAAKSFGVTFCRDSFSFQLRMLIEQMKYIESQVKDTEAEIETIMDEIDSPITSIPGIGKITGAVILGEIGNIERFDSPIKLVAFAGIDATVRQSGEFDGSSNRMSKRGSPYLRRALYQSSIVASIGRNPDPILHAFYNKKRSQGKHHGTCIGAVCRKLCYIIYTILKENRPFELRNS

SEQ ID NO: 281713 - protein, 467 aa, unidentified
MPFFIGLDWASQEHTVCVIDDTARVGWQGRVTHSADGLADLLRRLARFGPPATLPVAIERPSGLVVDTLLEAGHPVVPIHPNALKATRPRYAAAGSKSDPGDAFILADLLRTDGPRFRPLQPLADETHALRALVRSRDDLVTQRVALANQLRALLERLWPGAAAIFADVDSPIALAFLSRYPTPQSAERLGEKRLARFLAQHGYCGRRAAIELLARLRAAPVSRAGEAEAEAGGEGVRALVAVLVPLGTQIQQLSAAIAAVLAQHADGPIVQSLPRSGAVNAAQILAELGDDRTRFPSDEQLAAEAGVAPVTRASGKHRAVSFRWACNKRLRQALTTFADNSRHASPWAATLYAAARQRGCDHPHAIRVLARAWVRVLWRCWQDRRPYDVTLHRAAQRLFDGWPGPIVACAPIVAPVRTMVRSVLAVGADVTNSRRAGSAARGHLSLVKTAPAATMTMSSIVTPAQT

SEQ ID NO: 281714 - protein, 356 aa, unidentified
MATYYIGADVHSNNIEIAIQSRKKIVKRYTVPAGISAVVQVLDSLPGKKHMAIEEGPMAGWLYRNLHQKVERFVVADPRRNKLISSDGDHDDRIDSVKLAMLLAGGYLREVYHSDSDQRAELKHWVSLYHDRVRDAVRNINKIRARCRMYGITIPRKVLRQPEHRDTWLSKLKRPALAKQLLMLWIGYDATAKQARMAKQQLINLSKKYPIIRLWKKLAGIGVIRTVTIFAYLDTPWRFKKKNKLWKYCGIGLQRTASGTDKNGKPKPARLQLPWAANRILKNAILGAALTAINQKQNTFKDDYERMVQNGIIPGNARHTVARKLLTVMWGMWKRSCQFDQANATLSEPVEECVCV

SEQ ID NO: 281715 - protein, 375 aa, unidentified
MDQFIKYVGLDTHKDTIAVAIADAAGGKPRFYGEIANTPAALSKLMKDLSPNGEVVSYCYEAGPCGYGIYRQISDLGHDCSVVAPSLIPTKPGDRVKTDRRDSENLARLHRAGELTPVWVPDQEQEAIRDLTRAREDMKHLERQARQRLCAFLLRHGQRYVSGKSKWTQAYWRWLERIKFGHRVQQTVFQEYIDSVKQQQQRVADLEQAMHEALADWTLAPVVEGLMALRGCRLITAMTVVAELGDITRFESPRQLMSYLGLVPSESSSGPKTRRGGITKTGNGHVRRVLVEAAWCYRFPARKTAPLQRRAEQTSAEVQAIAWKAQKRLCGRYQALSKRGLLPQKTCTAIARELTGFIWAIACEVMPKNVAKANA

SEQ ID NO: 281716 - protein, 375 aa, unidentified
MLSKRINQNEKSLRALFSAFSAHDHKVLVVVDQPNNIGRLTVAVAQELGIDVRYLPGLAMRQLSRIHAGNAKTDIRDAYIIAHAAKNLPESLRSVDRVEEAFLQLKVLNGIDEDLARSYTRLINQIRSALVGCYPQFEQALRGQIIHRKWVLHLLARYGGPTKIKRLGKAKATAFARRYKARNPEPVLDAIFAAISEQTVAIAGAHYAEMGVAMSAKDALLKLEHRTQIEQEVIELINDIPHTQILLSMPGIGPKTAAQILMTAGDMTDFPTAGHLASYAGLSPRTNQSGTSIMSNSLNRAGNKKLKNALWQSSFASIRFHERSRQFYERKRREGKRHNAAVVALARRRLNVLYAMMRNHEHYHDPAPSQEDLAA

SEQ ID NO: 281717 - protein, 449 aa, unidentified
MSKKTETKNNLQLAVIHEHTAAVDVGSMLMMVSYTDKEGGQQLLQTDGFTESLTNLAATLKSEGVTQVAMEATGVYWMALYEVIERAGLKVTLVNPKHFKNVDAQKTDVKDAQWLQQLHAHGLLRPSHVAPELYRELRSYIHERNVLQQQKSDTLNRIHKVLTKMNIKFQHLISDIEGVNGMKLSRAIAEGISDPEELLSFINIKILKASKEDLLKSLQGVYKREHIVILQHALKAIDFFKQQMKEFEMLVEDVLQRLLPNDKQGQKPEVTKKGKRARKNQYSINLKEYLLHITGVDLTAIDGLDEISVLEIIAVTGTDLSKWKTAEHFTSWLNLSPRHKITGGKLIGYSKRFSNNNATQAFRIAARTLWNHKGTLGRLYRRLAAQKGSAKAIKAIARKLAVIFYHMIKNKSAFDASKLQLDPDKEKRKRIIRLEREAAKYGYIIQKAA

SEQ ID NO: 281718 - protein, 403 aa, unidentified
MKSVLSIDVANGKSEVLLITEYGEVLIEPYEVKHCLSEFNLLKEKIDNFNLNDLTIFMESTSTYHLPIQRFFTKNNYNVQVINPILGKNNTRNLRKTKTDIEDCYNLADLFFKNTVKIHTKNMNDIYSSMIELSRQEKHLTESLVRSKNRFKQIVANAFPEYIKCFTANDIFGKTSLNFIKEFPHADIIKEKRIDALANNLYKSSKNGCSYNKCLSKAKKIKELANNSYPGIDVDSYEVNNLINIVDVISYNGSKLNDVKQDIVKLARQTPYFNIINSIYGIGETSTAQIIAELGDINRFENIKQLNAFCGLDPTIIQSGKSINYHGPISKRGNRNARKILFITCCSIIRASVLHNVDNEILLYYRKKQAENKHFKECIIACSTKLLRTIFAMCKNNSLYVQK

SEQ ID NO: 281719 - protein, 349 aa, unidentified
MASLSRVAPQVTVGVDSHKDVHVAAAVDQVGRVLGTIWVPTTTHGSAQLLRWATRLGAVQRFGIEGTGSFGAGLSRWLQQQGYPVVEVNRPNRQARRRRGKSDPVDAEAAARAVLAGEATTTPKAANGTVEMLRVLRVARRSAIKARGQAANQLHSLLVTAPDPLRQQLRGLPLARLVQVAAAFRPGPLTDPQAATKLALRELARRYQLLTAELDRLDAQLATLVPKAAPRLLARRGVGAQVAGALLVVAGDNPDRLRSEAAFSMLCGSSPLEASSGKTIRHRLNRGGDRDANNALWTIAMTRLSCDERTQRYLARRTAEGKSKREIIRCLKRYIAREIYRDITAAIGS

SEQ ID NO: 281720 - protein, 345 aa, unidentified
MESEASASQRYVGLDIAADTFTAAWRTPAGKPTLPFTAEQTPAGFAALQRRLTAGGAAPAEALVVLEATGNYWVALAVTLHAAGYRVAVVDPRQAHHFATAQLRRAKTDARDARDRAQLAAALLPAPWTPPAAVDHAVRQRLVARDGLLAMRTQARNQRHALVPWPVVVAAVRQHLDTVSADRDRRIAALEAAIAAVRKNGAWAEPRACPTSAPGIGLVTAAWLLVGTLNFARCASPGVLTAYAGLAPVPRESGRTIRGRAASGHDGNGRLRTALSMATLSAARDNPAITACDDRLRAAGKPRNVARCAAARTLLHPAWARGAKQRRCDPEHQEHQRDSVPDLAA

SEQ ID NO: 281721 - protein, 351 aa, unidentified
MEEYIAFDSHKRYTWVDRQDHSTGKSRGHRLEHSPGAVREYLNGCEPGTAVAVEATGNWYWIIDEIEQAGLVPQLVHPRKAKLMMGQTNKTDKLDAQGLNRLQRNGTLPTVWIPPGPLRDLRELTRTRLVLVAQRTRLKNRLAATLAKWGTPASEYSDPYGKRGRAELEKHLERLPEQTRWVSGQLLAQLDFVSGQVRQLEQRLEELVEVTEPMQWLLSMPGVGVILAATIALEIGEVGRFPSAMHLASYAGTTPRVHASGGKVRFGSLRADVNRYLKWAFAEAANSVAVNHTRCPDRHVSQLYWRLRQRKGHPKAIGAVARHLAEAAFHVLRKKEMYQDPSLGRGRTSQG

SEQ ID NO: 281722 - protein, 412 aa, unidentified
MTVTNQFAAHVGLDWADKKHDVCVQFKNGERVFHVIEHTAEALDVWLTELHQKVKGRIAIALELKKGPVVYALQKYPFITVFPVHALSLARYRQAFSPSGAKDDPQDAELALELMLRYPQKIKAIEPDNADIRLLQQLVEQRRQLVEDKRRFVNRIINTLKQYYPQPLEWFSHRGSLLLCELIIRWPTLQQLKRARRDTLRNFLNAKGGRAMALTEQRVVSIDNAIPLTTDPSVIEANALMATALATQIKVVSEIIKTYDERIETLFDTLPDAGLFKSLPGMGPCMGPRMLAALGDNRDRFNSAEEIQNYAGIAPVTERSGQKSWVHWRWQCARFVRQTFVEWTAKTVNSSYWARLYYQGQREKGKSHQSAIRALAFKWIRIIYRCWKTKTRYDEAKYLLALEARKSPLLKP

SEQ ID NO: 281723 - protein, 350 aa, unidentified
MLIIGCDYHPAFQQIAFVDSETGELQERRLQHREEAEKFYRDLAAQGRKVRVGMEASGHARWFERLLAELQIELWIGDAAEIRTKRVRKQKTDRQDAQLILKLMLKDDFPQIWVASWENRDLRQLLWHRHRMVQARTRIMNQLQAVALNEGLRCKKRLWREAGREQLEAFQLAPWASRRRQDLLELLDRLNPTIADLTQTIEQEVEKCPEAQRLRTHPGVGPLTALAFVLIIGRADRFQCGKQIASYLGLVPLEESSGNRRRLGHITKQGNSLLRFLLVEAAQVTVRSIPEWRSKYFHLAMRRGRKIAKVAMARRLAVRLYWMWRQGWNYEQLKKFGPHAGKPEHRDGVQ

SEQ ID NO: 281724 - protein, 482 aa, unidentified
MKSRSREKANKTTNDQTQCHWHEMNRKQRRDMMRQIQSEDVSLEVVHSDAAGIDIGNEFHYVAVPQSRDSQPVRRFGCTTGELRTMANWLKQCRIRTVAMQSTGVYWIAVYDILEQAGLEVYLVNARDTKNLPGRKSDVQESQWLMKLHTYGLLRNSFRPAQEIRTMRTYWRQRNDLVQSASRHIQRMQKALTQMNLQLANVLSDVSGVTGQAIITAILAGERNPHKLAEFRDPRVKASEEQIARSLEGNWQPDLLFVLQQEQDGYKFGQKQIAECDRQLEKYLLQREDRSHGAPLPEEKRKQRLKKTKGKPQFDLRTGLFHLSGTDLTQIDGIDVMTASSILSEAGWDMSKWPDEDHFVSWLRLCPDNRISGEKIIGKGRLPTNNRANIALKMAASTLRQSDTYLGAQFRRLRTRLGAPIAIKAMAAKLARLVYRMLRYGIKYADKGATFYQVEHRQRQIKHLKWKAASLGYKVTPIPEAA

SEQ ID NO: 281725 - protein, 402 aa, unidentified
MNKTDNMSIRQQKVRAGGIDIHKDKTVVCFYIAGIKEEVKEYGTFTEDLEKIRDDLLNQNIREVIIESTGIYWIALCTVLTLSKIEVTVVNPKFIKNMPKEKTDRKDARWLCKLLVNGLVRNSFVASEEQRAFRELCRMRSKYTNHITQAGNRMVKTLERRNIKLKSVASNTKSKSIKEIIAALAHGETDVEKLLKLCRGKLKKKEPEMRKALHGVLTPHDRLMMQDLLNDIAHFEKQIQGLNERIKQHTDKVNEELIKNIRVVSGIGAQSVEVLLAEVGSNVNAFENEDKLAAWVGLAPGNKESAGKAHYAGRRDGNVYLRTIMIQVAWAAVRTKNSYWRAMYYHLSKRINKGKAIIAVARKLIRLIYKIIKGTKTYTEYGADYFVQQLQERYAKRRTQQA

SEQ ID NO: 281726 - protein, 458 aa, unidentified
MQQFFLGADVSKGYSDFVIVDQQKQTVVENFQLDDTALGHSQLYDQLHIFLAQHSDSVIFAAVESTGGYENNWYNSLIKFQGSLNIKTTRLNPEGVYCNSRADLKRTITDKVSAKSIADYLIAHPEKVKYQQEDYWAPMRKQWSFVALLTKQKTQLSNQLESLVYTANPEVLQYCQQGMSQWVLKLLKQYPTAKKLSRAKVATVAKIPYLTKDRVKKLILAAKDSVASSQDDFTGQLVTSTIDHILQIKKTIKAQVKILANNCKMPEVELLKTYPGISDYSAIGLMLELQTVGRFSTAKKLSSFWGIHPVFKASGDGSTVARMSKKGRKEPRRILFMVAMSAINCNPIIKALYHDQLAKGKEKMAAIGHCMHKTLRIIYGMLKTNTAFTPEIDKKNQLKSQRKTPTIKKDRNRRYQEFDSEAPISRRQGKKRKEQKMSQSATGGTESGINTSAPVTSL

SEQ ID NO: 281727 - protein, 337 aa, unidentified
MEQQQYVGIDLHRRRSVIVRVDEHGEHTLPVRIDNDAAALAAEVAKAGEHPEVVLEATYGWYWAVDVLQELGATVHLAHPLGLNWGHRRRKDDVADATDLVDMLRLGRLPEAWIAPPACRELRELVRYRAKLVCLRSGLKAQVHAVLAKEGVHVPVSDLFGVTGQRLLDEVPLGRAYTIRVESLRDLIEVYDREVAMADREVRTCLAGHPGWQAIQAIPGVGPVLGAVFVAEIDDVTRFPTARHLCSWAGLTPTHHESDTTVVKGHITKQGSRLVRWAAVEAAQKTGDFLRTDYRRIAERRNNRKIARVAVARKIVTLVYYGLRDGHIRCLEPKAAA

SEQ ID NO: 281728 - protein, 318 aa, unidentified
MRFYTKQHQYYCGIDLHAKTMYVCVLDGEGKILVHRDIGSNAHAFLEIIEPYRPDVAVAVECIFTWYWLADLCTKEGIPFVLGHALYMKAIHGGKAKNDEIDAHKIAVLLRGGMLPQAYVYPPEMRVTRDLLRRRPHLVRKRAELLAHIENTKSQYNLPDFSARLAYAGNRKDVAEHFPDPCVRRSIEADLELIDHYDDLIGKIEWHVVRAGNRCDEDLLLRLRTIPGIGKILSLTILYEVHDIARFPRVQDFVSYSRLVKCAKESGGKRLGSSGKKIGNVHLKWAFSEAATLFLRNNPKAKAYRQRMAHKHGKCQRR

SEQ ID NO: 281729 - protein, 341 aa, unidentified
MGDYIGIDLHKTKSFVTRMTAQGHILEQVNLLHTTGALQQYMTALPADVHVAVEATGNWMWLYEQIEDRQLDLVLAHPLKVRAIASARIKTDKIDATTLAHLLRTDLLPTAYIPPRAIRDQRERLRYRASLVRLRTQVKNKIAAILTKTGVRTPTKTAFGVKSRRFLATVSVRACYRLALDGYLRQLEHLTTEIRAADQVIAEQVTADPQAQLLCTIPGIGAYSALLIRSEIGDIHRFPDSRHLCSYAGLVPSVHASADTTRLGRLTKQGSSWLRWILVEVSVHAINGAPQFRSLYYRVAKKHGHNVGRVAVARALLKTIYAMLTTQRPFRPIRKGTPVSA

SEQ ID NO: 281730 - protein, 330 aa, unidentified
MTKHNTKARTAKTPEEPTKSSPFAGIDVGKARLDVALWQSRQALCFANDAAGRGQIIAFLQRHGVSRVGLEASGSYEMEITEALRAAGFEVVVFQPAQVRAYAVFKLQRAKTDPIDAKLIASCTAAVEEVRSAPDPRFIALAEHLTLIEQITEDIARAKTRRGRFRDPRLRKVVQEEIKRLTARRRQEIGRLREAVLADEDLKIRFKLLLSIQGIGEPTALALLIRMPELGTVSREKAAALLGVAPVADDSGNRQGSRHIAGGRARPRTGLFAATQAAARLWNPALIAFYERLIKAGKPYAVAIIACTRKLIIYANTVLARGTPWEARQT

SEQ ID NO: 281731 - protein, 360 aa, unidentified
MKLDAALDTSATTTAICIVNSRDGAIVLETTVPTDPDAIARVLTPFLPRLHLVGHEATGWSAWLHRELESRDVPMVLLETHHTARMLEAQRNKTDKNDARGLAQLVRSGWFKPVHAKSDESNRLKLLLAHRRTLKRKLMDIENEVRQSLKMFGLMAGKRVQRASFPSRIRALVAGDPLLEGSTECMLRCWTVLWDEYRKLHALLVKLAGSDELLRRLCGIPGVGPVTAVTFKAAIDDPRRFAKSKTVGAHFGLTPKRLQSGTSVDVDGHISRRGDGEVRTALYEAASAMMTRSKQRSALKAWGTQLAAKRGHKRAVVAVARKLAVVMHRMWIDGTTFRVSATDRDAERRIGTAAAVAQAA

SEQ ID NO: 281732 - protein, 385 aa, unidentified
MIYVGIDIAKLNHFASAISSDGEELIKPFKFTNDNDGFQLLISKLDSLDKDSLIIGLESTTHYDDNLVRYLVAKNYKVCVLNPIKTSTMRKNNIRKTKTDKVDTYIICKTLMMQESLRFVTFYDLDLMDLRALGRFRQKTINQRTLLKIQLTSYVDEIFPELQYFFKSGLHQKSVYALLKEAPTPEAIASMHMTHLLKVNSHGRFDKKMAQQLRVLAQKSIGASDSSLSIQVTHTIQQIELLDSQLERVEAEMTEIMKFNDSVIMTIPGIGYINGGMILGEIGDIHRFSSPNKLLAYAGLDPSVYQSRNFQAKKTRMSKRGSKVLRYALVNAAHNVVKSNATFKTYYDAKMAEGRTHYNALGHCAGKLVRIIWKMMTDNLEFNLE

SEQ ID NO: 281733 - protein, 424 aa, unidentified
MASHEFAAFVGIDWGDQKHAVCLRTEGVEVEHELSQKADEIDAWATELRTRFGGRPVAVCLEQSRGPLIYALLKYEFLVLFPLNPLQATRYREALYPSGSKDDPLDARLLCLFVETHHGQLRAWKPDDEATRLLRLLAEDRRRFVDQRTAHKNQLRQRLKEFFPLALELLRSGDLEDEWFLQLLIKFPSHAELRRVSPRTLERMLPKHHRLPDDESLDPRVARIRAAVPLVTDGAVVKAARLQVMELARLLLRLNTTIAEYDHELSAELARHPEAELFRSFPGAGAALLPRLAAAFGTDRERYADAQDLQQLSGIAPVQIRSGKSCSVRRRRACPKFLRQTFHEYADHSRKRSLWAKAYYRMLRGRGLRHNAAVRALAFKWLRILFRCWQTRTPYDEHRHLKQLRLKQSPLLQYLDLPDPVEQT

SEQ ID NO: 281734 - protein, 412 aa, unidentified
MKVEHECCAGLDVHKRTVVACVLKGAPGKEPVTETKSFGTTTPELMEMVQWLKSHAATHVAMEATGNYWMPVYNLLEGHFELLVANAAHMKAVPGRKTDVQDAHWIADLLRHGLLRASFIPSREQRDLRELTRHRSSLATKRGQAANELQKALESANIKLQSVVTDITGVSATEMLTEMLGGKNDPKELAQLAKRKLRAKIPELEKALTGNLRAHHRLILEQLLSDMALFVAQIAELDAHIEKLLQKDNDDIERLDGMPGINRRVAEVIIAEAGTDMSRFPDAHHFASWIGLCPGQNESAGKRRSGRTRKGNRALRAALVEAAQGAVRKKNSYFGAQCRRIAPRRGKKKALIAVTHSLAVAIYHIIKNQTCYVELGADYFDKLNPTRVLHRLTKRIQNLGFDVHLSPVPVAA

SEQ ID NO: 281735 - protein, 322 aa, unidentified
MKRSTKYVGLDVHQATTVASVREESGKVIARSVVPMQPRALVEFLRGLRGAVHVALEEGTQAQWLHDLLVPVVHRVVVCDRRREARASHKADHADADALSDGLRCGTLRAVYHGGAQAPGLKDLARTYLNLVEDATRVMLRLKAVFRARGIPVAGRSVYDPRQRAQWLAQLPAGGAHFRALALYAQLELLQRLRPQAKTALVTEARRDAAWRALRTIPYLGPVRVALLLAVVQTPWRFRTKRQLWAYAGLAVVTRTSAEFGWHEGRPVRRPRPPLTRGLNRNHNRIVKWVLKGAATTAATRAGALHDFYETLLGRGMRPELA

SEQ ID NO: 281736 - protein, 412 aa, unidentified
MDVVYRCCCGIDVHKDSVTVCVLWAETKGKSRQEKRMFATFTQDLLALSDWLHACGVTHVAMESTGVYWKPVWHILEGHFELLLVNAQHVKAIPGRKTDRKDSAWLAELLQHGLLKSSFVAPEPIRELRDLTRYRVNLAQECNRIANRIQKVMEDANLKLASVATDALGASGRAMLKAIITGERDVEKLADMSRGLLRRKIPELQLALEGYVSQHHRFLLQELLDHLEFVESKMTRLEQEIAERLRPFEDTVRRLCTVPGIDRVSAWGIISEIGLDMHQFEDAKHLASWAGLCPGNWESAGKRKSGRIRKGSAWLRRHLCQSAWGVSTKQKNYLSALFRRLAARRGVKRATIAVAHALLCIAYRILRDPVEYRDLGPDYFDKLHPVRLKNRLVKRLEGLGFQVTLEARSLPA

SEQ ID NO: 281737 - protein, 412 aa, unidentified
MEVVHGCCGGLDVHKESVTAGVVWAEENGKKRREERTYGTFTRDLLRMSDWLRACGVTHVAMESTGVYWKPVWHILEGQFELLRVNAQHVKAIPGRKTDRGDAARLAELLQHGLVKSSFVPPEPIRELRDLTRYRVNLTHECNRIANRVQKVLEDANLKLASVATDPLGVSGRAMLKAIIAGEDDATELAEMARGLLRRKIPQLQAALEGRVSDHHRFLLRELLEHLEFVESKMTRLEEEIATRLRPFEETVEGLCTVPGIERISAWGILSEIGLDMRQFPDAGHWASWAGLCPGNWNSAGKRQSGRIRKGNAWLRRHLCQSAWAVSTKQKNYVSALFRRIAGRRGVKRATIVVAHGLLVIVYHILKRGMVYHELGADYFDKLNPQRTKRRLVKRLEALGFRVTLQTAPQPA

SEQ ID NO: 281738 - protein, 354 aa, unidentified
MTTMQAARQSSLYVGIDTHKDQHHAAVLDSTGMKLGDLEFQATTAGYRDLAKWLGTLGSIELVGMECSGSFGAGLTRFLRERDVDVREINMPHRHLRARVGKTDPIDAEAAARKVLSGSFTVKPKDTTGIVESIRLLSAARNSAVKAKASAIVQLKCILVTVPASLRESIDSQYGTVKHCATLRPDMTRLDEPLQSSKYTLRTLARRIRVLETEIADHDKELKALVQEVAPTLLTRVGIGPVHAAQLIVTAGQNLDRMKSDAAFARLCGVAPIPASSGQTRRMRLHKGGHRQANRSLHLIAVVRLRYDPRTRAYMERRQKEGLSKKDVLRCLKRFIAREVFYDLKHDLLTQSGT

SEQ ID NO: 281739 - protein, 367 aa, unidentified
MGEIGRSSLGLLKPYVSMVVSPVTKRSRTVDWANQARIVQDWDRKEDYRMDKDFVGVDVSKNTLDVAAYTTNKSWHFPNSGAGISQLTQTLSDLTPALVVLEATGGYETPLAISLHKAAITCAVVNPREVRDFAKATKKLAKTDTIDARVLAHFAAVIRPEPRPLSDEQTQELEAIMTRRRQVIDMLTAEKNHLHVARKPVREAIKSHIEYLTKELVQIDSTLQVRIEESPVQRDKYSLLRSVPGVGPHLSATLLVDLPELGNLNRRQIAALVGVAPINHDSGARRGKRSIWGGRPQVRAMLYMSALVAARHNPVINQYYIRLCAAGKAKKVALVACMRKLLTILNSILKHHVPWRIYQPVLISSNP

SEQ ID NO: 281740 - protein, 353 aa, unidentified
MKILALDLGKRKSVYVDYDTDKTRKPEFGKINTTQREVAALLDRIRPDRLVIEAGGPAGWVCDLGRARNIVVQVANGNDPRWQWKRVKKKSDRDDGMKMAQMSELQCLPTVHMPDAGVRQWRSLIEYRHSLVDRRTAIKNSIRAIYDRQGLSVCSGDHLWTAAGLEELGRDAREGALTSIDELWRLQLHCELKQLEAVAVQIAELEKKLAEIAQTRKAVSLLKTAPYVGPRLSEAVVAILDDPHRFKSGREVGSYAGLTPRLLQSGESDRQGRISRQGNALLRELLVEVSWLGIRSDPWMKQVYENVRRGSEKRKKIAIVAVARRLLVRLWAMWRDGTEWKAPALTAQAAAVT

SEQ ID NO: 281741 - protein, 482 aa, unidentified
MKHKRHEKTKKAICGPTQGNWQQMNRKQRREMTRKIQSENISLEVIHPDAAGIDIGNESHYVAVPPPRDSQPVQRFGCTTAELKDMAGWLKQCGIRTVAMQSTGVYWIAVYDILEEAGLEVYLVNARDTKNLPGHKSDVQESQWLMKLHTYGLLRNSFRPSQEIRTMRTYWRQRNDLVQSAGRHIQRMQKTLTQMNLQLANVLSDISGVTGQAIIKAILAGEHDPDKLAEFRDPRVKARKGQIARSLEGNWQEDLLFVLQQEQDGYEFCQKQMTECDQRLEHYLQQRDDRSAGASLPEEKRKERRKKRKGNKPRFDLRTGLFRMTGTDVTRIDGIDVMTATTILSEVGWDMSKWETEDHFVSWLRLCPDNRTSGDKIIGKGRLPTNNRVSTALKMAASTLRTSQTYLGAQFRRLRSRLDTPVAIKAMAAKLARLVYRMLRYGMKYVDRGAEFYEAQHRQRQIKHLKSKASKLGFQIIQVPAA

SEQ ID NO: 281742 - protein, 421 aa, unidentified
METDANEVEIIERVAALDIGKAVLTCCVRLPPLPGLRARRQQVSDHPTMTRSLQHLMDRLVGLGVTRVVMEATSDYWKPAFYLAEAAGLDPWLVNARDVKHLPGRPKTDRLDAVWLCKVAERQMLRASFVPPPPIRELRDLTRYRVDLVAAATAEKQRAEKLLEDAMIKLSVVASDIFGVSGRAMMAALIAGQRDPKVLAELARSSMRKKIPDLQEAFIGRFNDHHAFLLATMLARVDTLTADIASVDDRIEAHLGPFADAVAGLDQIPGIGPRTAAMIIAEIGVDMTRFPTPGHLASWAGYAPKVAISAGKAKGRNATGHGNRYLARALGEAAISAGRTRTFLGERHRRLARRRGPSRANVAIGRSMLVIIWHLLAHPDEQFHDLGPDYYTTKINPDRKRHDHVRGLQALGYKVTLEPAA

SEQ ID NO: 281743 - protein, 479 aa, unidentified
MRLLNKDDPAAVLFFHFKIKEDMAKAKITGKKHVTMPIVNPNAAGIDIGSRFHVVSVGQGADDVKTFGVFTDDLHEICSYLKDNGVKTVAMESTGYYWKPLFVMLQSEGFEVYLVNARHIKDAKGVKSDPYDSRRLQKLHSLGLLTASYQPDEEVEVLRSFCRQRRYLVVERSRHINRMYKSLTMMNIQLGNVLSDLDGQSGLAIIRAILSGQRNPEQLAKLAHPRVKASPETIARSLEGTWRRECLFELSQCMELYEQYNQRIQACDEQIEQILKECVAAKNEGELPSIPKDKKLTRKSKSKNEPGFHVGKWAYLLTDGRDLLAIPGFGQGTLLTVVSEVGWDLKKKFESAKHFTSWLSLAPNVQKSGGKVLSSKTRKNKSIAAAAFRQAANAIGNMKSHPLHSFFMRIAMRKDRLAAIVATARKLAVIYYKMVVNGEDFNYVPNEEYEKRLREKQLHKIKKQIEQYDFKLDELNIAV

SEQ ID NO: 281744 - protein, 411 aa, unidentified
METVVRRCAGLDVHKDSLVACVRIVDENGELQSFTQSFGTMVTDLLQLNDWLASYEVTIVGMESTGVYWKPVYALLETDFTCWLLNAQHLHNVPGRKTDVADASWIAQLVAHGLVRPSFVPPKKVRELRELTRYRKALIQERTREAQRLHKILQDSGLKLSSVATDILGKSGRAILQALIDGTHDPDILAELARGRLRRKIPLLRKALTAWFSPTHRILVSALLAHLEYLDESIEQFSSDIASLLTPFAQAIDLLDSIPGVNRRSAEVFLAEFGADMSRFGSANRLASWAGMCPGNNESAGKHFSGKTRRGSKWLRTALTESAEAAARKNGGYLRAQYTRIKGRHGHNKAITAVAHSILVIAFHVLQRQEPYNELGGDYFVQRQNKDSYRKRLVTQLERMGYDVALSERAA

SEQ ID NO: 281745 - protein, 406 aa, unidentified
MYYVGIDVAKEKHYVCILDESKDLACKPFWIYSDCLGLNELVKRLYDLSLTCDDFILAVESTGAFSENIYEYLTDLDFKVILLNSYQTAKYRDFSTLKKVKNDSIDAYVIAELIATGKYKESHISSETYHTLKVLNRLKKSLDDKIKTIKREISTVMAIVNPEINKVLPNIFTKTAMAIIKEYPTAKDLQETTPKKLCKVFRNIKGNNFNEEKAKVLISNAKDSIYLGRAQSARSLMITTNINILELIIQKKTLLEYEIKILIDENQDDTFNKGVDNLKTIPGVADKTISAILGECGDLKRFDCAKSFIGYLGLYPTQYQSGNSHTVGRLAKRGIPIAKHALYMSAVAAVLHNEQLRKIFRDKVSLGKSKKEALIIIAKKIAAMIYSMFKYNTQYNPNRVLVSYGK

SEQ ID NO: 281746 - protein, 370 aa, unidentified
MGDYSEVFVAFDVAKAKHAVAIAEGGRQGEIRFLGEIENTPVAVARTIKKLASRYKRLHVCYEAGPTGYGLYRQVLDLGHECLVVAPALIPQRPGERVKTNRRDAVALARLHRAGELTGVWVPDAIHESIRDLVRSREAAGDDLRRKRQQLLSFLLRHGRVYTAGRDHWTQAHRRWLARQSFEIAAHQIVFQEGIDAIDDAARRLRRLDDQLASIVPNWSMAPVVQAYQAMRGASFLVAVTFAAEIGDVRRFDTPRQLMAFLGLVPGERSTGNTVRRTSLTLAGNRRARRVLIEAAWTYRFPARISETLRARLEGVPKAVRDIAWKAQIRLCARYRRLGAAGKKLPVVVAAIAREIAAFLWAIGREVTPM

SEQ ID NO: 281747 - protein, 377 aa, unidentified
MKKELYLGLDVHKDCIITAVAEEGRKGEVRESGAISNDLHAVEKWIGRLRKRHGKGTLLRACYEAGPCGFGLARRLRQLGVECEVVAPSLTPTRSGDRVKTDKRDARKLARLLRAGELTPVYIPDARDEAIRDLCRARSDAVDDRRRSRHRLKGFLLRHGYRYQGKSSWSAAHERYLRELVLPHPAMKVIMEEYLQGIAAATERIERCEAAMGDLLEKWRLAPAVRALMAMKGFQTVAAMILVSELGEVHRFAHPRQVMAYLGLVPTENTSSDRRRQGHITKCGNAHARWLLVECAQHYATPPKVSKELSRRQEGQSAQVRAISWRAQNRLHSRYTRLLARRLLRNKAIVAIARELCGFIWELLRTQDCYQAQSTPV

SEQ ID NO: 281748 - protein, 356 aa, unidentified
MSIVADAHPFVVGVDTHARNHVYTILRVATGVVIDTQDFPTTTAGINRAIAWAARRTDADADTLWVIEGAASYGAILTGTLASHGYPVAEAPRMDTKQRYGVGKSDTLDAHRIAAAALPVPVDKLRRPRLNDGIRQAIQILVTARNAITKDRTRSINALTALLRSNNLGVDARKALNKAQVAEVSKWRARNEELSVAVARDEAVRLAKHIVELEQQLADNERHLTEFVQISEAAPLLDEKGFQAISAAKCLAAWSHHGRVRTEAEFASLAGVNPIPASSGNTVRHRLNRGGDRALNSALHIVTVSKMTHDAQTRAYVARRSAQDKTDRDIRRCLKRYIARRVFRILNTQHKVLQLT

SEQ ID NO: 281749 - protein, 362 aa, unidentified
MHATAAFPVVGVDLSKHVFELAVADEHWHIVERARLTRSQFERWFANRAVGLVVMESCGSAHHWGRWLAGMGIAVRLLPAQYVRAYVKRNKTDAADAAALIEAARCADLAPVRVKSIEQQGLQALHRTRSLWMATRTSRINALRGFCREFGISISQGSRIGLEQIGRQLADPASPVPDLLRPTMRLLIEEIRLLETRISQLEAELARLAQQSAACKTLLSVPGVGLLTATAMVAATSGEVTHFKDARHFASWFGLTPKESSSGMTRRLGRISKRGDRYLRMLLTHGARSVLRAATVADRQGRPVDDLRRWALAIQGRAHHNRATCALANKMARICYAVLRDHQDYGGTRVQRKMCVTYPLAA

SEQ ID NO: 281750 - protein, 331 aa, unidentified
MEIKEIIGIDVSKLTLDCCIHSNGQQIVLENTLESIAQMVDWALENGSGENHNTMFVFEHTGLYSYGLAQYLGGSGYIFKVVSGLEIKRSLGITRGKDDKADAKRIALYGYRLRDELSPSVLIDETIDTLKRFMSLRKKLVRQRAGHIACLGEQKRVLTKLEGTLLFEAQQEIINTLDKQITRIEKELEDVVENDPNLQRLYQLLISVKGIGAVTARFLIVYTAGFTSFDSWRKFASYCGIAPFPNRSGTSIRGKTKVSNLANKEAKTLLNLCAFTAVQWNPEMRAYYNRRLEEGKSKMCTMNIVRNKILARAFAVVQRGTPYVDTMKYLS

SEQ ID NO: 281751 - protein, 338 aa, unidentified
MSLYAAIDLHSSNSVLAVMDGDGKPVLRCRRPNDLPRLLGDLAPYQDELVGVAVESTYNWYWLVDGLMDHGYVVHLVNTTAIPQYDGLKHGDDDSDALHLAQLMRLGLLPEGYIYPREQRGTRDLLRRRFGLVRQAVRLMLSIQSSFSRSTGKQRSANQLRQLTPSQLVDLFPELSTRYGVLIQFKLWLTVQDQITALERWIRKDLARPDLLVRLQSVPGIGPILGMTILLESGAIERFASVGDYASYCRMVESVRLSNGKRKGHGNRKCGNRYLCWAYMEAANYAVRFDPLIRGWYERKRARKHRVVAIKAVAHKLARACYHMLHEGTAFDLTRAFG

SEQ ID NO: 281752 - protein, 339 aa, unidentified
MKYTTVGVDIAKNVFQLHWVDAGTGEIVNRQLKRAAFLEHFANREPCLIGMEACGGSQHWARRLVEMGHQVKLMPAKLVKAFNIGNKSDPADARAIWMATQMPTKPVAVKTETQQAVLALHRLRQQKVKFRTMQMNTLRGLLAEYGEAIAKSRAALDKAIPGVLARLSERLPAMLIDSLRELWNDLDRLDRQIADIERRLQTWMKEDRACRAIAAIPGVGLLTATATVATMGDAKAFRSGREFAAWLGLVPKQIGTGGKIQLLGISRRGDTYVRTLLIHGARSVLFHGKHGGTWAEQLQKRRPPNVAAVALANKMARTIWAILAHDRPYDPAYLTTRAA

SEQ ID NO: 281753 - protein, 379 aa, unidentified
MFRKERQEPGGHPALGADRRIAATRTCRIAEKQDRDRLLIVARMVARTTWFACKAGTTKMNETSTKAAGIDTGKKWLDIALYPAGERTRVANDGDGHRALAAWLAERKITRIGIEASGGYERDVVAYLRANGFEVAQLQPRQVRAFAVYKLRRAKNDRIDAALIAECAAKLDSLHEAPDTRLAPLAEQLLFIEQIEADIARLKTRRERFTDKRILQEIDRDIEARKRRCKAELIRLQAAVGQQDDLARRLQLVESVDGIGIRTALTLVILLPELGKVSRERISSLVGVAPFDDDSAERAGKRHIDGGRSRVRRALFNAALPASQRWNSALVAHYSRLTGRGKAHKEALIACVRKLLIFANAVVERGTHWTKNPSTKLHA

SEQ ID NO: 281754 - protein, 342 aa, unidentified
MTIIIGIDPHKASHTAVAIDNTECVLDELRVRACAAQTDRLRSWAAPFPDRVWAIESARGLGYLLAQQLVAAGETVVDVPAVLSTRTRLLGSGRAQKNDPNDARSVAIAALRTDGLARVGVDEHAQVLKLLAKRHRDLGRLRGKAACRIHALLMELQPGGMAQRMNVTRANALLDEVNVDTEMAAHRVGVAREFVADLAHYEAQMKTSKARLRHAIAATSTSLTDIRGVGVVTAAMIVGHVGDVGRFKSAAHFASYNGTAPIEASSGERRRHRLNPRGNRQLNYAIHVVAITQLRYPCEGREYYDRKRAEGKSAKEAIRSLKRQLSNVIYRTMVADARRRQM

SEQ ID NO: 281755 - protein, 347 aa, unidentified
MNNAFSAFDSSGIEVSRSLLVVALRRQERDEPRREFPNPCQGHPSLLRYWERSARPVRVCMESTGLYGLDLALTLHPAGVAMMVANPRAARHFAHALLQRSKNDPLDAGVLCEFAARMPFVAWRPPSAAGLKLVAVARRLEALTDRRAAEKHRRPAASLSEALPALIRRDVERSIQTQRRAIDRLTRLAQEFILSEPVRARRYELLLSLPGFGTTRAVHTLAELALLPAEMDVRQWVAYTGLDPREFTSGTSVHKKVRISKAGNKHLRRALYMPALVAIVHQPHLRAFYEHLTARGKTKMQALVASMRKLLHAIFGMFKHDQLFDGAKLYALPAETLPAAAGATEVA

SEQ ID NO: 281756 - protein, 346 aa, unidentified
MIIKTVGLDLAKNVFQLHGVDDSGNVVLRRRTLRRTQVTQLFAQLPPCIIGIESCSSSQYWARKLIGLGHQARLIPPQFVKPYVKSNKNDANDAAAICEATGRPQMRFVPLKTPEQQSILAVHRIRESFVQGEDGLCQSNSGHHGRVWTHAPQGIGHVSRSAGEQVSHAADPVPGMVRDLVLKLLEHLRYLERRIAELELVIKGWHRHNADSQRLAGIPGVGVITATALVATIGDARQFKSGRHLAAWLGIVPRQHSYGGKERLLGISKRGDVYLRTLLIHGARVVLRHLTAPPHKVGIWLIRLGNRAHPNVVATALANRNARVVWALLVHKSSYDPALPGRACSG

SEQ ID NO: 281757 - protein, 357 aa, unidentified
MKKRAQDILRNEKVFVGLEDSKKTWQLCVRSGGVIVHETSMPAKFEVLRNYFDNRFPECQIQVIYEAGFKGFELHDELEEKGWDCIVTPPHTVTEKKCQRKKNDRTDCRRLAKNLENGDYHSCFVPDKELREDRQIPRTYGQIQEDITRVCNRIRRTLEFHGLDNGLLPWSWNRAMYTRVKLYLEDLEINTSLRFSLKVMFNELEHLRQLRKELLQQLRTLAKSDRYKERVEIIQSAPGIGMFTAIRLVLEWGDVSRFKRKEEFASFLGLVPSDYSSGEKERQGHITKQGNSSVRSWLVECSWMAIKHDPVLLDKYRRVLKNCGSKKKAIVAVARKLAIRLRRILLNGEPYVIGVVE

SEQ ID NO: 281758 - protein, 452 aa, unidentified
MEKKKEEVWQIVYPHSAGIDVGSRFHMVAVGQSDDQVRKFGINTDDHNLMIDFLKVHQITHVAMESTGSYFQTLFLALQEAGFKVSLVHGSHTKGIGGQKTDVKDCKWIQKLFTYGFLKSCFLPSNATMEIRTLNRHRNNLIDESSRLLNRIGQCMRQMNIRLDVAINDLGGKTGQSIIQAIVEGQRDGNKLAILADSRIRKSHQELAQYLQGRWNDNQLYILKDLHQAYQYVRNRIENCDQQMKNCFDQIIESQGAEEAGKINLTKKQKSRNSSSLNVCTTSYQYYGVDLMEIECVSEATVMSLLAEVGRDIFKFSTASKFVSWLRLAPNNKKTGGKIISSKTPQTTNKFTLTLRNAANTISRKKTGYLLHFFQKIAYKKGRGAAITATARKMAVIIWNMITKKQPYKPIDMDQYKLKKRQRTLKTINKLIKHMEINTDELIIGSQRLAGS

SEQ ID NO: 281759 - protein, 352 aa, unidentified
MALPTLPHPQVLVTLGVDTHADSHVAAALDQAGRPLGTRTISTTPGGYAALLGWARRLGTVDRIGVEGTGSYGAGLARWLRAHGQLVIEVDRPDRAARRRQGKADDLDAHAAARAVQAGTATGQPKAGDGTVEMIRSLRLARRSAVKARTQAANQLKALLVTAPDVLRAQLRCLPPAELVTTAARLRAATTPATPTDAAKLALRSIARRWLLLTQEITALDTQLDRLVAMAAPALVAVKGVGTETAAVLLVAAGDNPERLRSEAAFAHLCGVAPIPASSGKTTRHRLNRGGNREANWALYLIAVGRMAWHAPTRAYVKRRTTQGKTTAEIIRCLKRYIARELYGILVSRPAA

SEQ ID NO: 281760 - protein, 428 aa, unidentified
MKRKAAVCLPFILTRGLLWFLPEQSRTNGRDTRVPEALQCKQFELANTPMKTELYVGLDVDKEWIVTAVAEWGRNGPVHDLGAISNDLHALEKLLARLRKRYGPDVRICACYEAGPWGFGIARRLHQLGVECTVVAPSLTPTRSGDRLKTDKRDARKLARLLRAGELTEIYIPEPTDEALRDLCRARSDAVDDRRRSRHRLKAFLLRHGYRYEGKSAWSAAHERYLRELVLPHPAMKVILEEYLISVQLASERIARTEAAMSDLLGKWRLEPAVRALMAMKGFQTVAAMIVVSELGALDRFTHPRQVMAYLGLVPSEKSSSDRRRQGSITKCGNAHARWLLVECTQHYAAPPKVSKELSRRQQNQSRAVRLISWKAQNRLHQRYVRLMARRLQRNKVIVAVARELCGFIWELLRSQECYHAPCPSGMN

SEQ ID NO: 281761 - protein, 324 aa, unidentified
MTDAVLGIDVSKNTFDTNLGAGTKARSKSFANSPDGWHHLIAWLGEHKIGQVHACLEATGRHGLGIALALHEAGHVVSIVNPAQIRDFARTKLGRNKTDQVDAVHIREYAELFKPRPWTPPSPAMRRLCELQTIRAGTVAGLTEWKNRRGSGIMDDLALSLAETTIQHFTSQLKAVDQAIAETIDNDVELSAKRDLLVSINGVGEALAGIVLAELPGSDILGCSAAVAAYAGLNPQQHQSGISVNRPVRISKIGNAVLRTALYMPALSAMRYNPAVVALVDRLKAQGRLKGKQIVIAAMRKLLVLCFGVLKTGKEFDPAMAMGK

SEQ ID NO: 281762 - protein, 408 aa, unidentified
MKITCGIDWAEAHHDVAVLDEGGQVLGRRKIDTGLTGFGELMSLLAEHTDDPGSVPVAIETDKNLIVVALQTAGLTVFPINPRAVARYRERHGQSGKKSDPGDATLLADVLRTDLHQHRPLPTISDAGLAVKALARQHQEAIWALHQTNSRLRSVLLEFYPQALQAFPNLKHKAALTVLAAVPTPELGGKITARKVVALLHRCGRRNDTALVEQILADLKTPGLRQSLPVEAALGRTVVGLLGVITAMQTAVEQLEQALATEFDEHPMAPVLRSAPGLGPVLAARVLAEVGDDPERFASAGGLRAFAGTAPVTRASGKSRRVLARRVRNKRLGDACHWWAFAMLTKSAGARAHYDRRRAAGDHHSAALRNLANKLIGRLWWCLQNHQPWDEETAWNNAAMAAPTSRAA

SEQ ID NO: 281763 - protein, 409 aa, unidentified
MDVVISRCAGLDVHQATVVATVRVPSPTGGRDVVTTTFGTMTPDLIALREWLQAYGVTQVALESTGVYWKPVYYVLEDGFTLLLINMQELKRVPGRKTDVKDSEWLAQLLECGLLRASFVPPPPIRELRDLTRYRVQQVRDRAQEVNRLCKVLEDAGVKLSTVATNVIGVSGRAMLQALVEGTTDPAVLADLARGKLRKKLPDLRRALTGRFRPHHAFLLEQVLAKIDFLDEALDRLMAEIESRLGPFASMLTALDTIPGINRVGAISLLAETGGDMTRFATAGHLCSWGAMCPGQNESAGKRHSGKTRKGNRYLRAALIQAALAASRAKGTALQAQYLRIRRHRGHKKAVVAVGHQILEIAYYLMRDGGSYHELGPSYFDQRNKQRTIRRHLKQLEALGVHVTIQEAA

SEQ ID NO: 281764 - protein, 331 aa, unidentified
MMSLSKQASGMPLSVGVDVAKATLEVGFSDREMTFAPTNDAVGHQALLTLLSDLRAQGTAIGLIVLEATGGLEVLVATEMQLAGYPVAVVNPRQARDFARSMGYLAKTDRLDAKVLAHMGQTLLQRSDLHKLVKPLVDEKHRTLQALVTRRRQLIDMRTAEQQRLSGPDQRMRRSVSFMIEALDSEIGRVDLDLQSFIDTHYSELAALLDSVKGVGKATISTLLAEVPELGKLSGREVSALIGVAPINRDSGATRGRRSIFGGRRDVRKVLYMAALTASRYNPVLKVFYQRLVAAGKPKKLALTACARKLLVILNAIVRAGKPFDMTLHET

SEQ ID NO: 281765 - protein, 388 aa, unidentified
MQTVADRPEAPTAIRTDLGAIFVSLELSRSTWLITSLSPGGGEKMSKQVVRGGDVAGLLERFARLREKARARTGKVFPFVVIQEAGLDGFWIDRALQNEGIESHVVDPASIATSRRRRRAKTDGIDGEALVRALLAYKRGEPRVCAMVKAPTPEEEDRRRLCRERKVLIGERVQHVNRVKGLLFSQGISGYEPLRRDRRERLDTLQTGDGRLLPDHLKAQVCRELDRLELLLEQIKAVEAERDVLLAAQQVAAPAPAAMLLDIKGIGPEFAAILWSEGLFRHFDNRRQVASYAGLAPTPWQSGSVDREQGVSKAGNPRLRTTLIQLAWLWLRHQPQSALALWFEERVRRNGGRLKKTTIVALARKLLVALWKYVTAGVVIEGAVMKRT

SEQ ID NO: 281766 - protein, 587 aa, unidentified
MSVGIFALRTNRHFAQTVKRNDTPRYDALDPQNTSSGVRQLGLLWGKFQVHTFTFPDYGESKMPYHVRRKGRQQHKAKPRRQSLQKPRGVISPRVQRVGGEHFAIVCIDPAKHRSEWMMADYFGNLLIEPQTVEHQSVFFQVAVEMIRQAQQQHDIRDTIVVVERTGNYYLPPKRAFARAGFETRVVHPFATKQYRMPADPGNKTDENDLYAQHRAAVAGFGLCELELEPPYRDLQLRARHRRNLVQKTAALACQIRDHLHLAMPGYAGLFDRLFESPTALVIAARCDSPTKLLELGQNRLSRFLSKSKVPHQLRTVDKVLAWAAQAADDPIRDGPMHHAIWTDLHELYQHFQRRIAALERQLACDVVQTPYVRLMAIPGINVVSAAELAAEMGPISGYANANAITGRAGLFPSRYQSDQTDNASGEMIRQANRRLRCVLMAIADNLACHCNYYRGQAELDIARGVDKRAIRVKIAKRFSRLALACVAGDEPMRHPCFQKPDSILDKLRRFHQQHATPIDVLLADLEAAVGKLPYNTCRHEAEIVADVLQQHTRRRRGAGLIGDVLPAVLARLNLRITQANKKRDRS

SEQ ID NO: 281767 - protein, 372 aa, unidentified
MTKNNIATKSPGRKESNRQSDRITIGMDLGDKTSRYCVLDDGGEVIAERSVASTKNGMLRSFAAMKRCRIALEVGTHSPWVSRLLSKLGHEVIVANARQVKLISASSRKDDRLDAQMLARLARADPKLLAPIRHRSEEAQADLNRIRVRAALVEARTSLVNAARGLSKAAGERLPKCGTDQLDVERLEELPAALGEVLRPLVEEVKSITGKIKECEKKLEQIARDKYPETILLKQVNGVGTLIALTFVLTLEDKTRFAKSRDAGCYVGLRPKRSDSGESQPQLRITKEGDIYLRKMLVQGAHHILGHRGADTDLRRWGLKLAERGGKNAKKRAIVAVARKLAVLLHHLWVSGEVYEPLRNAGQRSGLKKAAA

SEQ ID NO: 281768 - protein, 365 aa, unidentified
MTVIHYIGLDVHKKTISYCIKTADGQIVREGKLEASRAVLRAWAEGLTAPWHGAMEATLFSGWIYDTLKPYAEKLVMGHPARMKAISAGKKKSDAIDARTIADLLRCNLLPTCHVMPPELRDLRRLLRYRNLVVQQSVRMQNKMAGLLMESGTPFLKNKLHGKKYFTELVKSLQEVPESVKDLLRMSRSSMEMFQATQKQLVERLLSEPALEQRVERLMSIRAVGPITALTWALEIGDPHRFASIADAVSYCGLTAALRSSAGKQQRGPISKQRNAWLQSVLIEAAKLAPCWNPQLAALHAYELKRGHANRATLQVARKLVAYLLAVDKSGQPFQVHTPPSPAKTKANNKTRRKNRKAAGLLPAA

SEQ ID NO: 281769 - protein, 379 aa, unidentified
MERIIYIGMDVHSTSYSLCALEPVFGQENKFFFETKVAAEPSNIIKYIDDIESCFANDECTFVTGYEAGCLGFSLYNYLKGRGIDCKILAPTKMSEEKGGKKVKTDKRDARTIAQNLAYGTYSAVFVPTEEDLAVRDYIRMRNDHKAAVKRIKQQINALCMRHGYIYQRTKWTAEHLKYIKGLTLSPLYREILQEYLATMEQLNNKIKAFDVRIEELSKTKRYKDNVGKLACFTGITRSRALAIIAEIGDFRRFLKPLNFAAYVGLVPGEKSSGKKQKRIAITKAGNSHIRKELIEAAQSICRGLPGYKSRALLARQQGNDTTVINYADKASARLRRRYYKLERCGKKHNVAVTAVARELSCFICGMMNGLTEVQIKKA

SEQ ID NO: 281770 - protein, 415 aa, unidentified
MGGRVGRRDLIGTCSECLVTVLSALPDQAALPDREDGMQSMTQEDTLVVGGVDAHADTHHAAALDQRGALLSTNSFPTTTSGYRELLDWLSGHGEIDVVAVESTGSYAAALVRYLRQHGVRVVEVNQPHAHTRRRVGKSDPIDAEMAARLFQAGNAKAVPKQTDGIVESIRLLRVARHSAVKSRSAALVQVRDLIITAPQEIRDQLCCRKTLRGKVTVCARFRPSGRELRSPSQAAKFALRSTAQRVQALDQEIGALDRELEQLVAAAAPRTVQLLGISTGHAGQLLVTAGQNIERLHGESSFAMLCGASPIPASSGKTTRHRLNYGGDRQANRALHLIAVCRLRYCERTRAYAKRRTAEGKTQREIMRCLKRYIAREVFTSLRADLAETAQPRPAVSTTIMCGNPGFGINRTRT

SEQ ID NO: 281771 - protein, 343 aa, unidentified
MKISRVGVDLAKNVFQLHGSDRQGKVVWKRRLTRDKWLNTLVDAIEPGCEVGMEACTGAHHWARELQSKGFTVKLIPPQFVKPYIKSNKNDAKDAEAICEAMSRPSMRYVQVKQVYQQDIQAAHRIRSELMNHRKAKANQLRGLVAEYGLVAPKQYARLRAAVPDWLEDAENGLTDLFRRLLHGLWEDLTTLDKRITEMDKEIERLAKEDPMAQRLQQLRGVGPLIATAMVATIGDGKQYKHGRQMAASLGLTPRQYSSGGKERLLGISKRGDVYLRTLLIHGARSVITHAKHKDDGLSRWVKDLGARRHTNVVAVALANKTVRMAWAMMTKEVDYDPTLAAA

SEQ ID NO: 281772 - protein, 334 aa, unidentified
MNNYIGLDSHSSTSTFCVVDERGVEVDSTTVRTNGRLLVNYLRSIKGKKYLTFEECELSNWLYEILVKEVDKILVCNPVYNREYKGKKTDKIDARKLAKLLRGNFLTPVFHDGSQREQFRDLMSAYTDLVEEAVRLKLRYKSLFRKSGNNVTGEQLYSNESFLDGLERKDHNFIGRNLYHGLQELEESRKRYVKEIIRLSKRFKEIKRLKTIPGIGVIRAAQISAQVIDPKRFSSKYRYYSYCGLVRHKQESGGHKYGSTKIWGNRVLKCVYKMAAQNAIKGDNGLRRYYESLRKKGLTDKNARNAVSRKISSISLGLWKKDKNYDDKKVITVI

SEQ ID NO: 281773 - protein, 411 aa, unidentified
MGDLLQRALPVDTLVVAVDPGKALNRVWLSTDTDGLLLDPLTLPVLRPGIDELTRLIQLHRGNRHPVIAIETTGALHQAWAAELGQRFPDSVRLFAPSETVAARSQLGSRRFKTDDRDCAALTYLARQGHGRRLGVDEHELLTAVRFRRGLLAERKAAQQRLHDQVNALCPGLSAPSGQGRALDLTGVAGQAFLDCLIDLEGRPASVRSLQARAVGRLTANDARYWSARWKACLPAPSDAPVRVERLARSVSRWRQLSADIVAVEADMERLLALTAGQVLTTLPGVKTVRAACFSAFTLPIDRFPTAGHLYSATGLAPASYQSSSIERRSGISRQGLPEHRDALMAIAWGLSQYCQPFIEREEQLRVRGMRPMQVRVAIARHACRLVYRMLTTQDVFDEQRYRRARHQTGR

SEQ ID NO: 281774 - protein, 428 aa, unidentified
MNQEDRSRLEEFRQFRKEVRGSTEYLLVGIDVAKEKHYAFLGTATGKTLFKRLVFENNLEGFEKLLVQAEAMKVQHGLKRVVFGMEPTGNYHKPLGEHLIRCGHRVVLVSGVAAHENRKTLDGRWDSNDTRDAANVADLISQGKCLFYEFPVGTLQDLRNLLSLKRRLKRQEHGYRVRIRNHLVAKYFPELDGYFEQSEKTSLAIVRWCLDPSVIAGWGYQKFVETVSSGPRRLSQEKRLRAIWQRAVGSVGCEVGPAVEVEAQVMVEGLRRIRESIQRIEEEIYEACSQFPEYEFLLSIPGFGPDVSSKVLGALGDPFRFQNGRQVLKMAGLDLSAERSGKTSERAIPVISKKGKADLRYALYQAALIASIKNRDFIVYYTNKLRGREKEPGIKTKMRVKLSAKLLIIAWTLMKKREPFNPDYLAIE

SEQ ID NO: 281775 - protein, 356 aa, unidentified
MDKYIGFDIDSKKTVACVVEKGKKERYATIGSDVGAMRSYLKGQKSDGSRIHLTFEVSGQAGFIYDSLIDCADTITVSNPSKMTWIYRTAKKNDRIDSRKQAILLSIGEIPKVHMPEAEIRQWRNVILHRRNLVNKTTEVKNRIRAVLKSQGFSSPEQKGSWWKRSNRLWMRGLSEQQVSSIGLWRMNLCNLMEQLELLDGQVKRVTEYLDNYLGRHGGGKLLMSIPGVGPRTAEAILAYTDDVRRFGRTKQYCSYFGLTPRLDESGTSRRLGHISKLGPSVVRWLLCESSWKVIRKSSALRAFYERVKAGQAGRKKIAIVAVCRKLLSIMRAMLETGELFNEELVCRECEVKRAC

SEQ ID NO: 281776 - protein, 400 aa, unidentified
MPANLRLNSNLPSATSEKPVLYLALELGWNSWKLAFAAGPGPAPRRREMTARDLAGLVREIAEAKRRLKLPADCPVMSCYEAGRDGFWLHHWLVAQGVQNVVVDSASIEVNRRQRRAKSDSLDAAKLLSMLLRYAGGETKLWSVVQVPTVEQEDARQLHRELMTLTQEATEHINRIKSLLATYGLALETIDRHFPKKLKELRQWNGTPLPEALHQRLLREFERLQVANRQARQLEQQRAKEVRQREDSAAIDQVRKLLGLKAIGIGSAWLYVHEFFAWRKFKNRKQVGSLSGLAPTPYASGQLDHDQGISKAGNKRMRWMAVEIAWGWLHFQPDSELSRWFMERFGRGSSRQRRIGIVALARKLLVQLWKYLETGVPPAGALLSDWRPKARLTTRSIEAA

SEQ ID NO: 281777 - protein, 321 aa, unidentified
MNKNVTVPKYVGIDVAKATLQVHLQGHQIEFENTPLGHLLLCNKLLALTAPHVVCEATGGYEAAMAQAFHDANIAVSVVNPAHVRAAAQAQGKRAKTDPLDAASLTDYGQRFQPAPTPKVAALQRQIRDLALWLKQLIDARAVAKAQAEHQVDAFVKQQHAQLLAHYLEQIKLTEAKVKTLLAQDHALQQRVDCLVQIEGVGLRTALMVLVYMPELGTINRGQAAALAGLAPWTRDSGTMKGKRCIGGGRAEIRPVLYMSSLSSIRHNSILKAFYKGLRERNKPGKVALTAVMRKLLVYMNYKLKNLQSPLSDQKLQTPKL

SEQ ID NO: 281778 - protein, 384 aa, unidentified
MDRIVGLDLGEKISYCEIKGEEVVERATVAGIAGLVRLLGPNTLPAKVAFEACREAWAVHDQLRAWGHTPLMLDTTRVRQLGIGQHKRKNDRIDAEVIARALGMGRIPLAHVLSPHRRELRLQLSVRRALVETRAQYATTIRGLVRAGGKRLPPCNPENLPLKLAEEPLNPTTRRMTEPLVKLLQELTPQIKLVEAKLEQLCEGEPVIAQLQTVPGVALIVAAAFVSVIDDAKRFTDAHQVEAYLGLVPSEHTSGKRKLGAITKQGNSYMRALLIQSAHCILRLRADDPLKRWGETVEQRRGLKIAVVAVARRLVGILWAIWRDGTRYDITKLGHASARGLSSHAEELKAEAAQMRADVSPTGNRRSAPRAAKRATHSREVSMT

SEQ ID NO: 281779 - protein, 363 aa, unidentified
MNVIHYIGLDVHKKTISYCIKTADGQIVRQGKLEASRAALRSWAEGLPVPWYGAMEATLFSAWIYDTLKPYAQKLVMGHPARMKAITAGKNKSDSIDARTIADLLRCDLLPSCYVLSPELRDLRRLLRYRNLVVRESVRMQNKMAGLLMETGTAFDKTKLHGKKYFTQLMNSLEEVPEWVKDLLRMSRGSMEMFQSTQKQLVERLLSEPALEQRVERLMTIGAVGPITALTWALEVADPHRFASIADAVSYCGLTAAFRSSAGKQQRGPISKQRNAWLQSVLIEAAKLAPRWNPQLAALHAHELERGHANRATLQVARKLVAYLLAVDKSGQPFQVHTPPANTKEKNTTRRKTKKAAALLPAA

SEQ ID NO: 281780 - protein, 468 aa, unidentified
MKRKSRHAKQQKASLLSEDLQLIEPDAAAIDIGSRSHWVAVNPQRASEPVREFGTFTTDLNRLADWLTECRASSVVMEATGVYWVTLYELLEERGFKVYLVDAHTVRHLPGRKKSDVVDCQWIRRLQSYGLLQGSFRPPQQIRRLRTYLRSRSKVLECAAQQQLRMQKALTLMNIQLHHVISDLDGVTGMGIVRAIVAGERDAKQLARLRDPRIRASRETIEKSLQGNWQEELLFDLKIALESYDHFQTQIAAYDEQIRQELKALPSKVDLQKQPLGAPRPKSCRTRPGTTQQQQFDLRQELYRISGVDLTRIDGVSLQTAQKVLFEIGTDVSAWSDERKFSSWLGLSPNHHISGGKVLKRKSRKVINPLSIALRLAARTLRNSKSALGANFRRLIAKIGMPKAITAMARKLAVLIYRMLKYGSDYVDKGMQHYERKYQETKLQYLRRQAARLGMQLVPNQGVATSVH

SEQ ID NO: 281781 - protein, 411 aa, unidentified
MDVVNARCAGLDVHKATVVAGVRVPGPQPGARRGETTTFATTTRGLRDLTNWLRTHGVTVVAMESTGVYWRPVYEALEGLVQLVVVNARHVQMVPGRKTDVKDCEWLAQLLECGLRRGSFVPPRAVRDLRDLTRLRKALIRERGHHVNRIAKTLELAHLKLSCVVTDLMGKTGRAILQALSAGVDDPERLAACAQGLLRKKQAALREALGGRLTPHYAFLLQQHLSLIDGLDAHIATLDTRIEAAMAPLAEAAALVQTMPGVAARAAQAILAETGVDMDLFPTPAHFASWARLCPGNHESAGKRQSTTTGKGATWLRATLQETAWAAVRSKKSYYRALYHRLKGRRGAKKAIVAVQHAMIVALWHMLKHGVTHQDLGADYFERRNIARIRRHHVRRLEQLGYDVTLRGKAA

SEQ ID NO: 281782 - protein, 400 aa, unidentified
MKASKRYLRFCGIDMGKHKHVACIVEKDGRYLLQPKSIRNDAHGFETILNCLKQTGRTKSVLTGMEATGHYWYSLHDFLTRQGYNVVVLNPIQTAQQAKQAIRKCKTDRYDAFHIANLLRTSQYKAAVVPDELAMTCRQITRLRYRIVKQAAMIKQLLNSRLHPVWPEYEALFSSKFGKTSMELLKKAPTPKELMELDPDELSELIHRVSKGRFGPAQTQKILQSARNSVGMQRGHYGISIGIKFLIEQIVALEPVRKKMDAEILKLSAKLPQYLFTLPGATELTIVSLYGEVSPIEAFEKPSQLVAFAGLDPKVFQSGQYDAPRRHISKRGSPYLRRTLWQMAYRALITEGDLRDFWRRKHRQNKHHLVATTAVANKLCHVVWRIMTDRRDYIRKGYNP

SEQ ID NO: 281783 - protein, 411 aa, unidentified
MKVVHEVCCGIDVHAKMLVACLRLANGEKQLRTFSTMTAELLQLRDWLVAAQCTHVALESTGVYWKPVFNILEDGLTVILINPEHARALRGRKTDVKDAEWLADLLRHGLLKASFIPPPVIRELRELTRYRESLVREQSAVANRIQKLIESGNIKLGQVASDALGVSGRAILKALATGEKDPRQLVALARGKLKEKSLSLERALEGRLTVNQRFVLGELLRRWEELETADARVTQEIDKYVQAHPKLARAREVLDSIPGIGPRAAEIIMAETGIEMPVFGDAAHLASWAGLCPGNKATGGKRLSGRTRKGNTYLRSVLVQAAWGASMKHHCYLSSQFQRLTKRLGRKKALVAVAHSLLVIIFHVLQRDQTYTELGGDYFDRHHVEQQREYYLRRLQMLGLKITVEELPAAA

SEQ ID NO: 281784 - protein, 454 aa, unidentified
MSKSIKKTKTGVKKITQFEIIRSQVAGIDVSDNDSMMVAYPISKTEIKVEAFECYTRDLRRISSTLKLHHIESVAMESTGVYWIPLFLLLQEDGFEVYLVNSKHTKNVTGRKDDESDAEWIQKLHRCGLLSASFQPDNQTRALRSVVRHRSSLVKTRSTYLNRMQKALEQMNLKIHTVISDIDGKTGQAIIKAILAGERDAVKLANLRDRRIKASHEEIVKSLEGFWADEHLFELEQCYMLYEFHNQMIKNSDLKIEKILQQIIKSKNNGIVPKLGKLKRKDKNKNDFTFDATNYLYLLSKVDIASKNGISGISEISALTIYSEIGDNLSRFKNEKHFTSWLGLVPNTKISGGKVISSHIPKKKHSAGQAFRMAAFGLCSKKNPLSDYYRKVRTKAGHPKALVALARKLAVIYYQMLTTKKAYNPQSLIDYQEKYKEKKIRYLEKYLIKLKEAV

SEQ ID NO: 281785 - protein, 411 aa, unidentified
MTQTEDRSDRSILVAIDVAKLKNDVLIEAPGKRRKQRLRVLNTQSDHDRLIKHLSGLEGRVEVGFEATGNYHRPLAWRLLRAGFRLHLISSVALARTREAIHGGWDKNDPKDAQVMLHMLKTGLTQTYHDPLEHGTNDWQELSKTHEVISKAKTEAIHRLQTHYLPLYFPEIEKFRHNSRSEWFFAFLDQFPVPSTIVTMPKRAFIEAAWDVVGRKVAKTQVLSDIYDTATSSIGLPVAPDSIAVAMCRVVIAHIRQLIRQRDEIERIADAVLSDQPDYQRLRQLPGVGPIIALTVLAEAGDLRRFGHGRQFLKFCGFDLATHQSGQFRGQSKLSKHGNARLRRAFWMAGQIAVRQRANSFRDKFERYTAKDRYNRDLRRKALTAVAAKMARVAHSLIKHGTDYRPYYGVR

SEQ ID NO: 281786 - protein, 368 aa, unidentified
MSKLAKVERFFNTIKLTSDDEVFVGVDVHKKSYHVALHLNDMPAIDFRMGSQPQQLNKKLQPMAQSIKNIVYETGPTGYGLARHLIKNNLPTDVVATSKTPRSSVADDKTDKLDSIKLAQYAAKGLLRAVTIPTPKQEADRQLYRMRHRQAINFAKVKVQIKSFLLMHGIEEPDGLANWRIASVGELREMRLLDTLRLSLDELLSDYDYFKNRIKVLNKVLADNLDKGVLGRRMDILKTHPGVGTVVACQYATELFHYKDFSSTRQLYKYLGLSPRVSQSGERSSSGSINKAANGRLRNNLIQAAWIWVRTDIEAKKCFWRIYENCGGIKQKAIVAMARKMSGHLWAMLMNDQPYDENKAKCRHNNER

SEQ ID NO: 281787 - protein, 410 aa, unidentified
MELLHRRCCGLDVHKETVVACLRLVADGKVTTEVRTFQTTTADLLRLSEWLAANDCTHVAMEATGVYWKPVWHILDDGEFELVLANAAHVRNVPGRKTDVNDAMWLAELLAHGLIRASFVPDTQTQEMRNLLRTRKQLVREQSSHVLRVQKILEDANIKLDSVLTDLMGKSGRAMIEALIAGETNPAKLASLADRRAKASHEEFREALRGRVTKHHRFLLRLHLNQIDALDAAMATLDAQVEANLGPFRTAVELLISIPGIKNLGAHVIVSEIGIDMSRFPSHAHLISWAGICPRNDESAGKRRSNRLRKGAPWLKTTLVQCAWAAVKKKNSYLQAQFYRIKARRGPKKAIMAVAASILTAIYHMLKDGTMYKDLGRNHFDRRSTDKQKQRLVKRLAELGYVVEIKPLAA

SEQ ID NO: 281788 - protein, 388 aa, unidentified
MNVTADQPEAPTAIRTDLGAIFVSLELSRSSWLITSLSPGGGEKMSKHTVRGGDVSGLLQRVAQLSEKARVRTGKVFRLIVIQEAGLDGFWIDRVLQNEEVESHVVDPASIATSRRRRRAKTDKIDGETLVRSLLAYKRGEPRVCSMVKAPTPEEEDHRRLCRERKVLTAESVRHVNRIKGLLFCQGISGYEPLRRDRRERLEELQTGDGRRLPQHLKAQVDRELDRLELLLKQIKTVEGERDALLAAAQTAMPAPAAMLLDIKGIGSEFAAVLWSEGLLRHFDTRRQVAAYAGLAPTPWQSGAVDREQGVSKAGNPRLRTTLIQLAWLWLRNQPQSALTIWFHERVRRNAGRLRKTTIVALARKLLVALWKYVTTGVVIKGATMKAA

SEQ ID NO: 281789 - protein, 340 aa, unidentified
MQITTIGLDIAKNVFQVHGIDAAERVLVRKQLRRGQVMKFFEALPPCLVGMEACATAHHWARELTKLGHEVRLMPAKDVKAYVKRNKNDAADAEAICEAVRRPTMRFVQPKSAEQQGRLMQHRARDLLMRQQTQVINALRAHLAELGVVAAQGREGLKQLLAIIADKKDARLPIDARASLIVLAAQLQALHTMIGSIEKRLMVQHRANEASKRLQSIHGIGMIGASAIAATVTDPKVFRSGRDFAAWIGLVPRQDSTGGKQKLGPISKQGDRYLRRILVVGAHSVLRRAKQNPEKYPWLTQLLARRPFKVVAIALANKLARIAWALLASGGHYRPRLAAA

SEQ ID NO: 281790 - protein, 312 aa, unidentified
MKKVFIGIDIAKDTIDISVLPSGESWTVGTTPTELSETVDRLAALKPTNIVMEATGGYETRLAASLATAGLPVAVVNPRQVRDLARALGILAKTDAIDAHVLALFAEKVQPECRPLPTDDEHALKELLTRRYQLVDMRTAESNRRQQIVSKQVYESITTLIESINHELDVIEREIDNRIKTSPVWRAKDKLLQSVPGIGKTTASMLIVALPELGHLNRRQIASLVGLAPMNRDSGTFRGRRMITGGRALIRAGLYMPILSAVRYNPKIKPFYDRLITAGKLEKVAITACMRKLLTMLNAIVRENEPWHSITA

SEQ ID NO: 281791 - protein, 342 aa, unidentified
MDEYDGRQFVGIDLHRQRSVIVRQSESGEQLSAVRIVNDPVALELQLEQAGTDPEVVLEATYGWYWAVDVLQACGAQVHLAHPLGVKGFRYRRVKNDVRDAADLADLLRMGRLPEAWIAPKHTRELRELVRYRAKLVATRSGLKAQIHAVLAKAGVLIAVSDLFGVTGRQRLAKVPLAPAYTERIRSLLELIDILDGHEARFAALIAQRLDTHAGYQAIQQVPGIGPTLAAVFVAEIGDVHRFTDAAHLCSWAGLTPRHRESDTVVHRGHITKQGSKAVRWAAIEAVQRHPTTPKISADKQRIEARRGKNIAKVAAARKLLTLVYYGLRDGHIRALDRARAA

SEQ ID NO: 281792 - protein, 389 aa, unidentified
MDTMIARVAGIDVHQATMVVTVRVPSADGSRHGETQTFGATSAELIALRDWLEAQRVTHVALESTGVYWRPLYYLLEETFTLVLVNMKHLAHVPGRKSDVRDSEWLAQLLECGLLRGSLVPPAPIRDLRDLTRYRKRQVDDRAQEVNRLHRTLEDAGFKLATVMSDIMGVSGRAMLAALLEGSTDVVAIAELARGRLRRKLPELQRALHGRLRPHQAFLVTEILAKIDYLEEALERLTAEIDRHLAPFEPAMANLMTIPGVARTTAAILIAETTGDMSRFPSAAHLCSWAGMCPGQDESAGKRRRGKTRKGNRALRTALPGPRPIPNRRRCELATIGSNGSAGTSAPSWRSATRSSKSRITSCATASPIRNSAPTISTSVRRSARSVAT

SEQ ID NO: 281793 - protein, 398 aa, unidentified
MTESSDYESVQVFIGVDVGKDTHHAVAINRSGKRLFDKALPNDENKLRSLISDLKQHGQILLVVDQPATIGALPVAVARSEGVLVGYLPGLAMRRIADLHAGEAKTDARDAAIIAEAARTLPHALRTLKLADEQIAELSMLCGFDDDLAAQTTQASNRIRGLLTQIHPAPERVLGPRLEHPAVLDLLQRYPSPEKLASLGEKKLAAQLCKLAPRLGKRLAADIAQALAEQTVVVPGTNAAAVVLPRLALQLITLRKQRDEVALEVEQRVLAHPLYPVLTSMPGVGVRTAARLLTEVACRAFASAAHLAAYAGLAPVTRRSGSSIRGEHPSRRGNKALKRALFLSAFAALRNPLSRAYYTRKMSQGKRHNQVLIALARRRCDVLFAMMRDGTFYTPQGS

SEQ ID NO: 281794 - protein, 381 aa, unidentified
MGDHIAAFVAFDTSKLRNAVAIAEEGREGEVRFFGEIDNTAEATVKLVKKLAAKYEHLTFCYEAGPTGYGLQRQISDLGYECTVVAPSLTPKRPGDRVKTNRRDALDLAKLMRAGQLTAVWVPDPRHEAMRDLTRARGAAAQDVRQKGQQVSAFLLRLGRHYDPDKNTWTKAHMNWLTSQKFEHPEQRIAFEEMLLAVRQAQERVGRLEEAIRQAVPDWSLAEVVTALMAMRGIDMVTATAFLAEIGDLSRFRTPRQLMAYLGLVPSESSTGNTVVRGPITKAGNRRARRLLIESAWSYRHPPRIGRDKQAKVAAAPRAVAEIAWKAQHRLYRRYRALIRNGKLKTVAITAVARELAAFIWAIGREIANTGRAQAQQGIRG

SEQ ID NO: 281795 - protein, 412 aa, unidentified
MYYVGIDIAKRSHVACIMREDNVLEVQPFAFASTQEGFRKLLVHLQSLGCPRSDIIIGMEATGLLFENLYRFLRDLKYLVVLLNPYQTSKFREMDTMKRVKNDNIDSIMIAALIKSGRFSEGYVSQDQLQSLRVLYRHRASLEDQLKAIKRQVSTLLAVVFPELETLLSSPFSVTGLALLEKYPTAKHYEYASCERILKTFRGIKGNNFSKEKAQKLLELAKESIYSGSAKEERALSIRSNITLIRLLSSQMEAIEEQMLLLFHETQAAPSEQDEMASLIDNLRTIPGVSDKTILALLAECGNLDRFHNAKALTGYLGLYPTLEQSGGSSKSGKLAKRGARLAKKAIYMAAIASIRHNAQLAQVFRNYRSKGRAPKECLVIVARKLLGIIYAIYVHNTPYDPARVFNAKVHH

SEQ ID NO: 281796 - protein, 355 aa, unidentified
MNVTHYIGFDVHKKSISFCVKTADGQIVEEGKLSAERGALRQWAMARTQPWRGAMEATLFSGWTYDTWKPFAAQLDMAHPAMMRAICAGKKKNDKIDARTIADMVRCDWLPVCYVAPPEMRELRRLLRYRSLVVREAVRMKNKIAGLLMETGSPYNKEKLHRKKYFAELVKNLEEVPESVKDLLRLTRGAMETFEATQKQLVKRLLAEHELGQRVERLASIPGVGEITALTWALEIADPNRFSSSAQVMSYCGLTSALQSSAGKEQRGPISKQRNAWLQTALIEAAKLAPRWNPQLAEVHERELTRGHRNRATLAVARKLAAYLLAVDKGGKPFQLRTPPPAEAAATAAEGERAA

SEQ ID NO: 281797 - protein, 465 aa, unidentified
MAARKKKRMSAQVVEDEDYQLHYEKVAGIDVAKESAAVCIRLPAAEGKTHRTSHLREVIATVPAITELAWELKTLGVQMVSMESTSDYWRIWFIVLEEAGLAVQLVNSSQARSLPGRPKTDKEDARWIARLTEMGLLRPSFVPPPEIRALRLLTRHISDLTADRTRYWQRLEKLLEDGLCKLTSVVSKLAGHQTARAVIEAMIGGERDPRALAALGKGNMRGEKLPALAAALTGMRFGPEHAGVAASLLAAIDLLEEELRVAEDAVAAKLAAIPASWGVDADGATGPDAGREEGAPVLPAVDRLDEIPGLGRESAAALIAEIGLDMSRFPTPEALVSWAGLTPTARQSGPRKGRGKKGRGNTYAKHIAVLAAYAAANTDTFLGERFRRLASRPGGGGRKKAGCAVGRSILVIVWHLLSDRACRYRDLGPDWHARHTDRNRKARSARRQLEALGYDVIITLREDAA

SEQ ID NO: 281798 - protein, 411 aa, unidentified
MEVYCGIDWAEDHHDIALVDRDGKLLARRRISDDAAGLAQLLVMLAEHGDTPDDLIPVAIETPRGLLTACLRATGRQVYPINPMAVARYRDRHTVSGGKSDHGDSVVLANVLRTDLHAHRPLPADSELAQAIAVLARAQQDAVWDRTTAHNKLRSHLREYFPGFLAAFAGARGGIMRPEARTILAAASTPSAAAALTADELRSLLKKAGRRRGIDTEATRLHEAFHGEQMRQLPLVEQAMGRQTLALLRQLDAACASADDLEQAATASFYQHPDAGIITSFPGPGPLTGARVLAEIADDRSRFCDAKGLKAYAVAAPITRASGKTTSVTHRRVKNNRLNAAGYTWAFSALTASPGARAHYDRRRDDGDGHAAAQRNLFGRLLGCLWHCLTTGQHYDEATAFPGNTKLPTAA

SEQ ID NO: 281799 - protein, 392 aa, unidentified
MYIVGIDIGKNHHEASIVSPEGKQIGPSLRFATTHKGADSLMRFIFKNIGNSPCVFGMEATGHYWYPIYSFLKAKGYTIYVINPIQSDSLRKMYIRQTKNDSIDSFLIAEVIRFGQFGTTSMADENILAMRQLCRYRDSVISSRTEIKLRIGTIMEQIFPEYEKQFSSLWVSTSMGILEKYLTPENIENAPIDELFEIIKDKSHNRLTKAKAISIKEAAADTFGIKIAQDAFSFQLKQLIDRMNFLDKQIEALDIEIMKYYEQFDCYLHTIPGIGIIGAATILAEIGDISRFKNSSALVAFAGIDPTVRQSGEFNSTHNHMSKRGSPYLRHAIFLAATTCSFHNSPLNAYYKKKRDQGKHHLTATGAVARKLTTIIYAVLRDSKPYEPKKFC

SEQ ID NO: 281800 - protein, 590 aa, unidentified
MDTQQFEVIRPKCAGLDVHKKSVVAAVCTSDPVTLTASYKTKVFNTTNSDISALRDWLLAQDCRDVCMESTGKYWIPIFNILEPHMHVILTHPKYVKAIKGKKTDKRDAKWIANLFRFDIVKASFIPPADIRALRELSRYRLKLSYMRTAEKNRYQNSMTSRIRIDCVLTDPFGLSATRIMDYLLSGEPFDEEKCRSLIDRRVKASKDEVMDTIHGYHILEEQKFKMTHAKAHMDFINKSIDEIEAELFLRSRQYDVQVKRIATVTGITELSALFILSEIGADMSVFESDRHLCSWVGLTPANNESANKKKSTRCSKAGQYLKPLLIQCALAAVKSKKEPYFAIKYQRLSKRRGKKKAIIAIARMMLTSIYHMLSDNEDFHPDDYEATINPPKQKPVVLTLDNTLQFLREQGADPETLKLIQQQCVAQFLDLPSNFKELDLRKSLIRNMKDFILEVGRDFTFIDEEFRVQVGGEDYKIDLLFFHRGLQCLVAFELKVGKFKPEYISKMDFYLEALDRQKNKENENPSVGMILCASKDDEVVEYAMSRTLSPMMVAEYQLQLPDKNILQKKLQELINIPLLEDDISKQDEN

SEQ ID NO: 281801 - protein, 425 aa, unidentified
MKATKISSTAQLDSLLDVCVDISKAKLNVYFELGDQAFDDEWPNTTRQIERKLRQCERLAQEHGLRGLRVVCEPSGGYEKKLLHTARRLGHLTAYVNGEAVARFRVVETNDNGKTDIKDPHIIRTLARLNKTLRVRDLPGEYQLLRKCGNLYEQADKAVTRIRGRLHRSLLELFGDYSFAKDFLYTVSGQALVDKYGCNPYRIVRAGKKRFEKAMRRRAPRIRQTTLDRLWENAVTSARHEFAWDYAELLELQLRQHYEEFLLYSGRKAAFGEQLVSLLNRLREKDPKVPAPTRGVISPKNLARLIGETGPITDFANWRMLLRYAGLNIQMRQSGQYKGQYKIAKRGRPLLRKILALIVLPLVRCKDLYGPYYHRKRRTMPGQKAMVAVMRHFLRKFHGWYRSGQAFDEKRYFTSISQYDLREAA

SEQ ID NO: 281802 - protein, 487 aa, unidentified
MHLRITNYSAKTSDVHRFDFEFAGALERDNEYSGLAVAPALYIAFAALKQAHPVPLTLALRRLAMKTHATGQSEHEFAAFIGIDWADTKHDICLQAAESSQREFTVLPHRPKDIDEWAGSLRRRFHGRQVAVCIETSRGALVYALQKHDFIVLFPINPATLAKYRQAFKPSRAKADPTDAQIALEILLGHRDKLKALQPQSPAVRELAMLLEERRQVVDDQRRIVNRLISNLKHYYPLAHDWFEDKGTILFCDFLTRWPTYKQLHQARRTTLEAFFRAHNCHHPKLIEERLAAVRNAAPLTEDPAIIRPKQLLVEGLVEQLRTTLKSIDRFDAAIVCLAPTLPDYELFHALPGAGPTLAPRLLVAFGEQRDRYASAAELQMYAGIAPVTESSGKQHWVHWRMQCPTFLRQTFVEWAALTIPRSFWAKAYYRQQRARGCAHQAAIRALAFKWVRILYRCWLNHTPYDESAYLNALKRRGSPLLATLAT

SEQ ID NO: 281803 - protein, 344 aa, unidentified
MDHFVGLDVSVKETSVCIVDDTGRIVKEVKAASEPQALLKVLGNPAYRFKRIGLEAGPLSQWLFSGLAEAGLPVVCVETRHMQAVLKAQINKTDRNDARGIAQMMRAGLYRPVHVKTLRSQKLRMLLTHRKLLQSKAIAIENDLRGTLRNFGLKVGMVGKMRFEARIKELVESLPDLAELVEPLLIVRRSLREQIVILHRRLLAIVRDDEVCQRLMTTPGVGPVVALTYRATVDVPARFRKSKAVGAVFGLTCARYQSGEIDWSGRISRCGDEMMRVMLYEAAQSMMRSKKWSWLKAWAMQIARRRGMKKAIVALARRVAVIMHRIWVDGTEFRWTREQAAAAA

SEQ ID NO: 281804 - protein, 322 aa, unidentified
MSLPGPLCIGIDVSKATLDIAASSAIEPFSVANDTDGFDSIIAELRKHSVALVLMEATGGLEAAVACTLQAEGFELAVVNPRQARDFARAMGYLAKTDRIDARVLAQMAEVINRHPERSRFIRALPDAERQVLNAMVVRRRQLIAMLVAERNRLHPAHPQSRKSINTIIKALEDELARLDDDMNNHIRSHFKELSERLSSIKGVGAMTVAALLAEVPELGHLSRREISALVGVAPVNRDSGTMRGRRTIFGGRAGVRTALYMAALVATRYNPVIKAFYTRLVAAGKPKKVALVACMRKLLTILNAMLRKNEEWNESYHHVAP

SEQ ID NO: 281805 - protein, 340 aa, unidentified
MDKITKKSEFIGVDISKDHIDCALMSKDRPGLFKDNRFDNNLNGFESLEEWLQESDVELKNSLFCMEHTGTYGLLFFAWLSQSEIDFCVEPGLRIKRSLGMTRGKNDKIDARRIAEYAFTNCIKLSLFSFPSEEILHVKQLLTYREQLVRIRTSLKNSIKSHQQYEQITKKDTITKDISDQIKSYNKRIKQLEREITELIETDQQLRKNFELATSVKGIGLVIAAFMLVTTNNFSSFENGRKYACYTGIAPFEHTSGTSIKGKTSVSHLANKTMKTLLSKGANSAAKWDPEIKAYFKRRTEEGKDYKLIMNAISCKLVNRVFAVVKRQTPYVITYQHKVA

SEQ ID NO: 281806 - protein, 361 aa, unidentified
MESTTVIAFDQHAATTMAAVLLPEHGTPALHPLTSDIPTILRFVARLQREGAVRCCYEAGPCGFELRRALEARAISCDVIAPALIPRRPGDRVKTDRRDARQLAVLYRAGALTAIHIPTEQEEAARDLLRCREDIRADLLRARHRLSKFLLRHGRRFTGTKKAWSKRHEAWLRAQTWSRPALDQTHRAYLRAVTETLARLRDVEADLRALLDLEPLRGRVQRLRCFRGIDDLTALTIAAEFGDPRRFATAPSTMAFVGLVPSEHSSGSKRAQGGITKTGNAHLRRVLVEAAWHYRHHPFVGAALRARQRDAPAAVIAHAWSAQQRLHRRYARLAARGKPKQHIVTAVARELTGFVWAALTQ

SEQ ID NO: 281807 - protein, 377 aa, unidentified
MTKIRFVGLDVHAETIAVAVAEKDGEVRSHGIIPNRLESIRKTMAKLGPSKDLKCCYEAGPTGYVLYWQLTQLGVACEVIAPTLVPVKAGDRVKTDRRDAEKLARCYRAGELTPVWVPDAEHEALRDLVRAREAAKKDQLRARHRLRKFLLRHGKRPTDAGKAWTKKYLEWIKTHVRFAQAALEATLQDYLDEVDHVAERIGKLEKAIDAAVAQASPEIRAVIDALQALRGVAQISAATIVCELGSLSRFESPRQLMGYSGLVSREHSSGGKIQRGAITKTGNAHLRRVLVEAAWAYQHRPNVTGYLLRRQKSLELADETKQIAWKAQHRLHKRYKALASRGKNKNQIVTALGRELLGFVWAIAVHTEAQYRQAQAA

SEQ ID NO: 281808 - protein, 429 aa, unidentified
MNSTQNKKIEQVKETTMIVGIDVGSEQHYFRAFNWRGIELTRKPVAFSNSMEGFNSFYNTIMELMQKSELEEALVGIEPTGHYWFDLGQFMGEKNIKFVMVNPHHVHKTKELDDNSPSKNDRKDPRIIAGLVRDGRYFYSYMPTGVYAELRNASNRRFVLVEEQTRAKNRLQKWIAVYFPEYKGIYTRIDAKGGLLVLKQAPTPEEITKLGEEGIIKIWKDAKLRGSGHKKAMKILNAAMRSIGLKAGLTEARMEIQDLIEDYELQTRRLERVNDLIKELCQQVRYADKLLEIKGIGITTVAGFIAEVGDITRFDSTKELQKLAGLELVADSSGKHNGRTKISKRGRKRLRYLLFEAAISVVGKNEEFKEIHRYYTTREKNPLKKMQSLIAVACKLIRVFHVILTKGVSYDASKMLKDIRHPGEQLKAA

SEQ ID NO: 281809 - protein, 413 aa, unidentified
MIATTAYVGIDVAKRFHKLCVKDGHKRSLIPTLEIDDSQEGYDKLRQCFDTLKDRHHVQMFAVGLESTGTYHEHILDWCRHQPDVLVSLVNPVQTNHFMKSDMRRASTDKISAEMLAQFMAERTPSPTQFVADDYESTKRLVSHIHSLTKHKSAAINRLREQVALLWPEYERFFKNFNSKQCIALLTLVQTPTEFLKLSEETLKHVAVMGTTYTLRKDFLADVTSVAQRSQPRYARAKVEPIIKSLAEQVLFLLEQIGRVTEELKGMFTKALSEGSDPKAGASGKPLVATIDGVGEVSAMFFTACIGDPNRFAQGKQVCAYFGLTPRIHDSGDTIRGRGYIQKKGNSLVRYYLFNCVLAMIRKHNHPIARFYQRLVAKGKQKLVAITACMRKLVLIMFAMLKSNKPVKPNFVH

SEQ ID NO: 281810 - protein, 345 aa, unidentified
MELHTAGIDLGKTVFHLVGVNLRGEVVVRKKFSRTQLLRFTANLQVELIGMEACGGAHFLGRALRGQGHEVRLIPAQYVRPYVKTNKSDYIDAEAIAEAVARPTMRFVPIKTDDQLDLQSLHRARERWVMRRTAVINQIRGLLLERGITLRKGRRYVDTALPLILEDADAKLSGALRLLLAQLKLDLDQLAERIDEADAVIERTAGENEACQRLVAIPGIGPVTATALIAAIGNGGAFHKGREFAAWLGIVPREHSTGGQQKLLGISKRGNSYLRRLFVQGARAVLQQRTKQSSGLSAWLVQLTSRTHHNVAAVALANKLARMAWAVLAKNEQYRPPVLADVAAD

SEQ ID NO: 281811 - protein, 445 aa, unidentified
MHYKRLLSLIDSVSSYLSVGLDVGADFTWMSIALPNGSFIGKPFKIIHSDPRSRDLAVTKIKEAQETYSLKSRCFLESTGIYHIPLLCFLRDKGFDCSVINPIITKNSTNINIRKLHNDKFDSKKAAHVGRNVSLKTASLPDDAVVDLRNLVRDYYYFKDLQSAVALKLTAELKVSFPAYAKVFSKVTTQSSLKLLSSYPLPEDMLAASKEDIVDIIRSTARFGEAYALRKYDAIISAAQDAAVFGRALPSNAVRIRLYIDTYQEYQKHLDALLKALHETVEKLQDTLIYDQICLLQSLRGIGFLSAVVLIAEMGNFKLFSSPKKLYAYFGLDPAVKQSGKLNGDKVHMSKRGSSLARRVLHMAALNNVKVDKGSGTPVNPVIYDYYTRKCSGKKKPVAMGAVMHKLCNIIFAMLRDNKPFEIITPEEHCRRFAAEHPDKIRKAA

SEQ ID NO: 281812 - protein, 341 aa, unidentified
MKKFIRIGIDLGKRYFQVHCLETEGGRSISRKLTRSKMLEFFSQIERCRVGMEACGSAHYWARELVAMGFEVVLIPPAYIKPYVKRGKNDAVDAAAICEAMSRPGMRFVPIKSADQQAVLMLHKTREMLVKQRTMSVNALRGHLAEFGIVVAKGIGRVDELLALAQSDAALPQVAKSAVADQAQHLEGLDQSIEAVEDEIARAHGQNPTSRLLDEVPGIGTLIASVIAASVPDPGVFKSGRDFAAWLGLTPRQNSSGGTEKLGAITKQGNRYIRKMLVTGSTSVLRVAGRRKGALADWINALRARKPERVVAVALANKLARICWAIMTTGESFRVDTYVKV

SEQ ID NO: 281813 - protein, 412 aa, unidentified
MDVIHERCAGIDISKVDVKVTIRVPGAGKRRRRETRTFSSVTSGLLAMRDWLLAEGVTVAGMEATGAYWKPVFYLLEHEMECWLLNARHMKAVPGRKTDVKDSEWIARLVEHGLVRPSFVPPEPIRQLRDLTRYRTEVIRERTREAQRLEKLLEDAGIKLSAVVSDILGVSGRAMLAALITGNRDPHLLADLAKGSMRRKTDALIEALTGYFTDHHAFLARAMLDRIDACTAMEKRLDERIDEQIAPFRRRIELLVTVPGINTRTAQVILAEIGADIAHFPTAADLASWAGVCPGNNESGGRKGPGRTRHGDPWLKAALGQGAVSASRTKDTYLAARYRRITARRGKKRALVALQHSILISVWHMFTHDAEYADLGGRYFIERTGRARQTRRLVSQLNQLGYHVTLQTNGAV

SEQ ID NO: 281814 - protein, 322 aa, unidentified
MAQETIKFNQVIKCGCGLDVHQQVIVATVRHNDSEEETREYDAYTSSLTSLREWCKSEGVTHIAMESTGIYWKPVFNILEEDFEIILVNARHVKNVPGHKTDKKDSRWISKLLLSGLLKGSFIPPQDIRELRDLVRYKRKLTNQAASEKNRLIKMLEDCNIKLSSVVSDVNDGVSATKIINDIIRGVTDVDKLMVHLHGRIKADREDIRKALEGRVTEHHRFMLKIIKESIEKTEKIISKVEKQIDKAVKQYEVEVDLLQTVPGIGKDSAIAIISEIGVNMDQFPNEQHLSSWTGMSPGSNESAGKKKVPEPPTETNISDQL

SEQ ID NO: 281815 - protein, 422 aa, unidentified
MLEETRDSEEIIERIAALDIGKATLVCCVRIPNDGKAGRRLQEVQTYTTMTRALLTMADRLRCLGVSRVVMEATSDYWKPVFYILEAAGFETWLVNARDVKHLPGRPKTDRLDAVWLCKVAERQMIRPSFVPPPEIRELRDLTRYRVDLVAARTAEKQRVEKLLEDAQIKVSVVASDIFGVSGRDMLAALLAGERDPKVLAQLARSSMRAKISALEEAFTGRFTDHHAFLLRTMLARVDQISADIAALDTKIEELIAPFASAVERLDEIPGIGRTAASVILSEIGLDMSRFPTPGHLASWARFAPGIKESAGKKKGREATGHGNPYLARVLGEAALNAGRTDTFLGERYRRIARRRGKKRAIVAVGRSILTIVWHLLSDPETRFVDLGADFYDTHIGPERKKRNHIRQLEALGYRVTLEPTA

SEQ ID NO: 281816 - protein, 343 aa, unidentified
MDHFVGLDVSVKETSVCIVDEVGKIVREVKVASEPEALLAVLKKPAYRFKRIGLEAGPLSQWLFGALAEAELPVVCVETRHMQVVLKAQINKTDRNDARSMAQMIRVGLYRPVHVKTLRSQKLRMLLTHRKLLQSKAIAIENDLRGTLRNFGLKVGIAGTVKFEARIRELVENLPDLAALVEPLLIVRRVLHEQISVLHRRLLAIVRDDAVCRRLMTIPGVGPVVALTYRATIDVPARFKNSKAVGAVFGLTPSKYQSGEINRTGAISKCGDEMMRVMLYEAAQVMLTRTNKWSWLKAWAMKIARQRGMKKAIVALARRLAVIMHRVWVDGTEFRWTRKVVAA

SEQ ID NO: 281817 - protein, 353 aa, unidentified
MKQDKYIGMDIHQATTVVAVLDANGKVIWETIIPTQAGEMIRMLESLSGPLHVTFEETTQAEWLYEVVRRHVAEVVVCDPRRNKLLSEGSKGDKIDARKLAELLRVGMVRAVYHGQEGTRKLKQLAAGYQTICSDVQRTMARIKAIYRGRGIATPGRRVYQVKQRQQWLELLTDAGVRQRAAWLYEQLDYCQPLRRQARQAMLEESRKHRAVGLIRTIPQLGPIRSALIVAIVDTPHRFRTRRQLWSYSGLAVVTHTSSEYQVKQGQVVRSRKPVATRGLNRNCNRTLKDVFISAATGGGQREPYRGYLQELEKRGMRKEMARLTLARKISAIALAIWKKGEAFDPKKLNCAT

SEQ ID NO: 281818 - protein, 361 aa, unidentified
MKRALKDNQDAFTGQEFYIGIDVHQKQWTISVQSNQMSLAKPLTIDPSAGSLSSYLKRQYPGGKYYAVYEAGYSGFWPARDLLTQKIETMVVNPADIPTMHKERSTKTDSVDSRKLARSLENKELRAIYIPERKAEEYRLLNRYRSQLVRDETRIKNRIKAILAEFNYRVPVALEGNRWSGAYLRWLQTNTFETPYAQRAYNERLEQLAESRKRLAKVLRELKLMATQEPAIASLVKLLQSVPGVGFLTAILLVVELIDMNRFKRFDELASYIGLAPSIHESDERSYSRGLTKRQHHELRSRLLESAWIAVRKDPVLTMKFGQLCKRMNKNKAIIRIAKMLVSRIRTVWKTKTPYVYGVIE

SEQ ID NO: 281819 - protein, 445 aa, unidentified
MHYKRLLTWIDGSSSYLSVGLDVGADFTWMSIALPNGAFIGKPFKVVHSDPRSRDLAVTKIKEAQETYSLKSRCFLESTGIYHIPLLCFLRDKGFDCSVINPIITKNSTNINIRKLHNDKFDSKKAALVGLNVSLKASIIPEDSVVDLRNLVRDYYYFKDLQSAVALKLTAELKVSFPAYAKVFSKVTTQSSLKLLSSYPLAGDMLEASKDDIVETIRSTARFGEAYALRKYDAVIAAAQDASVFGRALPSNAVRIRLYIDTYQEYQKHLDALLKALHETVERLQDTLIYDQICLLQSLRGIGFLSAVVLIAEMGDFKLFPSPKKLHAYFGLDPAVKQSGKLNGDKVHMSKRGSSLARRVLHMVALNNVKVDKGSGTPVNPVIYDYYTRKCSGKKKPVAMGAVMHKICNIIFAMLRDNKPFEIITPEEHCQRFAAEYPDKIRKAA

SEQ ID NO: 281820 - protein, 371 aa, unidentified
MTEAVKYVGLDVHKETIAVAVADGQRGGEVRFIGTVANEDDAVRKLVKRLTGPGVTLNVCYEAGPCGYGLHRLLTKLGQDCIVIAPSMMPRRPGDHVKTDRRDAMTLARLLRAGELTAIWVPDEAHEAVRDLIRARRNAQDDAIGAKQTVRSFLLRHDRRFGGKAAWTKMYWRWLSEQRFDFPHQQLAFEEMQKRVLEAQARVGRLEAALAEAVDAWCFAPLVRNLQVLRGIRLVSAATLVAEVGDLTRFDNPKQLMAYVGLVPSEHSSGARTKRGRITRAGNAQARTMLIEAGWSYRLPAREERRYRERVIDLPEDIQAIGWKAQVRLSQRYRRLAATGKPQPKVTTAIARELVGYAWDIARRVSPAVAG

SEQ ID NO: 281821 - protein, 391 aa, unidentified
MEVMVETCCGVDVHQKSIVCCILDGPLDTNKPKKQHRTFGTTTKKLREALTWIQSQNITHVFFESTGQYWIPIFNIFYDSNLTLILANPQHIKNLPGKKTDMNDAEWIAQLGRCGLIHPSYIPCEEVQQLRLLTRRRKAYTERITQCKNEIHNILQRANIKLTSYLSDIYGITGITLLEMFIDGEVITEQTILPKIHGKVKATAAELVEAMDGKLSFEDRFLLGQSLEHYRHSVNQVEEITVVIKQYVLERFEREYNLLIELPGVSAIIACVILSEIGPNVEAFKSQGNLASWAGVCPGSYESAGIKKSSHTTQGNKYLKSILFQAGGTAGRSKDEAFHNLYARISGRSSKMKAIIACAHKMIRVIYKILSTGEHYDAKKALGLRQQARAN

SEQ ID NO: 281822 - protein, 456 aa, unidentified
MATKRKSSKKKIGAPVLHCLNPHAAGVDVGATEIYIAVPVDRDPQPVRHFSTFTEDLHAVAAWLKACKIETVAMESTGVYWIPLFQVLEARGFTVFLVNARHVKNVPGRKSDVSDCQWLQYLHSVGLLRGSFRPEQAVCTVRSILRHRDSLVQMASTHVQHMQKALDQMNLQLHHVINDITGLTGLTIIQAILAGERNPHTLAALRDRRVKATEATIAKSLVGDYRREHLFTLGQSLTAFRHYQELIGACDHEIERYLEAFESKVDAREGSSPESKNERAPSQGVPRFDLRSHLHRIFGVDLTRVPGINILTTQTLLAEIGPDLSRFGSAPEFTSWLGLCPDNRVSGGKVLSVKTRKVKNRAATALRMAAQALHRSQSYLGHFYRRMRAKLGAPKAITATAHKLARIIYHMVSMGQAYDQTVCAQNEIQNRLRLEARLRKQAREMGFQLVLAKTAI

SEQ ID NO: 281823 - protein, 426 aa, unidentified
MKFNTQNAKIAAITEKTLIIGIDVGSETHFARAFSWRGYEFSRKPLEFSNTEEGFETFRIWIKELKEKHGMDKVIPGMEPTGHYWFNLGKFLQDNGMAPVHVNPHHVKKSKELDDNNPSKNDRKDPKVIAGLVKDGRYFRPYIPDGVYAEIRALSGLQVLAQSEITRLKNRIARWFSIYFPNYKGVYGNIGAVSGLMILKVAPLPEDIVKLGVDGVNRIWRDAKLRGVGLKRAKTLVTAAEHSIGNREAQEAARVELNILLSDYEMQTAREAELMALIEEKITEVPYVDKLLEIKGVGLKTVIGFVAEVGDITRFDDPKQLQKLAGYAIVKNESGKHKGESHISYRGRKRLRYVLYEAAVSVVSHSPEFRSIHQYYTTRDRNPLKKMQSMIAVACKLIRVFYLILQTGATYDAAKMMGDIRRPEAA

SEQ ID NO: 281824 - protein, 429 aa, unidentified
MSAEKPLELRVSVDVGYRRHSVAMGLSSGEVLEEFEIDHRIEGFQEFFSRIEKHRKEKNCAVAIAMEGYNGHARPLDSLVRERGYRLYNLNNLKFARFKEIFPGAAKSDRIDARKGLELFQLSDHLPLAKEVLQEVRGTPPENEVLKRLTRRRRRLVNERVRVVNNLQADLQAVCPGLLEITGEASNQWFLNFLLSADTLPQLARLKRSTLLKIPSVGVKSAAIIEGWQKRSHFSQEVDWVGEMIQEDAKRCLELDEKIKRLETQIAEIAKDSKIAKTLRSIPGFGAVCTSELAGEIGTIERFASEGSLSLYLGMSTLENSSGKYQGTKAPKHVNTRAKAAMMIGVDRHRKYVPQSQKYYEKKRSEGKKHNQAIRALGRHLSRIIYKMLKEERDYEIRPEKGNTKTQVSPRSLVKTQIRRPKISIKENK

SEQ ID NO: 281825 - protein, 392 aa, unidentified
MNNQTYFCGIDVAKDSFVVSIKNGSFIVKNKIFNMDINGFQNLQQTINNYKDSIVVGMEPSGIYHLNLFNFLKQKNFTTIILNPYTLHNFFKFTTNKPTKTDKKDSQTIASFLEFNKNNLLHTYKDDQKYNLKYFVREKEKIIHQIAQTKTEIKRIVCITFPEIEKFNIFNNNILSLLAEFGGAYKIKNMTKEDFIKKTQNISNTNNKGKKPQISYEEIYQLALSSIASYYPEYESLLKFKINKLKNLIKEKQFISNIIQQQTQTLFKTEIQILTSIPGIAEETAICFIAEIVNIKRFANYRKLVGFCGLDPIIKQSGKFKISCKISKKGNAHIRRTLWIMANCVKKVCPYFRQYYIKKRNQGKSYKDAVICVAHKLLRVIYALLNENRTFK

SEQ ID NO: 281826 - protein, 470 aa, unidentified
MSKLKAKKTKVKDIISMQVVNPYSAGIDVGDKEMVVAVPEGLSEPRVRIFGTMTCDLEEIAKHLKDCEIDSVGMESTGVYWKPLFRKLINEGIEVFLVNAAHVKNVSGRKDDENDAMWIQKLHSCGLLKSSYLPDEDQESLRTLVRHRKTLVQDASRFVNRMQKSLELMNVKFHTVISDIVGKTGCAVVEAIIGGERNAANFLPLIGKQIKADLPTIEKSLQGNWLEEHLFTLKQNYDMYKIFWQQIIICDQEIEKNLQKYEAKHNEGVIEEHKPVTEEPVLTKSGKKAKVVKKSADKNSPRFDVRGYLASIYHVDVMAIYGINSTSALDIFAEVGTDLSKWKNEKHFVSWLNLCPNNKISGGKLISSKLFRKHPNPASRAFRAAANGVQNSDNWLGDYFRRKKAKGGNRYAIIATANKIATIFYKMVRYKEEFKPVELEQYQQKYKQAKIAYLERKLIQLRQETENVAA

SEQ ID NO: 281827 - protein, 381 aa, unidentified
MKKNNIGKLQVTKSQLRRKAAKQRLTVGLDLGDRTSRYCILDEAGEKAGENQLPTTRAGMDAAFAKMAPSRIALEVGTHSPWVSRQLVGMGHEVIVANPRKVRLISQSVKKNDRMDAEQLARLARVDPKLLSPIRHRGAEVQADLAVIRARAGLVECRTGLINTARGLVKPMGERLKKCDADQVREALGEGLSEEAQNVIGPLLKSVEEISKQIQVYEQKIEEIEKRYPETKVLKQVSGVGRLVALTFVLTVEDPERFEHSRDIGPYLGLTRKQRDSGEREPELGISKAGDELLRWLLVQAAHCILRRGAPDSDLREWGLKKVQAVGGKKGGKTRKKKAAVGVARKLAVLLHRLWVTGEVYDPQYNRKARETAKGKRKAAA

SEQ ID NO: 281828 - protein, 402 aa, unidentified
MNCVGIDVSKGKSMIAVMRPFGEVVVSPFEVRHTANELSELAGLLKSLDGETRVVMESTGNYHAPVAWLLHGAGLYVSVVNAMLVHDYGNNSLRRGKTDKKDAVKLANYGLDHWLTLPRYVPEEDTRLMLKTCYRQYQQYSKVQTMLKNNLISLLDTAFPDANRLFTSPPRADGSEKWVDFVATFWHCECVCGLSKKAFTAKYQKWCRKHGYNFSQDKALDIYASACGRFGVMPKTNTAKLLVEQAISQLQTTSAALAALKQEMQSLAASLPEYPVVMEMFGVGPTLGPQLIAEIGDVRRFHSKKALVAFAGIDAPPYQSGQIDVRSRSISKRGSASLRRTLFLVMGVLLQCAPMDEPVYQFMNKKRSEGKPYRVYMMASANKFLRIYYASVKAYLDSLEHD

SEQ ID NO: 281829 - protein, 397 aa, unidentified
MIAVGIDISKAKSTVAVIDSDGTVLASPFTMAHTQPEMEAFVTYLKGLGEPTTILMEYTGHYHYPVLKKLQGEGFPVCIVNPYQMKKYGDVEIHKAKTDKKDALRIAAYALEKSYKLVPYSSMEQKYEDLKFLSRQYSQRITYVAKLKVQLIALLDQTMPGITRILPLNSRNPEKCALLLFIRRFKSFDEIHRIGKARFLASYDVLAKKTSERSASSKGLSIYELAVDSITTRGEDPYIWLSQNQCVDLLSTTQNAADEIISQMRNIAETIPEYKVLRAMRGVGDRLGPIILAEIGDIRRFHSGKALNSYAGNDAPPYQSGQFESRNRHISKRGSSALRKACYEVMQALKLTKPQDDPVYLFMLKKEQEGKPFNVAKMAGVNKFLRIYYARAMELYK

SEQ ID NO: 281830 - protein, 422 aa, unidentified
MLEETHDNDQIIQRVAALDVGKAELTCCVRVPGQGGSGRRLQEVRTYQTMTRWLLVMADRLRELGVTRVVMEATSDYWKGVYYLLEAHGFETWLVNARDVKHLPGRPKTDTLDAVWLCKVAERQMLRPSFVPPRPIRQLRDVTRYRADLVAARTAEKQRVEKLLEDAQIKLSVVASDIFGVSGRAMLAALLAGERDPKVLAQLARTRLRAKLGPLAEAFTGFFTDQHAFLLGKMLARVDALDADLAELDAKLQELITPFTDAVDRLDEIPGVGRLAAHLLIAELGVDMTRFPTAGHLVSWAKYAPGVSESAGKRKGSGSTGHGNPYLARVLGEAAVAASKTDTFLGERYRRIARRRGKKRAIVAVGRSILVIVWHLLSDPTVRFHDLGAGFYDTRIGPERAKRNHVRQLEALGYKVTLEPAA

SEQ ID NO: 281831 - protein, 406 aa, unidentified
MEVLHERCCGLDVHKKSITACIITTEGKEIRTFATMTRNLIELVDWVKSNRCSHVAMESTGDYWKPIYNLLEPEDLHPVLVNAQHIKAVPGRKTDVKDAEWIARLLRHGLVQGSFVPSREQRELREIVRYRRSIVEERAREVNRIQKVLEGGNIKLSSVASNILGVSARNMLEAMIKGEEDVVILADFAQKKLKTKKEELKLALDGRLAAHQLSMIEKQLGHIDYLDGLIKELDEEIEKRMLPFSKELKLLDTIPGVGRRTAEQILAEIGTDMTRFPTAGHLCSWAGMTPGHDESAGKKKSTKTRKGNKKLRSALTEAARAAARQKDTYLSAQYHRIAVRRGKNRAAIAVGHTILCLVYVLLTREQAYIDLGYDYFNQRKKEILITQSIKKLESLGLIVTIQEQTA

SEQ ID NO: 281832 - protein, 345 aa, unidentified
MPIVGGLDIHRKQITFDYPGTVTGEVRRGQVSPADRAHLRAWLARFAGRDDVAFAMEGCTGWRYVAEELAAAGIAAHVGEPADTAFARGRKRHAKTDKTDSRHLRQLLAEGRLPECWIPPAQVLECRALLETYHDLRREHTAWIQRIHAVFFHQGAPALGEGALRTERSLAALREAAAVHLSPAGQLQIATDLDMLAAVEARMDTLRRQLLHAARRLAGARVLADRLYGVGPVAGLALTCWLGGAGRFSSSRKAVRFAGLDVTVYSSDGKRSPGHLSRQGPEILRWVVYEAGKTHARAAAPGHDYYAAVKDRTDGKIAALSQARKIVRQACHILAELGDDALTVT

SEQ ID NO: 281833 - protein, 347 aa, unidentified
MNYVSTIGLDLAKHVFRVHGADTAGSPLFNRKLRRGEVLRFFEKLPPCLVGMEACGGAHYWAREIANLGHDVRLIPPAYVKPFVKRGKTDAADAEAISEAVIRKTMRFVPIKTAEQQADAMVLKTRALLVQQRTQSVNALRAHLAELGIIAAGGLPSVAALMAIVREGEETRLPAAARFALMAVADQIDSLADQIDELERAIVTEAKRDEDMRRLTTIPGVGPITAATIKALVPDPGGFKSARHFAAWVGLTPKPHSSGGKERLGGISKMGNPELRVLLVLGATAVLRIARNDDRARPWLKALLARRPFKVAAVALANKMARIIWALLNKGGIYHRPEPLSIAAVAR

SEQ ID NO: 281834 - protein, 470 aa, unidentified
MPEWDGPIFFCEEKMMLRDAIGIDPDSKGCQCALVKPGECQTQQRGYLAIEEGMERFIRWVKKQGDVIVAIEGSNGLSKPMEKALRSAGIVFYSFKPSDVDKFRKAVLGQNKNNKKDAESTARYAMALEAQGKLENWRMVWSPDEELQSLTRSYAQRTKESTREVNRLWKLLRAASVDLYLALGGDHPDIDITENLLQHEGILALLAAKPDIYEWKTLSETDFLAVMGDYNYKGHDKLIRELKKVSRSFKPISQTISLMIKNSTEQIVLLKKQLTEIKRMIEKLTKDNKAVKTLVRYKGIGIMTASTLISEIVDIRRFVKEDNLASYAGLCKREYKTGNNEKEVPNCFFNRRLKNAFMTAARNYVLFNPDSHLAGYYRNLVKSGMKQTEARKRVARALVRVFFRDLYSLVEPDNSDNIKDEKRGKESDMANGLSRSDKDHSNISLSFPIENNTKEYGKIKVEKTKKAVLL

SEQ ID NO: 281835 - protein, 383 aa, unidentified
MKSVCGLDVHKDSVYLCILSEFGELIEKVFGVLTYQLEEMRDLMLHHHVVEVSMESTSVYWIPIWRVLSPHFKLNLANPYFIKQLPGRKSDVKDAQWIAECTMKELIRGSFVPPEIIQQLRQYDRRIFDLNEEIVRKLSKLDAVLQRCNIRLSNYVSNVDSKSYKAVVRAISQGITAPEELVKLIHGRIINHHGIDVITASLKGVVSLAEIDMISQLRDELDMAEAHKEKCQARMLEICEMEFPEDLKRLQTIPGIKERAATSLIAEIGTDMNKFETANHLASWSGLKPRNDESNKKIKSRSITHGNVYLRKTIIECAWAASRTKDCFFSRFSYHQTQVRKKNKMKVLVAVARKMLVAIWHVLHDNTNYIDFTTDRKTSQTRG

SEQ ID NO: 281836 - protein, 440 aa, unidentified
MRYIGLDVHKRVVQACVLDTEGVQLDAVRFDLNLDTLTAFAKQYLDDDCAVALEATTNTWAVVDVLKTCCPNVTVSNPMRTKMIAAASVKTDKVDALVLAQLLRCKYLPAVWIPDANTRGERALASRRSALTRQSITLKNRIHSVLHQRLIQAPCDLFSTKGIEWLKHVELQPLARGEIDSLLRMLDALGIEQAALRVEVDRAAFASDEVKLLMTLPGVDATTAHAIMAAIGDITRFASDQKLSAYFGLVPSVHQSAEHCYHGHITKQGNSNVRWLLIQAAQAAARHPGPLGHQFAKLERKKNRSVAIVAIAHKLAILVWHLLTKKTPYRYAIPATVESKLARLRVSQTGKRKTGSTKGQPRSPNYGSGVGTRQKKTLDRVLASEQLPATTQAPLGEQRIINELQLESFAKDIQSESRKPRRQQDRKRGTAALATPAQSA

SEQ ID NO: 281837 - protein, 430 aa, unidentified
MYNKNYISVGIDVGSAFSFMTIVAPDGSVIQKPFKITHNKPDSLEKAVSAIKKAEELHSLESRTFLESTGIYHFPLFCYLVDCGFHVSIINPIITHSANNTSIRKVKNDKVDSIGIAKLGLSGDIPVSQFPAKLVLEIRSLTRKYYDLTDERSAHINKLKGDLHTVFPQYLDIFCDVTGKTSTMILRQYGTPDKILRGHKKTMIEKISKASRKGLSKAAERYEKLCAAATAAKTFGCQIDSIYFNISLTLDLIEKLDSALDSILQRIHQLVTFNKSEKFIQQIKWLDTIKGVGFLTAVTIMCEIGDFSAFRNPKQLFAYFGLDPEVNQSGKFVGTEMHMTKRGSRIARRAVFAVALASIRTKRNGEGINPYLREYYEKKSGQKPKMVALGAVMHKVCNIIFAVLRDEKEFELRSPEEHCRQYQRPALQDA

SEQ ID NO: 281838 - protein, 425 aa, unidentified
MDVAGVIIGIDPHKGSHTAFAIDARERQLGRVRVPASARQAEVLVRWAARWPRRSWAIEGARGLGYLLAQQLIAADQRVLDVPPKLAARVRLLNSGQINKNDENDARSVAIAALRGHDLPVLGAEDQTMVMRVWSRRYHDLGRLRTQVICRLHTVLCELVPGGVRKELRTSKASEVVAGLVADSPVTQAKLELARDLVADLQRIDAQRREAKRRTARAVAASGTSTTSIDGVGPIVAGIVLGYVRDIHRFRCRDHFASYNGTAPIEVSSGNRVIFRLSRRGNRQLNHAIHMAAISQISRRGTEGRAYYEKKIAEGMGRKAALRALKRKISDALYARMLDDARRSQDPGGQSGNDAASSAAGSHPETPALRTSHSRADTNPRTAEATPAMPNPRPAPASRRTSRSAAGVQVEPRQRPRSGRRQERP

SEQ ID NO: 281839 - protein, 404 aa, unidentified
MNAVGIDVSKGHSTICVMRPFGEIVASPFEVNHTDNELSMLADKLKNLTGETKIIMECTGTYHLPLAYALYESGLDVYIVNPLLIHGFGNNSIRKVKTDKADSVKIANYGLNNWLDLHLYIPEDDVRQMLKVYSRQYNKYNKLKTILKNNLISLLEQTFPGVNELFTSPPRKSDGHEKWIDFAKTFWHCECICSLSQKSFVDRYHRWCKSNSYNFSQSKAEDVFISSLGHINVMPKNKTTKFLVTQAIVQINTISEAISSISKEMKRLATTLPEYPVAIDFFGVGEIHASQIMAEIGDIYRFKSKNSLVAFAGLDAPPFQSGQFEAQNRSISKKGTPHLRKSLFLVMKSVIQKAPIDDPIYQFLDRKRAEGKHYYSYMTAGSAKFLRIYYARVKEYLDNLYSIA

SEQ ID NO: 281840 - protein, 328 aa, unidentified
MDNPLYYVGIDIAKAKFDVAIKLQNGKHKHKVFKNNLEGFQSLMQWLNTFGETFHCVMEATNIYHEALADFLFQQQITVSVINPKCSAHFTKTDNLRSKTDKIDAKMLADYADEKRHKLPIYQPISPAQRELLRKNRQLDHLKKQLAQEKTRLTMLLDSDCIASTQQMIAFIKAQIKALEKTIKQCINADNTLKNNVKLLCTIPAIGFATAVQLIAHLGDGNRFKNAKAAATFAGLTPMIKSSGKSLNTVIGISKIGQSDIRKALFCPAMNFAFGSYKNSVYRSFVLRLLECGKPKMVIITALMRKLVTIAQAVLQKQTAFNLDTFMK

SEQ ID NO: 281841 - protein, 356 aa, unidentified
MSNYITIGMDLGNKRHTVCALDQAGKVMWRREVANTPEALKPFFEGNAGATVAMETGLCCRWISALAKTCGCNVLVGNARKLAAIWKNKQKNDENDALMIAELARASRRLFHPVELRDDKRHEMVQVIELREVAVSQRTQAVNSVRGLCKAHGVFIPKCDASCFHKVAADAIPDGMAWKFKPMLRHLKEVAATIKRYDAMLEEYAQKHFKEEVELLRTVPGVGPITSCAFVALIADPGRFGSTRDAGAYFGLTPGQDKSGDKDAPKHITKTGSALMRHLLVTAANHILRASSPDTALKRHGERICARGGKVARRKAKTAVARKLAVVMLAMLKSGKAYDDGIAAVKAGAGESTVAA

SEQ ID NO: 281842 - protein, 456 aa, unidentified
MKASVFARPEERKINQNLKMNQTKLNRKTTAASGRGDFAALIGLDWASQRHALCLYDCATEKRENSTLEHTPEAIAQWAQGLEQRFGGKKIALCLEQAKGPLIYALLEYSFFVLYPVNPATAARYRQAFTTSRAKDDPADAQVCLELLLHHREKLTPWLANDGTTRELSRLLEARRSLIDLRTLLTNMLRDALKSYYPQALELAGQDLFAPLGCQFLLKWPSLEQLQKARTESVRKFYYAHNCRRMDVIEKRLHTIAEMKPLCRDRALIEPARIQVKMLARQLLQFGTALTEYDSRIEHLFAQHQDASIWQSFPGAGPTLAPRLCCAFGSERSRYQSALSIQEYSGIAPVQERSGKNQHWIHRRWARPHFVHQSFFEYASQSALHCPWAKAFIQDQLARGKTHPTAVRALAFKWQRIMFVCWRDRVLYHETIYLDSLKHRGSYLVRKLDQELPKAA

SEQ ID NO: 281843 - protein, 437 aa, unidentified
MVVVVRTVALDVHKRFAEVAVHEDGALRRLGRIETRELGLFARSLGAGDHVVLESTAMTWAIAELLAEHAGRVTVSNPMRTRAIASAKVKTDKIDAKVLAQLGAADFLPEVWAPDELTRALRRRVAHRSSLVRQRTRLRNQVHAVLARNLIQAPMTDVFGQAGRRWLGELALPAHEREQVDSNLRLHDALDVEIELVERQLAEHALARTDVRRLMTIPGIGAITALALVAVIGDVTRFPSPRQLVGYLGLDPRVRQSGETAARHGHISRAGQAHARGLLIEAAHTAIRTPGPLRAFHARIAARRGKQIALCATARKLAVLAWHLLTKHEDYRYGAPTITQRKLRKLQRQADDPGPRISLAGETKRKALERRFLEEAERNYRNYVAAKATRGAGAANGDATVQAVRAASDARQAPQSPDAHSSRSGSPAPKGILAPSP

SEQ ID NO: 281844 - protein, 343 aa, unidentified
MQTVATIGLDIAKSVFQVHGVDAAGHVVVRRQLKRQHVLAFFARLPPCLIGIEACASSHYWARELRAVGHTVRLIPPAYVKPYVKRQKNDAADAEAICEAVTRPNMRFVSIKTVEQQGCLVLHRTRHLLVRQQTATINSIRAHLAEFGIVAPVGRRGVENLLEVIADANDTRVPEVARACVATLGVQLQQLKAQILELDRRILAWHRSSEESRRLNHIPGVGPLLATALVASIADPKAFRSGRDFSAWIGLVPKQNSSGGKDKLGNISKRGDRYLRSLFTAGALAVIRYAKIHGTKHRPWLVALLARRPTKVAAIALANKLARIAWALMTKGSRYRQPAALRV

SEQ ID NO: 281845 - protein, 388 aa, unidentified
MNYAGIDISKYKHDLFVMSDFGEVITENLTFTNNSDGFAQLKKELDLCGIGNVRIGFEATGNYGINLKLFLERIGYDYMEINPLLVKEYIKSSSLRRTKTDKLDARAIAGYLFEKEYRPHPGSFYSLFALKQLTRLRSSLVTSRSRYLIQITNVLDCIFPEFKPLFGGKFTETALYILTHYPSPQAIANMNTLSYDILRRKSRGKFSMDKFVKLKALAKTTVGVFDDCYRIELDALLDLYCQIDAKITELETEILQIIEAMNPPTLSIKGVGPMSAAVIVAEFGDFSRFASADKMLSFAGLEPGYFQSGTSEYNGHMVKRGSSQLRCVLMNCARAIKLHNMTFAAYYRKKMDEGKPHRVAVSHVAKKLVRLIFALETKREMFDPEKSR

SEQ ID NO: 281846 - protein, 400 aa, unidentified
MSLDPHEEPAAIQTHIGAIFISLELSRSKWLITSLVPGGGQRMSKHWVEAGDLAGLLARFWAIRDKVSARTGITYPIVVIQEAGLDGFWIHRALVEEGIESHVVDAASIAVSRRRRRAKTDKIDGEGLLRALLAFKRGEPRVCSMVRVPTPQDEDRRRICRERKTLIAERIRHVNRIKGLLFSQGIGDYEPLRRDRRRALEAVRTGDGRALGANMKAQIGRELDRLELLLEQIAAVEAGRDAMLARQAEAETAQSEQSVRDAPARVQKLMELNGLGAETVAKLETEAFYRSFDNRRQLAAFVGLAGTPWKSGSIDREQGVSMGNHRLRETMIQLAWLWPLHQPSSALTRWYLERTKGASKIQRKKMVVALARKLLVALWRYVDAGVLIEGAVLKRAARAR

SEQ ID NO: 281847 - protein, 338 aa, unidentified
MSQLSKSATGVVFCGIDVSAATLAVAVEQQDQPVVEREFPNNASGHKALIGWLGQRGHARVSLEATGVYSLDLALALDAAEGIEVQVLNPKVAHRFGQTLSRSKTDPVDARTLAVYSRRMEFTGWRAPSRSQMQLRSLTRHIDNLTAELTRGKNRLHAAKVSDMTPACIVEDLQNALESLECRIHVLRREALALVRADAVLKENFELLISIPGIARVSALQILGELVVLSPELSVRQWVAHSGLDPAHHISGSSIHKPSRISRAGNRALRRVLYMPALVAIQHDPHVKAFYRALVHRHKAKMQALIAVARKLLHAIYGVLKSATPYNGQKLFPQIQTI

SEQ ID NO: 281848 - protein, 333 aa, unidentified
MKDLSAKQHFVGCDVSKDTLDFALFERGKDYRGFEHIQVPNNTEGFQAMRKWLRGLKVKLSEAVVAMEHTGSYSTALAEWCHKKGYAFVFLHPLDVKNAGARGRNKTDKIDAQFIADYVYTMREKLEASTPESPVIKKLRVLRNERRLAVNARTAFANQSKCLDDTHAAKRASKIISELNKQIAAVEAQMLDVISSDESIKSNYELLLTIKGVGMINALAAIIATGNFTRFQTARQYAKFCCVAPLSCRSGTSVMNGDHVSKAGHNDIKATLTEAARSAIQHDAQLKQYYERKRAQGKSHGCVMNAVKFKIICRMFAVIQRQTPYVNTDRYKS

SEQ ID NO: 281849 - protein, 360 aa, unidentified
MPSMSPDPRRRRVVIGVDTHKYVHVAVALDNIGGRLDARSFPADKGGYEQLLDWAASLGAKQLIFAIEGTGSYGAGLTSAVRRRSLGVIEVLRTDRRDRRLRGKSDTLDAENAARSVLSGNATSVPKTNDGVVEMIRQIKVAKDVAVKARTAAMITLKALLVTAAPELREQLQPLSKMALIERCAGLRPGSVSSVTAATKHTLRSIARRWQHLNEEIKSHEALLGELTRQLVPQLVDAFGVGADTAAEMLIVAGDNIDRVRSESAWARLCGVAPIPASSGMTTRHRLNRGGHRQANAALYRAVIVRMQHHEPTRAYVARRTVEGKTKAEIIRCLKRLLAREIWALLRPLRDTTTTAAPGT

SEQ ID NO: 281850 - protein, 369 aa, unidentified
METKEIDPINFLYVGVDVHKDQHTAVATNCFGHALMEKDIRNSKEEFAELVRRIRILAEAKSLKPVFGLEDTSAYGQRLALHLSHEDFSVKVVSPVLVVRERKKLTHPEKSDSQDALGVAKALISEIGTLPDFSISKTSEIAKGLKDLVTDREFLVKEQTRIKNQLHRLLHKSYNSEYREKFKNPFSVKALEYWSKHPVPADLSGNVLLKSQIKRKIRRMRGIKKEVIEIEEEMRILVNQIDQKLETLNGCGLVSASSVLAEIKDIDRFDSPNALAQYGGFCPKEKSSGKRIRHIKTKSGNRKLNKAVHRIALSQLGRQGNIYSKGYFQKKIAEGKNKSQAICCLKRKLISIIFMMLKHKTAYDYAARC

SEQ ID NO: 281851 - protein, 357 aa, unidentified
MEASPRPPGARKPETELGAVSIIAVPHPDSRSGPSPHLQGRVMDEQRPVFAGIDVSKDRLDIHLRPSNEAFHVSRDGKGLDDLVSRLKKLPVALVVLEATGGFEATVAAALAGIGLPLCVVNPRQIRDFARAMGRLAKTDTLDAEVIALFAERIRPEVRPLPEPERNHLAEIVGRRRQIIEMIGMETNRGRQTVDKHLARRLACHIAFLQKELDAIDHDIGEAIKHSPAWREAEALLKSVPGIGDVTARTLLAELPELGTVSRHQVAALVGVAPINRDSGLMRGRRAIAGGRTSVRAVLYMAALTAIRRRSPFRAFYDQLTARGRPKKVALVAVMRKLLTILNAILRDRTPWRHLNA

SEQ ID NO: 281852 - protein, 351 aa, unidentified
MQIVGALDVHRRQITFKTLVLASGESSRGRISPAAREPLRQWLERFDGLEGEFVLEGTTGWRFVVEEIERAGHVARLADPAETAARRGRKRRAKTDDADCDLQLRLLLAGELPEAWIPPVQILELRTRVRLRKTLIDQRTAWLQRLQAQLFHQGVPPGLKPGTAAGRDALARVELSPAGREAVELCLRMLDQLDRELVPIDRALRAFARRQPGCRALTGQLYGVGAVTATAILAELGDARRFRSSDDAVRHCGLDVTVWQSDRKRAAGHLSHQGPSLLRWALFEAAQCAARRTSPDHAYYLDVAKRIDHNRACLSVARKLCRRAHHILRELGDDALAPSDPPRAKLVDAAA

SEQ ID NO: 281853 - protein, 343 aa, unidentified
MSNDTRIAVDVAKAVFEIAISDREGRVSRRERPKRHQFLPFLAQQPPATVVMEACGSAHYWAREIQKLGHQVVLLPPHHVRPYIRRNKTDRTDAKGILEASRNDDIRPVPVKTVNQQVLTSLHRLRAGWMLERTARLNTLRGLLRELGVFIPVGSREVVPAVWAVIEDADSNLPDALRTIFAEACREIREIEARVRFAEQQLASIAEQLPAVEHLQTIPGVGLLTSTALVGFIGDIQRFPSGRHFASYLGLTPREYSSGLKRNLGRISKRGDGYLRTLLIHGARSVLVHARKQQPDRLREWANQLAKTHVHNKAAVAVANKLARIVWAVWKHERPFALMARAA

SEQ ID NO: 281854 - protein, 378 aa, unidentified
MNDGITYVGIDSAKKQNDVAMLLPGEKEAIVFRAANDARGTKRLARRLKKEAPGEVVACYEAGPCGYELQRKLEAAGIRCIVVAPSLVPVKPGDHIKTNRRDAKRLAHHLRSGDLTEVHPPTAAEEAVRDLCRCREDAREDLTRARHRMSKLLLRKGVYYPGNAWTQKHRRWLRSLRFEEVALQVVFEDYLRQLEHLEERLQGLAAKLEEVSQTEPYREPVAWLRCFRGIDTVTAMTLIAELHDFRRFESPRGLMSYVGLVPSETSTGDRARRGAITKASNKHVRRVLVEAPWSYRHRPAVGVGLRKRRTDQPGWVIAIADRAQDRLHRRYWTLVMRGKEHNKALIALARELIGFVWAVLYQGQAMEPGRRPAEGALG

SEQ ID NO: 281855 - protein, 364 aa, unidentified
MVPTNQKGSGERSRTIIIGCDYHPGFQQIAFVDTETGELQERRLQHREEAEKFYRDLAAQGMKVRVGMEASGHARWFERLLSELQFELWIGDAAEISARRVRKQKTDRQDAQLILKLMLKDDFPQIWVPSWENRDLRQLLWHRHRMVQARTRMMNQLQAVALNEGLRCKKKLWREAGREKLESFQLAPWASQRRRDLLELLDQLNPTIAKLTQAIEEEVKRYPAAQRLRTHPGVGPLTALAFVLIIGKADRFQCGKQIASYLGLVPLEKSSGNQRRLGHITKQGNSLLRFLLVEAAQVTVRSLPEWRSKYCHLTMRRGRKIAKVAMARKLAVRLYWMLRKEWDYEQLTKFGSHAGQPGNRHGVK

SEQ ID NO: 281856 - protein, 354 aa, unidentified
MNNSKYIGIDVHQATSVFAVVNQQGRITGEAVLETKPTTIIDFLKGQRGTVWVTFEEGTYANWLYDVIQPHVAKLVVCDPRKNKLDGNKSDKIDARRLAELLRMNALTSVYHGENSTRTLKELARSYVSLQQDSTRVMNRVKAMFRSRGIECRGTSVYQPERRKEWLAKLDDEGPRHRAERLLKQLELLEKLCVEAQRDLIRESRKHKSCTILREIPGLGPIRVALILAFVMTPHRFRNKRQFWTYTGFSVVRRGSAEYEISEGELKRTKKKPLPRGLNKNYNHVLKNVFKGAALTAAYRGPFRKAFDQRVANGIAPNTALLTLARKIASITLALWKKGESFDIKRHRLSEQAT

SEQ ID NO: 281857 - protein, 413 aa, unidentified
MKKRTYRAQKVNNMNWQQVNEQSAGEALVLAVDVAKVQQYALLTNQEHTQTWLMQWSHLEHTQYLIEQLKTLEVPITVVMESTSTYGDSLRYQCRQAGFTIFQANAKKVHDAREIYDGVPSLHDAKAAWLIAKLHKDGATKPWCEPTEEERRMNALRLEYELHQDQYCRNQNRLEAYLSRHWPEVLTLMPLHSVTLEQLIKTYGSPQVVGSQSEQAASDMYGWGKSGLSAEKIALVIASAINTLGEPCIEAERQFLMALASELHHSRQQKQTTKQALEAIVENDEALREMGRTVGKVTTAVLISLHLDPRRFATPKSYQKALGVNLTEKSSGQLNGRLRLSKRGSATARKFLYLAALRLLVNDPLVGKWYKAKKDDRAKLKTVIALMRKLPLALWHIARGERFDAGKLLKVAV

SEQ ID NO: 281858 - protein, 360 aa, unidentified
MDGSKEHPHMTAGLDLGDKYSYLCLIDTVSGEVMEEGRLRTSPEAFRRRFASEPPSMRIAIEAGTHSPWASRVLEECGHEVLVANARKLRLIYANKRKTDEIDAENLARLARLDPKLLYPIEHRGEDSQAHMAIIRSRQALIGCRTQLVNHVRGAVKSFGARLPKCPARSFHKRAAEHIPESLRPALEPILEQIGSLTERIRDYDRQLETISKERYPETELLRQVQGVGALTALTFVLTLEDPSRFEKSRSVGAYLGLVPARDQSGDRDPQKRISKEGLEMLRKLLVGSAHYILGPFGQDSDLRRHAEKIASRGGKNAKKRAVVAVARKLSVLVHRLWVSAEVYDPLYNARRRTKQEEAA

SEQ ID NO: 281859 - protein, 377 aa, unidentified
MSNVRFIGLDVHAETIAVAAAEPAGEVRSLGVIPNRIESIRKLVKKLGPVKQLRVCYEAGPTGYVVYWHLTALGVKCEVVAPTLVPVKPGDRVKTDRRDALKLARSYRAGDLTPVWVPDAAHEALRDLVRAREAAKKDQLRARHRLGKFLLRHGRRPPTAMKAWTQAHLAWVKSAVHFDQAAQEATLLDYIHEVDHVAARIGRLEAAIDAAVQTAPARMRAVIEALQALRGIALVTAVTIAAEVGELSRFAKPRQLMGYSGAVASEHSSGERTRRGGITKAGNAHLRRVIVEAAWAYRHRPAVGAVLRKRQVSASAEVKEIAWKAQHRLHARYRALIGRGKCKQQVITAIGRELLGFIWAIGVHVESATADGKTVAA

SEQ ID NO: 281860 - protein, 486 aa, unidentified
MVEHSMAYVAFDTSKLHNAVALAEAGRAGEVRYLGEFENTPAATAKLVRKLTAKHGALSCCYEAGPTGYGLYRQIKQLGQDCIVVAPSLIPRKPGKRVKTNRLDALSLAKQLRAGELTAVWVPDERHEAVRELTRARGAAALELRAKCQQVSSMLLRLGRHYPGKKTWGKAHMAWLAGQKLEHLEQRIALEERLVAVRQAKERIERLEQAIREAVPGWSLAPLVTALMALRGIDFVAATALLAEFGDLSRFRTPRELMAWLGLVPSEFSTGEDIRRGPITKAGNRRARQILIECAWSYRHPPRVGAGKLARVAAAPAVVRDIAWKAQVRLSGRYRTLCRAGKLDVVAITAVARELAGFIWAIVRAVADGAAAADANATATDADNGSGGTRSANERSAIPSRNGIQGNPAHGTQTTGRTRTERRRTPGALPGTAERGVAGDTAGAAAPAGAPTQCQPGAALARGGRRDRRLAGGVCRVAGSHAGGNP

SEQ ID NO: 281861 - protein, 312 aa, unidentified
MVVIAGIDVSKDKLDIHVLPSNQTFVVGRDPRGLASLARRLRKAGVEQVALEASGDYERIVIEALEADGFVVQLLNPARVRAFAEAIGMLAKTDPIDARLIALYCQHFPDTGLTRRPEQARKLGEFLNMRAMLLKLAGEIRNSLEHVREPGLKALADTLSADIAAKLKDVDDRIAKVIAGDDATMRKARIIRSFTGARPVLTSGLLARVPELGGVTRHAAARLCRAAPTDRQSGRTRHRSSIEGGRDQVRPVLHMAALAAIRSNPIIKAFAHRLSAAGKPKPLVIAACARKMVVILNAMLRDNTEWKYAKAA

SEQ ID NO: 281862 - protein, 347 aa, unidentified
MNHYAGLDVSLEETAICVVDESGRIVKESRAASEPEALIAALRAIDVPLERIGLEACSLTAWLHDGLREAGLPAICIETRQANAAMKTMPNKTDRNDARALAQIMRTGWFRQVHVKSRQCRLWRSLLVARRTVLNEMRSIENVVRAVLREAGLKLGTPGRAAFAGRVRELAGDDLAVMPIVGPLLAILATMLDQLARLTKQVLVIVRREQVCRRLMSVPGVGPITALAFRATIDRPDRFRRSRDVGAHLGLTPARYQSGETDIQGRVSRCGDELARTALYEAAHSLLVRSKKWSSLRAWGMTIAKARGMARARVAVARKLSVVLHRMWSDGTEFRFGKEPAPRLVAA

SEQ ID NO: 281863 - protein, 356 aa, unidentified
MYGLKHQMEKRSMDNFAGLDVSVKETSVCIVDETGKISREVKVASEPVALLAVLKNPTCRFKRIGLEAGPLSQWLFSALAEAGLPMICVETRHMRAALKAQINKTDRNDARGIAQMMRVRLYRPVHVKTLRSQKLRMLLTHRKLLQSKAIAVENDLRATLRNFGLKVGMVGTAKFEVRIKDLVENLPDLAALVEPLLIVRRVLREQIAILHRRLLVIVRDDEVCRRLMTIPGVGSVVALTYRATVDVPARFRKSKSVGAVFGLTCSKYQSGEVDWDGRISRCGDEMMRTMLYEAAQAMLRSKKWSWLKAWAMKIARHRGMKKAIVSLARRLAVIMHRIWVDGTEFRWSREQATAAA

SEQ ID NO: 281864 - protein, 344 aa, unidentified
MEHYAGFDVSLELTSVCVVDLRGQVVREAKVASEPDALIRFLCEQDLEIARVGLEAGPLSQWLHAGLVAAGFEAVLLETRHVKAALSAMTVKTDRRDARGIAQLLRLGWYRPVHVKSASAQEVRSLLTARKLIQGKLLDIESGIRGVLRGFGLKVGPISRGRFEARILDLVAGQAVLETVVGSMLAARSALQSEFAKLHRALLVLVRADPVCRQLMSVPGVGAVVAITFRSGVDNPGRFRRSRDVGPHFGLTPRKYQSGEIDVTGSISKVGDRMVRTALYEAASVMLSRTVRMSPLKSWAMAVAKRRGTKKARVALARKLGVILHRMWVDGTSFRWTSAVTAKA

SEQ ID NO: 281865 - protein, 391 aa, unidentified
MIYVGIDVAKDKHDCFITNSDGEVLFKSFTIPNNRDGFETLFQKIQSVSDDLTKVKVGLEATGHYSYNLLGFLLDKGLPTYVINPLHTNLYRKSLSLRKTKTDKVDAHTIASMIMSDVNLKSYSDTSYHNEELKSLTRYRFDKVKERAKLKSSVSRLVCILFPELEKLVPKLHMASVYTLLSEFPSAHAIASAHLTRLTHLLSESSHGRYGKETAICFREAARSSIGSNMPAKSLELKHTIKLIRELTSEIDEIETEIKSIMDEINSPILTIPGISYNMGAMIIAEIGDFSRFDSADKILAYAGMSPSTYQSGQLDNCYSHMEKRGSRYLRYALYNATKYACIWDKSFGAYLVKKRAEGKHYNVALSHAAKKLVRTIYAMEKSGQAYNSAA

SEQ ID NO: 281866 - protein, 333 aa, unidentified
MVEGTKGSHHKEGSTKMSKSTISAAGIDTGKHKLDVALHGRKDLLQVNNDAAGHRQLSAWLRRHRVERVGIEASGGYERAVIAQLRKDGFTVIRFQPLQVRAYADYRLQRAKNDKIDAVLIAACAAEATTVREAPDPRLEPFAEHLTLIEQIEEDIVRFKTRREAVRDVKLGRRLDREIVRLKAWRALELKQLAAKLRQHQDLARRLALAASVDGVGERTALAFVIRAPELGNISREQAAALVGLAPFDDDSAERYGQRHIAGGRSRLRKSVYAAALPAAFHWNPQVIALYKRLVAAGKPHKLALVACARKLVVYVNTVLARGTPWTSRPLSI

SEQ ID NO: 281867 - protein, 412 aa, unidentified
MELLHRRCCGLDVHKETVVACLRLVSDGKVTTEVRTFQTTTADLLRLSEWLAANECTHVAMEATGVYWKPVWRILDDGEFALVLANAMHVKNVPGRKTDINDAMWLAELLAHGLIRASFVPDAQTQDMRNLLRTRKQLVREQSSHVLRVQKTLEDANIKLDSVLTDLMGKSGRAIIEALIAGETNPVKLAGLADRRVKASFEEFREALRGRVTRHHRFLLRLHLNQIDALDAAMATLDAQVEANLGPFRTAVELIGSIPGIKNLGAHVIVSEIGIDMSRFPSAAHLISWACICPRNDESAGKRRSNRVRKGGTWLKTTLVQCAWAAVKKKDSYLQAQFYRIKARRGPKKAIMAVVASILTAIYHMLKDGTMYKDLGRNHFDRRSSDQQKNRLVKRLVDLGYVVEIKALAATA

SEQ ID NO: 281868 - protein, 342 aa, unidentified
MKKSYYIGIDISKKTLDASIFVENMNEKRYPHIKEDNDKAGFKRILKWASSEKVDLKDCLFCMEHTGNYGLELCLFLEQKHIEYCAVSPLVMKRAMGISRDKNDKIDSARIATFAFEKAYKMKPSKMASEDILALKKLQAERNLHVRERAKYKGYLSDKCTKNDGLRKRMTIMVKTLDCQIEEVEKEMQAIIQRNQELSSNYELLLSIPGVGKVIAISTLVYTNNFKAFDNARQYACYASVAPFVHTSGSSIHGAPTVSKMGNSQIKSELSMGALNAMFNDPQMSEYASRKRKEGKHNGVILNAIKFKLIERMFAVIHRGTPYVATHEYKTLRHPNRVSEAS

SEQ ID NO: 281869 - protein, 365 aa, unidentified
MQKVSTMRTSGKRIFKGQLTIGLDLGDRSSSYCILDEAGKILLEQKLPTTPEAMKQTFAKMPRSRIAMETGTHSPWISRLLKALGHEVIVAHAQNVHLIVKSRRKDDRIDARTLARLARIDPELLSPVQHRSAQAQLHLTEIRARAGLVSARTALVNAARGLVKSHGERLRKCGTFQVSREITSGLSTELREALQPLLREVESLNERIQEYDRRIEKMAKEKYPETALLKQVKGVGDLIATTYVLTLEDRHRFRKSRDAGCFVGLQPGRRNSGESEPQMHISKEGDEYLRTLLVQGAHYILGPFGEDSDLRRWGQRLAARGGKNAKKRAVVAVARKLAVLLHRLWVSGEPYEPLRNSQKAISAAA

SEQ ID NO: 281870 - protein, 364 aa, unidentified
MQCVITNTELSSHEGTRCQFSGSRGSIKLGIDVHQDFYVVVEQVEGTNPKPAQRFAKEAFLHWAARLRQSGAKVYAVYEACGFGFTLQRQLSVLGIDTYVVCPQKLDERNKRVKTDGLDAKALCLKLDRFVQGNQEALALVRVPSEAEEQRRAIHRQREQLVKVRKQLEARGRSLMVNHGLEPVKNWWKERTFAALSVPSWMRQLLSHSQPILVALQEQITLLTVKLQSAAEPEQARGLGRLSSVVIDREIGDWQRFKNRRQIGSYTGLCPGEYSSGTTRLQTCVTKHGNPRLRAALVEAAWRLVRFQPNYKPVAKWRATLAKGALTTGAARKKAIVAVARQLAIDLWRIRTGRLTPAHLGLTI

SEQ ID NO: 281871 - protein, 460 aa, unidentified
MLITRGFGQHMIPRINLLLQAPRIQDRKGGDIMLKINPLSTLYVGIDVSSKSNYVCALDFYKNKYINSSFANNQPGAEELAQKILECIKKHPDLNTVVAALESTSVYSIHIANYLSSCEELLHLKPYVFVVNPKCTANYKKSYIGVGKSDPIDAFVIADYARAGNIETEPWRGSQFLALKRLTRHRLHLVECMTREKAYLVSNLYLKFSELQMLEKDDQPFCDIYGATSSSVLTEYLSPEEIVSSSEEELISFLAEKSRNRIKDISKTADLLKKAARDSYRLDKALYEPLNVSIASSFNCIETFKKEIKVIDAAIEREIKGLNPNAFIILQSIDGIGPVFAGGIVAEIGDISAFHSSDALAKYAGLMWKSNQSGDFDGEDTPMSKAGNRYLRYYLGEAANSMRRHNVEYGAYYRKKYNEVPKHQHKRALALTSRKFVRLVYGLLARNQLYSGVSLDTSNE

SEQ ID NO: 281872 - protein, 339 aa, unidentified
MTVLGGLDLHRGQITFDVVDTASGASERGRVAPADRATFRRWLEGFADRPVELAVEGCTGWRFVVEECAQVGARAHLAEPADVAGLKGRRQHAKTDRLDARHLRELLETGNLPECWIPPGHVLEIRAKVRLYKDLLEERCGWQQRIHATLFHLGAPRQLDLLSGDPARLVRLEALTPATRQATTVGLRIIEALSEELTQLRAELVAFGRRQPGCRELQHEYGIGALTSVVIWSEIGDARRFRNSRTAVRHTGLDISVYSSDGKRSRGHLTRQGPPMLRWALYEAGRCAARASSPDHAYYTRVAARVGKQRAALSVARKLARRCHHRLRALGDQALAPVT

SEQ ID NO: 281873 - protein, 416 aa, unidentified
MSLALPPAEFFVGLDWAAEIHAVCVINMEGKVLSQFTVKHSADGITLLVRRLAKFGEPIDIPIGIERPDGRLVDLLLEAGHPVVPVSPNAIKTWREGEVLSGAKSDAADAAVIAEYLRLRRHRLTVAAPYSSETKAVRTVVRTRDDLVAMRVAAVNQLAALLDAHWPGAKAIFADLESKIALEFLSRYPTPSAAAHLGEKRIAGFCAAHGYSGRRPAAELLTRLRAAPAGTTDPYLSVALHDAVLALVGVVKAVNTAVKNLDQSVAARLGEHPDGKIFTSLPRSGQINAAQMLAEWGDCRQAYETPDSIAALAGCTPVTKASGKHKAVHFRWACNKRFRKAITTFADNSRHASPWAAKIYNEARTAGKDHPHAVRILARAWIRVIWRCWQNNTPYDPTRHGAARALSGQSSVDLAA

SEQ ID NO: 281874 - protein, 411 aa, unidentified
MDKIYDICCGIDVHKKLIVVCFKKGNKQEIREFGATTREILELADWLKDSGCQIAAMESTGSYWKPLYNILEASELKAIVVNAQHMKAVPGRKTDVKDAEWIADLVQHGLLKASFIPNKDQRELRELVSYRKSLVGERTRELNRLQKMLEGANIKISGTVKDINGKSARNILEFILTGEAFDEAKYDEMYRNKTISHNLKASKEQIIADLNGVMSPLQRRMMKELLAHLDELNLHIKNLDDEIDNFMKPDEKDASISLQSIPGIGSTSAQAVVSVIGTDMERFPNAAHLASWAGLCPGDNQSAAKRKSGKTRKGNSLLRTTLITCAHSAVLNKESYFYAQFMRISAHRGKKRAYVAVAHSMLIAIYHMLKYGVAFEDLGADYYNQFNKERKINAYLKKLKALGWEAPAVAV

SEQ ID NO: 281875 - protein, 351 aa, unidentified
MKKVVKQVVAFDVAQNELVVTLGRVYDDVSQELVASKTFANRQGGFKALLLWIKRFFDAELQTLYVMEATGVYHESLAYFLDDQGFWVSIVLPNKISSYMRTLQVKTITDKTASQAICSFGMDRKLPRWKRPVDTYKKLRQLTRERHQIVDQRTVALNQMHAQKAQAEPCPSSLQRTKKLIEFLSRQEKQIIVEITELVKQGGEVKRAVGLISSITGVGELTAATVLGETNGFDLIKSKKQLTSYAGLDVVEKQSGTSVKGKAKISKRGNKYLRRAMHLPALTAIGHDERFKALFARVVAKHGIKMKAVVAVQRKLLEMTYTIFKTGTSYDKQYLQKQQNTQAEQIIKAIN

SEQ ID NO: 281876 - protein, 374 aa, unidentified
MIKIARIGIDTSKGSFQLHGVNEKEEVVLRRTVRRRQFLEFMAKLELTVIGLEACGASHHWARALGRLGHRVMLIPPQAVKPYVSPGRKNDKNDAEAICEAMSRPRVGARLVAVKSVEQSAGQMLMGVREGLLKRRTQLCNMIRGHAAEFGLVAARGLDKIGPLLARIAGDDGLPALAREMFADLGQEHAELGARIARIDKKLAAFHRSNELSRRLMEIPVVGPIGAGLMITKIVNPHGFRSGRLCAAWVGLTPKDHSTGGKQRLGGITRAGDESLRAVLVSGATAYIQQVRRGRIVPSPWLAALLERKPPKLAAVALANKTVRIAWKLMTSGERYDPNHRGDREGPGASQYGGLRAGPLAPSPTAGHGHAVAA

SEQ ID NO: 281877 - protein, 411 aa, unidentified
MIQAVIERCAGIDVGKTFLVVCVMTGALPEEPQVECRKFGTIVPELERLREWLVQEGCTHVVMESTGSYWKPVFNILETHLHVVLANAFDVQNRRGHKTDPNDSRWLAHLLRHGMIRPSFIPPLAIRQLRDLTRRRRQLIGEGARERNRLQKVLEDANIKLGDVLHDVLGVSGRLMLEALLEGQSTPEEMADLAKRSARKKIPQIAAALEKHRLTAHHKFLIRHTLKHLNFIDEQIAALEAEIDRQIETAGLQTTCELLATIPGVKQDSAATIVAEIGADMRQFPSSAHLASWAGICPGNHESAGVRKSGKINRGNNWLRGILTQCAWASTNKKGSELQACFRRLAPRCGKQRAIVALGHRLLKIVYNILTTAQPYREPTLQDSSPLLRIQHHLRSLSKLGFKIDPAEGIA

SEQ ID NO: 281878 - protein, 404 aa, unidentified
MNDSMIGYAGVDWAMDGHAVCVVNGHGTAVIEFDVEHSAEGLSEMCRRIAGTGARRVAIERPDGPVVDALLGAGLEVVVVSSRSVKALRERYGTSGNKSDRSDAYVLADCLRTDGHRWRSLEPDSPATVTLRGHVRARKDLVETRVAVANQLRAHLRIVFPGAVGLFSAIDRPIALRFLERFPSATSAGWLSEKRLATWLRANSYSGSKDPAELYTRLSAAPAGVIGVDGDARGAITLAYVNVLKTLRTQIDELNTRLDELLDAHPDAPIFRSLPRCATVRAATLLAEIGDCRARFPDPESLCCLAGVAPSTRASGRHRVVTFRFSSDTKLRAAICDFAGDSWRGNAWAAHRYHELRASGKTHPHAERILARSWTHIIWRCWQDNTTYDPTRHGAHQRLTTQTA

SEQ ID NO: 281879 - protein, 343 aa, unidentified
MENIHYIGLDVHKKTIAYCIKTVAGKTVQHGTVRSERQALREWQAEISGPWMGAMEATLFTGWIYDFLKPYAVELKVAHPEMLKAITAAKKKNDRADAEKLADLLRVDLLPECSMMSEELRELRRILRYRNMVVRTSVKMKNKISGLLMEVGAPYEKRRLHSRSYFNQLLESVEDVPGSVKDLLKLSRCNLELFEAVQKKLVKTLRHEPQIKERVECLMSIAGVGEITALTWVLEIGDPARFKNSRQAISYCGLCSAQKESAGKEHRGPISKKRNKHLQTILVEAAKLAPYWNPHLAAVREKELERGNRNRATLSVARKLVEYMLAVDRRCTPFVSEEPSPVN

SEQ ID NO: 281880 - protein, 353 aa, unidentified
MDNGNRYVGLDIHRDTISVAVCDSRGKLMLERVIPTSAPAVLELLELLRGHLHIAFEEGTSAQWLAGLLQPRVAQVLVCDPRKNDRRGSKNDRIDARELADLLRCGRLWPVFHQDCGLTALQELARTYLVLTKDQTRVMNRIKAIYRSWAIPCAGQSCYSPKQRQAFLSHLPHAAVRGRAQIYYQQMDSLMTLRQQVRTQLLREGHKQPALRLLRQIPYIGPMRATLLIVFIQSPHRFRTKRQLWAYCGLGIETHDSGEYRFRHGQLERKRQPTVMGLNRNHHHLLKYVLKSVAARCCSGSGPLRDFAQTLLDQGMRPEMVRLTVARKIAAIVLVLWKKGVSFDPHYLKSQAA

SEQ ID NO: 281881 - protein, 417 aa, unidentified
MLKPTRFIGLDIHKHYMVAAGVDADQNEVLSPQRVTWDRFEGWMKRNLTSRDAVVIEMTTNTWDVYDALIEHVHSVCVVHPPHVKAVINPQVMTDKIASRTLAKLLAAKLLVSIWVPPREVRDLRMLVAEYHKMTVLGATAKHRLLALLHRHRIQPEAGLEIFHPEVRAWWNLLHVSLAEKACMNTDLDTLAFAQSQKKALDKALSEWAAKDERVPLLVQLPGVGMLTAITILAAIGDVRRFPDEDHLVGYAGLGASVHDSGEKRSTGHITKHGRRDLRRAMVNAANHAVSDHPYWKQELARLEPKLGRSRAIVRIARLLLMAVWHVLTKDTADKYNDARSVACSLFLYAYRVKVRNLGGMSAKQWTRHQLDRMGIGRELSEIPWGTKKVKLPPSSLKKKVSGTLKQVGAPESRISS

SEQ ID NO: 281882 - protein, 356 aa, unidentified
MKDKSNLLNFSDIPIYIGLDVHKKDWSVTLYSDEFELKTFTQPPKPDVLAKYLCQHYPGGSYKAIYEAGFSGFWAQRELTKLGIDCIVIHPADVPTSDKEKRQKTDKMDSRKLSKVCKNEEVNGIYIPSEEHQEERNLLRVRQKIVRDKTRVKNRIKSYLMYQGIDTTSHEGKKWTKRSISYLKEIKLTTSSGTFALMTYIEELENLQKQADKIDLEIKELSKTDRYSENVKLLCSVPSIGITSAMILLTEIGDITRFKTFDDLCSFIGFVPNTHSSGECDRVGHMTSRGNQFLKSILVECAWVAVRKDPALLQYYKELTVRMNGNKAIIRITRRLLSRIRHVLLKKEKYQIGVLK

SEQ ID NO: 281883 - protein, 341 aa, unidentified
MGRHIGIDLHRNRFTVCTRTNGRNYLSTCSLKHLERFCGKLRADDAVAVEMTSNTRLFAEAVGPHVARVVLVNPQQFKVVSASVNKTDDNDARRLALFLEKDMLPEVRMKDKQHAEMKSLAQTRDKLVKLRTALKNKINNILCSYGILLKKESLSSEKGLNRVLGMPLGEVADVELRVLVEQIRSLNKSIAELEKTMKEHGPKLSGHKNLKSIKGIGDVGASILLSVIGDVNDFADEGKLASYFGIVPRVSNSNETERCGRITKRGSKLGRTTLVQCALIAMRYSSYLRGHYERIKARRGSGKAIIALARKFLNIIYMTLKDNLIWEDFPNGVLAEQETSP

SEQ ID NO: 281884 - protein, 348 aa, unidentified
MNNNITIGMDLGDKFHIAVVFDSDGNELEIAKVINTKTGIRKFFKQYKSAIVAIEAGTHSPWISRLLIEMGLSVYVGNPRKLRYIWDSIDKSDARDARMLGMVCRLEPRLLHPIHHRSSQAQADMTTIKSRDILVKSRTLLINHIRGIVKANGERLPKCSAASFANKCVSFIPKELWISMAPLFEMIIQLNQQIKELDNIIKQLSEEKYPETKLLSQVTGVGPITALSYILYIEDPARFSKSRQVGPFLGLTPRRDQSGEMDKQLSITKAGNTYLRQLLVGCAHYIMGPFGPESSLRLHGLAIAARGGKNAKKRAVVAVARKLAVLLHRLWVSGDTYQPFYCRNKKVA

SEQ ID NO: 281885 - protein, 390 aa, unidentified
MVFIGIDIASKKHDCCIMGEDSTVLTPVFTFENNAEGFDILLKNIRAHSRSIDEVKIGLESTGHYSTNLVAYLQARGFSLTVYNPLQVNLFRKAQTLRKTKTDKVDARCLALMLKSCDSPTFKPQAFETAELKTLVRHRTRLVSMRTRLKISVSRLVAILFPELPGAVSSIHQTTCHALLLEYPTAKAIADCHLTKLTNLLYERSKHRYGKDKAIEIKALASNSIGLNSVATGFELQQTLRLLANLRTEIDTLDKLIKAQMLKMDSPILTIPGISFTLGAVILTEIGNIHNFDNPAKLLAFAGLDPSAYQSGNFTATQTSMVKRGSTYLRWAVLQAALLVSHLDPVFKAYAQKKQSEGKHHFVVQSHVGRKLIRVIFHLLKSGTSFKSAV

SEQ ID NO: 281886 - protein, 356 aa, unidentified
MVGAAVPGVERSPLKKLDPDAPALLKLIERWRGEAERKGRTIKRVVLAYEAGRDGFWLARWLIEHGIEAYVIHPASVAVSRERKRAKTDRLDTAMLLRVLLGWLRGERGHCSMVAIPSLEEEDARRPSRERETLVGERARITNRIKGALVRFGITGFNPMLRKAVQNPEKLVTAEGGPLPANTLAEIKRDLARLAVVREQIGAIEKARVESLKRAPETGPNAMVQLLARVIGIGIETADMLVREVLSRNLRDRRAVARYAGLTGSPDESGSKRREKGLSRAGNTRVRRGLIQLAWRFLMFQKGSALAQWYRARTAGAKPAQRKSLIVALARKLLIALWRLATTGEVPDGLVLRPAT

SEQ ID NO: 281887 - protein, 477 aa, unidentified
MELIEFKCNVDWRTHPFFCGLDVHKYELAVTICSAEYRDAKIVSRSIFPVNSEGLERFWNYVKKYQPAGFAMEATGIFHHVIHKFLMHKLTTVIWHAEIIVTNPSDANSLPGRPKDDKIDSESLAKYLAKGMLRNGKPIIEAQEDLKAIFRMILRIEKDRTALKNRIIKTLDRAGIRPKSVDLNKNWICRFIYYFTQFQGTLGAFLEEILTDGHPLEPQRNIIKKNIGRFLPFSPIWLTNVQRTLIRQDLIELDFKTGRKDTLTIEIGQIIEQYPVLRRHASNLASIPGLSKIKAVWILAEIGNIKQYPTPRKFAAYCGCCPRIVSSAGKVYSAHIMRHSNKYLRTIFYNAAIVVCNLLKQDSDLKRYATRTVKRKGRVAFKLAVCNVATKLTKIAYAILRDGNPFDPEHVQNHLGPSKKEKEQVFTLVDKKIIRHARNVLRRVSQMEKVQDLGMLGDDITIVAAHLDSLLEGKKIK

SEQ ID NO: 281888 - protein, 307 aa, unidentified
MFIGIDVAKDRLDVHVRPSGESFTVGRDGEAIEELAKRLNAVAPTLVVLEATGGFETVVAAGLAAAGLPVAVVNPRQIRDFARATARLAKTDSLDAAAIAHFAEAVNPPVRPLADPQQRLLGELMARRRQLIDMMVAEANRRRLLTARRTLKSVDRVLATLRAQLEEIDHDIDIAVRGTPAWREAEDLLISVPGIGTKIARTLLAEMPELGRLDRRQIAALTGVAPFNRDSGTLRGRRTIAGGRTVVRSALYMSVLVSIRRNLPLAHTYHRLRASGKPAKVAIVACMRKLVTILNAILRDKKPWATA

SEQ ID NO: 281889 - protein, 367 aa, unidentified
MDHFAGLDVSVKDTSVCIVDDAGRIIREVKVASEPDALLAVLTNRIYHFKRIGLEAGPLSQWLFSALAEAELPVICVETRHMRAVLKAQINKTDRNDARGIAQMMRVGLYRPVHVKTLRSQKLRMLLTHRKLLQSKAIAVDNDLRGTLRNFGLKVGMVGTAKFEARIRELVENLPDLAVLVEPLLVVRRVLREQIGILHRRLLAIVRDDEVCRRLMTVPGVGPVVALTYRTTVDVPARFRKSKSVGAVFGLTCSRDQSGERDRPGAISRCGDEMMRAMLYEAAQSMLGRSSRWSWLKAWAMQIARHRGMKKAIVALARRLAVIMHRIYGPAVRCKGIRTEWSFWSALIYPASRGSSCSGPSWLSAHT

SEQ ID NO: 281890 - protein, 316 aa, unidentified
MNTEPVYVGIDVAKASLEVAVHQSADRWTVEYTDPAVAPLVARLTALTPSLIVVEATGGLEVPLVGVLAAGGLPVVVVNPRQVRDFAKATGRLAKTDTLDAAVLAHFAAAVRPPVRPLPDAATQGLAALVTRRRQLVDMLTAERNRLSCAPKVLHKELQAHIRWLERRITGVDADLEQAVRTSPVWRAQEDLLRSAPGVGPVVARTLLAQLPELGTLSHKTTAALVGVAPLNRDSGRFRGRRQVWGGRAAVRAVLYMGTLAAVRCNPVLRAFYLRLRAAGKLPKVALTACMHKLLTILNAMMKHQQRWDPNYAPTT

SEQ ID NO: 281891 - protein, 400 aa, unidentified
MISVGIDVSKGKSTVCILKPYGEIVSKPFNITHTHKDLSELSSMLFRLNDEVKIVMEATGIYHLPVLTYLQEKGFFVSVINPYLMKSYRNESLRKAKTDKIDSRIIANYGIDHWFKMKEFQTSGEIYEELKLLGQQYRHYMKLHLLSLAELTHLLDLTMPGIKNLLASWNETNRKDKRSDFVERFWHYDVITSMSEQEFTEEYILWAKEKKYVPSQEKAKVIYTLAQESIPTLPSETSSVKMLVTEAVRVLKEVDATLGLILSRMQEIAKTLPEYSVVREIGGVGNTLAPKLIAEIGDVRRFRNGKALVAFAGIDPPPYESGQFVGCNRKISKRGSASLRKVGYETMRSLKMRSRPEDPIYRYVVKKESEDKSKKSAKIAGLNKFLRIYYARVTELYKNI

SEQ ID NO: 281892 - protein, 346 aa, unidentified
MQVTTIGLDIAKNVFQVHGIDASEKVVVRKQLRRSQVLAFFKALPPCLVGMEACATAHYWGRELTKLGHQARLMPAKDVKAYVKRNKNDAADAEAICEAVRRPTMRFVQIKSAEQQGRLMLHRTRDLLMRQRTQVINALRAHLAELGIVAAQGRDGIKELLTLIASEQDARLTVDAHTSLVVLAAELQAMQTMIGSIEKRLMAQHRANEASRRLESIPGIGVIGATAIVATVPDPKVFRSGRDFAAWVGLVPRQDSTGGKQKLGPISKQGDRYLRRILVVGACAVLRYARQKPEKYPWLIQLLARKPFKVVAVALANKMARVAWALLAKGGTYRAPGLAPVLAAAA

SEQ ID NO: 281893 - protein, 355 aa, unidentified
MNSLGIDVGKKKCRAALKDERGDIIREFFFSNNNEGISALIQSASHYGKCTAVVESTGNMWIRIHDTLEENGIDTILANPYKTKIIAEAKIKSDKLDARILADLLRADLVYESYVPTKEFREKRSLVRHRISLVRNRTILENKVHSLLDKYDYKSDLTDIFGKSGIIWLKTLDVSNIDRLIMNTTLAAIENINLQIDTVSKELAKYGWDSYDVKILLSMTGIDVFSAMLIVVEIVDVRRFCTPWKLISYAGLAPSTRESSGKTKTGRISKQGSPWLRWILVQCAMTAVRYDQRLKSFYERLKSRKGSAKAIVATAKEILVIIWYMLTRRELYRHMNKKRYEQKLSRLKKIKESAV

SEQ ID NO: 281894 - protein, 310 aa, unidentified
MIICGVDVSSEHLDARIGPNGAVTRVTNTAAGISELAAFCRQHRVDLVAMEATGGYERQPFALLWAAGLPCAIVNPRSVRRFAEAVGRLEKTDPIDAAMIAWYAEVKRITPREPDSPAQLKLRALVARLRQLTTAKVAQTNQRRLVEEPEVLAMIDELVGVIRRQIRSLETQIAALIDADPLWRALDAEFRATDGVADRTVARLMADFDEIGTISNKAAAKLAGLAPIAKDSGKRAGKRSVRGGRQSIRDILFVVADIVRRYDPDFADFHRRLTDAGKPKKVIRIALARKLLVRLNAKARDVRKQLALAA

SEQ ID NO: 281895 - protein, 343 aa, unidentified
MNEYIGLDVSMKETMVSIRREGKRIWRGRCASDPQLIADLVRKRAPTARRVVFETGPLSVWFYHALRAEGLPAICIDARHAKAALDMAANKTDSNDADGLAELAEVGFFREVRVKGFDSMLTRTLVMARTRLVRMMTELSNQIRGVMKTFGLVVPAGRGSVFETNVRALLVDQNGLAPIVLPMLEAWRSLRIRAAELGRQLIGGARRSQACRILMSIPGVGAITAMSFAAAVEEPANFKKSRSVGAWLGLTTRRYQSGQVDYDGHISRRGDHHLRGLLYEAATVILTRSSADSTLRAWGVRLRERVGFKRAAVAVARKLAVMMHAMLKTGELFDRSAGIGAAA

SEQ ID NO: 281896 - protein, 408 aa, unidentified
MKTLHRRCAGLDVHSDSVVACARLTVRTKASHEVRRFSTATRDLLELADWLAAQGVTHVAMEATGIYWKPIWHILEGRFELVLANAAHIRNVPGRKSDVNDAVWISDLLAHGLIRASFVPPAQIQDVRDLTRTRTQLAREVAQHIQRIQKTLENANIKLTSVISNIIGTSGRRILKAMIAGETNPIKLAELGSTRLKCPRAELTAALDGRVTAHHRFLIAHHLSLIGELERHIAAFDARIEKLLRPLRDAVAQLITIPGVSQVSAQVILAEIGADMTPFPTSGHLLSWAGLVPRLDESAGKRRSTRVRKGAPWLKPVLVQCAWGAARTKGTYYQAQFFRLKARRGPKKAAIAVAASLLTAAYHMLKNGTFHQDLGADFLVKRDKARIVTKLASRIKDLGYDVSFTPAA

SEQ ID NO: 281897 - protein, 487 aa, unidentified
MENQIMVKKNKNKRKKTKKVVVFKEIRRNVAGIDLAWRADHYVCGPIQENGEKEITSFGTTTPELYKMLKWLQERNVESVALESTSVYWIPTAELLEANDIEVVLIDPREVRMVPGRKSDMKDCEWIQKLHSCGLLRGAFRPPESVVAIRSILREKETVLAMRVQTLQQMQKSLDQMNIRVHHAVSDIDGVTGTAIVRAIVEGERDPIKLAAHRDKRCKKSLSEIAEHLTGTWRDEHIFNLTQAFNRLQFLNKSIEEYDSRAKEMFAALSTTITDSDNPTSSSSDLPIEKPTNSTSPTSTPAKLPAQKPTAKELKNITEKKSLYKIMGFDLTSLAGIGYETAAIIVAELGNNLNRFEDENKFASYLGLSPSHGKSGGKNVRQNRRCKNTSRAGRALRMAAASLYHSTSALGAYFRNVTRRSDRKTAVKATARRLAHMIYRGVVYGKQYLDCGAEAYDNFLREKMVKNVKKIITTFNISMLEICPDIK

SEQ ID NO: 281898 - protein, 389 aa, unidentified
MKRLFCGIDVAKYEHVVSIYDPSNGEYILDSLHFENNEKGYKSLDSRLSKLKRKNDLVIGFESTGHYHMALFSYLSGRSYRCFLINPYMTSRFRSVSLRDAKNDDIDSRAIAHFLSSEYDRLSEEEFVNNELKELSLQRSFLISDSSKMKIKLKSYLDRVFPELEGIADINTAALRAILKEYPCARDIAQTRIDRLKNLAHKASKGRYPAAKIERIKEAAAVSVGYYSKAIGLNISQCIETLELKERQIEQIESSIIIHPLVSESPLKQLKGINDIEIGYIMSAIISISRFSCAKKLVAFAGLDPKIRQSGTWQASRTRMSKRGNKLLRYALIWTAYNMSRHEGPIKRYYELKRSQGKSHYNALGHCAAKLCRYIFRILSNPDKQFIYQ

SEQ ID NO: 281899 - protein, 385 aa, unidentified
MMIIGVDYHPSFQTIAFLVEETGDCGEQEVNHSDGQAEKFYRELKPRGLSVRVGMEATGHSRWFERLLAELGIETWIGDAAKIKRQRIRKQKTDREDARLLLKLLLENRFPRIWVPSPENRDLRQLLWHRHRLVQMRTRIMNQLQAVAMNEGYRWKKKLFSAQGRALLENLWLAPWASRRRKELLELLDQLDPKIAELTAAAEREAKKQPDVVRLMTHPGVGPLTALAFVLIIGTTVRFRCGKQIGSYTGLIPCEDSSARKQRLGHISKQGNTLLRFLLVEAAQAAARCNPDWRRRYVHLAMRSTQEHCQSGDGQETCCSVVLDVAERLGLFAVGRIRFERGKARYRTWRELERCPHDWASRSLQREFEEVIMVEVLIEEMYGSD

SEQ ID NO: 281900 - protein, 409 aa, unidentified
MDKLYVGIDVGSRSNAVYIMKPDGDKHSCFSVDNSLNGSKSLVKKIVSAMNSLSLTTILIGLEATGVYGNPLVYFLREDGHLSPYNKKIHVLNPKQVEKFKQSYSDLPKNDPVDAFVVADALRFGRINKEVYLGDYRYDALKNLTRARFFAVQNRTKEKQRFLNYLFVKHSSFTQEKVFSDTFGATALAVYQSFDSVDELAYMDLSELTSFIQKTGKNRFPNPEEVARSIQAAARGSYRLPKTVNDSVNQVLAISINSLRALDNQIKSLDKAIAEQLELIPSTLTSVSGIGPVFSAGIIAEIGDINRFPSHAALAKYAGLVWKERKSGTFEAQITRLIKSGNRFLKYYLCEAAFSLVRCEPEFKRFYGLKYREVNKFQHKRALALTARKFVRLVFRLLKDNRLYTPFEN

SEQ ID NO: 281901 - protein, 345 aa, unidentified
MEIRTIGIDLGKTVFHLVGVNARGEVVVRKKCSRTQLLRFTSNLRECLVGMEACGGSHFLGRALREQGHDVRLMPAQYVKPYVKTNKNDYIDAEAIAEAVTRPTMRFVPIKSDDQLDLQSLHRVRERWVVRRTAVINQIRGMLLERGITMHKGRKHLEASLPHILEDAENKLSGALRALLTQLQIEMQYLHRQIGESDKLIDRIAGELEPCRRLVAIPGIGPVIATATIAAIGNGAAFKKGRGFAAWLGVVPGEHSTGGKQQLTGTSRRGNKYLRKLFVLGAHTVLLQRTKQSSGLSTWLTSLSERKRKQVATVALANKMARIVWAVLFKGEAYRPPLLPEPVAA

SEQ ID NO: 281902 - protein, 325 aa, unidentified
MNVTTYGLDVAKRVFQVHWVEPETGEVKRKTLARTEVSAFFARREPGVVAMEACGSAHHWGRLLEGLGQEVKLIAAQFVRPFVKTNKTDAADAEAIWEACQRPRMRFVAVKSAEQQAVLSLHRIRQQLVKIRTMQALQVRGLLYEFGVMAPQGSRALLAQAGPILADQTRCPVPELVRRELLGQLDGLHALTTRIAELERQIGSWQRRESECQRITAIPGVGRLTASAVVATVADARTFRSGREFAAFLGLVPRQSGTGGRVRLLGTLLIHGARAALRQQSRADRTLDPWPQGAARAATQERRDRGTREQDGTHDLGAAGPRSSV

SEQ ID NO: 281903 - protein, 428 aa, unidentified
MPYRIAGIDVHKRMLTVVVCDVEVRSEYEFERRQYGSTASHLRSLAAWLVERQVEEVVMESTAQYWKPVWATLERYWKPLRQAREGGAGPMSGTLHLAQAQSNRGPRGRKNDFADPERLVKRLVAGELILSFVPSAEQRLWRTVMRSKHQLRCNQVQLQNRLEALLEEAHLKLSSLVSDLLGLSGRRMLTAIAEGETDPAAVAARADYRLRATPEQLCDALGACGELHPVYRRLLKVALEEWQRTEAQIIQLGQEMATLLGAHQEQVQRLAEVPGLGVDSGQQIIAEVGTSAATFPSAQALSSWVGVCPGEEESAGVNHNRRSPKGNRHLRRILNQAAHAAVKLKGSVFAVLYRRYVVRFGHNQTIAVIAHRLCRLIWKILHQGVRYEERGPAVSQKSKQKRTARMIRQLRDLGYRVELLKPAAGAPA

SEQ ID NO: 281904 - protein, 389 aa, unidentified
MLYLGIDQHKDQLTINLRNERGEVVQKGQIKTIHADIDDFFGKLRKKARKCRGFMAIVEVCGFNDWLLEKLSKAFCDEIVVIQPDNSAVHKTDKRDANALCELLWNNRKRLQGGKRPFGIRRIFPASPEEAQVRQLSNFRQHLITQRTKIINKIKGIINKHNMAQDAPTQKYDTKKYREWIAKVQLPVVDRFEVDINIKTWDVYDKHILAVEAELVKRSETNHKDVFRLNAIPGISAMGAITLLSRIGDIKRFKTPDSLANYFGLTPGCHNSAGKHRVGGITKRGNAIARQVLNFAVIHVLRKDPEMKAWHKKIKSRRGAKTARVAVMRKLATIIWHMLRWDKPYQFRYDPPKVTPKKTSKEVFLGMDNSNRQERKGKTPLKSGSKTRA

SEQ ID NO: 281905 - protein, 389 aa, unidentified
MKIYVGIDIAKLNHFAAAISSDGEIILEPFKFTNDADGFQLLVSKLESFDKNSIIIGLESTAHYGDNLVRYLVAELYQVCVLNPIKTCQMRKNNIRKTKTDKVDTYVIAKTLMMQDDLRFVSFYDLDMMDLKALGRFRQKTIKQRTRLKIQLTTYVDQVFPEIQYFFKSGLHQNAVYALLKEAPSPKEIASMHMTHLANLLKVNSHGHFTKEQAKELRVLAQKSVGANDSAISIQITQTIQQIELLDSQLDKIEAEMTDIMKFNDSVIMTIPGIGYINGGMILGEIGDIHRFSNPNKLLAFAGLDPSVYQSGNFQAKTTRMSKRGSRVLRYALVNAAWNVVRNNATFKAYYDAKRAEGRSHYNALGHCAGKLVRVIWKMLTDEVEFNLE

SEQ ID NO: 281906 - protein, 344 aa, unidentified
MTQDIMIGVDLAKNVFQIHGASMSGQVLFRKKLTRQRFRKFMADQKPCVVVMEACGSSHYWAREMMRLGHEAKLIAPRYVTPFIKRHKNDAADAEAIVEAAQRPGMRFVEAKTEAQQARAILFRTREQLVRQRTDLINALRAHLYEYGYIVAQGVGHLGRFEEILAEPSSELPGLVRELGQLMLEQIARKSEAIRGLDLKIKELAAQGRDARRLQTIPGVGPVTALAIEAFAPPLETFRSGRDFAAWLGLVPRQHSSGGKQRLGRVSKAGQRDIRRLLIIGAMSRLNWLGRKSIPEGSWLDRLAARKPRMLVAVALANKMARTIWAMSARQEDYRDPARAVAAC

SEQ ID NO: 281907 - protein, 343 aa, unidentified
MQAVKTIGLDIAKSGFQVHGVDADGQVVFRRQLKRRNVLAFFQKVPSCLVGMEACATSHHWSRELQALGHTVRLMPPAYVKPYVKRQKNDATDAEAICEAVTRANMRFVATKTPEQQSGLMLHRTRHLFIRQQTALINAIRAHLAEFGIVAAVGRNGLEQLLNVVADAGDKRLPEVARTCLMALGTQLQALKAKLLEFDRMITAWHRSNETSKRLDAIPGVGHVLATALVASIADPKVFRSGRDFSAWIGLVPKQHSSGGKDRLGSISKQGDRYLRSLFTAGALAVIRYAKIYGTKHRPWLTALLARRPTKVAAIALANKLARMAWAMMSRGERYKEPVALAA

SEQ ID NO: 281908 - protein, 339 aa, unidentified
MFYVGLDIHCKHISICILDNNGKIVQRDKVRQLDQMTSLLKELPGRFEVCFEASCGYGFYHELLTPIATRVAVAHPGLLKLIYRSKKKNDRRDAEQLAKLLYVDQVPAVHVPPADVQAWRKLIGFRQKLVQKRTRAKNGVRSLLRTVAITAPKRPGLWTKGGLAWLQRLEFSQPMYALERDLLVDEIESLSSKLRRVEKELTRFSKDKPAIWQLQSIPGVGPRTAEAVVAFIDDPHRFANSKRVGAYFGLVPSQDQSGDRNRLGHITRQGPAVVRQFLAEAAWQAARRSPTVRAYFERIARGDKDRRKIAVVATAHYLVRVMWSMLKNGTLWKERIPAA

SEQ ID NO: 281909 - protein, 341 aa, unidentified
MKQEMHVLGIDIAKRVFHAVGMDDRGNVVYRKRLSRHDLLPCIAKLPPVRIGIEACGGAHYWARRFRAHGHEVKLMAPQFVKPYVKSNKNDSRDAEAIAEAVTRPTMRFVPVKDVDQQDIQALHRIRERLIGERTALVNEVHGLMHEYGIVIPKGVSKFRQVVVGKLESEKDKLTPLSQEMFWKLVEEFAALEKQLAYDQEKLEALATTHPKCQRLMTIPGIGPLSATALVAAVSDASAFKNGRQFAAWLGLVPRQYSTGGKERLLGISKRGDSYLRKLLIHGARATLRWVGRKPDRRSQWIRQLVERRGKNRTAVAIANKNARIVWALLTSHQAYEPAKG

SEQ ID NO: 281910 - protein, 397 aa, unidentified
MYIVGIDIAKRKHEAAVIDGEGTVIIKPFSFTNNCSGYNRLLAMLTKAKLPLDEVSFAMEATGHYWLALFTRLQKEGFRVQVINPVQTNSIRSFYIRQAKTDPRDALLIAEVIRFGHFSESTLHPENIYELRELCRGRHAIVSMQADVKRKVVALLDQVFPEYETAFTNLFGDTSMAILQACPTPKELSEMPLEELCHLIEVPSRKRFRTEKAQELQALARNSFGFAMAGDVFSTMIRLYAKHLDFLKQQVREMDRKIAEIMDTLDTPITTITGIGPTLGAYILSEIGDISRFPSAAKLAAYAGIDPTMRQSGEYNGVRNRMSKRGSPYLRHAIWLAASSAVLHDPALKLYFQKKRDEGKPYMASVGHACRKMVSIIYAVMRDNKAYTPCIPNEISA

SEQ ID NO: 281911 - protein, 317 aa, unidentified
MKSNTAVYVGVDVAKATLQVHVQGRQTELKNAPAARAQLCQKLQAVAGAHVVCEATGGYERNLVGALHKAKIPVSVVNPAQVRAAAQAQGQRAKTDRIDALMLTNYGQRYQPQPTPPASQVQRQLVDLTQWLKQLIAAQATAKTQAEHHHDSFVRKQHQALLDCYQAQIQAVEDKLQALLKQDQELQQRVEALDAIEGVGSRTALLILAHMPELGQLNRQQAAALAGLAPWTRESGTMKGVRCIGGGRPEVRLALYMSALSAARYNPVLRAFYQRLIAKGKLPKVALTAVMRKLLIYMNHKLKALAAQPILTAQVQS

SEQ ID NO: 281912 - protein, 288 aa, unidentified
MLGLDVGKSSHWACLIDRDGEVLASAPVRNREAELDALFASAPAGTLVVVDQFRNIGSLAVRRARAAGLGVAYLPGLAASRAAGLFAGEAKTDERDAAVIARTALGVPDSLSGVPGRGEALEAARALSSQRDHVVACATRDKNRLRAVLLESCPALEAAVDLSDRRWLELLTVPGIGPRTAAQLAVSVDIGRFPDHDHLASYCGIAPRVRSSGTSVRSVRASRRGDARLKSLLIFSCNSLVRSSGRYGEYYRACRARGMGRGRALKAVARKRLRAIYAVMRDRVPYRE

SEQ ID NO: 281913 - protein, 410 aa, unidentified
MELLHRRCCGLDVHKETVVACLRLVSDGKVTTEVRTFQTTTADLLRLSEWLAANNCTHVAMEATGVYWKPVWHILDDGEFALVLANAAHVKNVPGRKTDVNDAMWLAELLAHGLIRASFVPDAQTQEMRNLLRTRKQLVREQSSHVQRVQKTLEDANIKLDSVLTDLMGKSGRAMIEALIAGETNPAKLASLADRRVKASPEAFREALRGRVTKHHRFLLRLHLNQIDALDAAMATVDAQVEANLGPFRTAVELIMSVPGIKNLGANVIVSEIGIDMSRFPSDAHLISWACICPRNDESAGKRRSNRLRKGATWLKTTLVQCAWAAVKKKDSYLQAQFHRIKARRGPKKAIMAVAASILTAIYHMLKDGTMYKDLGSNHFDRRSADQQKNRLVKRLADLGYAVELKPLAA

SEQ ID NO: 281914 - protein, 343 aa, unidentified
MKDTIYNHYIAIDWSIENMAIARMTKKSNKITAIDVPSDIADLQAYLKNLRGTKMLAIEETTTSQWLYTELKDYVDRILICDPNRNKLLNEGPKTDKIDATKLVQLLKAGLMKEVYHSTDKFLYLRRFVSGYEDLVKAGVRLKNQRYSLLRACGKRGFEWAGTKLDSEGDQFVLDCIDRQIEAHKQEKEGYEKEFERLTKDYPEISHQKTLPGIGPIHAVKIVARVVSPYRFADKGHYLSYTGLVKLERVSGGRSYGRKNSRYCRQLKSVYKTSTWAAIGGNNPINDYYEYLIQDKGYPEHNARHKACRQLAILSLGVFKSGKKYQPYRRDHVKGNQEVKSGL

SEQ ID NO: 281915 - protein, 423 aa, unidentified
MTEDTEAIEWFVGFDWASGTHVACLLDRNGRAIEERKIAHGGAELGEFGDWLIAKTAAPPARIGVAIETPHGPIVEMLLERGFAVFAINPKQLDRFRDRFTVAGAKDDRRDAHVLGDSLRTDRRAFRRLSVDDPTVIELREWSRIADDLSQERTRLANRIRQLLWRYYPQMLQLADDLTAENFLALWECAPTPARAAQIDEAGLAKVLKAHRVRRIGPAEALRILRQTPLRVAAGATEAAVAHIEFAAERVRLVNRQLKDAHQKLEALCARLERPTAGERENEPGQQSEQRDVTILRSLPGVGRTGLATLLVEATEPLRRRDYQVLRVLSGVAPVTRRSGKARLVTRRMACNERLREAVYHWARVAMQIDPESKRRYAALRQRGHSHGRALRTLGDRLLAMACAMLRSQTLYDPDRKAVSPAA

SEQ ID NO: 281916 - protein, 398 aa, unidentified
MTESSDYESVQVFIGVDVGKDTHHAVAINRSGKRLFDKALPNDENKLRSLISDLKQHGQILLVVDQPATIGALPVAVARSEGVLVGYLPGLAMRRIADLHAGEAKTDARDAAIIAEAARTLPHALRTLKLADEQIAELSMLCGFDDDLAAQTTQASNRIRGLLTQIHPALERVLGPRLEHPAVLDLLQRYPSPEKLASLGEKKLAAQLCKLAPRLGKRLAADIAQALAEQTVVVPGTNAAAVVLPRLALQLITLRKQRDEVALEVEQRVLAHPLYPVLTSMPGVGVRTAARLLAEVACRAFASAAHLAAYAGLAPVTRRSGSSIRGEHPSRRGNKALKRALFLSAFAALRDPLSRAYYTRKMSQGKRHNQALIALARRRCDVLFAMMRDGTFYTPQGS

SEQ ID NO: 281917 - protein, 313 aa, unidentified
MSNALFIGIDVSKDSLDIFVRPLNEKMHVGNNDESIDRLVKDIKSYQPTLIVMEATGSYHRLLLARLLAADLPAIAINPRQARDFAKAIGKLAKSDGMDAEILADFADKVRPDVRAVGEQITEQLDALCTRRRQLVSMMAAEKNRAQVGPAAIRVRIKRHIEWLEKQIAELEEDLNQQIRSTPAWREKDDLLRSFKGIGPTTSHTLLASLPELGHLNRWQIAALVGVAPFNRDSGKYRGQRHIQGGRHDVRAVLYMATLAAIRSNAVIRAFHQRLIASGKAKKVAITACMRKMLTIVNAMVRNRMSWSPDFAS

SEQ ID NO: 281918 - protein, 344 aa, unidentified
MGHYVGVDVGLRSSSLCIIDEQGKVCLEREVASEIDEIADAIRGFSEHVDGVALETGNLTPWLTAGLRAEGFRVVVMEARQVKTTLSSLRNKTDRNDARGIAQILRTGWYREVHVKSLESQRLKTLLAARKALLRRRIDLENEVRGLLKVYGFKLPAQIYHARFEDMARQAVTADPALDEALGPLLDARGHLYRAFLEIDKRVRSIAHDDPICQLLMSAPGIGFVAALTFKAAVDDPKRFRRSKTVAAHFGLTPRRYQSGEKDSPGHISKAGDVEVRSALFLAANTIMNGRGKPSSLRSFGARLARKKGRKRAMVAVARKLAVVLHAMWTDGTLFCNVEKEVIA

SEQ ID NO: 281919 - protein, 383 aa, unidentified
MKAVCGLDVHKDSVYLCILSEFGELIEKVFGVLTYQLEEMRDLMLHHHVIEVSMESTSVYWIPIWRVLSPHFKLNLANPYFIKQLPGRKSDVKDAQWIAECTMKELIRGSFVPPETIQQLRQCDCRIFDLNEEIVRKLSKLDAVLQRCNIRLSNYVSNVDSKSYKAVVRAISQGITAPEELVKLIHGRIINHHGTDVITASLKGVVSLAEIDMISQLRDELDMAEAHKEKCQARMLEICEREFPEELRRLQTIPGIKERTATSLIAEIGTDMNKFETANHLASWSGLKPRNDESNKKIKSRSITHGNVYLRKTIIECAWAASRTKDCFFSRFSFHQTQVRKKNKMKVLVAVARKMLIAVWHVLHDNTIYIDFTTDRKTSQTRG

SEQ ID NO: 281920 - protein, 383 aa, unidentified
MWNRLNSIDVLQDYYMEKVVSTTFGFHPRPKFGVIHMDKPRFFVGIDIASATFTSAVGSITDKWHIVVKPATFANEYDSFPKYLKWLQDHGIHPDNCVICMEATGVYNEVLAHFLIANSYRVSIEPPLKVKRAFKPEGHKSDPVDSCQISEYAYRFWDQLSLWAPRKEILEQIKVLLTTREQFVVDRTGHQNSLLALKRKAIRTPLAEKIHEKAITELKGHILELEAEIQRLIDQNPDFRNLVTLLISIPGVGMLLAAQMLVLFQSSPKACSPKHLAAFIGICPYDDSSGSSLHHTPTSRHYGPSGLRKLLFLAALSIRTHRKQFKQYFLRKLQEGKPKQLIINNIANKLLKIMCAILRSNTPFIENYRSVNPALLVQGLTLS

SEQ ID NO: 281921 - protein, 398 aa, unidentified
MLSIGIDVSKGKSTVCGMKPGGEIVYTPFEVQHTREGMSELVSLLRGSGEEVRVVLESTGSYHCPVVTALLENGIFVSVVNSLRMKRFCSQSIRRVKTDQIDAMQIALYGLAYWPELQPTRLPENTYRELQLLARQYYQMTSILIKAKVDFNALCDQVLPGMQELMNDHAGRHKLSDFVLRYRHTTHILEMGETRFRKDYCKWAEKKGYRNRERMAALIFATAQNGIPVLPNAPSTQIVITEAIRVLHTVEASRDAILTQMQALAKTLPEYSLVREMPCIGDTLAPRLIAEIGDVRRFHSKRALIAYAGIDAPPYQSGKFSANNRHISKRGNRYLRKTGYEVMQSYVMHKPANDPIFTFIEKKRSEGKSGKLAMVAGLNKFLRVYYGKVTELYRSLPQ

SEQ ID NO: 281922 - protein, 401 aa, unidentified
MKYGVGIDVSKGKSTISILSIEGEVIEMPFDINHDVENLEKLDKKLQMFSKEDLKIVLEQTGTYHLPILIYLLDKGYCVIAENALKIKKYLDRSLRKAKTDKKDSLKLAEYACDNWYKLKANFVEEEKYKELRFLSRQYFSLNSMKVQQKVDFSDLSDMLFPGYYQLLEECNFIVGLKIFEKFSDPKIIRKKKLETFLNDIEKIAQKIGQKRAGRNLAIKVYELAKKSVPSCPSNSSTQLILNKRVVALINLIETTNEIIAKMNEIAKTMDEYKEVRNMKGVGDRLAPLLIAEIGDIRRFKNAGSLIAYAGIDSPPYQSGKYEATNRHISKRGNKYLRKTGFEVMQSIKSFCRIDCEIYDYIVKKESEGKCKKSAKIAGLNKFLRQYYGILKKKYIELGTW

SEQ ID NO: 281923 - protein, 315 aa, unidentified
MIVGIDISKDTFDASWVVSGKEISKKYDYTELGLKSFSNDTPKEAFFLMEATGVYHTLLALRLYESKRQVSVCNPLAIKRYSQMKLIRAKTDKADARLIRMFGEENNPDMWSPNSEEINELKQAHSWLNDQIQERSRLMNRQEAHSHQAQKSTFVNKQMRIQLNSLNLQIKECEKHLEVVVKKHFVDLYSRLMTIPSIGPKTALELIIITGGFSRFEDIKSLSAYVGVSPTNYLSGTSVKGKGHIAKMGNGRIRQLLYLCSWTAKTCNPSCKELNTRMVEKGKPAKVINIAIAHKLLRQAFAVAVNNVEYSANYA

SEQ ID NO: 281924 - protein, 311 aa, unidentified
MEQCFVGIDISKDSLDVHILPQGRQYKIANTIARIKHLAKKLKREKPELIVIEATGGYEITAAITMAEEKLPVALVNPRQIRDYARAIGRLAKTDSIDAYVIARFAQDVRPEIRENLTIAHLHLKELVARREQLIEMRSSEKNRLPRVHSPQVIETIKLLIQMLDQQIKQIDEQLNDTIRKNPTWSQKAELLVSIPGIGKKTASTLIVMLPELGSLNRQEIAALVGVAPMNRDSGALRGKRSITGGRALVRKALHMPTLVATKRNIIISNFYSRLTSNAKKHKVAIIACMRKLVTIMNCMLKNNQVFRPEF

SEQ ID NO: 281925 - protein, 427 aa, unidentified
MKESNLPRLEEFRQLKKEIRGSEEHLIVGIDVAKEKHYAYFGTATGKSLLRKLIFANNRKGFETLLHRAEAIMRQEGLTKVVYGVEPTADYHKPLGEFIINSGHPLVLVANGAVKQNRELLDGRWDKNDTKDCANAADLISQGKFLYYDLPGPEILNLRNLASLKKKLKAQEHSIRMRIRNHLVTQFFPELDEYYGKREGENLAIVKWCLNPEQIAAMEFEQFFQMVTKRNTGAAQRERLRAIQEAARRSIGCQVTESAMFEAKMLVEHLGRVREMITATDARIAALCRQLPGYQSLMSIPGFGPIVTAAVMTALGNPHRFTSSKQVLKLAGLDLSASRSGKNSANVGAKISKKGKAPLRYALYQSALIATSRNKYFVEYLSRLIVGREREQGIKTKMRVKVAAKMLVIAWTLWKNEEVFQGKYLLQ

SEQ ID NO: 281926 - protein, 330 aa, unidentified
MNKYNYYFGVDISKQTVDISCKKNDQLIHRRFTNDTSGMKELQQWLKELNIVFNETLFCMEATGLYCFILTSFLTSNNIDTWIEDAGQIKKSMGLVRGKNDKVDSIRIVEYAIKNLDRIRLWKPMGTTLQKIKHLAALRDRLVTTQKRLKTPIQEFEEVGNKAMAKLLNKSIKSSLAAIDKDLKNLEGQIVEIINEDDNLKTLFKLVTSVVGIGLVTAINLIVYTNGFAVMRDARKLACYCGVAPFEYSSGSSIRGRTKVHFMANKKLKCNLHMASLTAIKHDTDLKAYYERKVLEGKSKMSVLNAVKNKLLARVVAVVNKQEMYVKKAA

SEQ ID NO: 281927 - protein, 401 aa, unidentified
MAFVGGLDWGGAAHAICVVDAQTGAVSERFEARHDAAGLREIVRRLGRWGPPGDLAVAIERPSGLIVDALVAAGHPVVPIHPNAVKAARPRYRSSGAKDDRGDAYLLADLLRTDGHRFRALALPSDAIRALRALTRGRDDLVATRVGLANQLRSLLEGFWPGAAAIFADVDSPIALAFLDRYPTPQSAARLGEKRLAAFLAQHRYSGRRSPAELLARLRAAPEGLAGAAEAEARGEMVRALVAVLASLVARIAELSARIRHDLAKMEDGRILMSFPRAGQICAAAILAELGEDRARYLTSDQLAADAGLCPVTYQSGKSRGVGFRWACNRRLRAALTCFADNSRHASAWAARIYTQARARGCRHPHAIRILGRAWLRILWRAWQDREPYDPAKHSAAAAMG

SEQ ID NO: 281928 - protein, 344 aa, unidentified
MNKLSRVGIDLAKNVFQIHGVDRHGKVVWRRRLTRDNWLTVLLGKIEPGCEVGMEACAGVHHWARQLQSRGFTVKLIAPQFVKPYVKSNKNDANDAEAVCEAMSRPNMRFVAVKTVGQQDIQAAHRIRSELIGHRTAKANQIRGLVAEYGLVAPQQLARLRAAVPAWLEDADNGLTSRFRGLLSGLWNDLKALDYRVAELDREINMIAQSDPVAKRLQQLRGVGPMVATALVATVGNVEQFANGRQMAASLGLTPKQHSSGGKDRLLGISKRGDAYLRSILIHGARSVIRTAKLKDDRLSQWVTSLAERRHPNVAAVALANKTARIAWAMLRHGTDYKPDYIAA

SEQ ID NO: 281929 - protein, 354 aa, unidentified
MSKDIILTVDYHDRACVIRRLDRGADREQVFTEIPTTAASLGQVVDQARRDLGRRGRVVWIQESTTGWARVRELLADRVEFNLANVLQMPLPPKARRRKTDKVDTARMQREYLAGTLPLAYQPPAAWRQLRRLVAYREGLVSRRTAVRNWIDRYLAHETWFDRTGLWSPRGQRRLRALLEGWPRTDRVILAEKLDELARLEGQLGVALKELVAAYRDCAEAQRLDAILGIDVVSAVSIVARIGPVERFGNAESLIAFAGLAPGIQQSDRTRRDGRIGGGGTDRHLRHYLIEATVWARKLPRYQTTYERMKKRRGSKVGRLVVARMLVRSIYKVLKDGVAFDPGVPPRTTPAVAC

SEQ ID NO: 281930 - protein, 321 aa, unidentified
MNKSTIFIGIDISKDTFDIYDPIQGHCQFTNNAKGFSSFLKILGAHHWCVMEATGCYHQQLALFLFDKAIRVTVMNPLVIKRFIQMKLNQVKTDKSDAKMICQYGQEQKMDLWQPSPEYVEDCKQLQTITQLYFKQSTAIKNKLHTLQTRGYNKGKMVRSLKRQLKSLQKEIKLLETEMEQLIKANQQDLYTRLNTIPGIGKKTAILLIVTTNGFKDFESSRQISSYLGLAPNERSSGSSIRGKTRISKTGNPIVRNHLFLCSFTASIHNPQCKALYDRIVAKGKSKKLALIAVCNKLIKQAYGISKSGISYDKNYVSKLA

SEQ ID NO: 281931 - protein, 342 aa, unidentified
MDHYAGIDVSLESASVCVVDASGKIVREGKVASEPAALISWFGAIGLRLARIGLEAGPLSQWLYAAMKEGGLAMELLETRHVRTALATMPVKSDRNDARGIAQLMRLGWFRPVHCKSIGAQEIRAVLTARKLAQSKLRDVENSLRGILRGFGLKVGKTTNRSFGGRVRELVVNHESLQMIAAALLSVHAVLLRELKTFERRVRSLARSDANAKLLMSAPAVGPIVALTYASAIDDPGRFKSSKRVGAHFGLTPKKYQSGEIDYTGRISKIGDASVRTALYEAAHIMLIKPIKGCTALKSWAMRIARRSGMKKAKVALARKLAVILHRMLANGTPFNAAAAAA

SEQ ID NO: 281932 - protein, 394 aa, unidentified
MREPQEIQDEAHEQVLERVAAIDVAKASGKVCIRVPHESRPGRRLTKVWDVDATTGAITELAGHLAGLGIEKVTVESTSDYWRSWFYLLQAAGLGVQLVNARDVKNVPGRPKTDKLDAVWLAKLTERGMLRPSFVPPAEIRQLRDYTRLRTDLTQERARHWQRLEKLLEDALIKVSSVASKLDTLSVRAMVEALIVGERDPGVLAGLARGRMKAKHAALVEALTGQFDDHHAELARMLLDQIDTLSTQIGTLTARIQELIVAIPAAQRVSADGTTGPGAGTGLGAAVLPAIQRLDAVPGVGRHTAQVLLAEVGLDMGVFPTPGQLVSWARLCPRTIQSGAKHRPGKTGRGNPYLKGVLGEAAAAAAKTDTFLGGRYRRLVKRRGKRKALVAVVI

SEQ ID NO: 281933 - protein, 356 aa, unidentified
MNPTTSTEIIVGVDTHKDIHAAVAINGVGARLGTRTIPVSQKGYQELEAWATSLGPVRAFGVEGTGSYGAGLTRSLQASGYTVIEVNRPNRQLRHQHGKSDPLDAESAARAVLSGQAGAQPKTGTSAVEMIRHLKVARDTAVKCRTQAMVTLKTIIVNAPTALRQQLDRLTTKMALIRHLAALRPGALTSTTASAKAALRAIARRWLALDAEIKAHDVHLDALTAVCAPTMIEAHGISTGTVAQMLVLVGDNPERIQSEAAFAKLCGACPIPASSGRTNRHRLNRGGNRQANAALYRVVIVRMRSHQPTLDYVRRRTAEGKSKMEIIRCLKRFVAREIFGYLCGARRPSAPSHIAT

SEQ ID NO: 281934 - protein, 369 aa, unidentified
MNKTIKYVGMDVHKDSITIAIADDGRDGEIRFYGKIAHNLNQIDKVMRKLISQNIELRCVYEAGPCGYPLHRYLNSKGIDCVVVAPALIPKKSGDRVKTDRRDAFKLATLHRSGELTAVHVPDQEDEAIRDLVRTRGDIQKAIRKLKQQINAFLLRQGISYPGKTKWSKVHLNWLAAMKMPHPAQQIAFTEYLDALANNDARIIRINQQILSFCQIWRFRPVIEALQSLRGISLISAVTIAAELGDLNRFENAAQLMAYLGLVPSEHSSGDTIKKGGITKTGNTHARRALIESAQAYRLPARKSTAIRKRQEGLSEDVLDIAWNAQLRLCHRYRRLIVKGKKHNVVITAIARELAGFIWAVFRAVPLTA

SEQ ID NO: 281935 - protein, 445 aa, unidentified
MALIVGCDLGRKSAHDVVILRRETARQVGRAFRFTSTPEGVDQLFGQIQKVRQNNEPVAFVIDSPGKAWVPVTAAIKARGFAVYRPTGVRFSKMRQAGDRKNKTNRIDAMALARCLLNFPQDTQHVFLPCGTPAQLDQLVRQRDRLVDTIRRRKQRIQDVIEGINPTLSNAMGNFILTEAGRAFLRTYLDPRKAVRAGQKRLTQFLQKRYRLNLDPKLAQAIFKACTEAVALYLPVREKGQIPFDETLLQEEMNWELDQLESEEARLRELNKRIETCNQKLDPHDCMISLPGIQHILAAGIQSCVGDIDRFDSLTKHRGFAGLYPVAKGTGDKQAQGTPICKMSSNRYKRYLYLAAENAYKWDVQLAAFYHAKREAGHTHTQAVCAVANGKLLPRIHHMMKQMKRVEGTPLRRPSYVFRDLSGNPISKAEAKAIIQAKWGDVSYA

SEQ ID NO: 281936 - protein, 345 aa, unidentified
MKITAVGIDLAKNVFQVHGVDERGKVVLRRQFRRAQVAVFFGNLPPCVVGMEACASAHFWGRTLQRYGHTVRLMASQFVKPYVKTNKNDAADAEAICEAVGRANMRFVPIKSIEQQAILSVHRVRQGFVKARTAQANQIRGLLGEFGLVIPQGIYNVAKRVPELLEDADKELPVPFRHLIERLTQHLKELDRQVKEFEREIIAWHRSSELSCKLEKIPGIGPLAASALVASIADPHSFDNGRQVSAWLGLVPRQHSSGGKPTLLGMSKRGDAYLRTLLIHGARSAILAAKNKVDNTNGWLTNLLNRRHPNIAAVALANKNVRTVWALLAHGREFRADYAPDRMAA

SEQ ID NO: 281937 - protein, 357 aa, unidentified
MPGSNVKYIGLDVHKEAITVAVRNGAGKLIMESIIETKARTLLDFLQGQRGELHVTLEEGTWAAWLYDVLKPHVREVVVCNTRRNALLKEGSKDDRVDARKLSELLRAGLLRAVYHGEHGLRTLRELARSYEVISKDSKRVMNRLKALYRSWGIPCTGTQVYGQRHRQQWLNKILQAGVRRRAELFYQQLDGLQALRHTVRGELLTESRKHRAVKILRQIPFIGPLRAAQLLALMQTPHRFRSKRQLWTYSGLAVVTHDSGQYRYVDGQLQRSKKPQQVRGLNHDHNHAMKEIFKSAALIATVRPGPFQDFYAGLLAKGMEPELARVTLARKIAAITLTLWKKGECFDAKYLKPQAA

SEQ ID NO: 281938 - protein, 356 aa, unidentified
MSRKLDNSPAVIGIDIGKNSFHIVGQNQRGAVVLRQKWSRGQVEARLANLPPCRIGMEACVGAHHLSRTLRGLGHDARLMPAKYVRPYSKGQKNDYRDAEAIAEAVQRPTMKFVATKTADQLDLQALHRVRERFVGQRTGIINQIRAFMLERGIAVRQGLRFLRAELPGILATRTNALSPRMLRILEDLSADWRRLDARIADLSGEIEALARQDKGCERLMSVPGIGPIISSAMVAAIGTGDAFSKGRDFGAWLGLVPKQLSTGDRTILGSISKRGNRYLRSLFVQAAWVVLVKIGPKRWDRYGLKSWIEAAKKRLHHNVLAVALANKLARIAWAVLHKGRAFECVKTNEAAYQPA

SEQ ID NO: 281939 - protein, 345 aa, unidentified
MPMFAALDVSKKETQVHIVDVSGKCVWRGKVPTNPDDIGTILEPYAQQLEKVGLETGSWSSWLFHGLTDQGFKVACMDARQAHAALSVTVNKTDANDAEGLAHLLRTGLFREVRVKPWCDLRRRALLRARATLVRTAIDLGNAIRSALRLFGFNMAAGPGSGGARAFERRVEQHLAEQPGLAPVVMPLLDAWRAARKQVARHESSIRAEVRADERCQLLMTVPGVGHLNALGFVAAIGDTNSFPSGRTAAAWIGLTSRRYQSGEINMQGRISRHGDKLLRSYLYEAAAHILTRAKTDSALKRWGTALREKIGFKRANVAVARKLAVTLFAMLRSGKPFEGDGVAA

SEQ ID NO: 281940 - protein, 317 aa, unidentified
MEAPVAGIDVSKDKLIMYFQGKLYEFTNDRQGFEEIRKILPKGCKVGIESTGVYHVNLAKYLNNEYDVRIINPFILKKFKDFRGKKSDKNDAKKLAELVVSMGSGFTTSDARELTSQWDFVIRSIARVKNRLRRDLVLLGYRDSLSKKNLEEVLRGGGDSVVLAEVRFLLEELERLEGRKREIEKELEDFVPKDSLIFTIPGIGKTLGCIILARVGDVRRFSDKKRFVAYCGLDPVVESSGKSVVSRGISKRGDAVLRRAFYLAALTAIKVNPVIKRFYEEHKGRLKGKKLIVACARKLAVITWAVLYYNKPFDASE

SEQ ID NO: 281941 - protein, 450 aa, unidentified
MAQRSGLTRGDRRRNAKIEELRAVVRSDRAILAIDLGEDKQVAALLDHDGRVLGRRVARDKAHALGGLLRWAVEQAGRHGFVGVVVGCEPTGHRWRSVMQLADAAGLGFVCVQSLRVHLAREADDYTRDKTDHKDAVLIGKLIARLDCYLPERAEEDWARLRHLGQRRFRLVGEMVACRNQIDDLLSCCWPAALECAVKPFDSTTWLACLAVTVDRCNGNPAKLRGLGRGRFSAAVRRELPRFGAQLFCHKVADRVFADLTDGGGVTVQRRGALERVGMLIDDWRSAIARLGEVEARMVAVLDGLGLTTLVTSVPGVSAVGAAVILAETGDLSRFATARSVVKHAGLNPAENTSANFRGQTRVSHRGRPALRAAAWRAAWGALPHNPVLGARFTHLTTRERDRLAPGQARVACAATLLRWLYAIVTTRESWNPDRAAGIRAGQAGEAAAA

SEQ ID NO: 281942 - protein, 342 aa, unidentified
MKFYCGIDLSARDCHLCVIDEQLQVAMQQKLRNDLKQICLLLEPYKTKLKIVVESTFNWYWLIDGLQAEGFEVMLAHTLGLYLITGAKVKTDRRDAYSLAKLLLVGAVPAAYIYPAETRPVRDLLRRRLHLVQVRAGEYGSLRRLLLRQGILSRKQQEIKTATETELEQWFEHPLVRLHANQELQRIELYSRQIAALEKSILEIAETNQSYELLRQLPGVGQTIALTILYEVGEWSRFATAKDFSSYCRVIPGIAQSGQVTRRGRGSKQGNHYLKAAFSQAAVHAVRCYPNVRRYYERQLQRHRGQGRKLVCYNIIAHKLAQAAFHILKEQTEYRAELLFGR

SEQ ID NO: 281943 - protein, 341 aa, unidentified
MSIITIGIDLAKNVFAVHGVDDNGKAALVKPKVARDKLVELVAQLPPCVIGMEACSGAHHWARLFRQHGHVIKLMAPKFVTPYRMSGKRGKNDAADAAAICEAVTRPNMRFVPIKEEHQQIILCLHRTRQGFVEERTATYNRLRGLISEFGIVLPQKVTCLRRDIGAHLEDLPGYANQCIGDLLAHADALDARIDEYDRIITKAARDDSRSKRLMERPGIGPVSASALLASIGGGHDFKNGRQVAAWMGLTPGQYSSGGKARLGRITKAGDPYLRSPLVMGARAALAGLGNKQDGFSRWARSLQERRGYWKAVIAIAAKNARLAWAVLKYGEEFRLNPNAA

SEQ ID NO: 281944 - protein, 345 aa, unidentified
MTVGLDLGDRRHRFCALDEGGEVVEEGSLCNDRDSLRKLAGRYHGALGVMEAGGHSPWISRLLEGVGWGVVVSNPRKVRAIYQHERKSDQRDALMLARIGRMDPALLYPVRHSSEEAQRALLRIKLRDSLVRARVGLINSVRFSLKSLGYTVRNPSRASFHKVAMEALPEMLRQMITPSVQALAELSARIQTLDREISALARTKYPQTLWLQQIPGVGPITALYFVLKIEDPSRFENVRDVGAYAGLCPRRDQSGESDPQLRISKRGDAYLRRLLVSAAQYILGPFGPASALREYGLMLAVDGTRRAKKRAVVAVARKLSVLLLSLWKNQTLYRPFPHPGLMRAT

SEQ ID NO: 281945 - protein, 399 aa, unidentified
MLPQSKEKYMVYVGIDVAKDKHDCFIIDENGEVLCDSFVIKNNLDGFSELLDKIISNADSIENVKVGLESTGHYGYNLINFLIKQNLKTYVINPLHSTLFRKSMSLRQTKTDKIDTRAIAHMMMSGVNLPEYKPSLEREELKSLSRYRYNKVRERAKLKVAVAKLVNMLFPELEGEVSKIHNKSVYKLLSEYPSAKHIALAELEDLAALLQKESRGHYGMDLAKSIQAAAERSVGTFISAKSLELKHTIRLILQYDDEVLEIEEEIKDIMDEIDSPILSIPGISYTIGAMIIGEIGDFKNFSSPDKIMAYAGISPTVYQSGHIKAGVYAHMEKRGSKYLRYALFNATRFVCKWDEGFGEYLNKKLSEGKHYKVAVSHASKKLVRVMFSLEKTGERYKKM

SEQ ID NO: 281946 - protein, 444 aa, unidentified
MKTTSASPRGAVPIVAAWIGLDWADQQHVGCLYDVASGQQEAFSLESSAEAIPLWLAQLRQRYGGRRVAIVLEQRRGALIHALLGCEFVILYPINPQSLAKYRQAYFSSGAKSDAADAPLLMDLVRHRPDRFHPWQPDDPETRSLQLLTQARRRWVDQQTALTNQLTQLLKGYYPQALELAGDLSSPGACQFLKRWPTLAALQQARPSQIRKHYQRYGRPTAAELDGRLERICQAQPLTQDPAVLLHGSLMLRALVDQLLPLFDTLREFERQIAALFAQHPDRPLFEHLPGAGKVLAPRLLAAFGTQRERWQQAAEVLTYWGVAPVTEQSGRSRWVHWRLACPKFLRQSWHEFAAHSRKHCGWAQAFYQQLRAHGKGHHAALRALAYKWIRILFRCWQTRTPYDEQVYLKSLEQKNSPLLAAIQALSSSSAPSKAVRGSLVKNL

SEQ ID NO: 281947 - protein, 452 aa, unidentified
MADGFCRMSFRKNSALSRNLSHQSLAHAESRSTRRSEDSSATCMSISTKKRGVARIAAENGPKSSSEAAILATVNLALGERTSPRVARTRIRPAAGSATGQADRFASRGSTSPRSNDPCPVPGLTRTAERALSSDCKKEKTMPAKTPPTYVGLDISKDQLDYCLSETEEGRCAYTPAGRAELIQKIRALPGARVVCEASGGYEKLIVAELLQADIEVCVAQPGRVRAFAYAEGLMAKTDRIDARLLRRFGEKITLRLAVPGDPAATTLRELLEHRRQTTTQLTEVSGRLPLAGPTLGKLLVKQQRFLERQIAEVEKMIEQHIDRDPDLKKKSERLQQVKGVGPVLSATVLAYVPELGQIESSQLSALFGVASYPDDSGHHSGPRHIRGGRAQVRHVLYMAAVSAARSNPILAEFYQRLLATGKPSKVCLVAVMRKMVCLMNKLIQNPDFVLA

SEQ ID NO: 281948 - protein, 351 aa, unidentified
MMILAIDLAKARSLFCWYDVVKGTHQMKTIASTPKAFHDALTSQKVERVIIEVCDMAGWIKDLCDSLQIPLQIANGNTEGWRWRNVKKKTDKEDVLKLVSLSLTNQLPTVTLPDRPVRQWKSLILYRQKLIERRTRIKNKIHAILVSEGKAISGGRKVWSQESLAELCRLARPLSDCPIEELWRGQLHMELEGLDDLDRLIATLDKKLDALGEKNAEVIRLQTIPGVGPRLSELVVAVIDDPKRFKNVRQVGSYAGLVPRRYQSGSMDRSGRISKAGCSKLRKLLLEIAWGMLRHNAHGQSVFKRISKGQKTRRKQAAVALARRILGWCWAMLRDGSNWRDRAASGSPVAT

SEQ ID NO: 281949 - protein, 313 aa, unidentified
MTSLSTMKTTNYIGIDVSKSTLQIDATNLAPTCPNQAKALHVWLRQLPARAHLVLEASGGYEKLLATLAHRAGVPISIVNPVRVRSFAKARGQRAKTDRIDAALITDYARCLQPAPTPPVSAAHARALELLRGRQALVSQRVTWINLLEHATDAGLIKLYKKHLRQTDASIAALEEEITTAVMADALLAARYQRLLAQFGVGEITAATLVLELPELGYLNRKQIAALCGLAPFAKDSGEKRGVRFVHGGRNQLRRALYMATLSAIRQKASPLQNFYLRLRTNGKPGKVALIACARKLLTYLNSQLKNPELSPQ

SEQ ID NO: 281950 - protein, 339 aa, unidentified
MELYAGLDLHSRNTYIGIMDETFNRVFKKRVSNDLDQILQTLKPFKKRLKGFVVESTYNWYWLVDGLMDAGYGSAHLANPAAIKQYEGLKYSDDQHDAFFLAKLLILGILPEGYIYPKQNRPVRDLARKRMFLVQHKTAHILSLQSFIQRCCCVKISTGDIRNLTVEALQEWLKEDYLLLSAQASLDTINFLKQKIKRLEKAIIQRVKLEKEFGQLLTIPGVGNILAMTIMLEVGDIKRFPKVGNFTSYCRCVPSKRLSDGKSKGYGNRKNGNRYLSWALTEAAQLGRRYNEQFRRYYNRKVAQANTSLATKALGNKLARICYYIIRDQVPFREELMDQ

SEQ ID NO: 281951 - protein, 429 aa, unidentified
MSYRIAGIDVHKRMLAVVVSDVEIESEYQFERRMFSSNPEQLRWLAVWLLEQEVEEVVMESTAQYWKPVWETLERYWKPIREKREGARRRSGTLHLAQAESNRGRRGRKRDFPDAERLVKRLVARELTLSFVPDAEQRLWRTVTRKKYQLRCDRVRLQNQLESLLEEAHIKLSSLVSDLFGLSARRMLKALAEGETDPAALAALADERLRATPEQLCDALGACTELNAVYRRLLKMALEELRLIDEQIGELDKEMASLLSEHQDAVQRLAEVPGLGVDSAQQIIAEVGPTAATFRSEKCLSSWVGACPGDDESAGVNYSRRSPKGNRHMRRLLNQAANAAARNKGSIFEIVYRRSVPRLGHNQAIGAIAHRQCRLIWLILHQGVRYEERGPAVTKRSKQLRTWKMLRQLRSLGYRIEPPNPQPSQAQAK

SEQ ID NO: 281952 - protein, 412 aa, unidentified
MGRAAEDMAPSSSTRTDGGCPVAQVNDLSRSLTAFDPISTLVVVVEMSKARWLVSGAVPGVERQPLKKLEPDATALLRLIERWRSEAMRAGRPINRIALAYEAGRDGFWLARWLIARGIEAHVIHSASVAVSRERKRAKTDRLDAAMLMRVFLGWLRGERGHCGMVVIPTMEEEAERRPSRERENLVNERSRITNRMKSALARLGIRGFKPHLRKAPERLVGLRTAEGTGLPANVIEEFRRDMARLALVREQIRSIEKTRAERLERAPDTGSHAMVRLLARVIGIGIETADMLVREILSRKLRDRRAVARYAGLTGSPDESGLKSREKGLAKAGNARVRRGLIQLAWRFLMFQKDSALARWYRTRTEGPSGARKTTMIVALARKLLIALWRLVTTGEIPDGVELWPAARATL

SEQ ID NO: 281953 - protein, 333 aa, unidentified
MTYIGIDVSKATFVVAYSSAKGSKTKTFANTATGIHKFIQTLPSDTHCVMEATGNYSMLLLYLLNKANIMVSMENPLKIKNFARVMLSVVKTDDIDAKLIALYGERMQPKPFKMRSDSLMLLKQKRTVLRQLKKQLVANTNLQESMEALPFVDSISKKVLEKTIKFLQKQIKQMEEELASLANIEYKKQMNLLTSIKGIGVTLAAALIVATGGFTYFDNAKQLTRYLDLSPTYQQSGTSVNVKGRINHNGDSYLRSQLYVAAFSSLRCNKECKACFDRLRSNGKPGKLAVVAVANKLVRQAFAVVTKNKPYIDGYKSVKPENTPAEGAPAVRG

SEQ ID NO: 281954 - protein, 346 aa, unidentified
MSQNNNTINYVGVDVAKKSLALDGVGCCGELPNDAKGHRGLLRLLGKTAQPVHVIVEASGGYEQGLVRALHEANIPVSVVEPFRVRSFARAKGLRAKTDPIDASVLRAFGEAIRPRPSLPPRSEQLRLAELVTRRAQLIDSEVAESNRSAHYLDSLVRRQAKTYLRFLRRQIEQCESAIAQLIEKDQSIKQHSARLQQVPGVGAITAATLLADMPELGTLSDETAAALAGVAPYNNDSGPFRGQRRIRGGRASVRRALYMAALSAVRHDLILKGFYQRLRAAGKKPLVALVAVMRKLIILLNRLLKNPNLTLQSHSKRVEKGTQRAPKQTGQQLDGGAAVCLGASV

SEQ ID NO: 281955 - protein, 354 aa, unidentified
MRTTEQAVRKVISAKEVYVGIDVHKESWHVTVRSDGEERFNGRIPGRYQSLKMVLERYRDLRIKVAYEAGPFGFWLLDRLVLDGIEAIVVPPSLIPIESGNKVKTDKRDSRKLATLLEKNMLKRVYVLTREEREHRDLLRTRRQIVDHRNNVARQIKSKLMFYGISSPFTSTTRWSVQYVEWLKTITFETTYLKEAFDLLIELYENLTRQIAKINRNVVALCRDKKYRQKIKLLCTAPGIGKLTAIELLVELQDITRFKSAEEIASYIGLTPAEYSTGERTRQGRITRCGNKRVRTYLVESTWVLITKDPYLRAKYLRLKNLRGGKRAVIAIARKFLIRLRRMLLDNVPYRMAA

SEQ ID NO: 281956 - protein, 498 aa, unidentified
MKSASSSLPDQPVNGVTAGLDWACEGHAVAVVDDRGQEIARRTVAHSAAGLRDLAGMLDLYRVEEVAIERPDGPVVEALLEAEITVVVISPNQVKNLRGRYGSAGHKDDRFDAFVLADTLRTDRARLVRLVRDSEATIALRQMCRERKDLVGHRVAVTNQLRAHLHNVLPGVVGLFADLDSAISLAFLARFDCQDRVDWLSAKRLAAWLASVGYSGRVDPAELYARLVAAPRGATGQYGAAQTHTTKALLAVLTTLSEQIKALTVQISRQLALHADQQIFTSLPRSGRVRAARLLAEIGDCRGRFPSPDSLACLAGVAPSTRQSGKSRAVNFRWACDKNLRDAVCDFAGDSRHTNPWAADLYQRARDRGHDHPHAVRISRPRMAVCDLALLAEFQRLRSQPTPSAPTLPQPRSSSRSLTQGISLAGSLARPGQRCASLVARIALWIPPTSSSLADDDAWLLHPPQRQVVSIHTTSHTTSRRRKISNDPMTTTVSSSAQ

SEQ ID NO: 281957 - protein, 353 aa, unidentified
MTSIEYIGMDVHKESISIAVRNDVGKIVMECVIETKANIILDFIHGLRGELQVTFEEGTWATWLYDLLKPHVTKLVVCDPRKNSRQGNKNDRIDARELSDRLYMNKLSSVYHGGAGVRTLKELARSYLTISKDLARVMTRVKAIYRSWGIPCAGKQVYAPRHRAEWLAKITEVGVFRRAEFYYQQLDALRSLRHQVRRDLLAESKKHQASKLLCQIPSIGPIRAALLIALIQTPHRFRTKRPLWKYSGFAIETHSSADYRKVQGQLERTQKQVSVRGLHRDCNHDLKNLFKSAATIASVKPGPFQEFYAALVAKGMRPEMARLTLARKIATIVLIVWKRGASFDAQHLKPQTA

SEQ ID NO: 281958 - protein, 356 aa, unidentified
MSEAILPDIIVGVDTHKQTHAAVAITRLGARVGELTIEVSLGGYRKLETWARSLGAVRAFGIEGTGSYGAGLARFLRAAGHTVHEAGRPDRGLRHRHGKTDHLDAEGAARAVLGGQATALPKAGTGEVEMIRHLKVARDTAVKARTQAMLALKAIIVSAPAALREQLDAVAGKMALVRHLAALRPGPLTTTTASAKASLRAIARRWLDLDAEIGSHDAHLGQLTARCAPEMVAAHGMGTATAAEMLILVGDEPERIRSEAAFAKLCGACPVPASSGKTSRHRLNRGGHRQANAALHRVVVVRMRTHQPTLDYVRRRTAEGKSKREIIRCLKRFVAREIFGYLCRRPKAVCPAQIAA

SEQ ID NO: 281959 - protein, 344 aa, unidentified
MDHFAGLDVSVKETSVCIVDDTGRIVKEVKVASEPQTLLKVLGNPAYRFKRIGLEAGPLSQWLFNGLAEAGLPVVCVETRHMQAVLKAQINKTDRNDARGIAQMMRAGLYRPVHVKTLRSQKLRMLLTHRKLLQSKAIAIENDLRGTLRNFGLKVGMVGKVRFEARIQELVENQPDLAVLVEPLLIVRRVLREQIVILHRRLLAIVRDDDVCRRLMTTPGVGPVVALTYRATVDVPARFRKSKSVGAVFGLTCSRYQSGEIDWSGKISRCGDEMMRTMLYEAAQSMMHSKKWSWLKAWAMQIARRRGMKKAIVALARRLAVIMHRIWVDGTEFRWTREQAAAAA

SEQ ID NO: 281960 - protein, 371 aa, unidentified
MGAYYVGLDVHSRETVFVIQDPTGAVIGRGALPTTPEAFARMCHQYQLPAGTPVALETGTSAFYVARALSALDLKPIVIDAHEVRLKAHRPGQKSDRRDAFELCDGLRRDLYRSIVHIPSPAISTLRTALSRRRHFIRIQTAEVNATKRLLRGAGWLGGKRGSLRTASGWERLIDALASEPTLQTHTRFHYAVWQQAGEQVRAIDHLLGDLGRGFRDDVRRLETVPGVGPIVALTAVAVFADVERFGSAKHVASYAGLVPSTYQSADRDCHGHITKRGSAELRTMLCEAAHHARRPSHPLHPYFLKLCARRGYKSAVVAVAHRLCRVLYALLRDGTDFQPSRLGIEEGPFTQTVTRRFRLTPKSAGRLALV

SEQ ID NO: 281961 - protein, 309 aa, unidentified
MLTAEADKRKTKVVVNTAAGVQALLAWCAKHGAQPAQLHAILEPTGLYHEQAATALPQVRVSLVNPAQARDFAKALALRSKNDALDSYVLARYGQTLSPALWHPAPLHARQLRALLTRREALSKDLLRELNRKEKSQFSPSAPLVDGSIDKAIAFLREQIKQIERAIDQHIDNHPDLKQDCELLNSIPAIGPQAGNAILAVMHNRHIDSAQSLAAYLGVVPVQRQAGSSLNSCARLSKAGPSQVRATLYMAALVGTRHNPHIRALYQRLLKAGKSKKAALGAAMRKLVHLCFGVLKNRIPYQPNYAMNG

SEQ ID NO: 281962 - protein, 430 aa, unidentified
MKSNTQNAKIEAITEKTLVLGIDVGSETHYARAFDYRGIEYSKKPFKFSNTEAGFATFKEWILDLKERHEKDKVVPGMEPTGHYWFNLGKFLQDNEMKPVLVNPHHVKKTKELDDNNPTKNDRKDPKVIAGLVREGRYMIPYLPDGVYADLRTASNIRFQLQAELTRIQNRISRWFNIYFPEYKTVYGKPDAKSGMLILKAAPLPEDILTLGIDGVNQIWRDAKLRAVGRARAKTLIEAAGHSVGSKEGAMSARMEIRMLLEDYESRNTRLQEVMVLIEELVRKIPMAEKLLEIKGVGIRTVSGFLAEVGDISRFNNPKELQKLAGLALVENSSGKHKGETTISRRGRKRLRYLLFEVAMSLVAKNPEFRELHNYYTTRRLNPLKKMQSLMAIAAKLIRVFYAMLTKGVDYDPKKMVSDIKRPAVYLQAA

SEQ ID NO: 281963 - protein, 355 aa, unidentified
MNAIKYIGMDVHLATISIAVLDGAGKLIMEVTIATQAGALLDFIRGLSGTLYVALEEGTSAHWLYTLLEPQVAKVVVCDPRQNPRRLGEKKSDRLDARKLAELLRLGTLKPVYHGNALGPALKELARSYRTLMSDATRVMNRLKALYRARGIRCAGTRVYSARFRDQWLAQLREPGARGRAERLYKQLDLLLPLRQEARAALLAESRKHPAQKILRSIPALGPVRVALLLALLQTPYRFRGKRQLWTYAGLGLVTRTSADYQMLDGQVTRSRKPAWVLGLNANHNHALKGLFKDAAVTALTRPGPLKDFYTTRVAQGMEAELARLTLARKIAAIALTLWKKGECFNAEHLKAQAA

SEQ ID NO: 281964 - protein, 405 aa, unidentified
MTTEVFVGLDWAVHTHAVCVIDTAGAVLDRFEIAHDRDGLAELMRRLARFGPRARIAIERPSGLIVDALVEAGHHVFPIHPNAVKASRPRYRSHGAKSDASDAYLLADLLRTDGHRWRELSPQSDSIRALRALVRSRDDLVATRVALGNQLQSTLEAFWPGAACIFADITSPIGLAFLKRYPSPASAARLGEAALGRFCRRQHYSGRRSPAELLARLHSAAAGLAGPLTNEAAARLVRSMVAVLQPLVTQIAELTRRIERFVESLPDGQIIMSFPRAGHVCAAQILAELGDVRERFPSLDQLASEAGAVPVTYQSGKTRSVAFRWACNHRLRKAVTCLADNSRHANAWARAIYTAARARGCDHPHAIRILARAWLRVIWRAWTDRKPYDPGLHVSAQKLASKQRG

SEQ ID NO: 281965 - protein, 343 aa, unidentified
MDYYAGIDVSQEQSSVCVVDGSGKIVRETKVVSEPEALSRHFAELGLPIIRIGLEAGPLSQWLREGLVVTGFDVVLLETRHVRAALSAMTVKTDRKAARGIAQLLRMGWFRPVHAKSADAQATRAVLIGRKLLQAKQRDVELGIRGILRGYGLKVGEVSRGRFEARIRDLIEGHDMLATVIGAMLKARIALWGEFTRLHRTMLKIARADPVCNRLRSVPGVGALVALTYRSAVDDPGRFSRSRTVGAYFGLTPGKYQSGETDKDGGITRVGDSMVRTALYKAAYIMLTRASRFSALKGWAMGIAKRRGMKRAKVALARKLAIVLHRMWVDANAFRWSKEVAAA

SEQ ID NO: 281966 - protein, 292 aa, unidentified
MQISILGIDIGKNNCSVVGVDDHGAAVVRRTMRRQTLIEFVEKLPTCVIAMEACCGAHHLGRLFVARGYEVRLMSPEYVRPYVKAQKNDDRDAEGIAEAASRPTMRFVELKSQEQLDIQTLHRVRSRLVAQRTTLINQLRAVLLERGVIFAAGRVKFASALDGLLAEADEILSARIRSLVIELRDEWRMLDKKIGALNAEFVALARQNSAMRRLTSIPGIGVLNATALVAAIGDVGSFKHARDLGAWLGLVTRQFTTGGKARLLGITKRGNTYLRTLLVLGARAAMHTLQSK

SEQ ID NO: 281967 - protein, 388 aa, unidentified
MQDVADQSAAPTTIGADLCAIFVSLELSRSTWLATSLSPGRGEKMSKHSVSAGDIAALLARFSELRRKACARTGKSFPIVVIQEAGLDGFWIHRVLLSEGIESHVVDAASIATSRRRRRAKTDRIDGETLLRALLAHKRGEPRVCSMVRAPTPEDEDRRRICRERKVLIMERVQHVNRIKGLLFSQGASGYEPLRRDRRARLDALQTGDGRRLPQHLKAQVCRELDRLELLLEQIKAVEAERDALLDAEQTKASAPPPMLLGVRGVGPEFASVLWSEGLSRHFDNRRQVAAYAGLAPTPWQSGSVNREQGISRSGNSRLRTTMIQLAWLWLRHQPRSALTLWFKDRIERNGGRRRKTTIVALARKLLVALWKYVSAGVVIEGAMIRPA

SEQ ID NO: 281968 - protein, 418 aa, unidentified
MRVDTDEPEIIERIAALDVAKAEVVCCARVPGPGRQRMQEVRTVSTMTAALLELGDWLAELGVTRVVMEATSDYWRAPFYLLEDRFETWLANAHDVKHLPGRPKTDRLDAVWLCKVAERQMLRPSFVPPPHIRALRDLTRYRVDLLAVRTAEKQRVEKLLEDALIKLSVVASDPFGASGRAIMAALIAGERDPAVLANLARGSLRSKTARLTEALTGRFTDHHAFLLTQMLQRVDAATADIATVQARIDDEVGELAPAVARLDAIPGIGPVAAQMILAEIGTDMSRFPTPAHLASWARFAPGVNESAGRPTGKAASGKGNRYLARVLGEAAVSAARTDTFLGERYRRIARRRGKKRAIVAVGRSILVVIWALLSDEQAQFIDLGPDYYASRTNPERKVRQHVRELQALGYAVTLNPAA

SEQ ID NO: 281969 - protein, 406 aa, unidentified
MRHYIGVDWADAEHAVWVEDETGTKVLSRALPQTAEAFADWGRWLDERRAHGVELWAAIEKPEGRVVDFLLDHGVVVFPLNPKTLDRARDRFRVSGAKSDPFDAQVGAGFLRTDHGHLRPLLPASEAAQELKGLTRDYGRQVRQQTRLLNQLTITLKEYYPRALELGGELTSQWVREFLRVYATPAALQALSERQWQRWARSQRLSAERTAALWTLLQRPPLPVPPHVVRVKARRVAVLLAQLEVTSEAVEAYRKAIEDFFAALPAAKWAASLPGGRRGTTVPMLWAELGDAAGRWQSFQHLQGYAGAVPVTERSGKGHVVKFRFACNTQLRYALSQFAFLSLRSSEWARAYYHRCRQRGHTHQHALRALGAKWLKIIFVLWSRQIPYNEEHHLASIARHQLRQPA

SEQ ID NO: 281970 - protein, 447 aa, unidentified
MEVLYERCAGLDVHKKTVKVCLKKAGRGSRSSQELRTYSTKTADLLAMGDWLKEQGCTHLARESTGVYWKPIYNLLEGEFAILVVNAQHLKRVPGRKTDVKDAEWIAELLQYGLLEASFIPPAPQRELRDLTRYRSRLVEERAREINRLQKTLEDSNLKLGDVVSDVMGKASQRILQAIVDGETDPVRLAAFAVGRVQASQQELESALTGKVTAHHRFMLGEHLKQIETLTAAIGRVSQEIARRFSPPDAPVGEESAQAQGMQQREAEGKEPSQLPCTKEMNWQQALALIDAVTGISEETAQGILAEIGIEMEQFASAQHLASWAGVCPGNHESAGKRLSGKARKGNPWLRRLLVQAAHAAAHSKNTYLAAQYHRIASRRGAKKAALAVAHSILVIIYHILRDHSTYQDLGGNYFDERDRQAVQKRLVRRLEQLGYQVELQPLAQVG

SEQ ID NO: 281971 - protein, 361 aa, unidentified
MIVIGTDTHKASHTAAALEEATGRVLTERTVRAKRRSFDDLLRWARRLRGERVWAVEDCRHVSGALERFLLARGERVLRVAPKLTAGARDSAREPGKSDVIDAVAIARAAIREGLDALPSAQLAGIELDIRLLVDHRGRLVATRTRLINDLRWHLHDRWPELEIPTGGLIAVRFPQRLAARLAHAAQTTRVRIARDELRRIRELTRTIDEIERDLAPLVAQAAPRLLAERGCGVLIAAKLVGEIAGINRFPTDAKLARVAGSAPIPASSGKTIRHRLDRGGNRQINCALHRLALTKSLHDPVTAAYLARRQADGKTRREAMRCLKRHLARRVWHLLQPDELAPTPTITIHCNTPYNNFHLT

SEQ ID NO: 281972 - protein, 430 aa, unidentified
MKSTQNKKIEQVKESTMIVGIDIGSEKHYFRAFDWRGIELTKKPVPFSNSMEGFNIFHSAVLELMNKNQLTEALVGFEPTGHYWFNLGQFMSDKNIKFVMVNPHHVHKTKEMDDNSPSKNDRKDPRVIANLVKDGRYFYTYMPTGVYAELRNLSNRRFVLVEEQTRAKNRLQKWIAVYFPEYKGIYTNIDAKGGMMVLKEAPVPDDIINLGVEGIQKIWRDAKLRGNGLKKAMKIVNAAANSIGLKEGLIEARMELVELIEDYELQMKRIERVNDLIKDLCSKIKYVDKLLEIKGIGITTVAGFIAEVGDITRFDNAKELQKLAGLELVSDDSGKHNGRTRISKRGRKRLRYLLVQAAVSVIGKNDEFKEIHHYYTTRDNNPLKKMQSLIAVACKLIRVFHVILTKGVDYDASKMLGDIKRPGVADRKAA

SEQ ID NO: 281973 - protein, 348 aa, unidentified
MDKVLKQVAGVDVAQKELVVSLGRLKGDLESEIYAYKVFKNTEAGILALLKWSRSLADPDLSLHFVMEATGVYHEKFAYHLDGEGYKVSIVLPNKISSYIRTLEVKTVTDKTCSEAIARYGLERKLDPWNRPKRIFKILKQLTRERDQIVDERTSVKNQLHAEETEAWPNDRSIGRLKERIKFLNKQEAEIKQDIDAVVEQDEQLKQEIANVCTIPGVGKLTAITIFAETNGFELIRNKKQLTSYAGLDVREKQSGTSVKGKPKISKRGNRYIRKALHLPSLSAVKYNDDNKDLYSRIVSKSGIKMKALIAVQRKMLELIYILHKNKTPYIKGYQVKRKANSNMVAAL

SEQ ID NO: 281974 - protein, 338 aa, unidentified
MRLYCGIDLHSNNNVIAVIDEYGAVQFKRRLRNELSSVKAALAPYREHLIGIVVESTFNWYWLVDGLKEAGYQLHLANPAACKQYDGLKHGDDDSDALWLAEMLRLGILREGYIYPKSERGVRDLLRKRSQLVEQRTRNLLSIQNVIARNTGKQFRGDAITELEIEQLAKLVVDEDVACSIAAGLRVHACLKEEVDALERAVLRRVKTRPEFIKLNTIPGVGDILGLTIMLETGEISRFPDVGNFASYSRCVDSKRMSNGKKKGKGNVRNGNRYLSWAFTEAAHFAIRYCEQIRKFHQRKERHSHSVVAIRAVAHKLARASYFIMRDQVDFDVMKAFG

SEQ ID NO: 281975 - protein, 400 aa, unidentified
MKTEDIQIFLGLDVGKTDHWACALIQDGTKIWNKTLPNDEAKLTAVYQKLLAQGQVLVVVDQPATIGALAVAVAQNLGIPVAYLPGLSMRRIADMYPGTAKTDGKDPFIIADAARTMPHTLRSIQVSDEDEATLGMLTGFDLDLARQITQTSNRIRGLFTQIHPPLERILDPWLEHDAVLEILATWPTPAQLKHAGKARIDAKLKKYGARRHTAWPVAIMDALDEQTVVVVGTDAAGLVIPHLARQLISLHAQRVDVATHLHLETMVEAHPLYPVLTSIPGVAVRTAAIIIAETSGKTFPSAAALSSYAGLAPTTRQSGTSIKSERVSHSGNKRLKRALFLSAFASIRFDPTSRDYYDRKQAQGKRHNQALIALAHRRFTVLFAMIRDASLYDVPELKIA

SEQ ID NO: 281976 - protein, 372 aa, unidentified
MDEGIKFFIGLDAHKDSTSVAACEAGREPARFAGTVGPDVRPLLKVLAKAGDPAQVSVVYEAGPTGYGLYRELRRRGYRCEIVAPSLIPRRPSDRVKNDRRDCTRLAELSRAGELKPIWVPDEAHEAMRNLWRAREDGLGMRLRARQQLKAFLLRHARRYPGKTSWTTRHERWIAEQCFDHEADRIALAEYQLAAQSADQRVQRLTFALTEATRGWRFEGVVAALRALRGIDTVSAIGLVCEIGDIGRFASARHLMGYLGLVPSEHFSGNSIHRGSITKTGNAHARRLLTEAAWNYRFPARLSGQLRERSKALPEPVRNHAWKAQLRLCKRFANLSSRGVQPNKVCVAVARELTGFVWAIAHQASPKASPVQ

SEQ ID NO: 281977 - protein, 415 aa, unidentified
MPNLYFGIDVGKFNHHLSVVDGHGNLIKSISFANNAFGIGLVELLAKELCADEPQSVNFAMEATGHYWIPLYEQLTKRGFHVEVINPLQSNRFRDFYIQPLKSDRRDSFVIANLLRFGQTTKTQLANPNIMVLRRLTRYRSSLTRSLARAKNRIRTVLDECFPEYQQLPIFSTIFCASSLALLKCHPTPQAICKLSKEELKDFLSKVSNRRLGEAKAKVILKAAEISIASTKLANTWQDILKDLVEELEALEKRIEHINLAISNSLDRISQSLTTIPGVSTIFAATIISEIGDISRFKSADHLLAYCGMIPSSHNSGTFSSRLNPMAKRGNPQLNYTFYRLALSSVRLNPTLKSYYRRRVEAGLPKKRALIAVARKLVRITYILLKEGSPYQLPITANMPSNVLSFQSTKCSKSN

SEQ ID NO: 281978 - protein, 344 aa, unidentified
MDHFAGLDVSVKETSICIVDDTGRIVREVKVASEPEALLQVLGNPIYRFKRIGLEAGPLSQWLFSALAEAGLPVICVETRHMRAVLQAQINKTDRNDARGMAQMMRAGLYRPVHVKTLSSQKLRMLLTHRKLLQSKAIAIDNDLRGTLRNFGLKVGMVGTVKFEARIQELAENVPDLVMLVEPLLIVRRALREQIGILHRRLLVIVRGDDVCRRLITVPGVGPVVALTYRATVDVPARFRKSKAVGAVFGLTCSKYQSGEIDRSGRISRCGDEMMRVMLYEAAQSMLHSKKWSWLKAWAMQIARRRGMKKAIVALARRLAVIMHRIWVDGTEFRWTREQAAAAA

SEQ ID NO: 281979 - protein, 312 aa, unidentified
MDVVVGIDVSKEQLDVHVLPSGESFVVANDDEGLDGLAAKLTGLKADIVALEATGGYEKLAVAALSGAGLAVIVINPAQVRAYANALGKRAKTDPIDAEVIAAFVAATRPEIRPLPNEQSQALAALLARRRQIVAMIVAEEQRTRMALAKEAQKSIKRLLAALRRELDSLDADLDDHIRKSPLWRVREALLTSVPGVGRVTARTLLAEMPELGSLDRRQVAALAGLAPWTRQSGRWKGKSFIGGGRTVVRSTLFMATLVACRHNPMLKAFRDRLVASGKPKIVATVAAMRKLLTILNAMIRDQKAWQNAQNA

SEQ ID NO: 281980 - protein, 450 aa, unidentified
MMREVQEIEDEEHEQILERVCAIDVAKAPGKVCTRVPHPSRPGARRTRVQDVDATTNAILELGGHLAGEGIEKVTLESTSDYWRIWFYLLEASGLDVQLVNARDIKNAPGRPKTDKLDSVWQAKLTERGMLRPSFVPPAEIRRLRDYTRLRTGLTRERTRYWQRLEKLPGDSLIKVSAVASSLDTLPVRDMLEALIAGERDPKVLAGLARGKMKAKHAALIEALTGRFDDHHAELARMLLDQVDALNAQIGKLTTRIGELIAAIPSAQGVGADGTTGPAAGTSPGAPVLPAAARLDEVTGIGLDGAQAIIAEIGLDMSRFPAAAHLVSWAKLSPRTIQSGTSSRSGRTGKGNPYLKGILGEAAAAAARTGTFPGERYRRIVKRRGKLKALVAVARSILVIIWNLLASPAARHHDLGSGYHASRTDTGKKVRNHIRQLEAPGYTVALTQAA

SEQ ID NO: 281981 - protein, 356 aa, unidentified
MQRGVDTHKRTHVLVALDDEGRHLGTRTIPNTPAGWAEALAWARGKQHHHRRWGVENGGSLGKGFAQFLLAQFLLAQGEVAVQEVRPQRTAQYRRRGRTQDKTDQADALAIARLLLAEGAHLPAIQRDDVSTALRLLSDHRDNLPVDRTRLINQLHAQMLQINPGYQERSGALTARRGLRYCRDLTLPEADGVTQTRLLIARQLVGQILRLEEEITTVTTALSERVRASRMPILALCGVGEVIAARLLGELGTVPRVPSAAALAALAGIAPVAVSSGGRGGFRLNRGGNRQLNRVIHLMALSQRRCDPRAQAYYAKKRAEGKTRRAAMRCLKRRLVDVLYRCFTRDADAQPVAVAA

SEQ ID NO: 281982 - protein, 401 aa, unidentified
MPFHGGLDWGGTSHAVCIIDGAGQVVVRVEARHDAAGLADLVARLERVAKPAELPIAIERPSGLIVDALVEAGHPVIPIHPNVVKACRPRYRAAGGKSDPGDAYMLADILRTDGHRFRPLMPASDDIRALRALVRGRDDLVAQRVALANQLRSLLEGFWPGAAAIFAAIDSPIALAFVGRYPTPDSAGRLGEKRMASFMAQHAYCGRRSPAELLARLRAAPIGLASDAEAEAKGEVARVLVAVLDRLVPEIAKLSSRIEHAVAELPDGRIVMSFPRAGRICAAQILAELGDVRERFPTEDQLAAEAGVCPVTHASGKSRGVVFRWACNKNLRLAVTCFADNSRHASAWAAAIYRKARDRGCKHPHAVRILARAWVRILWRAWQDGTTYNPKQHLGAMKIAP

SEQ ID NO: 281983 - protein, 454 aa, unidentified
MRKPQVVPDEDHEVMYERVAAVDVAKASGVVCLRTPDPARPGRFVNRIWDNVPATRAQIAGLGRELLRCQVQMVTLESTSDYWRIWYYVLETAGLAVQLVSPSQAKNLKGRPKTDKLDAMWLARLTQQGMLRPSFVPPAAIRRVRDFTRARQDLVAERTRCLQRLEKLLEDAMIKITSVAADGMKAKSVVAMVAALAAGERDPRTLADLAKGPLRAKRDALAEALDGMFDSHHGVIARMLLGQVAFLDQQITRMEDQAIAALAEVPGSWGVDASGQTGPGCGVTPGSPVLAAAHRLAEIPGISVWLAIVIIAEIGLNMAAFPTPAHLVSWMGLCRSAAQSGTRHGKGKPKKGNSYARAAAGQAAIGAARTATFLGERYARIARRRGKAIAQAAVARSIMIIAWHLLADPAARYRDLGPDFYASRINRDKKIRNHLRGLQALGVTVTITDDEQAA

SEQ ID NO: 281984 - protein, 337 aa, unidentified
MRKASTVKVFRDCLGIGIDVSKAELVVVGLTTGEPYIKRVNNQLTSVKAFVRALKKSGYRGKMICESTGHYHLQLALACHEIGMEIIVLNPLQSSKHSKANVRKTKTDPADGLMLASMCITEPNLPKPTRLTVSKALIRLKMGQLASIEKQLQKSQLSLNQYEETYAALGLELSELQLSLRQSFQALKRLRQQMEKELEELLVENMADRKSFARLCKFPGYSDVVAGLVGQLDRQVKGPNSWVAYVGMDISVQQSGTWKGRGKLTKRGNAYLRKRLYQAAWGACMNYDYVRAYYDELKARGRNHVEANCIISRKLLRIAYHVVVNEKEYDPRIAFSS

SEQ ID NO: 281985 - protein, 377 aa, unidentified
MPNETSVNANKVAKKELARGLRSVDPGLEVVHPNAAGIDVGNASHYVAVRPDRDTEPVRRFECFTADLYRLAEWLSSCGVKTIAMQSTGVYWIPLYDILEERGFEVFLVNARHTKNLPGRKSDVQESQWLLKLHTHGLLNNSFQPPSDIRVLRTYWRLRAEHATGMATCIQRMQKALTQMNIQLANVISDLSGTTGQAIVRAVLNGERDPHKLAELRDRRIHATKEEIAKSLQGNWRPELLFIVRQQLEMYEAYQRQIAECDLKLREHLESFASALSIPVDEGNSPQSKKSKRYRYMPQFPLSNELMRISGVDLTQIDGVDAMTAQTLISEVGLDMNRWKTESHFASWLGLCPDNRISGDKVLSRGTRRVINRAATA

SEQ ID NO: 281986 - protein, 344 aa, unidentified
MTTIDYIGFDIHKKTISFCAKAPDGAILEEGTIPSLRNRLLAWAKARPRPWIGAMEATLFTGWIYDFLKPLAQELKVAHPPMLKAIAVAKKKNDKVDARMIADLLRCNLLPECYMAPVAIRDLRRVLRYRNLVVRQATRIKNRIAGLLMETGTAYNKERLHGKAYFSELLGSLQEMPPSVVELLKLSRGQLELFAVIQRRLLKGLNEHPDLSERVMRLQTIPGVGEILALSWALEVGEVGRFASIGQAASYCGLTSAQHNSAGTEQRGPISKQRNKHLQTILIEAAKLAPRRNPQLAVVHERELQRGDRNRATLAVARKLVAYLMAVDKGGKRFAMRALTEVAA

SEQ ID NO: 281987 - protein, 342 aa, unidentified
MLEIAIVGLDLAKNVFQVHGADTEGAPVLRKKLRRTEVLPFFAKLPPCLVGMEACGGAHHWAREVSALGHQVRLIPPAYVKPFVKRGKTDAADAEAICEAVSRKTMRFVPVKSAEQQADAMVLKARELLVRQQTQAINALRAHLHELGIIAGAGVAKVSQLIDIARDPDDPRIPATARVALAAIVGQIDALGQELRRLERTIVAMGKRDPDTQRLTTIPGVGAITAASIKALVPDIGGFRSARHFAAWLGLTPKPHSSGGKERLGHISKMGNPTLRKLLVLGALAMLRRAKNAEPGLEWVARLPARRPGKVVAVALANKTARIVFALLSKGEVYRKPALATA

SEQ ID NO: 281988 - protein, 394 aa, unidentified
MTFWVGFDVGKTFHWVSVLDDAGEVVLSHRVEATEQGLEAACSQIAGLSEERKVALDVLGGPATLLLALLAERGEQIFHLPGLAVNRAREAYRGGEHKSDRNDAFVIADQLRMRWRSLQEICPKDEALAEMRALVVGHRRDLIQDQTRRITRLRGLLLEICPALEATLNLNREGTLQAVTKVATPASIRRLGEARLGRWLKSRGVRKWRVLAQRIVAAAKAQKCELPAAEVKAALVAEIALEVLRTRKRIAALDDRLEELLASNQQASIVRSLPGMGTVFTAEFLAEVSEISRFNSTNDLAAAAGLAPVLRSSGSVSYQRRPKRGNRTLKRLLYRSAFCAISHHGASESFYQRKRTEGKTHHRAMIALARRRVNVLWAMLRDGNTYVEQSPEAA

SEQ ID NO: 281989 - protein, 349 aa, unidentified
MLADQLDYVVGVDTHRDEHVLAVVAAPAGAVVAGKAVRANRRGYREALRFGERYAAGRRAWAIEGTGSYGAGLARYLAEQGETVLELSRTPRAERRLQGKDDALDAARTARAALASETLALPRAGQRREALRLLLVARRSAVDVRREALAQLRGVIVTAPDHIRQELRGLSAGKLLGRCSRLRRSSSADADELAARLVLRSLARRIEAATREADQLERELLGHVRALAPSLLDEPGVGPIVAAQLIVAWSHRGRLRSEACFARLAGVAPVPASSGQTRRQRLSRGGDRQLNRALHTVVLHRRQHDPATRDYIARRVAEGKSRRDATRLLKRYLARHLYRLLQAQEPLMA

SEQ ID NO: 281990 - protein, 349 aa, unidentified
MTTVPSRPVAVIGGVDTHADIHVAAACDPLGAVLGTESFPTTPSGYRRLLAFLVSFGPVTVVGVEGTGSYGAGLARHLAEVGVRVVEVNRPNRQVRRRHGKSDIVDAIAAARAVISGQATVIPKTHDGSVEALRALQIVHRSAMKSRTQALNQLHALVVTAPEAIRAPLRGLNRQQLLATCQAYRPGNGDDIVAVTKFALRHLAIRIGELTIETTEISKRRRRLLNQCAPTLMAIIGVGPDTATALMLAAGDNPDRLGSPAAFAALLGASPIPASSGKTTRMRLNRGGDRQGNSALWHIVISRMATQPATKAYVERRTEEGLSKPEIIRCLKRYVAREVFNALPREVLV

SEQ ID NO: 281991 - protein, 412 aa, unidentified
MSPMLIGVDVSLRSHHVQFMDGAGRSLASFSVPNDQSGADTLIHKMLDTASKEKLKHLHIGMEATSNLGWHLAHYLKSELQNYEPNVMSQVYVLNARKVARFKKGYDTLPKNDRIDAWVIADHLRFGRLPHEMKDIIQYEALQRLTRTRFHLMKNIKRDKTYFLNQVFLKFSGMRQDNPFSNTFGSTSLAVIQELEPDQIMAMSMEELIEFLQDKGKNRFENPEEIATYLKKIARSSYRLDKAMADPVNISLATTLSVIQHLESEVKKLDKEIAKIMKGIPQTLTSVKGIGPVYAAGIMAEVGGIDRFTNHAALAKYAGLVWNQNQSGEFEAEETSRMHTGNKYLRYYLVQAADSVRKHDTEYAAFYQKKYDEVPKHKHKRALVLSARKLVRLVFMLLKTNTLYTPPERRNP

SEQ ID NO: 281992 - protein, 312 aa, unidentified
MKIICGVDISKAGLDACIEPGSIRRSFKNEAAGIAALATFCRLHRVELVAMEATGGYERRAFLLLSEQGLPCAITNARQVRLYAEAMGVLEKTDQIDARIIARFARAKELQPTPVPSQAQQRIKALVARLRQVTDDLTVQKQRRSSLLDNAEILASLDEVIVLLKRQSRTLEGEIGSMIDDDPLWAQLAEAWCSVKGVASRTIARLMADLPEIGTYSNKAIAKLVGVAPIANSSGKREGKRPVRGGRSSVRSILFLVAEIASRYDQSLADFRARLVAKGKEKMVIRIALARKLLVRLNAKARDARAAYANAT

SEQ ID NO: 281993 - protein, 346 aa, unidentified
MPETEVDTFAGIDVSARELSVALRRGKGEDKPALAKFSNHPSGHKALIAHLLRGGRRVRVCLEASGNYSLDLALTLQAHRQVEISVINPRRARRFAESLGQRSKTDPVDARVLCEYAARMPWVAWQPPSSVALHLRALTRAIADLGVIHTQQNNRAHASAASQALPVLVVKEMQRHQKYLEQRITRLRREALRLIAGDSELDRRFRLMLTTTGIAETSALQILGELAVLPDMLDARQWVAFSGLDPRLFKSGKSVEKRPRISRGGSRHLRRALYMPALVALRRDPYLRCFYQNLLARGKARLQAVVAVMRKLLHALFAMFRTNQPYDGSKLCCAVETAGHAIAACA

SEQ ID NO: 281994 - protein, 347 aa, unidentified
MRFYTRQHVHYCGIDLHARSLYLCILDQEGTVLVHRKLPCDREKLLKTLTPYREDLVVAVECLFCWYWLADLCSEQDITFVLGHALYMKAIHGGKTKNDRIDSYKIAALLRGGNLPYAYVYPRKMRATRDLLRRRLFFARKRGELLAHIQNTNTQYNLPALEERPDKTKDRGAIIEHFDDEVVQMSIASDVALLDSYDQVIRDMELYLIHEVRKDRNREFYLLRSIPGIGEILSLTLLYEIHDLSRFPRVQDFLSYARLVKGTHESAGKTKKLAGAKMGNVHLKWAFSEAAALFLRGNSVGQKYFARLEKKHGKGKALSILAAKLGRAVYHMLLRRRPFELQRFVAA

SEQ ID NO: 281995 - protein, 355 aa, unidentified
MDSVKYIGMDVHKEAISIAVLNSSGKLVMECVIETKASTILQFLQGLRGSLHVTFEEGTSAAWLYDLLKPQVTKIVVCNPRRNALLKEGSKSDRIDARKLAELLRSNLLRPVYHGEHGVRTLKELARSYLTISKDLGRVMSRLKAIYRSWGIPCAGKQVYAPRYRSEWLGKIQEAGVRRRAEFYYQQLYALRPLRQQVRQELLAEAKKHSAWKLLRGIPSIGPIRAALIIAILQTPHRFRTKRQLWTYSGFGIETHSSADHRCVNGELERAKKQISIRGLNRNHHHDLKNLFKSAATIAAVKAGPFQEFYDALVAKGIKPEMARLTLARKIAAITLVVWKKGVRFDAEHLKPQTA

SEQ ID NO: 281996 - protein, 411 aa, unidentified
MRIFVGDDWAEDHHDVHLMNDDGARLAARRLPEGLEGIRTFHELVAVHVGDPGEVIVGIETDRGLWVTTLVAAGYQVYAINPLAASRYRDRHNVGGAKSDKGDAKMLADLVRTDRHNHRRVAGDSPQADAVRILARGHQNLIWVRTRHTNMLRSALRDYYPGALETFADLADRDTLQVLAKAPTPAQGAHLSISQIEAALKRGGRQRKLRSRAIEIHSGLRGGQLAAPDAVADAFAATTIAAVGIISELNRQIAHLETTLAASFEQHPDSDIYHSLPGFGVVLGARALGEFGDDPNRYANTKSRRNYAGTSPLTIASGKNKTVLARYVRNRRLYDAIDQAAFCSLTQSPGCRAFYDEHRAAGDHHHQALRALGNHLVSILHGCLDHRCLYDEHTAWDHRQPHEPEHVRQAA

SEQ ID NO: 281997 - protein, 455 aa, unidentified
MSNGSRRGLSRGDRRRNEKLARLRAIITRETAVLAFDLASDKQVCALTDPDSRVLARRTARVKAWQLAQTLDWGLAAAAEAGFTSVVVACEPTGHRWRVLDQLAAERGVMLVCVQPLLVARAREAEDFTRNKNDDTDATIIARLVTELRCYLPERADPAWARLRHLGARRARLVVEVGAARQQVRDLLECAWPAVLDAASKPLDSANWLAAVATGLDRVAATGELSELGQRGWEQFAAAVRAELAPTRWYSVIVRAVFDAATDPAAAAVGVVDQRAGALERVRFALADLAHLRGQIAEVETRMTRVLDTLGLTELVTGIPGVSAVGAATILAEAGDPTRFSSARALVKHAGLCPRANESGNYAGTTSISGRGRPELRLAAWRAVFTALQHNPVLAARHAHLTGRADNPLTDTQARVAVAASLLRQLHAVVVTRTAWDPAVAAGLDRREDGAATAA

SEQ ID NO: 281998 - protein, 338 aa, unidentified
MELSVIGMDIAKNVFQLHCVDRETGEIERIKLRRNEVLPYFARRTPALVAMEACGGAHWWARQLQQLGHTVRLLPAKAVRPFVLRNKTDAADARAIWTAVQQPEMKTVAIKTEYQQSILALHRMRAQLLKFRHMQTNAIRGLLLEFGHPLPESYLALRKAFPTVMATLDKQLPGILIETLREQWARVQSLDNEIALIEGRLKRALAETPTCQMISDIPGVGLMTATAAVATMGDPASFKTGREFAAWLGLVPRQTGTGGRIRQLGISKRGDAYLRTLLMHGARAIIARRTYSDWVAGLIARRPYRVVIAAIANKLARTIWAVLATGKRYDGAAFAAAI

SEQ ID NO: 281999 - protein, 419 aa, unidentified
MDVIVQRPAALDVHKEQVTACVRVPAPDGSRTQEVREFKTTVGGLLVLHDWLEAHGVTQVAMEATGVYWKPVWAVLEDSFDCLLVNARHVKQVPGRKTDVKDAEWLCQLLEAGLLRASFVPPKPIRALRNLTRYRKAQIKERQREANRLHKVLEDTGIKLDCVASDILGVSGRAMLDALCQGTTDPEVLANLAKGRLRAKLPALREALEGRFESLHALLVSSILAHLDFLDEQIERLSDAIEEQLRPSQSAVELLRSLGGIETRTAQNILAEIGTDMTVFPTAGHLTSWAGQCSGNDQSAGKRRSGRARKGSKWLNEALKDAAMGAILTKDSYLQAQYQRLRPRIGHGRALGAVKHSILCAIWHMLTTGELYRDLGGDYFRKRDPERQTKRLVAQLERLGHSVTLQSTATSTAEAVAVA

SEQ ID NO: 282000 - protein, 404 aa, unidentified
MKQFTPESVEVKSNSALNLILNHRNLDDYCAYIGLDVHKETIAIAIAKRGRGEASYRNEIPNRPKSIKKLVDKLTKEFHGELLLFSYEAGPCGYDVYHQLIALGQDCEVVAPSLIPQKAGERVKTDRRDAMGLARLSRSGELTAVWVPEPEQEAMRDLTRAREDSKAIELKTKQQLGAFLLRHGRVYETGKTRWTKGHFNWLETVKFDSAIQQIVLQEYINAVKDAVQRVAGLLNEMHKALQTWSLRPVVEGLIALRGIDIITAMTIMAELGDISRFDKPRQLMAFLGLVPSEYSSGGKRRLGGITKTGNGHVRRVLVESSWSYRFPARKTKHLRQKESKTSGRVQSIAWEAQKRLCGRYQHLLESGKAKQQACTAVARELSGFIWAIVCELMNKPHASRCLTM

SEQ ID NO: 282001 - protein, 371 aa, unidentified
MRNHIMVGCDLHDKNMLIKIAHNRGKPAQKSFGNTISGRKGMIQVLKKQASEAGDATVVFAYEASYMGFGLYDELTDAGFQCHVLAPTKIARSVKHRRRKTDARDAERLLEIVRGHVLGGNEMPSVWIPDHGTRDDRELVRMRLEVGRKITAVKSQILVLLKRNSFRKPRKMGNNWTKGHRAWLEESSKPESALPVGARYALSSLVRQLRALEGEVARLEIHIEALACTERYAVPVRELKKLKGVGTLTAITYLTEMGDLSRFGNRRKVGAFLGLVPSSNESGERDDRKGHITHHGPPRVRKVLCQAVWSRVRTDPNEKKVYERIVARNPKHKKIAIVAAMRRLAVKMWHEGLKAQQSAGCFEPQPQCTTV

SEQ ID NO: 282002 - protein, 384 aa, unidentified
MTAAALATFVPRDYDIFAGLDVDQRSMAITFTDHGTMQKSLKLPYSATQLLNYTEKHFLGQRVAFVYEAGPTGFGLHDELRAAHQFCLVVSPSMVPQAPRKKVKTNRLDSKKLSEGLRGGQLQGIHVPAQSYRELRHLVQLRDTQVAQLKATKQRIKSLLLYEGIPFPEAHGKWTVPVLRALEQLPCNATVRFKLDQLLDSLQFHYLAAAKVQKQIRRFCQNNPELRQCVRFLASLPGVGTITATHALARLGDWRQITDVRQIAGFLGLVSSEHSTGDKENRGEITRIGDKRLRSKLIQCAWIAIRKDPELRAFYHRVYERQPQKVAARKAIVAVARKLTTRMYAVLKQQRAFVIRADSSAAPLTTEETAGLEERLDVKQNQHP

SEQ ID NO: 282003 - protein, 348 aa, unidentified
MEAYDGPQIVGMDLHRRRSVLVRMTPDGRRLDTARITNSPAELRREIRKAGEHPKVVLEATYGWYWAADTLAEAGAEVHLAHPLGVKAFTYRRVKNDQKDAADLADLLRMGRLAEAWIAPPEIRELRELTRYRQKLVRARTSAKDQVHAVLAKLGIPVTCSDIFGVWGNAWLDGLPLGQPYAGKVASLRKLAGELTSEITLLDTVLADLLERHDGYRAIQALPGIGPVLAAVIVAEIGDIRRFSCPARLCCWAGLTPRHRESDLKVARGHITKQGSPLLRWAVVEAIQRQPAGPIRDVKDRIIARRGKEAKNIAKTAAARHLLTCVFYAMRDGQARSLARRTAARDAA

SEQ ID NO: 282004 - protein, 410 aa, unidentified
MEVLVSHGCGLDVHQATVVACLLTGEPGKLPRKQVKTFSTMTGGLIELRDWLVAADCTAVAMEATGVYWKPVYNILEGHFELIVANARHIKAVPGRKTDVKDAEWIADLLRHGLLQPSYVPPPELRELRSLLRYRVKLVNARSAERNRIIKLLESANIKLSGVISDPFGVSGRLMLNALKVGAATPEEMAELAQKRMRSKLPLLKLALDGRMEAHHRQLLSIQLDRLDRFDRDLKQMDAKLEAKLKPYARQMELLDDIPGIDWVVGATIIAEMGIKMGQWPTVGHLTSWAGLCPGQNESAGKRGKTSIRPGNPYLRSALVEAALAATREKDCYFREKYYRLKARRGHKRAVVAVAHKLLVAIYHVLSSDTPYRELGADYLERLEPERLKLNLVRRLERLGFQVKLEPRRA

SEQ ID NO: 282005 - protein, 416 aa, unidentified
MNAAGIDVSSRKSTVAVLRPFGEVVRLPFDVAHSTEGLASLAEQLKALDGETRVVLEHTGRYYEPVAKALHEAGLYVSAVNPLLIKEYGANSLRRVKTDKADALKIARYALDNWTDLRDYTPMDTIRYDLKTLNRQFQLASKQRTACSNNLIALLEQSFPGIRRCFDSPVRSDGTQKWVDFAHTFWHVDCVRKQSYNAFSERYRKWCKRHGYFFKQSNAEEVYALAKNAVVLVPKSGVTKVLVQEAANQLTSTSRSVETYRTEMERLASMLPEYPVVMKMYGVGKSFGPQLMAEIGDVRRFERKQALVAFAGIDPMPNQSGDKNVRSNKSSKRGSPYLRKTLFNVMGIYLKCAPLDEPVFQFLDRKRSEGKPFYVYMTAASNKFLRRYYAQVRDYLAALDDLPPVDMDSTGLKTSD

SEQ ID NO: 282006 - protein, 369 aa, unidentified
MNKNYSLKTAPTALSKEQKSQNRPKAKRIVIGVDVHLKSYHAACKIDNGAIGAVAKFRSQTELLLYIEKQLKAAEEVVVVYEAGPLGYVLYRELEAQGVRCYVCGAESTQQRSKRRKNNQIDARTLSSNLFNYLNGNERALQSVRVPTPAQEQARARSRQHDQLVQERKRLAAQGNSLLLSQGYGSWQNWWRPKAFSQLSQLVSPWILELLKGWVDLLQALDEKIQQAKVALAQRYQGPRPKGVGAASLAQLSAEVLDWQRYSSGRKIGCLAGMVPSEWSTGDNQRLGAITKVGRTGHSTDYHRGGLADYPLSAPVPAGAKMAGSLERHQPGAEEKGHLAIGRQLMVDLWRVQTGRITAQELNLVMIGG

SEQ ID NO: 282007 - protein, 344 aa, unidentified
MDNHTQYSGFAGVDLAKKVMQIHFVTGDGEITDKQVKRAEFLDFFRNRTKCLIGMEACGASQDWARKLEAMGHEVHLMSPKAVKPFVSGQKNDYNDAIGIYKAMFNGVRRVPVKSTEIRDLQTLRRIRSQVTKDKVKEINHVRGLLAEYGIVMGKSITAFNKGISSALESLKERGDVSPLVAEELRTTVESIKTKIERQKRLDREIEQLARGCKNYENFLKTPGVGPFTAAMLCVLLCEPAIFANGRQFAAYIGLAPRSRGSGGKNFIIGIPSKFNCDRESRAVFVECAQALARYKNKSPWVDGILRRKPKKVAVIAIANKLARQVWAMANKGESFKQMTILTA

SEQ ID NO: 282008 - protein, 422 aa, unidentified
MSKVVAELGATRFVGIDWASEEHAVCVLDEVGSSMAAFTIAHSSEGFENLVRKLASLGPVGAVPVAIERPDGRLVDCLLEAGHPVVAVSPNAIKAWREAEVASGAKSDAGDAEVIAEYLRLRQHRLVVLQPFSEATRALRAVVRCRDGMVHQRVAAANQLEACLDAYWPGAKQLFFDITSNIALAFIEDYPTPASAARLGEMRMAAFLKRHGYTGGRPAAELVKRLRSAPAGIGTGPEAEARRASALSYVRVLRALNGSIKDLERSIVTQLGEHPDAVIFTSLPRSGRLNAAQMLAEWGDCRQAYDGPDAVSALAGMTPVTKKSGKHSTVQFRWACNKRFRNAVTTFAGNSRHSSPWAAHIYARAIARGCDYPHAVRILARAWIRVIYRCWVDGVAYDPVRHGAAARISNGTEEALREDSAA

SEQ ID NO: 282009 - protein, 452 aa, unidentified
MVAVMEPQEIDDEEHEQVLERVAAVDVAKASGMVCSRVPHPARPGRRRTRVWPVDATTNAILELGEHLAAEGIEKVTLESTSDYWRIWFYLLEAAGLDVQLVRAQDVKQAPGRPKTDKLDAVWLAKLTERGMLRPSFVPPVEIRQLRDYTRLRTDLTRERTRHYSRLEKLLEDALIKVSAVASKLDTLSVRDMLEALIAGERDPTVLAGLARGRMRAKRDRLVQALTGKFDDHHAELARVLLDQIDALSAQIGKLTTRIEELIAAIPAAQGVDPGGTTGPAAGKADGAPVLPAVDRLDEVTGIGREAAQAIIAEIGLHMSVFPTAGHLVSWAKISPQTIQSGARNRAGRTGKGNPYLKGILGEAAAAAGRTDTFLGERYRRLVKRRGKLKALVAIARSILVIVWHLLADRNTRYQDLGAGYYASRIDTGRKTRNHVRQLEALGYTVTLTQAA

SEQ ID NO: 282010 - protein, 406 aa, unidentified
MELTTLFKRVIGLDVHQAQITACAIIEDEHGNRHVEQRQFGTFKRDRKALAEWAAALNPDLVVMESTGIYWKSPYAALEAAGVRTLVVNAKHVKNVPGRKTDIGDAQWLATLARAGLLRNSFIPPSQLRELRLISRQRQKLVGQLAAEKNRLHKVLTDGGIRLGVVVSDVHGAAARRMVKALIDGKSVPEVLELASKRFKASWEELFDAVQGELTPSHRFVLDELMRHIEEIEARIARFDARLLSGMDEQRNALALLQTLPGVDLIGAAMLLVEIGTDMDAFGSPDRLASWAGVCPGNNESAGKRKSGRAGKGNPYVRRLLCEFAHSARRTTCVFKSKFEALHIRRGHKRAIIAIAHKLLRTVFFMLKRGQCYRDSATDYEALAVKRNAPRWIKALKKFGLIDQPA

SEQ ID NO: 282011 - protein, 327 aa, unidentified
MDNPTYIGLDIGKYAVSCAVPGRRVRDFNNDRPGIRCLLQWCGLTSPPAKLFFVMEATGGYCLFTASTLLDLADTRVAIVPPVCIASFIKAGIKRTKTDRADAEAIRRFGEVHHPAPWFPRLKQQQRLRDLLLVFDAAKRTVVRLKCLKEKLATALQPDPFTLASLQRQLDSALAEQRLVAAEMDAVVSADEVLSTDSANMLSIPGVGPGVRNVLLALIGEQLHALSQRKLLAYCGLSPQENQSGKFKGRTMLNKAGDPRIRQILYMAALRAVSPRGILHDYFQRLKRGGKHGKSALVHVMRKLLYLIQALVKSGKPFDRARYLNPA

SEQ ID NO: 282012 - protein, 406 aa, unidentified
MIFVGVDWAEAHHDVLVQNEDGKRLGGGRLPEGMEGIARFHAMVAAHVGEPGEVVIGIETDRGLFVTALIAAGYQVFAVNPMSTSRYRDRHSTSGAKSDPGDAKVLADMVRTDRHNHRPVAADSDTVAAVKVLARAHQSMIWSRGRQANLLRSTLREFYPGALTAFPELTSADALEVLRVAPTPELGRTLSISKIAAALRRGGRQRRIDQRAMEIQAALRADQLGAPGEISTAMGASVAASVAVIAAMNAQIDTLAGGLEAGFDKHPDAVVVRSLPGLGTVLGARVLGEFGDQPNRYDSAKSRKNYAGTSPITRASGTKKAVLARYVRNHRLADAIYLWAFASLTASPGARAFYDAHRAAGDTHHAALRVLGNRLVGILHGCLEHHSAYDENIAWGHRQEKLPAAA

SEQ ID NO: 282013 - protein, 409 aa, unidentified
MHYYLGVDWADQTHAVWVADERGTKITARTVPHTAEGLSEWGRELDEWRAQGLELWAAIERPEGRAVDFLLDHGVVVYPVNPKALDRARDRFRQSAAKSDPFDARVLADFLRTDHPRLRALQPSSDAAQELKLLTEDCQRQIRQQTRLVNQLTATLKAYYPRALEVAELTTALAREFLQAYPTPAAVAGLTERQWQRWARAHRLSEARTQELWAVLQQPQLPVPAHVVRAKTRLMQTLLTELAPAVAAVEAYRQAVENFFAALPAAQWIRTLPIGEHGVTAPTLWARLGDAPGRWESFQHLQAQAGSVPVTVKSGKQQVVHFRFACDKALRHVVDQAAFLSLRSSEWARAYYDAQRARGNSHRQALRALGAKWLKIIFVLWERQMPYDESYHLATMARQQLRQRSRKIA

SEQ ID NO: 282014 - protein, 450 aa, unidentified
MGNGSGVSRGDRNRNARLARLRALVPVTNAIVGIDLADAKQMVVVTDHDSKVLARKTFRCRAWNLGAALDWAAERATAKGWAGVTVACEPTGHRWRVLGQLAADRAMPFVCVQPMLTSWARRSEDLTSDKTDEKDAVLIARLTAQLRCYVPEPVDETWGRLRHLGARREQLIIEMVSQVQQIRALLECVWPAALDTAKQPFRSRTWAAAMTVICQRDGGDLARTRRLGAARFEQAVRREITRRGGCKPSLRILRHLFTALTDPTGVTAHRPGALERVAFLLQDWHTAADKLTDTDTRMTRVLDELKLTELATSIPGLSAVGAAAILAETGDPNRFATARALVKHAGLAPREKLSGTFVGRTKLTGQGRPALRLAAWRAVWGAQRSNAVYAARYQHLTTRETNKLTATQAQTVIAAAILRQLHAVITTGRAWNADIATYGSHHRRQVALAA

SEQ ID NO: 282015 - protein, 390 aa, unidentified
MEARTVNNLLPAASHDDAVGCLVAIELSKKSWIVAVNTPLSDKISRHTLKAGDGKELLDLCERIRTRVARETKRRVKIVSCYEAGYDGFWLHRLLEAHGIRNYVIDPASLQVDRRARRAKTDHVDVERLLRSLMAYLRGEPKVWSVVCVPSVAEEDDRRLNRERGRLINERIQHVNRIKGLLAIHGIYDYQPLRRDRMLRLERLRTAADGQTLPPRLKAEILRELQRLELVLGMIKTIEAERDAIASPKTETEHTNAKKIQDLAKIKSIGPEFATTLIGEVLYRSFDNRKQLASYVGLTPAHFQSGAMCRDQGISKAGNGKARTVMIELAWLWLRHQPDSPLSVWFRERVGKLKGRIRRITIVAVARKLLIALWRYLETGLVPKGAILKA

SEQ ID NO: 282016 - protein, 345 aa, unidentified
MQSRTIAVDLAKSVFQVTFADENQRITERRRLSRPQFQRLITQSSPSRIVMEGCASAHHWGRLAIAHGHEPKLLHAKYVAAYVRRNKTDAADADALLRADGDDTLVPIAVKSVDQQALQSLHAIRAQWRGTLTAQINQAKALLAEFGLIVPRGSHTLGQRLHHAMLDLPDLLQPAFTELIFEINQLTQRIDKIDQQFKTITQTNAEAKRLTTIAGVGPLIATAMVARVPDIHGFRRGRSFASWLGITPREFSSGSKRRLGSISLQGDVYLRTLLIHGARAALLACRRNEKAGKPLTQLQRWALATQARVGHNKATVALANKMARIIWAVWTRKTTFNGDDALRFN

SEQ ID NO: 282017 - protein, 337 aa, unidentified
MKYSGIDLHSNNSVVTVTDEEDRVVAEKRLPNDLGKIVGFLRPWREELAGVVVESTFNWYWLVDGLQGAGFKVPLANTTAIKKYDGLKHSGDEADARYLAQLLRLGILPTGTILPPEQRAVRDLARKRMQLVRSRTTHILAVENITARQHGARISSNQVKGLTPEAIEQMPLPEDVALAVKANAAVITTLSAQIDLLEKRLQKMMGERVEYGLLTSVPGIGRVLATTILLEAGPIDRFAAAGNFASSARCVDSQRLSNGKKKGEGNTKNGNKYLAWAFVEAANFALRYCAEAKRFYERKMAKANRALAIKALAHKLARACFHILKERKPFDVTRCFA

SEQ ID NO: 282018 - protein, 323 aa, unidentified
MTYIGIDISKDSFVAAFPKVSGYQTHTFPNTVKGIRKFIGSLSVTEHHCVMEATGNYSFLLLYLLDRQGIAASMVNPKQIKHFSRMMMTVTKTDPKDACMIAMYGEKMNPPVYKMPSETVMLLKQKKTIIRQLKKQLTASKNLKSSLVVLPFHDKNGMKALDKTISFLASQIDSLESELADLASSEFNRQVKLLTSIKGIGITLATALIVATGGFSYFNNAKQVSRFIGICPTYQQSGTSVHIKGGINRNGDASLRSLLYVASWSALRGNTTCKECYARLKANGKPSKVALIAVANKLVRQAFAVIKSDSPYVDGFVSAHHTK

SEQ ID NO: 282019 - protein, 340 aa, unidentified
MNSTAYGVDTAKNVFQVYSVNQETGEVLNKQIKRAKFLEYFVNKPPCLIGMEACGGSQHWARALQMMGHEVKMMAGKVVKAFVSGNKNDAADARAIWLAVQQPGVRAVAVKSEAQQAVLALHRMRQQLVKFRTMQSNGLRGLLGEYGEVMPVGRAALNRGMKDALARLDERLPAMLIDTLREQWDMLARLDQQILQIEQRLLAWMRQDRASKMIAEIPGVGLLTATAAVATMGDASTFKSGREFAAWLGLVPAQTGTGGKVRLLGISKRGDTYLRTLLTHGARSVLMHTKEPGKWLQDIGKRRPPNVVVVALANKMARTIWALLAHDRKYDKEHVSLRPA

SEQ ID NO: 282020 - protein, 356 aa, unidentified
MITSKVAQKMDFTNRKIYIGLDVHKKNWNVSIFVEKQYFKAFQQAPKPDVLIKYLHDNFPGGIYECAYEAGFCGFWIQRELSDKGISCIVVNPADIPITNKERNNKRDPVDSKRIASALEDGKLNPIYIPSIQLEADRRIVRLRKTITNDLTRSKNRIKSELFLIGIEIPGKYKGWSKPFIEWLKALDLEHKNWRSTLDVTIQRMEQLRSQLLLLNRDIRKLIKEDRYKKIGEQLLKISGVGVLTAITVLTEIGEIERFETFDRLNSYIGYCPTEHSSGESEQKGGLTPRGNSQLRELLVESSWIATRTDPTMAACYADLTKRMTGKRAIIRIARKVLNRIYGAWKNGLNYQTGIN

SEQ ID NO: 282021 - protein, 351 aa, unidentified
MTCKKDVAVVRTIGIDTGKNTLHMIGLNEKGAIVLREKVSRNRIAARLVNIPPCLIGIEAGMATHYMSRDLLALGHEVKQVPPAYAKPFRQGHKNDFRDAHAVAEAVQRPSTRCVPIKTDDQLDLQGLHRVRSRLIGDRTAVINQVRGFLLEHGIAVRQGPRSLRQQLPQILATRTDVLSPRMLRIIGDIVDDWRYLDDRIERVTDEIEGLARTDVNCGQLISVPGIGPIIASATVAAVGNGTAFAKGRDFAAWLGLVPKQMSTGDRTILGRITKRGNRYLRMLFVQGARAILLRPKSWAKYSFGPWLTAAARRLHRNILTIALANKLARIALTVLVQGRSYESRIVPAAV

SEQ ID NO: 282022 - protein, 412 aa, unidentified
MGRYIGLDVHRDFAQVAIVEDGIVSDAGRVDCRPAALREWMTGLRSDDEVALEATGNSDAIATLLTSHVARVVVSNPLKTRAIAEANIKTDKVDARILAQLLAADFLPSVWLPDERTRRLRRQTMRRAHLVRQRTRLKNQVHAILHRNLLPHPPVTDLFGAAGRRWLAGQDLPNDEHHTIEALMRQLDFLGEELALADRELAVEALADPVVRRLMTIPGVDAVVALSVVAAVGDFGRFSSSGKLVAYLGLHPRVRQSGSQPASHGRITKAGRAQTRGMLVEAAWVAARAPGPLRAFYKRVKARRGLQVAVVATARKLAVLCWHLTVDGQDYAFARPSLVAFKQRKLALTAGAPRAHAHRGPGYDYNDKQLRRHEREVIEVAERAYETLIAGWQPRRPAHTGTADFGVRPRRA

SEQ ID NO: 282023 - protein, 350 aa, unidentified
MVVVGADVHKRTHTFVAVDEVGRKLAEKVVAATSSGHAEAVMWARERFGTEVVWAIEDCRHLSARLERDLLTAGQHVVRVPPKLMAQTRASARTRGKSDPIDALAVARGYLREPDLPVACHDEVSRELKLLVDRREVLVAQRTATINRLRWRVHELDPEQAPQPASLDRAKHCEKLAGWLDTVPGLVAELARDELADIIRLSAAINALAKRIGARVREVAPALLAMPGCGELTAAKLVGEAAGVTRFKSEAAFARHAGVAPIPVWSGNTAGRVRMSRSGNRQLNAALHRIAITQIRLDGLGRAYYAKRLDAGASRTEALRSLKRRLARIVHHHLHHDHQNRTQPCQPAAA

SEQ ID NO: 282024 - protein, 368 aa, unidentified
MSSVASPEGLIHLGMDTSKNTIVVATLLPGEESPVTDRVFNEEEAIRRLVGRFPDRSVLRAWYEAGPGGYDLYRLLTSMGVACQVVAPSLIPKGGSDKVKTDKRDSRRLARLGRAGELTPVRVPSAAEEAVRDLARARAVVLDDRKRARQRLIAVLMRHGRIWRGASYWTAAHRAWIAAQRFGEPALAAAVGHYRAALEVREAELAAIEAELAPWAAREPLAGPVARLGCYRGIAELSGLTLAAEVVDWRRFPAARAFMSYTGLVPAEYSSGDRTRRGHITKAGSEPVRTALTEAACAYRHGPAIGAGLRRRQHGAAPETLARSWTAQRRLHARYVHLVHAGGKAAPEAVVAVARELAGFVWAEMTAA

SEQ ID NO: 282025 - protein, 420 aa, unidentified
MFMIIPSQFPYQATVGLDWADQKHDVFVRFANGDSYRRKIDSRPEAIQEWLLELRSTCGEGKIALALEQRRGALFYHLCTHLNWIDLYPINPHSLASFRQTFFSSRAKDDPVDSQLLEELLRTHPERLRPYQPEPTTQRKLEQYCRHRRRLLDLATKTELKLISTLKQYFPLAVHLFNDVGMKSDIALSFLSRWPTLDELQRAKAHTVRSFFYAHNSRSQSLIEKRLQQIAQAHPVTDDLALIEPLLLTTKCLVAQLRRFNQAINEFDRKIRELFKSNPDHFLFESLPGAGEQLAPRLLSLFGSDRSRWADATDIQKYSGIAPVVERSGKSLWVHRRLARPIFICQTFHEFAQQSIQYSSWAEQFYRRQRQRGKSHHSAIRALAFKWIRIIYACWKANKPYDESFYVQTLEKRNFSVSST

SEQ ID NO: 282026 - protein, 450 aa, unidentified
MSPLALDVVTKTDKTPVLGRMLSKYVGRKTSSIENGITKARNHSRQRGNIMRVVFGIDVSKASSEVAILVNGEKVHGYTIPNDAIGFNRLLGDLKTVHQPEIVFEATGVYSRRLQAFFEDNSYTYTRLNPLESKKQLDSLRVRKTDKIDAEKLAMSQFILNRKPSYVQEALYQELRDLSRFYQNLTEDIVCAKNRLHKVLQITFPELENILSAPTGEQYWNLVITFPCNSFVLESDDATLTAIIRQSTAKRISEKRVTYLVDKLTKLANQSYCEVKKTSPMMEEIKYYAGELLRLSEHRQGVVEEMVTLAQSLPEYEILLSIPGIAETTATSIIGELGDIRRFHSANQINAFIGIDLRHYESGNFLAKEHITKRGNPYARKILFKCIHNIASASHTNPCHIADFYEKRKRQSQVTSTKPHTIASIHRLIRTMYYLITHNKLYDYTSIQNR

SEQ ID NO: 282027 - protein, 401 aa, unidentified
MKYVLVLDVAKGKSMFMLSSDIGEVLLEPTEYIHNKSYFEKIDSYINKLNIKDSLTVLMEATSIYHKSPERFFKENNYHVIVFNPLIGKEITNTIRKTKTDKQDCIKLTNLFWKGSIPDRNYTEDEIYTKLNELSRQYYHLDEGLTRHKNRYKELLHLCFPEFELCFKDGKIYDLTALNFIKEFPHAYIIKDKRVDALAYNMANTNNRHLNYYKRKATIIKEYALTSYPGVNKNSKDVDNLKQLANIIIDITEQKDEVKNQMIELAKETKNFECINSLFGIGELSASLIIAELKDITRFNNIKQINASCGLDPTIVQSGKSINYHGPISKRGNRYARKILFNCSRNIITLSAKCDKENSIYVYYQKKKQEGKHFYACLTACSTKLIRIIYALCMNNSQQQN

SEQ ID NO: 282028 - protein, 330 aa, unidentified
MDEVKRFVGIDAAKAALDVFVGSDGAAFSVTNDEVGIRQLLGQLKPTDFVILEATGGLETPVASALAAGIVVAIVNPRQVRDFARATGRLAKTDALDAEVLARFGEAVRPQARPLADEQAQALEALVTRRRQLVEMLTAEKNRRANAPKVLHRSIDEHIRWLEKRLSGFDDELGELIRDTPLWRERDELLRSVPGVGKVLSSTLLAHLPELGALNRKQIAALAGLAPFNRDSGTLRGSRCIWGGRAQVRRVLYMAVVAAVRSNPVIKNFYTQLRARGKYPKSALTACMCKLLVILNAMLHNKTHWQTPALASSTSALSPFLGAVPEHGCC

SEQ ID NO: 282029 - protein, 358 aa, unidentified
MAGKVTETAVVGGVDTHKDLHVAVVVDQNNKVLGTQFFSTIRQGYRQMLAWMTSFGALKRIGVECTGTYGSGLLRYLQNAGLDVLEVTAPDRMERRKRGKSDTIDAECAAHAAFSRIRTVTPKTRNGMIESLRVLKTCRKTAISARRVALQIIHSNIISAPDELREQLRNMTRMQLIRTLGSWRPDASEYRNVTNVYRISLKSLARRYLELHDEIADLDVMIAAIVDELAPELIKRNAIGYESASQLLITAGDNPQRLRSESGFAALCGVSPVPVSSGKTNRYRLNRGGDRAANSALHIIAIGRLRTDDKTKEYVARRVAEGHTKMEAIRCLKRYISREVYTLLRNQNRQLNSIPITA

SEQ ID NO: 282030 - protein, 427 aa, unidentified
MKDQSGTIVGIDWSADSHTCYDLKADKSFKIPDSVKGYERLLNDYPEAVFVIEEANNRIGDYLLTNKREVYVLPPCRSKEARKYHFSSGAKSDSLDAKAIALTFKEHPSYCLKARYSGVGAKITKLVTMYSIVSKIHSQQCNRLYSVLLRYFPEYLHIMDKQYRSNTSLRILSICPTITEFKKVSNEELRKILNKENYRMTSILRKKLDRIRSEGISWGDTSCEGNLIMFLANQILTLREEQERLREEMGETLENSPYRIILSIPGVKAVIGSYIVKAYLTHDFRSYQEMQKYAGTIPFLFQSGRKSIMLMRKKCDKDLRNMIHIAAFASLKTCGWARNYYKRKRKEGKTYGHALRALGNIILKIAFSMLSKMKEYDETLFLNAKGIKTTQQNNTIIPEAFTNPEYSQDAHPSLAATKDVVENLNVT

SEQ ID NO: 282031 - protein, 398 aa, unidentified
MPTTNLQKTDDFNGQIFYVGLDVHKKSWAVTIRSLGIEVAHFTQPPGAEALSNYLKKAFPGGTYHSAYEAGFCGTGTHEQLCELGINNIVVNAADIPSTDKQKKNKTDLHDSRAIAGHLERGNLQGIHVLTQEQQELRSLFRLRGSKVNDVTRANNRLKSFLMYYSIKLPDTVSKNDFLSNKALAWLNMELGCAAGTFSLKQYIEELKHQRQQLSHITRSLRGQIQALHAKTYKSLLSVPGIGAVTAMGLIAEVADFTRFDDPDEYCSYLGLCPWEDSSGDIIKTKGVQPRCNSHLRPLLVEASWTAIKRSRTLFAYYSKHAGKSGKKAIIKVARKLALIAKGVATTGQLYQDDYLKKKQQEQQNKKQLQAERFSSGITEQHINNQPDDRLQIAAMPG

SEQ ID NO: 282032 - protein, 380 aa, unidentified
MQNFYFIGIDVSKKKLDICVMSNSKVLKEEQVSNHPQAIATVIAGIKEELSMSNDCFIICAEHTGQYTYPLICACKSVGSKLWLENASQIKYCSGVTRGKNDKVDARRIAEYAMRFFDKAKPYQRPIEELMRLKQLEAERSLYLTDLAKYKAQLSDQEGFMEDKIFKRKAKRLKEMIKSLEKTLKEIAQEMADVIYSSEELSRQMRLLKSVEGVGPVVAMNMIIATEAFTRFDNPRQFNCYVGVAPFAYTSGSSQHSRNRVSQRAVKYIKCLLHMAAVAIAHKKTGDLKTYFERKVAEGKNKMTVLNAVRAKLVARMFAVIRNNRVYQPIYQFRLAQIIKYETMISTCSAYQQKKAAFSDLFRVKKGIRTSTLGTTNPML

SEQ ID NO: 282033 - protein, 352 aa, unidentified
MKYALEQESILGVDTHLDVHVAAVINQFGQLLGTQSVSTNTAGYLQLFQWASAFGALKRAGVEGTGTYGAGLCRFLCDKGIMVLEVNRPNRASRRLNGKSDSLDAENAARSVLSGVSKAIPKQQSGACEAMRIVSVARRSAVKAKTQSINQLRAMLVSAPQSVREELWKAKASDCAKACAMIASLGDTVVLKALSKTLKSLAKRWLALSEELKDYDQQLETLTQEHAQQLRSRFGVGPQTAAILLTVAGDNPNRLKNEAALASLCGVNPLPASSGKTTRHRLNRGGSRTANNALWTIAMVRMRSDPRTKIYVERRTHEGLSTKEIHRCLKRYIVRELFPLIMGDLGALAGVP

SEQ ID NO: 282034 - protein, 432 aa, unidentified
MQESSSSAPAEGVAAYIGIDWADEKHDVTLRPASEPAKVEHRRIAHQPDALMEWLGELQQRFAGKGKILVCLEQSRGALIYHLMGYEFLELYPVNPSQLASFRATFSPGGAKDDQPDGDLLCELLYCHRDRLKAWKPDDELTRKLAFLNEGRRRAVDQRTQLANEIKSHLKVYFPLALQVLDNDTSTALAADLLLQWPALDSLQKQSAHKLRKFFYAHNCRIEQKLLERLELIKVAKPLTRDRAVIEPAVLRVQLLAQQLKCLLPYISRYEKQIAELFDSHPDSFLFQDLPGAGPALGPRLLTAFGTDRERFEDASELCALSGTAPVRKASGKKTGKNASIHFRHACPKFLRQSFHEFSLHSIGSCPWAKALYDSLRERGKGHHAAVRAVSFKWIRILFACWKQRVPYDPERYLQALRTRGSAYAQAIPSCE

SEQ ID NO: 282035 - protein, 422 aa, unidentified
MLAEAEDHEEIVARVAALDIGKKELTCCVRVPNESKPGRRLQEVETYPTMTRALLGMADRLAALGVTRVVMESTGDYWKPVFYLLEACGFETWLVNARDVKHLPGRPKTGTLDAVWLCKVAEKQMLRPSFVPPPPIRRLRDLTRYRAGLVAVRTAEKQRAEKLLEDAHIKLPVVAADIFGVSGRDMMAALIAGQRDPNALAQLARARMRRKIGALEEALTGYFTDHHGFLLGRMLARIDAVNADIADLDTRIGELIAPFAAQVAQLDEVTGIAAIAAAAVIAEIGVDMTRFPTAGHLVSWAKYAPQIKESAGKNKGRNATGHGNKYLARILGDAAATVGRTDTFPGERYRRIARRRGKNKANVAVGRSLLVIIWHLLSNPQARFHDLGPDFYDTHISHSRKLRNHVRQLEALGYHVTLQPAA

SEQ ID NO: 282036 - protein, 345 aa, unidentified
MQYKSMKKVFIGIDFSKLKFDAAIYSIDTKAIVSTEVFENEQSGYDDFLKWVKENTHCQKSGMLFCGEHTGYYSCNLSVFIHDSGYDMWLVSGLEMKLSQGIKRTKTDSVDACKIAEYAYRFQDKTVLFQPPTKALDEIRELLSYRERLVETRKVLATSAKEMKRVKDNASCDFIYQDSLVYIQSLGSSIRNCEKRIEVLIKQDISLRTNYKLMSSVVGIGLINSALILIATANFTQFSNARKFGCYCGVVPFEHSSGSSVRGKTRVSKVANKKLKTKLTLAAQNSVRYDPELKEYYQRKISEGKNKWLVLNNVKNKLIHRIFAVVRDGQMYEKQYIHPLKQQAA

SEQ ID NO: 282037 - protein, 386 aa, unidentified
MQKLNDLSRSLAPLEPDGTLIAVIEMSQSSWLVAGIVPGVERQPLKKLAADEIALLKLLHRWREEAEKAGRRIERTAVAFEAGRDGFWLARWLRARSIEAHVIHASSVAVSREHRRAKTDRLDTELLKRAFLGWLRGERDHCKMVAIPTTKDEDAKRPNRERESLVGEQTRIVNRMKATLIRLGIRGFNPKLKKAAGRLEDLRTPEDEPIPPNTMAELRRDMDRRRLVSDQIRQIEEARLDRLKQAPDDGPHAMLRLLARVIGVGIETADMLVQEVLARNMRDRRAIARYAGLTGSPDESGTKRREKGLARSGNARVRRGMIQLAWRFLMFQRNSALAQWFRARTENARGTRKLMIVALARKLLIALWRLVREGVVPDGVVLRPTQ

SEQ ID NO: 282038 - protein, 341 aa, unidentified
MYYIGLDVHKKTISYCIKRSSGEMHGEGKIDATRASLDVWLASLPQPWTAALEATIFTGWIYDHLKPHAAAVKVAHPAMLKAIAASKKKNDEVDARKIADLLRCDLLPESYMAPVEFRERRRALRYRNLLMRQGVQMKNRVAGLLLETGVVYNKKKLHQKRYFADLLRDSEEIPESIKPLMKVGRETVERIGKTERALLRSLEQDPVLQSRLQRLQTIPGVGPILALTWVLEVGEVSRFSSLKHAVSYCGLCSAEIASAGITKRAPISKQRNKHLQAMLVEAAKMAPTWNADLAVVHEKALQKGNRNRATLTVARKLVAYLLAVDRRETPFQKGKEFAEAA

SEQ ID NO: 282039 - protein, 354 aa, unidentified
MSHLNSGIAAIGIDIGKNSFHVVGQDERGAIVLRQKWSRGQVEARLANLPHCLIGMEACVGAHHLSRKLRMLGHDARLMPAKYVRPYSKGQKNDFRDAEAIAEAVQRPTMKFVATKTAEQLDLQALHRVRERLVGQRTGIINQIRAFLLERGIAVRQGLRFLQAELPTILGAPGDALSPRMLRLIEDLAGDWRRLNERIEAISGEIEALARQDQACERLMTVPGIGPIISSAMVAAIGTGDAFSKGRDFGAWLGLVPKQISTGDRTILGGISKRGNRYLRALFVQAAWVVLVKLGKKWERYGLRSWIEAAKKRLHHNVLAVALANKLARIAWAVLHRGRAFECVKMDEIASRPA

SEQ ID NO: 282040 - protein, 337 aa, unidentified
MNYCGIDIANKSSSICIIDSDGNTLYRTEVETESGDIGQALTGFGPLKVMIEASPLAETIATIVESYGHTVVIIDARAAKNLMSSMKKTDRRDAQTLAEIGRCGWYREVHRKSPEARELRSLLRARQALLKSNKALTFSIRGLLRAHGIRLGKVSEGKFAEAVSLITAQQAPALLPALTAMLEVLTLAGRQAKQLKKDLEARCQQDAVSQRFESVPGIGPLISTAYRATIDNPHRFRHGEEIADYLGLAPRVYQSGEVEYRGRISKEGDRLLRWHLVEGAHVLLTKGRDCALKRWGLSLEKRKGSAKAKVAVARKLAILLWKLWKDEQWFEPFPQTV

SEQ ID NO: 282041 - protein, 386 aa, unidentified
MKRDDLSRSLVAFDQASTLVAVVELGLRSWLVAGLVPSLTRQPLKKLRSDPDALLGLLLRWRDQATKAGGRIKRMVVAFEAGRDGFWLARWLRARGIEAHVIHPTSIPVSREHRRAKTDRLDTGLLMRAVLGWLRGEPKHCSMAAIPTIAEEDSRRPNREREKLVGEQTRATNRIKSTLIRFGIRAFKIKLRQASKHLEELRGPEGEPLPPNTMAELRRDLARLQVIRAQITEIERARLERLKRGPRQGTNPMIRLLTRVLGIGIETADVLVHEVLTRKLRDQRAVARYGGLTGSPDESGTKRRERGLARAGNARVRRSMIQLAWRRLMYQKTSALAQWYQARTAGAKPGLRKAMIVALARKLLIDLWRYVTIGKVPAGAVLRPAT

SEQ ID NO: 282042 - protein, 419 aa, unidentified
MAFKILRKNCCGLDVHKTWIYACIGITDADGRTEYKQARFSSFSNGLRELADWLAKYSCADVCMESTGKYWIPVFNILEKTCWVTLAHPKYTKPQKGNKTDRKDAKWICDLYMCGMVKPSFIPPADIRQLRDLMRYRTKLTNMLTSEKNRAQNCLTVSNLKLDDVFSDVFGKSSRSIIQYILEHPGEQFDVAPFLDRRCKHSVEEVQAAVDGAVSREQAAKLRECLQHIDQLNEHRKNIETEILCLAELYPYQLELLRTVPGFSSAPLTAVALVSEIGVDMSVFPSSKHLVSWAGCCPRNDQSSKTVKSTRISRAGCYLKPLLVQIANAVIKSDKYPECRERYRRIKARRGHKKAIIAVCRMLLTAIWNVLSKLVPYSAEGYLSDKLTEHSVVISKAQGLELLRKRGYIFKDDLPADSA

SEQ ID NO: 282043 - protein, 311 aa, unidentified
MELYVGIDVAKDTLEVATSGGESFSAINDAAGRAQLIERLLKLNPALVVLEASGGYEQALLVELVAVDIDCARVNPVDVRYFARMHRQFAKTDRLDARLLAAFAQHRATELVPARLDAERDELKLLVNRRTQLLQMLTAERNRLAQAPKWLRKSIARTIRALERELGAIDHEIAERVNASARLKPLQQQLTSVPGVGRVLASVLLARLPELGHLNRREIAALVGVAPFSRQSGRWQGHESIFGGRAGVRTVLYMATLSAVRCNPTLHAFYSRLRQSGKPAKVALTAAMRKLLLILNAMLKTQTPWSPPCHT

SEQ ID NO: 282044 - protein, 334 aa, unidentified
MGKQYVGIDFHKRRSVIVQVGEDGNRSPARRVDNSPLALAGAIDWQDGPPEVVLEATLGWYWAYDALAEAGANVHLANPIGLNWGHRRVKNDEHDANDLADMLRLGRLPEAWPAPPAVRELRELVRYRYKLACVRSGMRSQVQGVLTKCAIVATRNELWGPKGPAFLAAAPLAGAFRSRVESLQKLIGALGEQISSLDHEIATWLAGDVGYRAILAIKGVGPVLGAVFVAEIGDATRFASPDRLCSWAGLTPLHRESDTTVHRGRITKQGSRLVRWAAVEAISRARDTSVADHYARVAERRGTNVARVAAARKLLRLVYYGLRDGEVRCLAKAS

SEQ ID NO: 282045 - protein, 355 aa, unidentified
MSEDKYIGLDVHQATVSVAVLDREGKLTMECVLETKASTIVEFIQGVRGSLAVSFEEGTCAAWLHDLLQSHVSRLVVCDPRKNALLRDGSKSDRIDARKLAELLRSNQLSPVYHGDHGIRTLKELARSYLSLTQDLTRVMTRIKALYRSWAIPCSGTRVYATRHRSEWLAKISPTGVRRRAERLYQQLDLLRPLHHQARCDLIEESHRHPALKWLRQIPSIGPIRAALLVALLQTPHRFRTKRQLWAYSGFAVETHDSGEYRYVGGKLLRNRERIRVRGLSDNYNRDLKNLFKSTAISASTRPGPLRDFYLALLAKGMRPSMARLTLARKIAAVSLTIWKKGANFDAKQLSRQAA

SEQ ID NO: 282046 - protein, 442 aa, unidentified
MTKSYYIGLDVHKETIAIAYAAGGTRDDSVYHGPCGGSVLAAERALRKLAEKLGVEFTSLKVCYEAGPTGFVLARRLIRYGLDCVLMSPSKTERKPNEKIKTDKRDACKIARLFRNGDITKVRIPPALDEAVRDACRARTDASDDLSRAKQRLNAFLLRNGFNYSGKSKWTPAHMRYLRELVMPHDAHKFVLEEYMQAIDTGIERVARLVDRMKQLLEGWEWEQVVRALMACKGFQEVAAMTVISELGDLRRFSHPRMLMSFLGLVPGENSSGPKHRQGSITKCGNSHCRWMLVECAQHFRKAPKVGSRLTTRQQGQSKEVKELSWRMQNRLHKRYVKLKARGKNENKAIVAIARELSAFIWELQVKLNLPIPGTETPVASGKGTSAKHGAAAPNPAERTPARPRLISPPNPHPGASPLPSPRGGGGRSLKKPPHTTDTLPC

SEQ ID NO: 282047 - protein, 435 aa, unidentified
MANYYHIPVVGIDVAANFSVVSALKPNGDIYIKNVKIIHSLDGFSKLLTLIQKIEKEFNVKSKVFCESTGIYHLTLLHYLINQKIDISVINPLITNSNKNSNIRKVKNDNLDSLSIARLGKFDDIKVSSYTSEEFLHLKFLVREYYKIVDLRANLKKSFSNNLYIHYPGFNKAFTDNTGKSALSFIKTYPTPDDFFNAPKLEVIELLKKSSRKGSKWAATKYNTIFAIATSASKIGLNTALFGTKVKRFIESYTFYSNQIDDLFAEIMDYIDNATFGETFKTNIQLLKSFKGVGDISAITLLTEMSSIDNFSKPSQLVAFFGIDPSVNQSGKFVGDRNKMSKRGTAIGRRALYAIALASIRKTKNKVPMNQVLYDYYHKNLKSKKKKVRLVAIMNKLLRYIFSILKNQKPYVVRNPKFHQRMFLESKTRLDKKTA

SEQ ID NO: 282048 - protein, 343 aa, unidentified
MEAITTIGLDIAKSVFQVHGVDAAGKVVVRRQPKRRYVVAFFQKVPPCVAGIEACATSHHWSREITALGHTVRLMPPAYVKPYVKRQKNDAADAEAICEAVSRANMRFVETKTPEQQACLMLHRTRHLFIKQQTSVINAIRAHLAEFGIVARVGRNGVEELLRVAADPGDRRVPEVALACIAALGAQLRMLKAQILEFDRQIMAWHRSNETSKRLDEIPGVGPALATALVASVADPKAFRSGRNFSAWIGLVPKQHSSGGKDRLGSISKQGDRYLRSLLTAGALAVIRYAKIHGTRHRPWLAALLARRPTKVAAIALANKIARMAWAMMVKGERYKEPAALAA

SEQ ID NO: 282049 - protein, 339 aa, unidentified
MELYSAIDLHSNNSHVAIIDDQQNRVFYRKLANDPAIIASVFAPYRERLKGIVIESTFNWYWLADFLIERGYPVHLANPCGIQKYSGLKHADDRHDAFWLAQMLALHILPEGYIYPKEDRPLRDLFRKRAHLVRVRTSLILSLLNIVLRNHGIKIRSSDLKKLTQDPVAEILKDQEELALAGKASKESIDFLTRQIQRIEKVAQNKAILKEPFSKLRTLPGVGEILAMTILLETGPIERFKAVGHYVSYCRKVPSRWTSNEKVKGKGNTKNGNRYLSWAFSEASDHARQTHGLSRDFYNRKLNQTNASVAHNALAHKLARAAYYIIRDHVEFKEDKMFR

SEQ ID NO: 282050 - protein, 397 aa, unidentified
MYIVGIDIAKRKHEAAVIDGDGAVIIKPFSFTNNCSGYNRLLAMLAKAKLPLDEVSFAMEATGHYWLALFTRLQKEGFRVQVINPVQTNSIRSFYIRQAKTDPRDALLIAEVIRFGHFSESTLHPENIYELRELCRGRHAIVSMQADVKRKVVALLDQVFPEYETAFTNLFGDTSMAILQTCPTPKELSEMPLEELCHLIEVSSHKRFRMAKAQELQVLARNSFGFAMAGDVFSTMIRLYAKHLVFLKQQVREMDRKIAEIMETLDTPITTITGIGPTLGAYILSEIGDISRFSSAAKLAAYAGIDPTMRQSGEYNGVRNRMSKRGSPYLRHAIWLAASSAVLHDPALKLYFQKKRDEGKPYMASVGHACRKMVSIIYAVMRDNKAYTPCIPNEIST

SEQ ID NO: 282051 - protein, 443 aa, unidentified
MSFDRLKRTQRRKRLPGHKLKPSRATLFVQNSKPHLSMKPTYFLGIDAAKHKMRATLSNRSEHVLFEKDLSVEATGLRQLLAAIKRQVNDPEQLLVLIEATGLLHLNWSAALTKAGYAVAVINPLIARRLYTLQNSIRDNKSDPIDARGLCTIGLLHGEKLLVHYRFSLRPEQFTLQRAQSVRKALRSALTNLKKTYQSLMDLSFPELGGLLQLDGVGIRQLLIQAPTPAAIAGKRLSTLENNWMVRPKAAALKALAADSMADPDLAAASGPALVALLQSVAAMEGRLHALDQQIAKLACTSVDPQTKALIETIPGFGPVNAAKTLAWLPTEILHSGSNRKVAARLQAFMGNDPRLRQSGQWKGHTKMSKRGVEMLRTAFFQSAFSAAHNDPELRAYYQCKRAQGKTHQVALSHLMRILTRRLVAVLRSGKPYQSHYNLKNAA

SEQ ID NO: 282052 - protein, 391 aa, unidentified
MVCVGIDVAKDKHDCCILDSDGMVRADCFTIPNNMDGFKQLLQTIRNCTNKSDKIKVGLEATGHYSYNILGFLLDNGLPPYVINPLHTNLYRKSLSLRKTKTDRVDARTIATMLLSDVDLKSYTDIAYHNEELKSLTRYRFDKVQECAKLKQSVSRLATILFPELEGLVSSIHGTSIYALLSEYPGAKQISEVHLTKLTNLLTTASKGRYGKEKAIQIREAARASIGSVMPAKSLELKHTIILIQELASEIDEIEDSIQKIIDELNPPILSIPGMGVNSAAVILAEIGDFSNFSSPDKILAYAGCSPSTYQSGKLTNCYAHMEKRGSRYLRHALYNATKYVCYWNPVFAEYLAKKRAEGKHYNVALSHAMKKLVRLIYALQKSGKTYLTAA

SEQ ID NO: 282053 - protein, 398 aa, unidentified
MISVGIDVSKEKSTICILKPYGEIVSKPFEVCHTEKELSELTSMLLRLNDDVRVVMEATGIYHLPVLCYLQEKGLFVAVVNPFEMKEYRCQGLRRVKTDKQDAVTISNYGIDHWYRLKEYEPEESIYAELKLLGRQYRHYMRMRVESVLELTHLLDYTMPGIKTLLKGWNETNGKDKLGDFVEEYWHYDNITKKSEEQFIESYLKWAKEKGYHQSQDKAAKIYMLAKEGIPTVSSDTSSTKMLVQEAVRVLREIDNTLMTILTQMQTLAKSLPEYPVVRAMGGVGNVLAPKLIAEIGDVRRFHSGKALIAHAGIDAPPYQSGQFTGTERKISKRGSSSLRKIGYEVMRCLKTHKEPEDAAVYRFILKKEKEGKSKRAAKIAGLNKFLRIYYARVMEVW

SEQ ID NO: 282054 - protein, 391 aa, unidentified
MVCVGIDVAKDKHDCCILDSDGTVRADCFTIPNNMDGFKQLLQTIRDCTKKSDKIKVGLEATGHYSYNILGFLLDNGLPTYVINPLHTNLYRKSLSLRKTKTDRVDARTIATMLLSDVDLKSYTDIAYHNEDLKSLTRYRFDKVQERAKLKQSVSRLATILFPELEQLVSSIHGTSIYALLGEYPGAKQISEVHLTKLTNLLTTASKGRYGKEKAIQIREAARASIGSVMPAKSLELKHTIKLIQELASEINEIEDSIQQIIDELNPPILSIPGMGVNSAAVILAEIGDFSNFSSPDKILAYAGCSPSTYQSGKLTNCYAHMEKRGSRYLRHALYNATKYVCYWNPVFAEYLAKKRAEGKHYNVALSHAMKKLVRLIYALQKSGKAYLAAA

SEQ ID NO: 282055 - protein, 316 aa, unidentified
MISYFVGLDVSKATLDVGFLPESIPQFQVRNDSEGFAQLIACLNELEVERVLLEATGGYERAVFKALRLEGLNVVRVNPMRCRDYASAMGKIAKTDKIDAQMLARFARDFEDLPQIEPNQDRDELGELIKLRGNLVQHRDDDKRRMKQTTSATAITVYTEHVAYLNDQIKALDKAIERASNVLDRTTAMRLRSVKGIGVISCGTFMAYLPELGSVTGREIAALAGLAPYNKDSGKKSGPRKIEGGRYRVRKAAYMSIWSMIQHVPEVRTRYEALIARGKRAKVAAVACMRVLLVRLNAMLRDGTEWKELKPQVPAP

SEQ ID NO: 282056 - protein, 401 aa, unidentified
MSKCNPEQHHIETASALEQVLYAGQQERHAAYVGLDVHKETIAVAVAEPGRAEPVYRGEIANKPKQVEKLVAKLSATYDGGLLQFCYEAGPCGYVLHRQILACGHDCQVVAPSKIPKTPGERIKTDRRDALKLARLLRSDDLTAVWVPDQDQEMMRDLSRARDDMKGQERKARQQLNAFVLRHGQHWPRDKSRWTQAHYNWLESLRFERPWQQVTLQEYIDAAKAASARVAQLNDHLMRALPEWSLAPVVDSLIALRGIDKLAAIVLLAELGDISRFDSPKQLMGFLGLVPSEHSSGPRRRQGGITLTGNARARRMLVESAWSYRFPARQTMHLKRKALNASVTAKKIAWKAQVRMCGRYRTLTRAGKNTKLVCVAIARELAGFIWDIVRQEMARVAPQAG

SEQ ID NO: 282057 - protein, 439 aa, unidentified
MQILYSRCCGIDVHKDSVTACVLVDSGAGEPDVRKKEFATHFKALLNLKMWLLAQKVTHVAMESTGVYWKAVWQALEGHFALVLANPFQVKNMPGRKTDARDCLWLAELLAHGLIRPSFVPPRETRDLRDLTRYRVKLTEERNRIHNRIHKVLEDACIKLDTVASDILGASGRAIIQAIIKGQEHPDWLADHAKGTLRGKRPELRLVLRGRITDHHRLMLRELTEDREFVERKIERIEKAIAPGPNLDQVSRLCTIPGVDLITAWTILAELGSDMNAFSGPKHAASWAGLCPGNHESGGKRLSNRTRKGNRRLRRALCQSAWAATRKKNCFLAAFFYRKAGKHGIRKAIVALAHRILIIAFCMLRDGTTYQEAGGDYFDRLNPDRTRTRLVRRLQRLGLDVILKPRIDSQEPAAGPPQRPRRGRPCKCFERAIPCIHGR

SEQ ID NO: 282058 - protein, 335 aa, unidentified
MDKLDFAGLEVSKEELVAALQREGQRKGLKTFANTPSGHQALIRHLSHPGRKVRVCLESTGMYGLDVALALQKAGLEVMVANPRAVRNFAKALMERSKNDQLDAGVLLEFAIRMPFQAWVAPRAAVLQLHALARRLEALTEMQTAEKGRREAAQATDTLLPALRRDLERSLRSLRRALARLSGEAVKIIEQDPDLKLRFELLISVHGSIAAASAIRILSEDLDVRQYVAYAGLDPRECTSGTSVHKKAHISKAGNAHLRRALYMPALVAIRHQPHLQAFYLHLRAQGKPKMVALVAVMRKLLHAIYGMFKHQQAFDGAKVYVLPAPEICTKEAAA

SEQ ID NO: 282059 - protein, 434 aa, unidentified
METDTMKVTIVEEKIKSLNYLIVAYDVSKGKLNYFIKLNNEAGDVCKTEGEIVNRAKHLEGHFAEVKSIADKYGYPGVCVVCEPTGGYEKKFLRMAREYGFFTKYVSGEATSKAKVIESNDAGKNDKKDSRVIYFLAENGKTLTCNARPAVYEHLKIINEYYEDLSNEGARLKNHISSITEQLFPDLSLAASQLYCNVVAGVIELYGLNPYKIAKVKWNMFVKKTEKVIGRKVSGSSLDLLAEIHNNALASVLYLMDKWESDEYENELRFYYKHRQIIEQKKEEYKRKMTDLFETTEEYSSLKEIPVSLFLLSRLIATTGPLGRYESIKQLMRFGGLNLLERQSGKFTGQIRLSKKGNVLMRKILGQIAFSCLIKTGKLYHNFYSSKKEKKGGFYALACTMRKALKMINGVYKNNGNFCIERVFDQQVKIEMAA

SEQ ID NO: 282060 - protein, 354 aa, unidentified
MESSRLDIKKECPFISFNYSKNKNNIKDTQMNSECKKLDFNNQHFFVGIDVHQKSWTVTIRSGKIVLKTFSMNPSAKQLTQYMNENYPGGIYFSVYEAGYFGYSIDRELRELGFNNIIASPTAIPTSPKEKIMNNDRIDSRKLSRELEGQSLKGIYVPDVLHQELRSLVRARYQLVRKQTRIKNQIKSYLSFYGHTYTDRGYWSGRFIEYLSSLDFHYEAGKEQMRIYLEELQSTRFLITRTIRLLREYLNKYKINDAIILLLSVPGVGFTTAIGIYTEVIDIKRFKDLDHLASFVGLVPSIVSSAEKSSNLGLKNQHNRYLRSLLIESSWIAIRNDPALLHCYNNYKNYQIIS

SEQ ID NO: 282061 - protein, 368 aa, unidentified
METKETDLVSFLYVGVDVHKDQHTAVATNCFGQTLFEKEIDNSQEEFAELVSKVKILAENKKLKPVFGLEDTSAYGQRLALRLCQDFPVKVVSPVLVVRERKRLTHPEKSDSQDALGVARALISRIGTLPDFSISKTSEISKGLKDLTVDREFLVKEQTRIKNQLHRLLHRAYNSEYRAKFKNPFAVRALEYWLKHPVPAELSGNILLKNQIRRKVKRLKNIKKEVVEMEEEMKILLDQTEQKLDTLNGCGLVSASAVLAEIKDIDRFNSPDALAKYGGFCPGEKSSGKRIRHIKSKSGNRKLNMAVHRIVLSQLGIHGNKYSKEYFKKKIGEGKNKSQAICCLKRKMVNIIYMMLKHKAAYDYAARC

SEQ ID NO: 282062 - protein, 429 aa, unidentified
MTFAGLDLHKKEVEAALVDDQGNILHRSRFAATREALEAFAKTRLAPDTAVAVEATTNTWPVAAILQPLVGRLVVSNPLRTKAIASAKIKTDKVDALALAQLLRTGYLPEVWIPDTETRLMRQRSTERAMLSADRTRIKNRIHSVLHQRLIEAPASDLFSRKNLLWLKALPLDPFGRDALDRHLRQLDRVEQELAALTQQIAVHAHQSPPVKLLMTLPGVDFTVAETILAALGDLSRFETPDKAASYLGLVPSTRQSGDHCYHGPITKQGARHARWLLVQAAQHAALHPGPIGAFFRRIAKKKNRNVAVVAVAHKLVVLAWHMLKNNEPYRYAQPKTLQAKLSRLRILATKQKRTGGLPKGQPRTPQYGNGRTKAIPALDQLYAAEGLPPLTSELRPGERRMLDDHGVAAHAKSVRVAKRIPRGTKTKA

SEQ ID NO: 282063 - protein, 412 aa, unidentified
MFKIFRNNCCGLDVHKTWIYACIGITDANGRTEYKQARFSSFSKGLRDLAAWLANYSCFEVCLESSGKYWIPVFNILEKTYLVTLAHPKYTKPQKGNKTDVKDAKWICDLFMCDMIKPSFIPSPEIRQLRDLIRYRIKLTNMLTGEKNRAQNCLTVSNLKLADVFSDVFGKSSRSITNHMLDHPGETFDVAPFVDARCQTPLDEIQAAVDGAISSEQAVKLRQCLAHIDELEAHRKEIEREILMIAEPFSAVLELLYTLPGLDKNPMTAIAILSEIGPDMSVFPSSKHLVSWAGCCPRNDQSNQKVKSRRISRAGCYLKPLLVQVANALIKSKKHPEFKERYRRIKSHRGHKKAIIAVCKMLLTAIWNMLSKLEPYNPDGFLEHRPVNEKRVLTKSQALELLRLRGYTITND

SEQ ID NO: 282064 - protein, 449 aa, unidentified
MQVLHRCCCGLDVHKKLIVACLISMNAAGERQKEIRCFTTMTKDILALAAWLATAGCTHVAFESTGVYWKPIWNLLEGQFEVLLVNAQHIKAVPGRKTDIKDAEWIADLLQHGLLRPSFIPPAPQRHLRDLTRYRSTLLAERARLINRLHKVLEDTNLKLTSVATNILGVSARAMLSALLEGETDPEVLAGLARGKLRKKREQLEQALQGHVQEHHRFLLTSQLAHIDFLDEQIADCDAKIEQFIRQTSEHPVEPSASPTTQSVSEPLPAKDHGQGEASQEPLSYQQAVALLDSIPGINQRIAEILIAEIGVDMSRFPSAGQLASWVGICPGNHQSAGKQGSGKTRKGDRWLRQALIEAAQGAMRTKDTYLSSQGQRLTRRRGKKRAVVAVAHTILVIAFYVLQRRQPYIDLGSNYFDERERAAIARQSIRRLEQLGFKVTLETPEEAA

SEQ ID NO: 282065 - protein, 416 aa, unidentified
MKIYPRTRPIQRYIALDIHKEYILAGGMNTSQEWILPPRKLEMSRFEEWAKRHLCESDAVVIETTTNVWDIYDIVQPLVGHAVVAHAGAVRQIAEARVKTDKEDVKRLIRLLIADIVPEVWIPPQPVRELRGLISYRQRLVKTGAVFRNRLQSLLHSHNLVLPEEGLLSQEWWTGQEKISPLEKLQIGQEIALLEQIEKHKAEVDQELGKQSLGETWGRDAIRLMQLPGIGVVIAMTVLSAIGDIHRFEDANHLVGYSGLGAGVHDSGQEHIEKRITKSGRKELRWAMIEAAWRAVRMSPYWKEQYEKFFHRMRRESQAIVVVARKLLVAVWHVLSKEETDERASEEDLAYKMLLLSWSLSEEVRQGLTYKQFAKYALMKLGVETDITRFVRRNVPRRLAPREEVLARMAELGLTA

SEQ ID NO: 282066 - protein, 430 aa, unidentified
MNDLNGIRLQEFCQFKKEIRGSTEYLIVGLDIGKERHNAFFGTATGRTLHKGMFFENTYDGFQKLLIQTDALKVQHDLRKVVFGLEPTANYHKPLGEYLIKGGHLVVLISAAATSKNRELLDGRWDKHDTKDSANVADLIAQGKCLYYDCPGEELRSLRGLLSLKRRLKKEEHGLRVRIRNQLLAQYFPEMDQHFGSVASLNVVQRCLDPSLISIMEYDEFCRTVSPGKVNTAQQRRLTQIWRVAKQSIGCSVGEAVSVEAQIMVSGLTRVRETIKTVEDNIEAICLTFPEYSFLLTIPGFGPDVSSKVLAAIGDPERFTSGKQVLKMAGFDLCAHRSGKTSNSATPVISKHGKSDLRYALYQAAIISSLSSKEFIVYHTNKIRGREREKGIGTKMRVKLAAKLLIIAWTLMKRKTPFDPKRLITGDGKV

SEQ ID NO: 282067 - protein, 333 aa, unidentified
MNKFKHFLGIDVSKEFFDAVLILEGKKEHPVHNQFINNYKGIRALVKWLRDMGATGENTLVCLEHTGMYGKLIIKYLIGFNFSLWVEMSLRIIKSIGIQRGKNDKIDAERIAFYALKNVESAVIYRAPRQVVDKIRTLLSLRDKLTTNKLRLLQYDNEMVDFDKELTKISTKFNKNTLAGINKDLLSIEKQLDKFIKEDENLNKIFNQATSVTGVGKITALYLICFTNEFTMYSNPRQLACYAGVVPFEHTSGKSIKGRAKVHYMANKTLKKHLHLCAMAATNYDPEIKQYYQRKVEEGKSKMLVMNNVRNKLIHRICSCIKNEKLFEVKKIE

SEQ ID NO: 282068 - protein, 350 aa, unidentified
MLIIGCDYHPGFQQIAFVDTETGELGERRLVHCEEAEQFYGKLRDQSVSVRVGMEASGHARWFERLLRQLEFELWVGDAAEILAKRVRKQKTDRQDAQLLLRLMMEDRFPRIWVADAENRDLRQLLWHRHRLVQMRTRVMNQLHVVALNEGLRRKKALWRPAGRKELESLALAPWASRRRRDLLDLLDQLTPKIQQLTQALQDEVEKRPVTRRLMTHPGVGPLTALAFELVIGTPERFRGGKQIASYVGLVPSERSSGDRRRLGHISKQGNALLRYLLVEAAQVTVRSQAQWRCKFFHLAMRRGRKIAKVAMARKLAVHLYWMWRQGWDYEQCQEFGSHAGKSGHRDGVQ

SEQ ID NO: 282069 - protein, 365 aa, unidentified
MTTRERSTSSSMDPPNRREVVLGVDTHGEVHVAALVSPLGKVLGTESFPATAAGYRQLLVWARKRGTVRRAGVEGTGTFGAGLSRYLLAQHVQVLEVNRPDRSARRLLGKSDPLDAQAAARAVLSGRAQARAKSGDGPVHSARIYKLAKDSAVKARTQAINQLKAVLVIADPALRERLSSLGNAELFRTCARLGPHDGGGDEDAVAQATHMTLRMLAERIEQLTGQINELNQRLTRLVERHAPQLLVPVGIGPDSAVTLLITMGDNPERLSTEASFAALCGVSPIEYSSGRRRTRRLNYGGDRQANAALHRIVFTRLRHDPRTQAYFERRTQEGKTRREIIRCLKRYAAREVFNLVRPVSRAPAL

SEQ ID NO: 282070 - protein, 407 aa, unidentified
MNPLYVGIDVSSKNNVVYLMKPDGTKIKNFFVPNSRDGSQRLVKEVLSALSSYTLTDVIIGLEATSVYGDNLVCFLREDGSLVPYNRRIHVLNPRQVNRFKESYNDLPKNDYVDSFVIADCLRFGRINKEVYLDDYRYKALQNLTRARYTTVQNLTREKQRFMNVLFKKYSSLAQEKVFSDKYGATALAVYEEFDSADTLACMDLHELTEFLKRKGKNHFSDPEAVAKAIQKAARSSYRLPKTVNDSVNQVLAISISAMRALEAQIKQFDKAIANQMQLIPNTLTSVRGTGPVYSAGIIAEIGDINRFPNQAKLAKYAGLAWTQHQSGNFEAQNTRLIKTGNRYLKYYLGEAAMSLVRCDAEYSSFYHLKYKEVNKHQHKRALALTARKFVRLVFRLLKDNRLYVER

SEQ ID NO: 282071 - protein, 412 aa, unidentified
MQDILTCAMGLDVHRDIIVACLVKGAVDAEPEAETRTFSTLIPEMQKLRDWVIESECRNIAMESTGIYWQPIYGMLESCFDGEISILVVNARHMKNVPGRKTDMKDAQWIATLLRAGLLKGSFIPDKAFRELRHLTRYRKSVVHDITAQKNRIDKFLQSSGFRFTAFLSDTFGASGRNIIRHLIEHGSIDREALDKCLKTKTRNRIDEILVALNGSLSEHQRRFLNMVFRHLEDLEAHKHTVEDEITEEVLKHTDTLNLLCSIPGIDVTAAAAIIAEIGTDMSSFPDSQHICSWAGLSPGNNESAGKRKSVHINKGNPYLKSMLCEVAWIMASHRKLYLSGWYWKVKQRKGAKRATIALARKILSIIYTMLKTGTPYNEECFEQRRLRCERKRANRLVNELQKLGYVVVAPD

SEQ ID NO: 282072 - protein, 430 aa, unidentified
MKFNTQNAKIEAITEKTLVLGIDVGSETHYARAFDYRGIEYSKKPFKFSNTEAGFVTFKEWILDLKEKHEKDKVVPGMEPTGHYWFNLGKFLQDNEMKPVLVNPHHVKKSKELDDNNPTKNDRKDPKVIAGLVREGCYMIPYLPDGVYADLRTASNIRSQLQAELTRIQNRISRWFNIYFPEYKTVYGKPDAKSGMLILKQAPLPEDILTLGIDGVNQIWRDAKMRAVGKARAKTLIEAAEHSVGSKEGAISARMEIRMLLEDYESRNIRLQEIMTLIEELVNQIPMAEKLLEIKGVGIKTVSGFLAEVGDISRFNNPKELQKLAGLALVENSSGKHKGRTTISRRGRKRLRYLLFEVAMSLVAKNPEFRELHTYYTTRRLNPLKKMQSLMAVAAKLIRVFYVMLTKGVDYDPKKMVGDIKRPAVYLQAA

SEQ ID NO: 282073 - protein, 440 aa, unidentified
MIDTNQKQEIEFAAFVGIDWADQKHAWALQIPGHLDVERGDLDHTPEAVELWAAELARRFAGRPIAVALEQSRGSLLFMLTKYAHLVLFPVNPATLANYRKGFRPSGAKSDPSDAGLLVDLLVHHREKLRRLDPDTEQTRTIQFLVEARRKFVNDKTRYSNRLTAYLKMYFPQVLDWFSEVTSPIAGDFLERWPTLQKVQKARPETLRRFFVQHHSCKSESIDRRLEEIRRAMPATHDAAVTCSCSAAVLALVRIVRAVRDAIVCYDQQIETLAREHPDFAIIDSLPGVGPALAPRLIAALGTQRDRYQSASELQSYSGIAPVLASSGKQCWVHWRWACPKFLRQTFHEWATHSIGSSAWARTYYKQQRAKGKPRNTVVRALAFKWIRILFRCWKDHKPYSEEVFRQALARRHQLAVKSSPVQLQWKTCAGFSKITAITS

SEQ ID NO: 282074 - protein, 356 aa, unidentified
MSREVKYIGMDVHKEAIVIAVRNTKGHVVMESIVETKAGSIQQFIRGLQGELHVTWEEGTWAAWLYDLLKPHVHQVLVCNPRRNALLKEGSKNDKVDARKLSDLLRTGMLRPVYHGEHGLRTLRELARTYQTLSQDLNRVMNRLKALYRGWGIACGGTQVYAPRYREEWLGKIEHAGVRRRAELLYQQLDGLQALRRTLRPELLAESRKHKAAKLLRQIPCIGPIRAARLIALMQTPHRFRSKRQLWTYSGLGIETHDSAQYRFVRGELQRAKKPQQIRGLNRNHNHEMKEIFKGAATRASCGVGPLRDFYVALLEKGMKPEMARLTLARKIAAIALTLWKREERFNAEQLKTQVA

SEQ ID NO: 282075 - protein, 368 aa, unidentified
MGKLITTFVGLDVHKESIAVGVAPAGREAPHFVGTVAPQWSALSKALGRLGRAKELQIVYEAGPCGYTLARELRSRGYACEVVAPAKIARRPGDRIKTDRRDALLLARAARAGELVNVAIPDERDEALRDLSRAREDAVRARLKARQQLKALLLRHGHRYTGKSSWTAAHERYLADLSFAQPAQQIAFAEYRSAVREAHERVERFTEALRGQLEHWRMRPVVEALMSLRGIDMIAAVTLVAEIGDFQRFARPAELMGFLGLVPSEYSSGSTRRQGAITKTGNGHARRVLVEAAWNYRFPARVSRTLQVRQEGQPKNVRTIAWNAQLRLAQRYRHLAARKLALNKICVAIARELSAFVWDIARQVKPNA

SEQ ID NO: 282076 - protein, 418 aa, unidentified
MIEDVQWFVGIDWATQSHRVGLLDIEGRHVSERDFAHGGAGMTELRDWLLEKTKAAPGQIAVAIETPHGPVVETLLDHAFQVFAINPKQLDRFRDRFTVAGAKDDSRDARVLGSALRTDRQAFRRLVVDDPLVIELREWSRMADELQQERTRLANRVRQQLWRYYPQAVELTDDVADDWFLALWQQVPTPVTAAEVPEEAITRILKDHRIRRLDATTVLQTLRKTPLFVAPGTTEAACAHIRAVAARLSLVNQQIKQTHRALDGLCAKLEAATESPSGQNREQHDVMILRSWPGIGRIVLATLLTEATEPLRRRDYHALRALAGTPPVTRRSGKQCFVIRRLACNKRLQNAVHHWSRVAIQHDTAARRRYDALRRRGHGHARALRTVGDRLLYALCTTLERQMPYNPNCQTAQVTVGL

SEQ ID NO: 282077 - protein, 341 aa, unidentified
MKHNITTVGIDLAKKIFHLVGMDTTGKIVWRKRLTRHALVPFLAQLPPVTIGMEACGGAHYWARQLCQQGHTVKLMAPQFVKPYVKSNKNDMRDAEAIAEAVTRPTMRFVPIKDIAQQDVQALHRVRERLIGARTALINEVHGFMQEYGIVLPKGVTKFRQAVVEKLESEKAKLTALSQEMFRKLMEEFVALEEQLAYYQEQLDTLAATHPECQRLMTIPGIGPITATALIAAVGDVGVFKNGRQFAAWLGLVPKQHSTGGQSHLLGISKRGDSYLRKLLIHGARATLRWVKLQTDRRSQWIRGLLARRGWNRTAVAVANKNARIVWALLSRGGVYEAPVC

SEQ ID NO: 282078 - protein, 460 aa, unidentified
MERAGYLGCDVSKGYCDFLLLDSKEAVLEASFNLSDTKAGRSDLKRLIEKWLANGITTLYCGVESTGGYENNWYRYLKSLGKNLPVKAARLNPKGVKAVSDATLRRTITDAVSAENIACYLIHFPAKVDYGDQRLTMHESEFKEGRQHVNYINMSNKQKVQLGNQMEKLIYQYFSEVLVYCRHGIPGWLLRLLVKYPCASAVIRAGEKKVAAVFGIGPKKAKSILAKASGSSQMVSFQVQHIISVTAREILHKQELIDEERLYLQGLYQSHKWVKLLCSIIGIGLNSAIALLLEIEDIHRFANAKKMASYFGVHPTYKQSGDGVWGKHMSKKGRGEIRAILYMACLSGIRYNPLLQNMYKRFRTKGMNHYQAMGVVMHKLLRIIYGILKNETAFDAAIDQENVLKAQEKQKQSEQLASELKKESLNSKFRYQTPSEDAPISRRKYQQNKKALSVPIQNIL

SEQ ID NO: 282079 - protein, 441 aa, unidentified
MRIVYKRCCGMDVHKNSVTACVLVIDGDGEFRKQSRYFSTMTRDLKEMDTWLANLGVEAIAMEATGVYWKPVWNILEAEKKYQLLLVNAHHVKHVPGRKTDQKDSEWIAELLQHGLLKGSFVPPETIRRLRDLTRTRAKIGQNVATFANRIQKVLEDANVKLGSVATDVLGVSGREMLKALIKGQRDPKQLAQLARGRLRKKLSELQLALEGHFTEHHGFQIQALLELVESGEERLRQLEAEIQRLLLQEPEPCRPEGSAIAEVDTASTPPTSSLQRAVELLDTIPGVDKVTAWTLVAEMGANMDQFGSASQLAKWAGICPGNNESAGKRLSGKTPKGNIWLRRALCEAAWAASRTKDTYLGAQYKHFIVRKGKKKTIVAVAHSMLRIAYYLLTRQCPYAELGGDFFDRVNQEAVRSRLVKKLVSLGYQVTLTPVSSEAVA

SEQ ID NO: 282080 - protein, 321 aa, unidentified
MEETMVCVMEGSGEAVFKGRVSSTPEAIADLLRRKAPHAERVVLEAGSLSTWHWHGLRALGFPVVCVDARHAKAALSMRVNKTDANDAEGLAHLARTGWCREVRVKSMASHHDRSLLAAREQLGKTKRDLENQMRGLMKTFGLLVGKVNGGRFEARVRELLEEVPALCDVIEPLLEARAAVRRELDGLTKRVMELARESAACRILMRHPGIGAISALAFVSTIDDPRRFAKSANVGAYLGLTPRRYQSGEVDRTGRISKCGDAMVRSLLFEAANVLLTRVKKWCPLKAWGMRLMKRIGAKKAKVAAARKMAVIPRRHDSSV

SEQ ID NO: 282081 - protein, 340 aa, unidentified
MTITTVGIDLAKNVFAVHCVDQHGKTVLVKPKVSRATLPELIASLPPCVIGMEACSGAHYWARLFRQYGHEPRLMAAKFVSPYRMAGKSGKNDAADAQAICEAVRRPHMRFVPVKDESQQAMQCLHRIRQGFIEEKTATYNRLRGLISEFGVIAPQSTDALRHMVSEQKSSLPLQVQQCVNDLLEHIDRIEDNITEYDRILSRMAKTDHRSQRLMELKGIGPTTACALVASIGNAHDFKNGRQLAAWLGLTPSQYSSGGKSKLGRITKAGDSYLRTLLVQGARSVLIGAEKRTDLFSRWVCSLVDRRGYWRAVVAIAAKNARLCWASLHYGDDFRLYSAS

SEQ ID NO: 282082 - protein, 344 aa, unidentified
MSVRVIGIDLGKTVFHLVGMDEHGNVAVKKRFSRAQLMKFLVNMPPCLIGMEASCGCHHVGRHLAAFGHEVRLIPAQFVKPYVKSQKNDYRDAEAIAEAVQRPTMRFVPIKTEDQLDVQAIHRVRERLLEQRKSLVNQLRAFFLERGLIVRTGRAYLWRVLSDVMAEAEQITSPRMFRLMNAIVQQWRMLEVAIDDIDCEIATIAQNDDACQRLQTVPGVGPLVETAMVAAVGNGSAFQKGREFSAWLGLVPQQCSTGGQTKLLGISKRGNEYLPRLFVHGARSVCLHVNRERHAWGKWITALRERKPSNVATVALANKLARVAWSVLNRNQEYRNLVLSHAAT

SEQ ID NO: 282083 - protein, 360 aa, unidentified
MIVIGADTHKRTHMLLGVDAGTGEVSRSKRINASDDGHRDAVRWARELDSERVWAIEDCRHVSRRLEQALLAAGERVVRVPPKMMGQTRRAERQSGKSDEIDALAVARAVVKDGVERFPSAYLDERAMEIRLLSDHRDQLVTERTRIQNRLRWHLLQLCPALEAQLPQAGLTRQAVQERIARRLRTFGDDTRARVAREQLSRVRALTHQINGLERELQRLVAAHRPALLAEQGCGALIAATLIGRTAGAERFPSDSHFARQAGAAPIPVSSGRVDRHRLHRGGDRQLNRALHMIAITKARIDPETRAYVERKRAEGKTRREALRCLKRHLARKIHRLLAMPAADPDPAQFNIAISGRCLT

SEQ ID NO: 282084 - protein, 323 aa, unidentified
MNTLDFLGIDIAKKTFNVALLRNDKLRHKKFENSPEGFKQLDSWLVKQGVIEIHACLEATGSYSEGLALHLHQAGHKVSLVNPARIKAFGQSELRRNKTDRADATLIARFCSMHRPAAWVPPPAEIRELQALVRHLDDLIGTRTQLGTRFTDGPKIKSVLESLKTLIEAVDVEIKLTRKKIREHIDQHPGLKEDCELLETIPGIGEKTATTLLAEIEHLRHYKHARQAAAYAGLSPRLRESGTSGKRSRLSKTGNSKVRKALFMPAISAKQHNPVLRQFSERLARRGKPKMAIIGAVMRKLLHLAFGVLKTRKPFDPNHPVTA

SEQ ID NO: 282085 - protein, 359 aa, unidentified
MKIVGCDFHPAWQQVAVFDPETGEITELKLLHGDGEAERFYRVLESPALIGIEACGNSQWFIELAESLGHVVWIGDAAQIRASYVRRQKTDRRDAGHILKLLMESRFPRLWTPTAAQRDLRQLLIHRHKLVEIRTRIKNGLQHLALNRGVQKKSALWSVRGRACLEKLPLAGWTARRREDLLRLHGELDRHVNELDVAVNLAAKEHPQARLLMTQPGVGPITSLGFVLTIGDVSRFRHSNQVSSYLGLIPREHSSGGKQRLGAITKQGNRFMRQLLVEAAQSVTRLDEGFRRQYLARCHHKAKGVAKVAAARKLAVRLYWMLRQNVGYPEIALIESSSRVPLRGESHLVTLNERSRTQQ

SEQ ID NO: 282086 - protein, 482 aa, unidentified
MKPRTAEKDKEVIADSSCGHWNQMNRQQRRHMMRKMQSDDLSLEVVHPDAAGIDIGNESHYVAVPPTRDSQPVRRFGCTTAELKAMADWLKQCGIQTVAMQSTGVYWIAVYDILEAAGLDVYLVNARDTKNLPGRKSDVQESQWLMKLHTYGLLRNSFRPSQEIRTMRTYWRQRNDLVQSASRHIHRIQKALTQMNLQLANVLSDVSGLTGQAIINAILAGERNPHKLAAFRDPRVQASEEQIARSLEGNWQEDLLFVLKQEQDGYEFCQKQMAECDRQLEQYFQRREDRSQGASLPEEKRKTRLKKKNGNKPQFGLRADLFRMSGTDLTQIDSIDVVTAATIVSEVGWDMSKWETEDHFVSWLRLCPDNRISGNKIIGKGRLPTNNRVSIALRMAASTLRVSNTYLGAQFRRFRAKLDARVAVKAMAAKLARLVYRMMRYGMKYVDQGAKFYETQHRNLQVKHLKWRAAKLGYQLVQAPST

SEQ ID NO: 282087 - protein, 368 aa, unidentified
MLTMFHGIDRHEKYSTISVLNRKGEEIRFTHRCTDLKGYIDSLGPEDAVVMEACSGAFYWADLIETRGAACSIIDPHRFRIIKDSWNKTDTHDARNMAQALWVSVVTGKYGIPTVYKPTMVIREMRKLYSQYQMLNRQMRVLKNSLQAILTENGIHLTGAEKNRLLSVRHGKEIVRGLELTHASEVNVRISLDLLWRIEEEKGRIKKEIFLTGEPLHEAVKLLITIKGITPLVALAFLADVGDIERFPTLRKMNAYLGLVPRVKESGGKSRHGHITRESRKLTRTLLTQSVYHISNASPVFRKYYSDLKERRGVGRARIALIRKVCGVMRRMLLTGECFRWMKDELFSKKLRAYEKELESLKREKKAA

SEQ ID NO: 282088 - protein, 355 aa, unidentified
MTSSKYIGMDVHKESISIAVRNAAGKIVMESVIQTKASMILQFIEGLRGEVHVTFEEGTWSAWLYDLLKPHVTKLVVCDPRRNALLKEGNQNDRVDARKLAELLQNNQLRPVYHGDHGLRALQELVRSYLTITKDLSRVMTRVKAIYRSWAIPCSGTQVYSARHRAEWLEKIREPGVRRRAETYYQELDGLRSLRQEVRKELLAESKKHEVWKRLGGIPSIGPIRAALLLGIMQTAHRFRTKRQLWAYSGFGVEGHSSADHQVVKGQLQRKKKPIEIRGLNKNCNHHLKNVFKSAAVVASTKPGPLQEFYAALVAKGMRPEMARLTLARKIATIVLIVWKKGVCFDANHLKPQTA

SEQ ID NO: 282089 - protein, 361 aa, unidentified
MSRRETAITTIAQLEPSRVTVGVDTHGEVHVACALDQLGRHLATLEVATTLRGYRELLAWAQRLGEVQGFGVEGTGCYGAGLARFLSAHGQVVLEVNRPDRQARRRRGKSDPVDAEAAARAVLAGQATAIPKAGDHLVEMVRCLRVARASAAKARTQAANALRALVVTAPAELRELLRELPAGRLASTAARLRPGPIVTTAAATKLALRQLGQRYQALEAELAAVDAELDRLTALAAPGLRRLCGIGPEIAGALLVASGDNPERLHSEAAFAMLCGASPIPASSGKTVRHRLNRGGNRQANTALYRIVVVRLRWHQPTRDYMARRTKEGLSKREIIRCLKRYVAREVFAALQASTALTATT

SEQ ID NO: 282090 - protein, 341 aa, unidentified
MQITTIGLDIAKNVFQVHGIDGDEKVVVRKQLRRNQVLQFFDELPPCLVGLEACATSHYWARELARLGHEVRLMPAKDVKAYIKRNKNDAADAEAICEAVRRPTMRFVQIKSADQQAQLMQHRARDLLMQQRTQLINALRSHLAELGIIAPQGREGIKELLAIIANEDNQHVPNDARASLVVLAAQLQALQTMIGAIEKRIVKQHRASKESKRIQTVPGIGEIGASAIAATVTNPKIFRSGRDFAAWIGLVPRQMSTGGKPKLGSISKQGDRYLRRLLVVGAISVMRRAKLHPGKFPWITQMLARRPFKVVAVALANKMARTAWALMMSGKTCRAARYAAA

SEQ ID NO: 282091 - protein, 460 aa, unidentified
MEKYSEKWTKSTVRTALLTVVHPETAAVDVHPNEMWGAIRPDHPSGKTVRRFGAVTYDLRQLVKWFKDSGVTTVAMEATGVYWLPLYELLEVEGIRVCLVNARHVKNVPGRPKTDVRDCQWLQKLHASGLLTASFIPDASTRQLRGLLRHRDRLTRLQSQHILRMQKALREMNVHLDAVVTDIMGVTGLRILKALMQGRRDFDVIAQECRHPLIKATPEQIAVAIDGTYTPDSMFVLGQELEAYDFTGTQVAKLDVQLEQLLQLATAGQPAIALPDQGLTGREKRQGDAPAFNVQQYLYQITGVDLTRIPGIGANASLILLSEIGNDMSRWRSSDAFCSWLGVCPNLQKSAGKIHGSRPRRTCSHAKHILRLCASSLKNHHGHLGAFFRRIRARSGSPAAITATAHKLARIIFAMLGGKKAYSELGEDYYDKRYRERILRNMKRKAQLYGFQLVPLEQAS

SEQ ID NO: 282092 - protein, 341 aa, unidentified
MTAIGIDTHKRTLSACALDDVGGILGERSFACDAEGFAALAVWARETAPAARVGVEGSASYGAPAARYLVDLGFEVREVPPQLSRRERGRTRRAGKSDPGDALAIARVTLREPDLPPVRLDDRAEELGLLVDAREEVVGAQTRARNRLHAHLVVLVPGYARTAAHLVSRRQLAAIEAALTPLTGTRAGLARDLLADVRALGQRADELERRIAALVAGHPLLGLPGVGSLTAARLVAEVGDARRFRSPDAFAMLAGVAPIPASSGESRRMRLNRGGNRRLNRALYTIALSQAWHHPPAKAYLERKRSAGMSWSEALRCLKHRISRPVFRLLQAGQLAWATAD

SEQ ID NO: 282093 - protein, 343 aa, unidentified
MQTVTTIGLDIAKSVFQVHGVDSTGHVVIRRQLKRRAVLAFFQKLLPCLVGIEACASSHHWSRELQALGHTVRLMPPAYVKPYVKRQKNDMADAEAICEAVTRANMRFVPTKTPEQQSCLMLHRTRHLFIRQQTAVINSIRAHLAEYGIVAPVGRKGVTELLHVVADPSDKRVPEVARACLAALGNQLLTLKEQIVEFDRMIMVWHRSNETSKRLHYIPGVGPMLATALVASVADARTFRSGRNFSAWIGLVPKQHSSGGKDRLGSISKQGDRYLRSLLVAGALAVIRYAKIHGTKHRPWLTALLARRPTKVAAIALANKIARMAWAMMAKGERYKQPVALAA

SEQ ID NO: 282094 - protein, 477 aa, unidentified
MAASNKKNVMGAAAPLAGPAQPGGEATEVAEERVEVVTYAAAIDVAKASGMVCTRVPGSRSDRKRQTVWQVDATYASVIALMDHLRCEGIQRLVLESTSDYWRCWYYLAEAAGLEVWLVNAKDVKHLPGRGKSDRKDCVWLCKLNERGMLRRSFVPPEEIRDLRALTRTRSRLAQDQVRHQNRVEKVLEDALLKISGVISDLFGTSGRRFLDALVAGERSPTALAALGDRRLKASPQRLADALTGRFRDVHAFEIATHLRLIDTINDEIARLDERIEQQLAAIAGVAPACTACGLIGGGHAPGCASDGTPVLSLIERLDEITGVGVRNAQVIIAELGTDMSVFPTAGHAAAWARLTPRTFQSGNTTRPGRTGKGDPYLRGALGQSVMAAARTDTRIGEQYRRTARRRGKQKGIVAVSRVICEIAWLLISDRGARFTDLGPDYYSIRSPHSQTRSRIREIERLNPGMKVTLTPAATAA

SEQ ID NO: 282095 - protein, 408 aa, unidentified
MEIFCGIDWAERHHDVAVVDQTGRLLGRRRISDDLAGFGDLTALLVEHAGEQGEQVTGVPVAIETDRGLLVAALRAVGHPVYAINPKAVDRYRDRHAVSGAKSDPADALVLAHLLRTDRHAHRPLPADTEQAQVVRVLARAHQDAIWARRQDANRLRSLLREFFPAALTAFPDLTTRTALTVLAAAPTPAAAAALTRANLTGLLHAAGRGTRPADAARLADIFAAADQLRQSTEVETAMGAAARAIVRTLAAANQSVHELELALADHFEQHPDAEILDSLPGLGLVLGARVLGEYGDDPTRWPDAASRRNYAGTAPITRASGRSRIVLARHIRNKRLADACYLWAFTALTKSPGARAYYDTRRAAGDTHNAALRRLASKLLGQLHHCLTHRQPYDEHHAWPPATPAAA

SEQ ID NO: 282096 - protein, 338 aa, unidentified
MSLYGGIDLHSRMSWLVVLDGALKVVRQIKLANDLLDFLRVLEPYRGELAGLAVESTPNWYWLVDGLQEAGYRMHLTNTCAVQQYSGLKYTDDRHDARWLAHLLALGILPEGYIYPAHERPLRDLLRRRGFLVRKRTSLLLSLQGAFGCHTGHRVSSDTVKKWTAVEIEELLDDATVARGLTCLLEPIKAMDSQIRILEKEVLAQAKLRDEFALLRTVWGIGPILALTVMLEVGDIKRFEKVGNFASYCRLVKTDRLSAGKRKGAGNAKNGNPHLSWAFSEAAHFAIRYHDAAKRFYQRKMATTNGIVAVRALAHKLARASYHVMRDQVEFNPKRLFA

SEQ ID NO: 282097 - protein, 469 aa, unidentified
MFGWLGHLFLVLPVSHARLFDILCVVDALIDPLCLKGSALLSQFLQDFIVGIDVASEFSFVAMLAPDGQLIRKPFRIDHNPTGFQRLLQILKNEEERLNSKPIFFVESTGIYHLPLFFFLRSNDLKGFVLNPLCVHSTKNHDIRKVKNDKKDAVAIAQLAKTKDVKVSLVPEPPILSLRMLSREYFALADNLTDCKLRFMNDLHLLFPGFKEVFKNPFSAAALAILREYPSFKSLQTADLEKLTGIVAKTARRSFTWAKEKLEKLFDYAIIAESIGLASVVLEEKLRIQIQTIEAIEAAMAKIEANIRQQVISDAFPKTFRDNIELLDAMPGIGFISAVTLIAEMGDFSMFKSAKAFAAFFGVDPTVKESGKFKGDRIQMSKRGTKLGRRVLYTIAMASIRKTKKGDPINPVLKAYYESKTISKKKKVALVAIMHKLLHYIFAVLRDQKPFECRVPEDHRLYHMAKLAA

SEQ ID NO: 282098 - protein, 360 aa, unidentified
MMETMTWVGLDVHARSTHAAALTLPTAELQRARFGAESEAIVAWLQRLPQPVHACYEAGPTGFVLYRTVRAAGIAIEVVAPTKTPRATGDRVKTDRKDAELLARLLPTGSLRPIAVPPPEVEGARDLARAREQLRVDLCRARHRVSKMLLRHGRVYPGKSTWTQAHHRWLAGQCFDNANSELAYLDYLAAVDGLVARRRALDERLSRLAVEGDWWPTVQRLRSFRGLDTLSALVPALEVGDFARFRSPRQLASWLGLVPSLSQSGESSTQGAITKTGSRYARRLLVEAAWHYGRPPRIGVTLRQRQDGQPAHVLQIAWRCQHRLYRLHQLLSQRHKPGNIVTVALARSLACYLWAAAVAP

SEQ ID NO: 282099 - protein, 391 aa, unidentified
MPDGICWVGLDVHARESTFAIFDRDSGEVITKRVVGRPHELLPLLRGVERPARMVYEAGPTGYGLARGALAEEIELGVCAPSKTERPPADRIKTDKRDAIRLARVLAAGELTLVTIPSVEREQLRDLVRCREDIRADLVRARHRIGNFLLRREIYWEGTGEAWTRKHRSWLTSIKFADHASRSTLADYLHAHDVLISRRDQVEADLATLALTAPCPPTLARLRCLRGIDTLSALGLCAEIGEWERFDHPDQLSAYLGIVPSEHTTGRQRRLGSITKAASTHARRLLVEAAYHYRRGPVVGEALERRQRGHPPEIINISWKAQRRLNARWRQLRDARRKPNGIVAIAIARELSHYCWEIATCTTTRNRHQRQPAASDLPTHADTNSRLTGTH

SEQ ID NO: 282100 - protein, 358 aa, unidentified
MQKYNISFKGQRIFIGIDVHKKNWDVAITPEIGIIKRHSQKASAKELFDFLKKHYPDGDYLAVYESGFSGFSTYYALKEVGVDCIVIHAADVPTTQYEEVMKTDRLDSIKLVKSLKAGLLKGIYIREKENIDDRSVIRIRKTIQKELSRYRIRVRHMLHSNGVPLPDRFEKPGSLWSRAFIKWLKEDVKLLSTSRNSLDLLIRQVETIRITLLEATNMMRNMSQTERYKRKFDLLTTIPGIGVTVAMCILTEVYDVRRFHNEREFAAYLGLIPTCHSSGDKVVHGEMTFRGNKQMGPMIIEAAWTTIYRDPGLGSLYLRYKERMKPQEAIVRIARKLSNVIFAILKNETEYIPYQTGK

SEQ ID NO: 282101 - protein, 386 aa, unidentified
MHASNVCTPITGHCGTIFVAIELSQRNWLVVIHSPDRDRISHHRLEGGDHAGLLALIASVRARAARRLGSVPAVVSCYEAGYDGFWLHRLLTAAGITNFVFDPASIAVEQRRRRAKTDRIDGEVELRTLMAHCRGEPRAVRIVRVPSREQEDARRASRERQRLISEQTAHTNRIKALLRLLGMAVGNPRRRDWLMWLAGQRDWQGQAVPPGLKAELEREHARLMLVGEQLAALAAAPAAAETSVAAAQMAERKELLLRLKGLGPVFAATLVNEVFYKDFRNRREVAAYCGLVPSPWRSGGIEREQGISKAGNPRARHKAIELAWLWLLHQPDSALSQWFRARTAGASGRIKRITIVALARQLIVALWRYLTTGLVPEHAVLKPRQA

SEQ ID NO: 282102 - protein, 342 aa, unidentified
MTTIQYSVGVDIASSTFTAAVGEIPWKVILKPQTFENTEDGYQTLLEWLAQHHLSVSETVVCMEATGVYSEGLAYFLYAKGYRVAVQSPLEVKRTFKPYGPKSDAVDSLQIAEYACRHTDKLAFWKPKNEILEQVKALLAVREQFVTQNTAHKNALQAIQRKVVRTPFAEQSYLQLIEQLKKQIQAIDSEVRRLIESDPTFKEMLLLLLSVPGVGLLLAAHFILLAQFSLEYKVLASFLGISPNEHSSGSSVFKHATSRHFGPPSIRKLLYLAACSVCTHRPQFGIYLARKTKQGKPARLVLNNVENKLVRIMCAVLQSKTAFVENYHSVQPFVFQNSLTKS

SEQ ID NO: 282103 - protein, 368 aa, unidentified
MENNSTVVGLDVHKENITIAVLRPGKDRPDPSVTVENQPSIIEKKIRELNRRHAPLEFVYEAGPGGFALYRQITQLGHPCAVIAPAWMPMKPGDRVKTDRKDAEKLSWYWRMRDLKEVRIPTPEEESVRDLLRVREDVLANQLRARHRLMKFLLRQGRIYQGKKNWTCAYREWLRQQKFELEYLTKTYQANFRILDEIDTHLADLNCEVELLAQSGNYRTAVGYLKCLKGVNTLTAMTLLAESGDFRRFKNARGYMRYTGMVSWEDSSGGRVYRGGIIKAGNAHLRRVLVQGAWTYRLRSLGSPVLAKRRKGYPPEVIRLARKADERLHLKFQRMVGRNKRSQVAVVAIARELAGFVWAIGQLIPSNQ

SEQ ID NO: 282104 - protein, 315 aa, unidentified
MSHYIGIDVSKARLDVDWMSESKTYANDLKAIKKLTGQLLKLRGKNILSLVVCEATGGYERKLVNACHQAKIPIHLAHANKVRYFAKSQGLLAKTDKIDAHVLSDYGRLLQPKADLVLLNKETEEMAELLKRREQLQADRKREGNRLDKITNKKIKHSIDDHIKWLDKNIKAIEDELHLLRKTEGISSDCDLLTSIPGVGNLTAYYLLASLPEIGKLSHKALAALVGVAPYNHDSGANQGKRFIQGGRSRLRQVLYMSAITTIRCNPDLKVFYCRLREKGKPVKVALIAVIRKLIAMASSVLKRGTIWQMDFQRT

SEQ ID NO: 282105 - protein, 416 aa, unidentified
MYPVHPRMTRTYCGVDSHKGSHTIAFLNCFHEKLGEITIGSAPSEFGKFIKRAKKYLQPDTTFVFGFEDTTAFGRTFVKYLVEKGYLVKHVDASKVTTERGQVLHKTDSYDAECCARVLINQFDKLPDATPQDKFWVITNLVTRRNAIVKMNVMVKNSLHGALADSYPHYKKFFSAVIRDSALAFYEEYPSPHHLENVTVEELTAFLHQASKGRLSTAKAETILKHVQRDKVQKSEYQSTQDFTVRSLVRQVKNNLAELDAIDEQIENILTHFDYPLTSIKGISSLTAAKLIAEIGDIRRFKNAKALAKYSGVAPVTYASGMTSLQMANARGNRKLNEIFFKIALSSITPIGINNALLNPIFYTYYQKKISEGKTKNQAIKAVQRRLVNIVFSVMKHNRPYENPAVAYLPKDTAVA

SEQ ID NO: 282106 - protein, 332 aa, unidentified
MENVRHIIGADLSKRKIDLVIHPIKKHLCIENQKDGFKEMISWLKDNKVKSSEILIVMEHTGLYGFCFEHFLHQKQIRFCKVSALDIKLSMGVSRGKSDKIDAARIAQYGANKRNHLTVQTQTSKALERLKMLNTSRDKLVRTRAGLKTSAEEFRNIGMSERDMALRAQLQVIKSLDIQIKSLEKEIEDVIRKEKELNTNYDLLKSIKGVGPVLATNAIIKTHNFERFPNSRKFACFCGIAPFEHTSGSSVKGKTRVNHLADKEMKTLLDLAAKSAITCDPELRAYYQKRITNGKSKMSTINIVRNKIVGRIFAVINRQSPYREDYSRIALN

SEQ ID NO: 282107 - protein, 328 aa, unidentified
MDNPLYYVGIDITKAKFDVAIKLQNGKHKHKVFKNNLEGFESLMQWLNTFGETFHCVMEATNIYHEALADFLFQQQITVSVINPKCSAHFTKTDNLRSKTDKIDAKMLADYADEKRHKLPIYQPISPAQRELLRKNRQLDHLKKQLAQEKTRLTMLLDSDCIASTQQMIAFIKAQIKALEKTIKQCINADNTLKNNVKLLCTIPAIGFATAVQLIAHLGDGNRFKNAKAAATFAGLTPMIKSSGKSLNTVIGISKIGQSDIRKALFCPAMNFAFGSYKNSVYRSFVLRLLECGKPKMVIITALMRKLVTIAQAVLQKQTAFNLDTFMK

SEQ ID NO: 282108 - protein, 419 aa, unidentified
MKLFVGLDVSSEKLDTCFLTDDDDLSILLEKTFPNDLNGATAIKDQIIKFTESMIFQKIVIGMESTSLYSFHPATFFQTDKELNQYELVVTVENPFKIKQFSRIFDEDKTDRIDAFRIADYLRLQRYSSSPLKEEKYMALQRLTRTRYQMVCQLTEAKQHFLENLTYKCNTLSRELKNGDSPTSVFGAAMIALMTEDYSLDDFSTMSLDALAELLQHYGKGRFKSPEKIAEAIKKAVRDSYRLGKLAQESIDIILACLVKSIQAFQKQIKILDQAIEDLVVILPEYQCLRSIPGIGPVYAAGLLAEIGQIERFEDQAKLAKYAGLTWKVSQSGNFQSERTPLTKTGNRYFRYYLIEATNSVRRHLPEFKAYYQKKYKEVPKQQHKRALVLTARKFVRLVDILLRNHQLYTPPRSVIEHE

SEQ ID NO: 282109 - protein, 342 aa, unidentified
MQITTIGLDIAKNVFQVHGIDANEKVVVRKQLRRSQVIAFFEALAPCLIGMEACATAHYWARELTKLGHEVRLMPAKDVKAYLKRNKNDAADAAAICEAVRRPTMRFVRIKSAEQQGQLMQHRTRDVLIRQRTQIINALRAHLAELGIVAAKGDAGVNELLAIVADEADTRLPIDARASVIVLAAQLEALQTLIGSIEKRIKMQHRSNETSQRVETIPGIGVVGATAIVATAADPTVFRSGRDFAAWIGLVPRQDSTGGKQKLGPISKQGDRYLRRILIVGAIAVLRRAQENPGKYPWLTQLLARRPFKVVAVALANKMARTAWALMVHGGTYRAPELVEAA

SEQ ID NO: 282110 - protein, 356 aa, unidentified
MESIALAAPKRKLVVGVDTHKHLHVAVALDELGARVGELTIGADSIGYAALASWSEQLGRPCAFGIEGTGSYGAGLASFLRRRGCRIVEVDRGDRRGRRSNGKSDTLDAEAAARAVLAGSAAAIPKSADGVCEMIRQVKIARDTAVKARTQALITLKCIVVNAPAELREQLAPLSDKALLDRCASFRRGPIESTTASTKHTLRALARRWLELADEIAEHDRVLDQLTRAAAPSLRDAFGIGPDTAAEMLIVFGDNPERIRSEAAFAKLCGVAPIPASSGKTNRHRLSRGGHRQANSALYRVVIVRMRFHQPTIDYVTRRSREGRTKRDIIRCLKRFLAREIYHHVMNDRAALTTTT

SEQ ID NO: 282111 - protein, 407 aa, unidentified
MSENDRIVFGGVDTHRDTHVAAAVDATGRVLGTSPFDADAAGYEQLGTWLGSWGRVARVGIEGTGSYGAGLSRHLLSIGVEVAEVNRPNRQLRRRWGKTDTVDAEAAARAVLSGQATGTPKTGDGPVEGIRMLVVARRSAVKARTQAINQLHALVVTAPDQVKHQLGELSPKTRVKVCAAYRPGTAQTTIRYAKQALRSLARRYQTLTAEIQQLDTEIHQLCARANPALLAASGIGPETAATLLVTAGDNPHRLTSEASFAALCGASPVQASSGRTVRHRLNRGGDRQANNALWRIAMVRLRADPRTIEYAQRRQTEGKTRKEIIRCLKRYIARHVYQLLTNPHPTPSGAHLRCLRQNTHITLAQAATALHANPTSLSQLERGQYHNHHLATRYQTWLTTQNPICKT

SEQ ID NO: 282112 - protein, 424 aa, unidentified
MKVTYQTCCGVDVHKSFLVATIVKTTGGIEPSYQKKRFSTFNSSILEFKQWLLDNDCHDVCMESTGKYWVPVFNLLEDEINVVIANPKWVKAVKGNKDDTKDSKWIGDLFRLGLVKGSYIPCKIVRILREYTRYRYKLVSCRSSEKNRYQNTLTVCNVALDSVVSDIFGKSSMSIIDYLLEQSGTSINHEEIASKLLRSLKSKEDAVIESVEGYQMTDAQKYRVRLVRAHMDYITAEINDVDKMIENMIFSNPDFENAVQFLCTIPGVKRDSAITIISEIGTDMSQFGGSKRLCCWAGLTPGSNESAGKKKSVRITRAGVYLKPALVQCAHAAVKSDKSPYYKKKYESLVKRRGKKRAIIAIARMILTAIYQMLSTGEQWNPSDLYKIDMPVALVEKQKAKAIKQAKKLLQREGILPPDEPLAS

SEQ ID NO: 282113 - protein, 393 aa, unidentified
MYITGDKLKYVSVVVAGDVRTGRLVEAVGREQPASKQRRDRPTLGKQPVGSLIRRRFITISARTVAWDILSNEPVYARKGTKMENYIGIDISKRYFDLHCLPEGKQHQFENNQKGIQQCLKLLADIKPKLVVMESTGGYEITLACKLQAVGLPVAVVNPRQIRDFAKAIGQIAKTDKIDAKVIAKFASMVEPPAREVMDDKARQLKGLVTRRDQLTEMHVAESNRMEHVVDRSIAHSIKAILKVIERQISDIDKQIAEHIRQDEHLRRKADIVDSAPGIGNTTAFMLVTKLPEIGTLNRRQIAALVGVAPMNRDSGAFRGKRMTGGGRSSVRSSLFMPTLVAIKHNPVIREFYQRLLSVGKTKMTAVIAAMRKLLTILNTMVAKNEFWNPKIA

SEQ ID NO: 282114 - protein, 427 aa, unidentified
MAYRIAAVDVHKKMLAVVVADVEGEGEYQFERRKFGASPDQLQVLAQWLVEQEIEEVVMESTAQYWKPVWGALERYWKPARQQRDGATKMSGKLHLCQAKSNRGPRGRKNDFADGERMIKRLVAQELILSFVPDPEQRLWRTVTRRKHQLTRDKIRFQNQLESLLEQAHIKLSSFVSDLLGLSARRMLKAIAEGETDPAAVAALADCRLRATPEQLRDALGACTQLNGVYRRLLNMALEELKLMEEQMEQLDQEAWNLLQEHQDAVQRVAEVPGFGVDSATQMIAEVGAEAAAFESEKDLSSWVGVCPGDEETAGKSKSTRSPKGNSTMRRLLNQAAQSAVKVKGSIFEITFRRLEPRLGYQQAIWAIAHRLCRLLWMILHKGIRYEERGPAVSAKSQRARTARMIKALQKLGYRVEGGPLPAGTPA

SEQ ID NO: 282115 - protein, 383 aa, unidentified
MCEAEPRFVGLDLHRHDVMVGAVNAHQDIVLTPQRVTLRQFAQWASHHLRPTDQVAVEATTNTWALYDLLEPHVAKVVVAHPQQVRLIASAKVKHDKRDALILAHLLSANLLPEVWVPPPHVRQLRSLIVHRHHLTTQRRMAKNRLRGVLFRFNLPAPPGDVASLDHRAWWQTLSLNPVERLRVQHDLDTFDHLAGQITDVNAALAQLSVCIPWSEDVPFLLQMPGIGLVSAMTLLSAIGDISRFPTPKHLVGYAGLGAGIRSSGQTSRPGPITKSGRGELRTTLIQVAWAAARYSPFWRESFNRLAPRKGPQKAITIIARKILVVIWHVLTHRTTDRNADPAQVERAFLKWATDYRLATSQGLSRTHFVHNALVLVGFRPPD

SEQ ID NO: 282116 - protein, 447 aa, unidentified
MKTEPEEIPDADHELIIERVAAIDVAKASGKVCLRLPRPGRPGHRVSRVWDVEATTAAVCELADHLVAGQIERVTVESTSDYWRIWYYLLEAAGLSVQLVNARDVKNVPGRPKSDKLDSVWLAKLTEKGLLRPSFVPPAPIRQLRDYTRLRVDLTRERSRYWQRLEKLLEDALIKVSAVASTLDTLSVRDMLEALIAGERDPRRLADLARGRMKTKRAALIEALTGRFDDHHGELARMLLDQIDALSGQINTLTIRIDQRLATIANEVPGHDDGDSGAGGQPSADLTVVQRLTEIPGIGPTGAQVILAEIGLDMSRFPTAAHLVSWAKLCPRTIQSGAIQRCGKSGKGNPYLKGALGEAAAAAAKTNTFLGERYRRIVKRRGKLKALVAVARSILVIIWNLLSDNHARFRDLGPDYHATRINTERKLRNHIAQLAALGYHVTVEPAA

SEQ ID NO: 282117 - protein, 388 aa, unidentified
MIYVGIDIAKLNHFASAISSDGEELIKPFKFTNDADGFQLLSSHLDSLPDDSFIIGLESTAHYGDNLVRYLVNQGLKVCVINPIQTATLRKNNIRKTKTDKVDTHIIAKALMLQQSHRFVTVDDINLMDLKALGRFRQKSLKQRTRLKIQLKAYVDETFPELQYFFKSGLHQKAVYALLKEAPSAKDVASMHLTHLAHILEVASHGHFKKETASQLRVLARKSVGSPDSALSIQVVHAIEQIELLDSQIDHVEAEMTDIMKYLDSVIMSIPGIGYINGGMILGEIGDIRRFPGPKQLLAFAGLDPSVYQSGNFQAKRTRMSKRGSKVLRYALMNAAHNVVKNNSTFKAYYDAKMAEGRTHYNALGHCAGKLVRIIYKMLSDKVEFNLA

SEQ ID NO: 282118 - protein, 372 aa, unidentified
MASIIYVGMDVHTTNFTFCCYTADSDRGFAVAQTEPDYRQVIKYMERVQKQRGEECKFVCGYEAGCLGYSLYHQLTRCGVDCVILAPSTMHQEKGKRIKTDRRDAENIARCLAFSLYSPVYVPTTEDDAVKEYIRMRDDIKADLKRVKQQIIAFTTRHGFAFDGKSYWTQKHLKWLETLVFEHPLYKETLQEYLILYYMLDEKVAVYDTRIEEMSHLEHYEENVQKLCCFRGVAAHTALSLLVEVGDFQRFRSAKHFAAYLGLVPGEHSSSDKHIRTSITKAGNTHLRRLLVEAAQSYNRGAIGKKSAALKARQGGNPAEVIAYADKANERMQRKYYRIAFKSRHNIAKTAIARELACFVWGMMTGNISNAA

SEQ ID NO: 282119 - protein, 389 aa, unidentified
MKIYVGIDIAKLNHFAAAISSDGEIIIEPFKFTNDADGFQLLVSKLESFDKNSLIIGLESTAHYGDNLVRYLVTELYQVCVLNPIKTCQMRKNNVRKTKTDKVDTYVIAKTLMMQDNLRFVSFFDLDMMDLKALGRFRQKTIKQRTRLKIQLTTYVDQVFPEIQYFFKSGLHQHAVYALLKEAPSPKEIASMHMTHLANLLKVNSHGHFTKEQAKELRVLAQKSVGANDSAISIQITQTIQQIELLDSQLEKIEAEMTDIMKFNDSVIMTIPGIGYINGGMILGEIGDIHRFSNPNKLLAFAGLDPSVYQSGNFQAKTTRMSKRGSRVLRYALVNAAWNVVRNNATFKAYYDAKRAEGRSHYNALGHCSGKLVRVIWKMLTDNVEFNLK

SEQ ID NO: 282120 - protein, 389 aa, unidentified
MLYCGIDVAKRRHAVALLDERGQLVQPILSMANDRAGFDLLLQSLPAADGVTIALEATGHYWLALYDALTQQGFPVVVLNPLQVAAYRRSGVRKVKSDRSDAAWIADFVRIATPSPTRRDLPVLLQLRELSRFRFRLSDQIGDIKRQLLTILDRVFPEYEQLFSSVFLQSSRALLQQAVSAQEFADLDLQELESLLLDASRGRFGLQKAQQIQARARQSIGVGFLADAAGLEMRCLLAQIELLEQQRDQVDAALETLMHQIPQHITSIPGIGPVTGAAIVAEIGDVNRFDSVEKLVAYAGIDPSVYQTGQFRASEAHMSKRGSPYLRHALWLAASVAIKHDPQLQSYYERKRQEGKPYGTALGAVCRKLLARVYVVLKEERPYVVKPPC

SEQ ID NO: 282121 - protein, 379 aa, unidentified
MSKIRFVGLDVHADTIAVAVAEPDGEVRALGIIPNRLESIRKLVTKLGPAKQLKACYEAGPTGYVLYWELTALGVACEVVAPGLVPVKPGDRVKTDRRDATKLARSYRAGDLTAVWVPDAAHEALRDLVRTREDARQDQHRARHRLSKFLLRQGRRPPEDVKKAWTLKYMTWIQEHVHFDQPALETTLLDYVQEVEHMAERIVRLEKAITEAIQKAPPEIRAVVQALQALRGVAQLTAVTVVAELGSLSRFQSPRQLMGYSGLVSSEYSSGNRVQRGGITKTGNAHLRRVVIESAWAYQHRPWIGGFLLRRQRDLRLDPEVKEIAWKAQWRLHTRYKKLAAAGKKKPQIVTAVGRELLGFLWAIAVQTEAKFRPDRKAA

SEQ ID NO: 282122 - protein, 491 aa, unidentified
MKANPSQPKASSKTRRSKGRGKKRARTPQNLPVVRPDTAGIDLAVTSEIWVAVAPDREGEGETVQPFSPMSHGLEALVAYLQAMRITSAAMEATGVYWVALYTKLMEAEIDVTLVQPRDVRRLNKPKSDIADCQWLQYLHSVGLLKKSFVPPPQILAVRAIARQRERLIDEATMHLQHAHQTLDEMNLHVHHVLSDLGGVSGQAIIEAMLAGERDPHKLAALCHRNVRTDRAIIAQALTGQWRDEQVFVLRQAYDSWKNTQRQMTECDARLWELAQALQVRVSEDEIAPQQPRRRPGRPRKQSPVKAKVRSRGNSRNGLDDAQDWVSRLHALFGVDLTAVPGVGLLLTLCLLVEVGPDWSAFPTAGHFAAWIGLCPHNDRSGKKVLRRRTPPGQTRLKGMLRVCAQSLCTNQSPLGDHYRRLKARLGPASANTAMAHKLARILWHMVHHQVAYDESVFCQRDQQVIERQTRRLRKQAQSLGFDLTPLSKAA

SEQ ID NO: 282123 - protein, 316 aa, unidentified
MYLGIDVSKLTIDCCLIADGQNHQKKFQNNKGGFEQLTKWLQSHKVSDKLHCVCEATGTYYEALAEYIYSRYTITVENPRKIKGYAIAELQRSKTDTQDAKLIAQYCQDRKHKLKAWQPPAKEQKQLQEIARYLDYLKQQRATEKAKQHEAPDYIKSHIQTTISNLTAQIQTVKKQLLQFYKDNPSYNNMRKRLKTITGIGEQATAVLLSTYKRHEFKNAKQFTAYLGLDPRKYQSGTSVNGKSRISKIGSSEIRKSLYMPAVVAYRCNAFSEFVGRLKTKGKHIKLILIAIMRKLAVIAFTLLKNGQDFIVERYK

SEQ ID NO: 282124 - protein, 327 aa, unidentified
MDPTTTRTARLFAGVDVSKDRLDVCLRWNESERHEEEAFVVAYDHSGVDALVSRLLKERTVLVVLEATGGFERTVVGALAAAELPVVVVNPRQVRDFARATGRLAKTDRIDASILARFAEVVRPAPKPLPDRELRALQGMVARRRQLLGMLAAENNRLSWATKPVAKRIKAHVRWLEKELSRTERDLEAAIESSPVLGENEALLRSVPGVGPVLARTLLAGVPELGTLTHKRLAALVGVAPLNRDSGTLRGHRSVWGGRADVRAALYMGALVAARRNPVVKEFYERLLAAGKPKKVALVACMRKLLSILNAVLKHRTPWRSPHYLSS

SEQ ID NO: 282125 - protein, 403 aa, unidentified
MNSVGIDISKGRSTVAVMRPFGEVVTSPFEVRHTDSELSELARRLKSLTGETRVVMEATGNYHAPVAKLLHDAGLYVSVVNAKLVHSYGNNDLRRVKTDRKDAVKLANYGLDRWLTLPRYVPEENTRLLLKNCYRQYRQYSKVQTVLKNNLISLLDTVFPNANRLFSSPIRGDGSEKWVDFVAEFWHCRCVSEKSERTFTNKYQRWCKKHGYNFREAKAHTIYAEASGHIGVMPKSETTKLLVEQAASQLRATSAALAALKHEMQSLASMLPEYPVVMDMFGVGPTLGPQLIAEIGDVRRFYSKKALVAYAGLDAPPNDSGDVTGRHKSMSKVGASSLRRTLFLVMSVYLQNAPLDEPVYQFMDKKRAEGKPYRVYMMASANKFLRIYYATVKAYLESLEHTA

SEQ ID NO: 282126 - protein, 412 aa, unidentified
MDVVVERCAGLDVHQATVTACVRLPGRQGERTQVIQTFGTTTPDLLTLRDWLAAHQVTHVAMESTGVYWKPVYYVLEDGFTLLLVNAAHMANVPGRKTDVQDCAWIAQLLECGLLRGSFVPPPAIRELRDLTRYRKALIQDRTREANRLHKVLEDAGVKLATVASDILGISGRAMLTALVAGTTDPTVLADLARGRLRAKLPALRQALTGRFRGHHAFLVTQLLAHLDYLDETIATLSTEIEGHLTPFASAVGRVQTIPGVKQRTVENLVAEIGVDMARFPTAGHLTSWAGVCPGNNESAGKRRRGRTRKGDRWLKITLIEAALAAIRVKGSALGARYRRICRHRGHKIAIVAVARAILEIVWHLLTHGTTYAELGADYIDRRDKEQVTRRYVRLLENLGHRVTLEPTPVAA

SEQ ID NO: 282127 - protein, 403 aa, unidentified
MRSVLSIDVANGKSEVLLITEHGEVLIEPYEVKHCLNEFKQLKERIISFNLEDLTVFMESTSTYHLPIQRFFTNNDFKVQVINPILGKNNTRNLRKTKTDIEDCYNLADLFFKNTVKIHAKEMNTIYSNMIELSRQEKHLTENIVRSKNRFKQIIANVFPEYINCFSSNDIYGETSLNFIKDFPHADIIKSKRIDALANNIYKSTKGYVPYSKCLTKAKKIKDLANNSYPGIDIDSCEVKNLINIIDIIIYNSNKLNEVKKDMVNLAKKTPYFNIINSIFGIGEISTAQIIAELGDINRFENIKQLNAFCGLDPTIVQSGKSINYNGPISKRGNRNARKILFITCCSIIRSSVLHNIDTDILVYYRKKQAENKHFKECITACSTKLLRIIFAMCKNNSLYVQK

SEQ ID NO: 282128 - protein, 455 aa, unidentified
MAKQKTHKTPAIETVNIGAAAVDIGSREHMAAVNPDATDDPVRAFGTFTHDLHNLADWFKTHGVTSVAMESTGVYWIPAYEILEQHGFEVILVNARYAKNVPGRKTDVSDASWLRQLHSYGLLRGSFRPSAEIATLRAYLRQRERLVEYAAAHIQHMQKALMEMNLQLHHVVSDITGVTGMKIIRAIAAGERDLDVLASHRDVRCRASVETIKAALNGNDRPEHLFALSQSLELYDFYKGKMLECDRHLEATLAELGADQDYDPSQLPRPRTKTKQVSTPSFDVRAALFGVLGVDLTEIHGMGPSLSLKLVGECGTDLRAWPSAKHFTSWLCLAPGNKISGGKMLSSRTRRSSSRAAALLRLAAVTIGRSDTALGAFYRRLAARAGKAKAVTATARKIAVLFYNTLRHGMTYKDPGASHYEERYRNRVLGNLKRRAKSFGYDLHELPAEIDMAVS

SEQ ID NO: 282129 - protein, 419 aa, unidentified
MRAVALDIHREFCEVAIVAEGRLRSAGQIKTRPEELELFAQSLDRSDWVALEVTGNAWAIAGILEPHVARVIVVSPNDTGIRQARAKTDRLDARTLAKLLWAGELDGVWTPDERVRTMRRRLARRAQLVRARSRVKNEIHAVLMRGLKDRPPSSDLFGVKGRRWLADQQLALCERETVESGLRQVDFLDAEIAAVEQLIAAEALSWPEIKRLMTVPGVNVIVAATFMAAIGDIRRFGDRRKLTAYLGLDPKVRQSGIGPANHGHISKQGSGSARHALVEACWSTVRQPGPIAAFYQRIKAKRGHSIAIVAAARKLACLFWCLLTRGEDYAFAQPSLTTKKMRRLELTAGAPRRQGGRDVWSTNSAMRHAERGLALQAQRAYERTVADWQAAAKVGASATPGRASQRPSKGQAARQTTSP

SEQ ID NO: 282130 - protein, 318 aa, unidentified
MNTKINQSINVGVDTGKTQLDIHIRPLDLFFSVENNDKGIKKALKTIKSHSPERIVIEATGRLEMPFVLACAEAQLPIVRANPVHIKRFAGAIGRRAKNDRLDAELIAHYGEAIKPALTVIKPKNIRLMSDLVIRRNQLLSMQTMEKNRIQILPASLHPTIKPMLTTIKNQITKLEEKLVKLIEDSPEYQAKNTILQSVPGIGNIAAASIISNVPELGYITNKQAASLIGVAPITRESGRYKGKHVIQGGRAQVRTVLYMAMMSAMQCNPVFRATYARLVAAGKPKKVAIIACVRKMVVTLNSMLRDGAMWDENTAKN

SEQ ID NO: 282131 - protein, 355 aa, unidentified
MNAIKYIGMDVHLATISIAVLDSKGKLVMEVTIATQAGALLDLIRGLSGTLHVTFEEGTSAHWLYTVLEPHVGKVVVCDPRQNPRRLGEKKSDRLDARKLAEGLRMGSLKPVYHGNALVPALKELVRSYRTLVSDTTRVMNRLKALYRGRGIGCAGTRVYSARFRNQWREQLQEPGVRGRADLLYKQLDLLLPLRQEARAAMLAESRKHPAHKILCSIPALGPVRVAVLMALMQTPHRFRGKRQLWTYAGLALVTRTSADYQMVDGQVTRTRKPALVLGLNANHNHTLKGIFKDAAASALAHPGPFKDFYTTRVAQGMKPELARLTLARKIAAITLTLWKKGERFNAEHVKAQAA

SEQ ID NO: 282132 - protein, 459 aa, unidentified
MTKHRQKKMKAGKVDALDQINHNAAGIDIGAGEVYVAVPPDRDEDNVRSFPTFTADLQCLADWLNACRIDTVAMESTGVYWIPLYEILEARGFQVCLVNARHLKNVSGRKTDVLDCQWIQQLHTYGLLSPSFRPPEQIVAIRSLVRHREMLVQYRSAHIQHMQKALTLMNLRLCNVLSDITGVTGLKIIRAIVAGERNPQVLAGFREAGCKKSAEEIAKSLEGHYKREHLFALKQALELYDFYDLELHECDAELEALYQQFDPPDDPGTPPPTPRRSKPRKNQAHFDLASALYRMSGVDLTQIDGLDALTVQKVLSETGTDMNKWPTEKHFASWLRLCPNNQITGGKVKQTGVQPTTNRASTALRLAASSLTHSDSALGAFYRRMRTRHGAPSAITSTAHKLARIIYFMLKENKPYHDIGADYYEQQYRTRVLRNLNRQASRFGFRLLPLDQLPVQEVS

SEQ ID NO: 282133 - protein, 412 aa, unidentified
MQTVIERGCGLDVHQATVVACLLIVRKDGKVQKQMRTFGTTTRELVGLREWLLSEGCTQVALESTGVYWKPIYAILEGALEIVVANAQHIKKVPGRKTDVKDAEWIADLLCHGLLRSSFVPPKPIRELRDLMRYRRKLVESQAAERNRLLKVLETANIKLASVATDVFGMSGRLMLRALIAGKATPQEMAELAKGLLRKKIPELQLALEGKLEEHHRFLLELQLQRLEAAEKDLAALEQRIQQRLEPYAAQLALLDEIPGVDWTLAAVIIAEMGVEMSVFGSVSQLASWAGVCPGNNESAGKRKSSRIPSGNVYLKTGLVEAANAAARAKGTYLRDKFFRLKARRGYKRAVVAVAHKILVAIYHMLSQQVSYNDLGDLYLDKLNKNHLTRNLVHRLERLGYAVTLTPQQKAA

SEQ ID NO: 282134 - protein, 428 aa, unidentified
MNTNQPPVGTADQYAAFIAIDWADQQHVFSLQVAGQTKKETGTLEQKPEVIGPWIAQLRARFGGRAIAIGVEQSRGALLHALLGYDFLVLYPIHSTTVAKFREAFKSSGAKSDPLDTDQILLILTKHLALLKPLRPDTVATRLLARLTQDRRKVVDLRTTHIQALLAGLKEYFPQAIELFNGNVTSRLSADFLKKWPDLPAFQAAKPAVLKKFYYGHNVRTPEVIEKMLQLAATAQPLTTDPAIVESGRQLSRLHSQVIQTLNASIAEYDERIAAVFASHPEAKIFTGLPGAGAALAPRLLAFFGTDRTRFATASNVQCFSGIAPVTKSSGRSKVVHFRLACPKFARQTFHEFARLSVAQCQWAANFVEYHTGRGKKYQAVIRALAFKWIRILTQCWKNRTPYDEQKYLADLKKRGSIFATLHLEKKS

SEQ ID NO: 282135 - protein, 352 aa, unidentified
MMIIGCDFHPRFQQISFLWEETGECGQRRLMHTAEAVEYYRSLRGTRVRIGIEATGSYGWFRRLLSELGHELLVGDATQIRASNPRRQKTDKRDAEHILGLLVADRFPAIWQPPAENEQLRQLLLHRSRLVRLRTRVTNQLDGMAKNEGWVIPGGWSGKRRKAIEALPLPGWYGERRKDLLGLLDRVEERIAPLDKAVSQAAANNAEACLLMTHPGVGPVVSLAYVLTIGNWQRFPRGKQVGSYLGLIPSEESSGDKRRLGHISKQGNTLLRWLLVEAASTAQRYDASWHRQYLRLSMTKHHGVAKVAIAHKLAVRLYWMLRSGEDYQHARERGSHARQSECPGGRNTRPIE

SEQ ID NO: 282136 - protein, 311 aa, unidentified
MNTQDCFIGLDISKDTLEVAVRPTEARKTFANQEDGLSLMIDFIKPFSPRLIVLEATGGLEKAAVCALAVAGLPVVVVNPRQVRDFAKAKGILAKTDKMDAGVIAQFGEAIRPEIRPLKTEEAQKLDALLSRRRQISQMITAEKNRLQAAPVWTRKDIQTHIAWLQKALDQFNQDLDRMVKESSIWRAKDEILQSVKGVGPVLSVTLISQLPELGTLQGKKIAALVGVAPLNRDSGKFRGRRTIWGGRAEVRSVLLMATRIAIRFNPVIRAFFERLKKAGKIRKVAETACMRKLLTILNAMMKNNTRWQAA

SEQ ID NO: 282137 - protein, 311 aa, unidentified
MYYIGIDVSKKDLSVFDDKDLNFINQEGLKSFKKYLKKKYSLSEIAIIFEPTGIYSLYLKEFCAENNIKAYIVNPKKSHNFVRALGIRPKTDKIDARILYQFHKLIEAKDIKVPEIDQQAKTLASYLVSYEFALKQRISLSHHLESLRDKRLIDLMKKEQKRAKRLEDRIFDDIKEYLGKNQNLKEDYQRLLTIPGIGEKAAIALLTLFKTYPGTNRVQITALFGLDPVRRESGTSVKYKVKISKNGKGIYRKILYLPTLCATVHHQRVRVFYQRLLANHKPKKLAIIASMRKILLIAHAMYKDKTEYVVA

SEQ ID NO: 282138 - protein, 399 aa, unidentified
MKILAMDVGKSKTVGYLVDTTTGEAAFETVVTAPTVIRRWVRKQRPDRVVMEIGPLAGWIHDVVRAAGVGDIEVANVNHEAWRWRSVRRKNDRMDAAKLADLSAAGQLPTVHLPAAAVRQWRQLIAYRAKLVDRRTAIKNSLRSILAAVGVAAPAGRACWKKETVTWMRGESRPLKDVPSEDLWRGELGLELDALEAVEKLIGEVEEKLASLGEADERVRRLQTVPGVGPRLAEMMVALVDRPGRFRSGRQVGSYLGLVPRQWQSGASDRRGHISRQGCRLARKLLVEVAWMTVRFNPHFRQMYERLRGGSPARTKVAIVGVARHLAVTLWAMLRDGTVWRPPTPHVPRTHPSPGRRRRKDAASATATTTTRRGEALPPHTPPPSQRQGEKDMMTTAKA

SEQ ID NO: 282139 - protein, 443 aa, unidentified
MAVRKRELAVLFPNAAGIDIGSAKHYVAVPPERCEQSVREFESFTADLASMAEWLASCAIDTVVMESTGVYWIPVYELLESRGFTVYLVNARHVKNVSGKKSDVLDCQWLQQLMSFGLLAGAFRPDGQVCALRALVRQRETLIAGQAQQIQRMQKALTQMNVQLVHVISDIAGKTGQDIVRAIVAGERDAGKLAQLRNYRVHASEEQIARSLLGNWREEHLFCLAQALRLFDTHQQLIDEADAKIEALLAHLQRHALGAIKPDKNKGRAKHAPRFDVRAALVRWAGVDLTRIGGIDVCTALKVLAELGTDLSKFKSAKHFASWLGLCPGTRITGGKRISGATKRVANRVAQALKLAAHGLHRSQCALGAYYRRMAARLGAGKAITATAHKLARLVYAILTRGEEFIERTQDHYEDQVRSRTIRYLQKKAASLGFNLLPNAVCP

SEQ ID NO: 282140 - protein, 345 aa, unidentified
MKITTVGIDLAKNVFQVHGVDERGKPVLRKQLRRGQLAEFFVNLPPCLIGMEACASAHHWGRTLRRFGHTVKLMAPQFVKPYVKTNKNDVADAEAICEAVNRPNMRFVPIKTIEQQAILSVHRVRQGFVKARTAQANQIRGLLGEFGLVIPQGIINVTKRVSEILEDASNELPAPFRHLIDRLTAHLKELDRQVKEFEQEIIAWHRSSDLSRELEKIPGIGPLAASALVASIADARSFKNGRQVSAWLGLVPRQSSSGGKPTLLGMSKRGDAYLRTLLIHGARSAILAAKNKVDNTQGWLTDLLKRRHPNIAAVALANKNVRTVWAILAHGREFKSDYVPTRMAA

SEQ ID NO: 282141 - protein, 316 aa, unidentified
MYLGIDVSKLTIDCCLIADGQSHQKKFQNNKGGFEQLTKWLQSHKVSDKLHCVCEATGTYYEELAEYLYSRYTITVENPRKIKGYAIAELQRSKTDTQDAKLIAQYCQDRKHKLKAWQPPAKEQKQLQEIARYLDYLKQQRATEKAKQHEAPDYIKSHIQTTISNLTAQIQTVKKQLLQFYKDNPSYNNMRKRLKTITGIGEQATAVLLSTYKRHEFKNAKQFTAYLGLDPRKYQSGTSVNGKSRISKIGSSEIRKSLYMPAVVAYRCNAFPEFVGRLKNKGKHIKLILIAIMRKLAVIAFTLLKNGQDFIVERYK

SEQ ID NO: 282142 - protein, 343 aa, unidentified
MTQYVGLDVSLKETKLHVLNEAGNRVWRGRCATDPTAIAAAVRRYAPMAARIGLETGPLTTWLWTALTAEGLPMVCLDARHAKKALDMKVNKTDANDAEGLAHLVRAGWYREVRVKGRSAMLAKALLGARSQLLNMSLALENQIRGILKTFGRIVPKGAGGLFDKNVRALITDDGEIAAVIMPLLQARQMARSKCAALDRRLIGSVQSDGTCRMLMTMPGIGPLTAVAYVAALEKPDNFKQSRAVGAWLGLTPRRFQSGEVDYEGHISRRGDCQLRALLYEAASVLLTRVRRDSVLRRWGLMLWKRLGFKRAATALARRMAVVLHAMWKSGTAFNPTLGAATP

SEQ ID NO: 282143 - protein, 342 aa, unidentified
MRGAVHMQITTIGLDIAKNVFQVHGIDAAEKVVVRKRLGRSQMLAFFKALPPCLVGMEACATAHYWARELTKLGHRVRLMPAKDVKAYVKRNKNDAADAEAICEAVRRPTMRFVAAKSAEQQGQLMQHRTRDLLMRQRTQVINALRAHLAELGIVAAQGDKGVKELLTIVTDKKDERLPIDARASVIVLAAQLEAVQTLIGSIERRIKTQHRANEASKRLETIPGIGVIGATAIAATVADPTIFRSGRDFAAWIGLVPRQDSTGGKQKLGPISKQGDRYLRRILVVGAHSVLRRAMQNPEKYLLAHATPGAATLQGRGGGTRQQDGAHGLGAVGARRHISSA

SEQ ID NO: 282144 - protein, 433 aa, unidentified
MSKSKAYRSTDVKNVVLDEVLSKAAPGRVTVGTDIGKLWIFVVLRFSDGTFLRPWKAGNPSEIEYFVWLLQRLSKEHDVTVAMESTGTYGDALRSELAAVGLSVARVSGKAARDYAEVFDGVASQHDGKDAAVVAELCALGKSRPWPYQAPKEEDAEMAYWVDKLDAQQRVQSLWTGHLEALLARHWPELSRLIDLTSVTLLNAVAHYGGPAALAADPEARQQLRGWSRNALKEATIEEIVSSAAQTFGAGQNVYDVKRMQEAAASALAAVREKQVAHARLEELAQGNEILRRQAQAVGSVTACVVWVAIGDPRDYYCGAAYRKAKGLNLKERSSGQYRGQLKISKRGSSIVRRWLYFAALRTVQKPGAQDWYEAKKTKDKGRGKGALVAVMRKLSLAMYAVGARGETYDPERLFPGKPWVKKACQAPSAVEV

SEQ ID NO: 282145 - protein, 392 aa, unidentified
MIYVGIDVASKKHDCFIMSDKDKNANMLITINNDIEGFNKLKETICDFMAETDDKVRIGLESTGHYSHNILHYLVREGFDTMLINPLLTNMERKASSVRKTKTDTIDAKSICMFLTRNKEFKPYTIKQYHNAALKSLSRRRISLVRQLSKQKVQLHMLITLTFPEYLKVFSSLYVNTSLELLHQYSIPSVFAKTRIDGLTNVLRKSSKGKLGIQTAARIKELAANTAGDKNEFYAIQIKLAVEMIRFLNSQIKTYNDEIKSIVDENCPIILSIPGISYVTGGIILGEIGEISLFQSPTKLLAFAGLDPNVYQSGNYSANNLKPSKRGSSYLRWAIHISSSVIIHNDKTFASYYAKKRKEGKHHLVALGHVSKKLIRVIFSILKYDNTFIPNH

SEQ ID NO: 282146 - protein, 291 aa, unidentified
MSQTVQTAVSTVGIDIGKNSFHIIGHDERGAIVLRQKWSRGQVETRLANMPPCLIGMEACVGAHHLSRRLKALGHDARLMPAKYVRPYSKGQKNDFRDAEAIAEAVQRPTMKFVATKTADQLDLQALHRVRERLVSQRTGIINQIRAFLLERGIAVRQGQRFLRAELPRILATPPDVLSPRMARVIEDLTGDWRRLDGRIEGLSAEIGMLARADSGCERLMSVPGIGPIISSAMVAAIGAGDAFTKGRDFAAWLGLVPRQMSTGDRTILGKYPSAAIAICASYSCRRHGLC

SEQ ID NO: 282147 - protein, 393 aa, unidentified
MAGRILDRFSAAHDKAGIEMLITRLRGSGVTEVAIERGGGVLAGALLAAGLTVVVVSSHRVKNLRARYRSGGGKDDRFDAFVLADTLRTDRARLRPLVPDTPATLALRAAVRARRDLVAHRVAACNQLRAHLAVAFPAAVGLFSDLASPISLRFLASFGSQDAAAGLGEQAIAAWLKTIPERGKTAPASVLCARLGAAPDGVTGEEGAAHAVITAALAATAGMLAAQIKILETGIGTQLAAHPDAHIFTSLPRAGRLRAARLLAEIGDCRSRYPGPQSLAALAGVTPVTRESGTRTSHAFRWAANRPLRDAVCDFADGSRHASPWAEAACQAARSRGKDHPHAIRILGRAWIIIIWRCWQEGTAYDPAKHTALQHILAQQTAQAATAGPGDTP

SEQ ID NO: 282148 - protein, 343 aa, unidentified
MERYVGLDVSLKLTSTCVVNQTGAVVREGVVDSDPEAIASFVRSNAPRVVRIGLETGPTATWLWTELKRLGLPVICIDARHAKAVLKMQINKSDRNDAAGIARIMQTGWFKEVRVKDLESHSVRAVLASRALLVKIKRDLENQIRGLLKNLGLVIGRAKFNVFAVRAEELIENSPELIAAVGPLLAARKAIEQQVGDLDRKVHKLARHDLQVRRFMTVPGVGPITALCFKATIDDPTRFKRSRSVGAYIGLTTRRHASGEVDWSGRISKCGDRMLRMYLFEAAGVLLTRVPKWSALKSWGTRLAKRNGLRKAKVAVARKLAVIMHRMWIDETEFNWSTKKAAA

SEQ ID NO: 282149 - protein, 357 aa, unidentified
MEITTIGLDLAKHWFQVHGVDANGRVVVRRRLWRSGVIAYFRSLEPCLVGMEACATAHYWARELIALGHRVKLMPPAYVKAYVKRNKNDAADAEAICEAVARPSMRFVPVKDAEQQSVLMLHRARSLLVRQRTMLVNALRAHMAEFGIIAPQGLRHVEILTKTIAHQQERLPELARAILQMIVGQLNGTMVRIREIEGQLARWHRESPVSRLLATVPGVGIMGASALAATVADPTLFRSGREFAAWLGMTPRQNSSGGKERLGRTSKRGDKYIRSLLTAGAVAVLRHARNRPTRDGEWVRALLARKPTKLAAVALANKTARIVWAVMMRGRAISLKKFSGGRHNHRQPIQHARVKRT

SEQ ID NO: 282150 - protein, 427 aa, unidentified
MSAANETRQQPIAAFVGIDWADQKHDIALRAAGFEAKVERSKIANQPEALSDWVLALRERFADQGKILICLEQSRGALIHFLMGYDCFELYPINPKQLDSYRKAFRPSGAKDDPTDGELLCKYVSLHHQELRPWRPDDEQTRKLALLCEKRRQAVDARSALSNQLKSELKQYYPLALAVLDNDLTTVLAADFLLKWPDFASLKKASAHKLRGFFYGHQCRSEKKIQTRIQLIESAQPLTRDSAIIETGALTAQMLARQLQALAPYIRQYDEQIAQLFSQHPDRVLFDNLPGAGDALAPRLLCAFGSNRDRFDNVLEPLSFFGLAPVTERSGKTTFIHFRWACPKFLRQTFHEFAGCSVRFCDWAAAFYDQQRARGKDHHVAVRALAYKWIRILFRCWKTRQPYDPQRYRAALAHRGSPLATAVKNSP

SEQ ID NO: 282151 - protein, 343 aa, unidentified
MQTITTIGLDIAKSVFQVHGVDAGGQVVVRRQLKRRYVLTFFQKLSPCLVGIEACGSAHHWSRELQTLGHTVRLMPPAYVKPYVKRQKNDATDAEAICEAVTRANMRFVPTKTPEQQSGLVLHRTRHLFIRQQTAVINAIRAHLAEFGIVAPIGRQGVEELLNVVANPNEKRVPELARACISAFGAQLQSIKEQILEFDRLIRAWHRSNEMSMRLDEAPGVGPVLATAVVATVADPKVFRSGRNFSAWIGLVPKQHSSGGKNRLGGISKQGDRYLRGLFVAGALAVIRYAKIHGTKHRPWLTALLARRPTKVAAIALANKIARMVWAMMVKGERYKEPVALAR

SEQ ID NO: 282152 - protein, 424 aa, unidentified
MNFKMQDKQNQLIERISDKHLIVGVDIAQQIHVARAVNFRGIVVGNPISFENNEEGFLKLLNWIQDLKRIKNLNDVIVGMEPTGHYWINLSKWLAKQNIEVVTVNPHLVKRNKENRDNTQSKSDIKDALVIADMVKNGYYSIIRPSSESFEKLRVLMSNRDVIVKRLVLSINQINRWVDVVFPELRQVFNDVSCKGAIATLRLFPTPEELSLMKPLDVQSGWKSLMKRQPGTRKAQLLIHLAKSSIGTKQALEAYKFHLEQLLEEYDLAVKQLDRVEHQVKEVLQQIPFVKNLLMIKGISEISLAGILGEAGDLSGFSHGNSLLRHAGLHLAEASSGKWKGQIVISKRGRSRLRRFLYLATMSLVMNNPEFKAVHFYNVKVKKIKRMKSIMKLIGKLARIFVGIARRNETYCPQKIQESIPLAA

SEQ ID NO: 282153 - protein, 397 aa, unidentified
MTKKHTQTTLDVSIEYAVIGLDLAKYDVSLAAVTLNEGEIIRIDRVTYAELYELADKLSPTLFAIEPCCGYSQLAHELEARGHEVSVISGKVVKMWIDTHMSGQKTDINDALALARLTADPDLRAIRAKSLEECRIMTVQGVRQQLIGQRTKTLVSFKGFAQTWGIHMPAGRRNLKKMREAVEAKADMMGDAAVSALTTMLDRVKTLDDQIHQLDKDLEALVSANANGRLLKSVMGVGTQIAARFITVVGDVKRFDKPRSLVAYIGCVPKKFITGHVNKPRQKKSSAPDLSSKGQGRISRRGDKLLRSLLMQGAACIYMQYCKRQLPDCQLTKWIDKQLAVRKPYGKIMVSLAAKLIRIAWAVLTYGEKFDIHRAGVPRSVLAAMTCQPNNEAAAAA

SEQ ID NO: 282154 - protein, 346 aa, unidentified
MPEVQATLGLDVSDRYSNYCVIDATGQLIEEGRLRTNKEALQKRFEGSPCRVVMEAGVHSPWMSRLFEEMGYEVVVANPRRVQLIAQSTRKNDRADAETLARLGRVDPKLLGPISHRNARAQMDLASIRGRNALVAARTLLINHIRGSVKSTGGRLPACDAHSFHKKVLAHLPPLLEPSLRPLVDAIAELTGRIKELDRLVLELIESRYQEAKCLQQVAGVGPLISLSFVLTISDPNRFKKSRQLGPYLGLVPKQRESGGSAPALRISKAGNGFLRQLLVNGAHYILGFRGPDCDLRRWGLQRAAGGKAAKKRAIVGVARRLAILLHRLWVTGEVYQPLRHLEVAA

SEQ ID NO: 282155 - protein, 420 aa, unidentified
MSFKIIRKNCCGLDVHKTWIYACIGIADSHDRVEYKQARFSSFTKGLNELCDWLAKYNCTDICMESTGKYWIPVFNILEKHNLWVTLSHPKYTKPQTGNKTDRKDAKWICDLYMCGMVKPSFIPPADIRQLRDLVRYRFKLTCMITGEKNRAHNCLTVSNLKLDDVFSDIFGKSSRSITEQILQHPGEFFDVTPFVDDRCKTPIEEIQAAVDGAISPEQAVKLRQCLEHIDELEKHKSEIEREIFRLSDKYEVALNLIRTVPGFDKNPLTAIQVLSEIGSDMSVFPTAKNLVSWAGCCPRNDQSSRKIKSTRISRAGSYFKPVLVQIANALIKSKKHPEFTNRYRRIKARRGHKKAIIAICRMILTAIWHILTDLKPYTPEGFLESRPVNEAKVLTASQALNLMRQRGYIIKDDMSPVMN

SEQ ID NO: 282156 - protein, 342 aa, unidentified
MKHYVGLDVSQRETAVCVVDETGRLIFEGRAKSNPGALAELIRRKAPFAERIGFETGAMSSWLWHELRRIDLPVVCIDARHAKAALSVRMNKSDENDARGLAELVRIGWYREVKVKSAESQQVRSLLVTRSRLIEIRRAIENQIRAMVKEYGLLFDRAIGSMFRRKVAELVDAEHPLKDVIAPLLSIHEQVCGEQEKLDKRIAALARADETSRRLMTVPGIGVVTALTFRHTIDDPSRFRSAATVGAYLGLTPRRKQSGESDTNGKTSKWGDRLLRTYLFEAASVLLHRTKKWCTLKAWGLRLAKRIGMKKAKGAVARKLAVILHCIWVDGTTFEWNAQKTA

SEQ ID NO: 282157 - protein, 403 aa, unidentified
MTMYKTCGLDVHKDTIFCGVFDGKHHQAVKEFSTLTSSITSLGEYLKSEAIEDVAMESTGIYWIPIWNILEDMGFNLTLVNPYLIKQMPGRKSDVKDAQWIAALLHKGLVRGSLIPCKEIRELRTYSRKYIRLQQRLTSILQEMERNLEMCGIRITSFVSNISGKSVMKVIHALVEGENDPEVLAGYIHGRIVNRHKRETIVESLRGHTTPQHLFQLELSLEEYELLCGQRDRCEEEMSRLCHLHYPKELALLQTIPGISLLSAMIVIAETGSDMKAFENSGKFAGWTGLRPRNDESAGKFKSTATTKGNRYLRAILVQVAWAASRTKGSFFKEKFSRLCLRKNRKKALIAIARKMAVLIWNVLYYKEEYNPQKLIVYEPGKVQAKMDYHQKEFKRLENLLKN

SEQ ID NO: 282158 - protein, 291 aa, unidentified
MTNDKYVGLDVHQASTSIVVLDCNGKTISESVVRTRADAIRDFIHGLSGTIHVSFEEGTQAAWLYEVIRRLVAELIVCDPRQNKVLAAGNKGDRIDAKKLAELLRAGLLKPVYHSNQDTKLLKLLTHNYDSLVSDTTRVMSRIKAVFRGQGIPCSGRDVYYKRNREEWITRLAEAGLRTRAQFLFDELEPLKGLRRAAKKVMLKEARRHKAFKILSEVPTLGPIRIAQIIAAVGSPHRFRTRRQFWAYCGFAVVTRSTDSSACEMGHPVELSRPERFRSRLSAWTTWKGSP

SEQ ID NO: 282159 - protein, 338 aa, unidentified
MLHIGVDLHKRFARVVAVDDAGHVVERQTLYSEDQAALVAYFRPKAGTAVVTVESVLGWTWFYELLDELGVAMKLAHPRKVRMIAESTVKTDTVDALTLAQLERTGYLPESYIPSRPVRDSRELLRYRISLVRIRTGLKNRIQAILHKLNVHHRFTDLFGLAGRRFLESLRLRPVYQQQLDGYLELLDEVGPRIEAVTRQIKAELVPDARAELLMSIPGVAHLTAYLLLAEIGDIRRFPSAKKLCAYAGLVPRVRQSADRCWQGHITREGDRFIRWGMVEAACKAPAKDYALGQYCRRIALRRGPLKARVAVARKLLVAVWSVLTYEEPYCATRPTAV

SEQ ID NO: 282160 - protein, 418 aa, unidentified
MGKRKNRVCGADVHKDIIVATILNSDNTEFQGKFGTTSMELGRFRDWLIAHNCEQVAFEATGVYWFPVYDALSPSIDTIVANPWMIKGIPRNKSDTLDSKWIADNCLDGKIKRSRVLPKDDRDLRTLTRARSAYTKTRTQLRNRIHKYLALCGITLSSYISDIFGKSGRHILDGLIESKDIDTILDSIPSGKVKKKRELIKASLGKGLDDVSRMLVKDTLELLHHLEEKVNDTSLEILGRLQERSKDLAIVMSVPGIGFVSASIILAEIGDYHDFQTSEQLVKWCGLAPGLNESAGKKSPCGITKQGSKSLRTILVEIAQVVAKMSNNKLSRFFHRLRARKNYNLAITALARKLISIIFHLLINQELYQENNCTTAKTKPIKKDLLCLSKEEQLKDGVAAIVDAFYHLKKKSSLEGGG

SEQ ID NO: 282161 - protein, 358 aa, unidentified
MNRNTGMNAGQIIGTMNGQQVVGLDIAKLVFQLHTVDMGTGEIINVQIKRAKVLEYFVNKPKCLIAMEACGGAHYWARELLALGHSVRLLHAKIVRPFVSGNKTDVTDARGIWLAIQQPGVKFVGIKSVTQQATLTLHRQRELLIKMRNMQTNALRGLLYEFGAIFAKGKKALFSEIESRLEGLAETLPQMVADSLREQVVRIKAIMADMQAIERRLAQQLRTDEQMKRIAQIPGVGVLTATAAIATMGQASAFKSGREFCAWLGLVPKQTGTGGKVRLGGISKRGDSYVRTLLIHGARSVLRHAKEPGPWLEQLKGRRPANVVIVAQAAKMARTIWAVTAKEQEFQRGFKSVRPHAA

SEQ ID NO: 282162 - protein, 409 aa, unidentified
MLFVGDDWAEDHHDVEVVDESGRRLARKRFPEGVTGFAGLHALIADHVSDEAEPGDVVIGIETDRGPWVTALIAAGYRVFAINPLQAARYRERYSTSGAKSDRGDAHVLAEIVRLDRAHHRQVAGDSDLSEAVKVLARGHQNLIWTRQRQTNQLRSMLREYYPAALAAFPDLAGRDALAVLAAAPTPAAGHALTLDAIIDLLARAGRQRNLESAATKIHTVLHAEQLAALPLTTQAFGFSARALIAVITTLTTEIAVLQDEVDACFGRHPDGEIYLSQPGLGVILAARVLAEFGDDPDRYATGKARKNYAGTSPVTRASGAKTVVLARYARNRRIGDALFQQAFCALTTSPGARACYDTMRARGIGHNDALRRLANRLVSILHGCLRHHTSYDETTAWPTNKQDQQAVA

SEQ ID NO: 282163 - protein, 403 aa, unidentified
MEVLYKRCCGIDVHKNMLVACVFMSVRKKEIRQFGTMTDDILQLTQWLKEVDCEMAAMESTGNYWKPVYNIFEEEQVPIIVVNAQHIKGVPGRKTDVKDAEWIADLVRHGLVKASFIPNREQRELREITRYRQELIEERARELNRIQAVLEGCNLKLGSVITDISGKSGVAILKAIVSGETDPFMLSQLAEGKARSKSAQLQRALRGSIHQHQRLMLKHQLEHVETLSKIIEDIDSDIEKRTESMNRQIQLLDEIPGIGKKSAERLLAEIGIEMNQFKDQSHFSSWAGLVPECKESAGKKMSTRIRKGNKYVKSVLVECARSAIRNKKSYFYSRYQRIAARRGGKRALIAVAHSMLIAVYHVLKDLQPYQELGCDYYDTCNHEKIIQRNVRSLERLGVKVVIE

SEQ ID NO: 282164 - protein, 382 aa, unidentified
MDTSKNWSRIIGLDLSKATFKGCILYGEGFIQRKNFSGEMKRDESGYVLINNMIQAGDIVLMEAGSSSFNLARYLQKNSKASDVVVLNPAHLRIIWDSQKKNDKADAMKIACIARDMRPEAWPRVTVPSEKEQSERSVIMHWIFLRKQETMLCNRFFALFNSLGYPEIDKSRLKKDSDFRIQTINDLLSFNELAFTDAIMLEEQIAIIQRQLSFMEDRLRNICLDHPQQALAWLSIPGIGLVNAATLIAYIGDGSRFSKPDQLMNYAGMVPKQNQSGTVDIKGKITKRGCSAIRRSIVQGAQVLIQLPPTCDISKFAYRKKKECPFNGKVAVAVANRMLRTGLALLHHNDLYRPMIEDGFDRFERKLAGNKLQALVPYLTSR

SEQ ID NO: 282165 - protein, 414 aa, unidentified
MSYKIAGIDVHKKVLMVVVMDASTPDLKPERRRFATMPSDLRQLSTWLRERGVEEAVMESTAQYWRSVWLELEPYMRLELAQAFSNRAPRGRKHDFKDAERLVRRLIANELILSFVPDGEQRTWRNLTRMKLQLTRDRVRLQSQMECLLEEMRIKLSHVVSDLLGSSGLRILRALAQGETEPKRLALLGDDRLKCSEEQLVDALTGRPQPMHRQMLGLQLERLQLLDGQIAKLNGLIAQAMKPHQDAVIRLAEVPGLGVDSAQQVIAEVGVKAGTFPSAAEFTSWVGTCPGKDESAEENHSTRSAKGNKYLRRVLNQAAHAAVKKNGSHFQAVFRRLLPRLGYQSAIWAIAHRLCRVVWKILHEGVRFIEQGTEPDPKAKKQRARMLARALRKLGYEVAITPISLATSQNETRI

SEQ ID NO: 282166 - protein, 349 aa, unidentified
MKITTIGLDLAKNVFQIHGADARGKAVVRKQLKRDQLVPYFANLPPCLIGMEACGSAHHWGRKLQALGHTVRLMAPQYVKPYVKSNKNDAADAEGICEAVTRPTMRFVPVKNIEQQAVLSLHRVRQGFVKSRTAQANQIRGLLGEYGLIVPQGIRQLATRVPALIEDAQGELPQVFRQLISGLLDHLKQLDRQVDELDVQIKAWHREDELSRRLEQIPGIGPTTASALIATIGDASHFQSGRQLAAWLGLVPRQHSSGGKAVLLGISKRGDAYLRTLLIHGARSVLLRAKHKSETDKSGLSSWLVGLAARRHTNVAVVALANKMARIVWAMLAHKREFQANYSGATASA

SEQ ID NO: 282167 - protein, 357 aa, unidentified
MERTSVGLDVHARSVAAAAIDGVTGELRQARLTPSHDHIRSWIAELDGPVAVSYEAGPTGFGLYRSLTAAGIRCVVAAPSKLQRPSGDRVKTDAKDAVHLARLLRLGEVTAVAVPSVDQEAARDLVRAREDCRGDLMRARHRLSKLLLRQGIVYSGGNAWTDRHDRWLRQQRFGNAWTRMAFESDYDAALATTARRDRLDTAIVELAAHSEFTPIVRRLSCLRGVSTLTAFGLAVEIGDWRRFTGNSIGSFVGLVPSEHSSGASRVQGSITKTGNTHARRLLVEAAWHHRAPYRPGKTMRERWDLAPAAARQRGDTGNRRLHARWINFNLRKKRPVIANVAIARELASWCWSLAVLD

SEQ ID NO: 282168 - protein, 343 aa, unidentified
MTKISTIGLDLAKNVFQLHGVDASGAVVLKKQLRRGALEKFFAQLPPCLVGMEACGSAHHWARVIGRYGHEVRLMPPAYVKPYVKRNKNDGRDAEGICEAVGRPTMRFVPVKSVEQQATLAVHGTRALLVRQRTMAANALRAALSELGIVAAQGYEGLRELMAKLEEPGEEIPEVMRGALLVLAKHWQALDADERLLERQIAKAARSDQDARRLMEVPSVGPIIASTVLAKVPDAKVFRSGRDFAAWIGLTGKDHGTGGKHRPGRISKQGDRMLRAMLICGASAYLRHQKARGVSDPWLRELLARRPYKVVMVALAAKTARIIWAMLAKGEAYRDRASASAAA

SEQ ID NO: 282169 - protein, 396 aa, unidentified
MESAVYMGLDIGKSGHYAVAVDASGEPIYQSAVPNDEAALRKLVTWAKEHQAKVVVDQPGGAAALVLKLCWVSEVPIGYLHGLAMARAREFYAGESKTDPKDAFVLADVARAHPSRVVWLEPSSEALAHLGLLCGYDADLRSDANRLTNRLRALLVSHWPALERALGKRLDTRGVLAVVQQYPSGPAVKNAGVAQLTAALKAQRVHRAEAYARELHQAALAQTVTITGSATAAGLIRELAVQLAAIMARRDALDKEIEQSFFGLPEAAILHSLPGIGPRLGARIAVEIGCISRFRTPGHLAAYAGLGPTPWKSGTSINANRPSRFGNHRLKNAFFVAAFASLRHPPSRTYYDRKRAQGKRHTQAVLCLARRRVDVLHAMLSQGIPYRSPAPLAAAA

SEQ ID NO: 282170 - protein, 408 aa, unidentified
MTAQTLVPKRFIGLDIHKHYLVAVGVDANLNQVLGPQRVEYIHLDQWMTRNLRPDDAVVIEMTTNTWQIYDDLLPHVCSVTVVHPPHVALITRSQVMNDKIAATILARLFAKGLLVGIWVPPKDVQDLRALVAQRNKMTRLSTQAKNRLHACLHRHHIIPPVGDIFREEQRGWWMALKLQSAEKTTLLSNWEALAFAEKQVAQIEVTLKELAAKDPRIPGLIQLPGISLINAMTILAAIGEIGRFPNAKKLVGYAGLGGRVHESGQTSRKGSITRAGRRDLRSAMVEAAQVAANSHPNWKAELARLMPRLGRNKAIVAIARKLLISVWHVLADNEVDRFAEPVIVARKLMQFAYLLGKQNRPAELSTGQYVRQQLDSLGISAELTHVPWGSKKKPVPLPPSDLLVKIK

SEQ ID NO: 282171 - protein, 402 aa, unidentified
MEADQLWAGADVGKEHHWVCVVDDKGTAVLSRKLTNDEQPIRELIDEIDALGCDVSWTVDLTTVYASLLLTVLADAGKSVRYLTGRAVWQASVTYRGGEAKTDAKDARVIADQSRMRGADLPVLHPDDDLITELRMLTAHRADLVADRTRTINRLRHQLIAVCPALERVAQLTQDRGWVVLLTRYQRPKAIRHSGVSRLTKMLGDAGVRNAATIAAAAVTAAKSQTVRLPGEDVAAGLVADLAGEVVALDDRIKSTDADIEDRFRRHPAAEVITSLPDMGFRLGAEFLAAVGDPTLIGSADQLAAWAGLAPVSRDSGKRTGRLHTPKRYSRRLRRVMYMSALTAIRCDPHSKAYYQRKRDEGKRPIPATLCLARRRTNVLYALIRDNRTWQPESPPITKSAA

SEQ ID NO: 282172 - protein, 429 aa, unidentified
MDNKDHSRLEDFRQLKNEIRGSKEYLIVGIDIAKDRHHAFFGTATGKTLLKRLVFENTKEGFEKLLVHAEAVKAEHALEQTVFGLEPTADYHKPLGEFLIGEGHRVVLVSGVGVKRNRELLDGRWDKHDTKDSANVADLISQGKCLFYDAPPLPLRELKALVSLKRRLKKQEHGIKARIRNHLLAQYFPELDRYYGQSESNALAVVRWCLNPSVIAAMDYRHFAQLIAPQTRSIAQQERLRSIWQRARDSIGCKAGEALAFEATVMVEELEHIREVIRATDQKIEEICLQFPEYQFLLTIPGFGPDVSSKVLAAIGDPFRFTTGSQVLKMAGLDLSADRSGKTSDAATPVLSKKGKADLRYALYQAALIASSRNRYFMTYYTHTLRGREKEKGIKTKMRVKLAAKLLIIAWTLMKRKEAFNPEYLKTDE

SEQ ID NO: 282173 - protein, 344 aa, unidentified
MLYVGLDLSRKRLDWLALDQEGELAEAGAISPDRDGLAKLGRRLGDQAVLAVIESMSGARFVHDRLELAGWDVCIADAAKARGLAPLACKTDRIDCWVLAELARRQLVPEIWLPDPRVRAERERARFRLHLVKHRRSLKNRVHAILFQHGLPSPHRDLFGAGGRCLLERLQLPEPWASTLRASLTLIDRLDEQIDDCERELRRLGVDHPYVPLLTSVPGVAWVLGYTIASEIGDIGRFASPRKLVGYTGLTPSVEQSGERDRRGPLRKNGPNYLRWALIEAAHTAGRDPRYRPIVERMRARHGRTRGSKIAAIEIGRRLTEAIWHMLTNDQPFAPAGAPTPVAA

SEQ ID NO: 282174 - protein, 343 aa, unidentified
MDHFAGLDVSVKETSVCIVDDTGKIVREVKVASEPEDLVRVLANPIYHFKRIGLEAGPLSQWLYSALAEAGLPVICVETRHMRAVLKAQINKTDRNDARGMAKMMRAGLYLPVHVKTLRSQKLRMLLTHRKLLQSKAIAIDNDLRGTLRNFGLKVGVVRTVKFETRIRELVADVPDIAAMVEPLLIVRRTLREQFCVLHRRLLAIVREDEVCRRLMTAPGVGPVVSLTYRATVDVPARFRKSKSVGAVFGLTCAKYQSGEVDWSGRISRCGDEMMRVMLYEAAQAMMRSKKWSWLKAWAMQIAKRRGMKKAIVALARRLAVIMHRIWVDGTEFRWTREQAAAA

SEQ ID NO: 282175 - protein, 420 aa, unidentified
MAYAVAGRAAGLFKRRHRPLGHRFRWLGGWILLVLPERTQVAWMSLVMGIDQHRAQITAEWLDTETGEVSRARVRPADRAGVRRFLARFAGQQLEVALEATTGWRFLVEELRAVGAVVHLAEPAETAALRGNKRRAKSDRADARHHRELLLAERLPESWIPPDHILDVRARVRLRHTLIEQHTEWQQRIQAVLYHHGCRQRRRLMEGDGREWLASQALSETAREQITVAMAIIDALDVQLAPLTKELCAWARRQAGCKALIDAYYGIGELCAVTVIAELGDCRRFQNSRDAVRYSGLDVTVYQSDRHRAPGHLSRQGPPALRWALYEAAQVARRPGSPDRGYYEQAAERLGGNRACLALARKLLKRCYHTLRELGDDALTPPVERPQPGPGSAAARRASSGSPRSLEPTTTNQRADVLAA

SEQ ID NO: 282176 - protein, 333 aa, unidentified
MNKFTHFLGIDISKEYFDAVIILEGKKELNNHNQFANNAKGIRELRKWLKEFNATSVNTLVCLEHTGMYGKLVIKHLISYEFSLWVEMSLKIIRSIGLQRGKNDKVDAFRIAYYAMKNQEEAVIYKAPRKVVEKIKTLLSVRDKLIQYRGSLSRHTNELKSFDPELYKLAVKHQNNTIKGIATDLKSIEKQLDLLIKEDEILNTIYTQVSSVPGVGKITTLTLICFTNEFSMYATPRQLACYTGVAPFEYTSGKSIKGKPRVNNMANKKLKKLLHMCALTAATYDPELKVYYQRKVEESKNKLLVLNNVRNKLIHRICACIKENRVYKIREVA

SEQ ID NO: 282177 - protein, 364 aa, unidentified
MGWTPPDGIDVPKWGVEHHLREASVSEVSIIGLDIAKHVFQVHGADASGRAVLRRKISRAKVLPFFASHPRCRVVLEACGGAHHWARELAKLGHDVQLIAPAYVRPFVKRQKNDAADAEAICEAAQRPSMRFVSVKSEEQQAAAMVFRGRDLLVKQRTQIVNAIRAHMAEYGWIAPKGLAHMDTLAVLLTDPSAVPEGVRAVCTVLLDSLAQLDRQIAVLDKEIVRRSREDEVARRLMTIPGIGPITATAITALAPPPGTFARGRDFAAWVGLTPRQHSTGGKQKLGAISKMGERTLRRLLIIGSSAVVLQASKRSAPRGSWLEQMLARKPRMLVTVALANKMARIVWALLMKQEDYRAPVAAA

SEQ ID NO: 282178 - protein, 412 aa, unidentified
MPLALPEALFFTGIDWAAATHAVCVMDAAGKITAEFTIAHSADGITQLIRRLARYGDPACIPIAIERPNGRLVDLLLEAGHPVVPVSPNAIKTWREGEVLSGAKSDAGDAAVIAEYLRLRRHRLQVAVPCSGETQALRTVVRTRSDLVDMRVAATNQLSALLEASWPGAKAIFADVESPISLAFLTRYPTPAPAAHLGEKRIAAFCASQGYSGKRPAAELLARLRSAPAGTADPALTTALGTAVLAMVAVLRALNTAVRDLDRSAAARLGEHPDGAIFTSLPRSGQVNAAQMLAEWGDCRQAYGGPDSVAALAGCTPVTKESGKHRAVHFRWACNKRFRKAMTTFADNSRHASPWAAKIYNDARAAGKDHPHAVRILARAWIRVIWPCWLNHTPYDPARHGAAAALAEPIAA

SEQ ID NO: 282179 - protein, 408 aa, unidentified
MRLFVGDDWAEDHHDVEVMGGSGRRLAKARLPEGVAGMARLHAMIGELVGDEVGEDVEVLVGIETDRGPWVAALVAAGYTVLAVNPLQAARFRDRLGVSGAKSDTGDAHVLADMVRTHAHELRPVAGDSAEAEAIKVVARTHKTLIWERTRHTQRLRHALRDYFPAALVAFDDLDASDTLELLAKAPTPALAARLTIGQISAALKRARRKNVADKAAVIQAALRADHLGQPEVVAAAYAASVQALIAVLTVLNTQVQTLQEQVEAHFGQHPAAEIIASQPGLGPVLGARVLAEFGDDPDRYASAKARKNYAGTSPITRASGKKKVALARFVHNDRLIDALMTQAFNALLRSPGARTYYDRQRARGASHNAALRQLANRLVGILHGCLKTGTPYNETTAWSHHINSVAA

SEQ ID NO: 282180 - protein, 441 aa, unidentified
MAVRARDEEIVFPNAAGIDVGASSHWVAVPRHSADEPVREFGAMTGDLNAMADWLLACGVNTVALESTGVYWIPVYEVLEQRGLKVWLVDARQMKYVPGRKSDVQDCQWLQKLMSLGFLRAAWRPDGEVCVVRAVARQSEVLLTEQASWVQRMQKALVQMNIQLSEVLTDVMGLTGQAIIRAIVAGERDPKALARHRNGRVKATAEEITKALTGNWRDEHLFVLRQALAMYDDIGRHLAECDAKVQALLTNLGQSKVDLGKAPRAGSKLRQEFDARQILANWAGVDLTRINGLGLTAVMKILSEIGPDLSRFETVKHFCSWLGLCPGTKISGGKVLSAKTKRSANRVRQALKMAAMSLSRNDSALGAFYRRLCSRMDKPRANTAVAHKLARMVYFMLTRGEAFVDKGQQQYEDQQRQRSVAALKRRAAALGFEINPTMATA

SEQ ID NO: 282181 - protein, 310 aa, unidentified
MGEVNAAIDVGKRQLEVALGSAGERFAENNEPRAIARLCQRLAAAGCARVLIEGGSYQNLLVGALRAAGLPVVIVNPRRVRQFARSTGQLAKTDALDARMLALYGERLQPPVRELPDEQTRALRDLWVRREQLIEMLVMEQNRLEHARQALHHSLRAHIDYLRKQIRQADDDLDRTVRNSPLWDKYELLSSVPGVGPVLSVALLADLPELGRLNRREVAALAGVAPFNQDSGTLHGQRTIEGGRPRLRRVLYAATVAAAQWNPVLRAFHQRLRAAGKPPKVARVAVMRKLLTILNLMLKTNTPWSPPCPA

SEQ ID NO: 282182 - protein, 468 aa, unidentified
MHKEKQKKLNRTKPEKVIVKMKKGLSVVNPHAAGIDIADQEHWVAIHKEDSYHVSRYGTFTRDLDSMVSYLKDNGITTVAIEATGVYYVCLFIKLEEAGIEPYLVNAKHVKNVTGRKQDDTDAIWMQKLHACGLLQKSFQPGFECRTLRSYVRHRKNLVTIGSDSVRRMQKALELMNIKIHTVISDILGKTGQQMIEAIIGGQHDPAELIKYKDRRVKASDEVIIKSLEGIWKEEHLFELKQAYETYQFHQKQIQECDIKIKDQLDKQTAIVKEGEILNEQDKISFNKQKGGKGKGKKTAKKNQYTFDARSYLRKLLDTDICAVPGISDITALEVIAEIGGDVNAWARVNQFTRWLNVSPNTKSSGGKILSSKIMKKKNYAGLSLRMSAMTMARNKTPLGDYYRRMRGKLGGRGAVVATANKIARIIYTMIKHKKEYDISMFKEAQQNYKTRQIKFYEKKIAELKKAS

SEQ ID NO: 282183 - protein, 315 aa, unidentified
MEHSPGAPSFVGIDVSKDRLDVHVLPSRQAFAVARNGEGLDRLIATLHGMAPSLVVLEATGGFELTVAAALTGAGLPLAVVNPRQIRDFARATGRLAKTDALDAAAIALFAERIRPEPRPVAPADAQALAELVARRRQLIEMIGMEANRRRQARAPKVQRTLDAMLKTLEAQLAELDREIDDTIRGSPAWREADDLLTSVPGIGDVTSSTFIAELPELGHLDRRRIAALVGVAPVNRDSGQMRGHRTIAGGRAAVRNVLYMATLSAIRWNPVIKAHYQQLIQRGRPKKVALVACMRRLLGILNAIIRTASPWQTA

SEQ ID NO: 282184 - protein, 427 aa, unidentified
MSGIESGGQEPEFAAFVGIDWADQKHVWCLQGRDSTKCESGELEHTPEAVEAWVAQLCQRFGNRPIAVALEQSRGSLVFMLAKYEPLHLFPVPSTMSASMRKALYPSGSKDDPRDADVLLVLLLQHRNKLRRLSPDTEATRRIQNLVQERRKLVDEKTEHTNRLTSHLKIYFPQMLNWFEHLDTELVCALLERWPTLEELQKVPSSKLRAFFGKHHCRNHELIEWRILAIRQSIPAIRDRAVIEAKSAAVKVIVQLIRILLEGIADLDERIEDTATAHPDFFIFKSLPGAGPALAPRLLAAFGSQRERYRNAGELQTYSGIAPVMEKSGKKQWIHFRWACPKFLRQSFHEWAGHSIGYSVWARAYYRQQRGKGVDHHGAVRALAFKWIRIVFRCWKERVAYDESKYLAALTRRGSPLVAVVAIAKAV

SEQ ID NO: 282185 - protein, 379 aa, unidentified
MVSASTPASLAETASATLFVALELSRSTWLVALHAPLTNKVSQHRLDGGDADGLLALITRKRSQAEEKLGRPVRVVCCFEAGYDGFWLHRWLCARGIENRVLDAASLLVNRRARRAKTDRLDAAGLLRTLMALERGEAQVCRVVRVPTPEQEDARRRSRERARLVVERGQHTSRIKGLLMTQGIRDFEPTRRDWPARFEALRTPDGLPLAPCLRAELLRECRRLWLVMEMIAEVEAELRAVADAEDGPAARLVQLRGIGLTFATVLGNEVFFRDFRNRREVGGYLGLAPSPWQSGAVRRDQGIAKAGNSRARRTAIELAWLWLRHQPESALTRWFHERVGSSKGRMRRILLVAMARKLIVSLWRYVTVGIVPEGAVLKV

SEQ ID NO: 282186 - protein, 482 aa, unidentified
MTERVYKLGGFGGEGVNSAIGIDPDSTGFVCALVKTSKAQVITKRFSVSQNGLSEFLRWVKAEGNPIVGIEGTHGQSRPIEKALRDTGVIFHSFKPADTDKFRKAVLGQNKNNERDAESVARFALALEAQGKLEQYRRVWSVDMELQVLTRRYESLSDQLTAEVNRLWKLLRYACPDLYLLLGGKNEENEQRGKVLKNQGILTLLISTSDIGEWKLLSEEGMLEAMGGGNYKGRGELIAELREAAGSFPSISSGIALVIKGSAQQIQRFKGEQGELARMLESLTEGNLAVQCLKSHRGIATLTAAKMIAEMIDIRRFAREDSLASYSGLGMREHTTGNTTMMIPTRLFNHRLKDAFMTAARNVVFYDPGSHLAGYHRNLLKAGMQPLEATKRVARALVRVLFRELSALNESKEKDLEQEKLKEGEGDMASGVTRSEQGRQSNISPSSQRSSKSKSTKKVKNSKAQVAIINGGRNKQVAKKTA

SEQ ID NO: 282187 - protein, 346 aa, unidentified
MYQDTLIAIDLSKNSFQGCLLDKYHHERFNRKFSRNKLTDWLSRQQPLTVAMEACGSAHHWARLVERMGHRPLLVPTRTVSRYREGHKTDATDARATGVAARQPKVKFVAPKTVEQQGIQGIERIREHFSDHLTATSNMIRALLYEFGLTIPKGISAFKRRVVEIMEDAENDLPMPLRIQLIESWEYYLELEARLKIAKRARDQIIAQHEVCQQLMQLQGVGPVNSLGLYLTLGDRGASFGNGREASACIGVTPKQYSTGGEVTMLGISKKCANKRLRSSLIQGARSVIKALKKRDPRNGMEAWLKSLMARRGEGRAAVALANKIVRLAWAMLHYGENFKLHPDMA

SEQ ID NO: 282188 - protein, 396 aa, unidentified
MQKGKNGTGMKKSSKKTKQAERKAKVARQEELVQLAALVERQPNSLVIGIDLGDKTSSYCVRTRDRQVVTEGVVATKAEAILESFREMPRQLMVMETGTHSRWVAQLLHLMGHEVIVANARKLKLISENNQKSDRVDSRLLSELGCTNVDWLHPVYQRNEGKHCDLLVVRAREALVEQRTGLINHVRGTVKSYGCRIRKCSAESFVGVAGSAIPAALQPASSGVLETLEEIGEQIYRYDAQIEHFCQTKYPETQWLRQVKGVGPVTALTYVLTIDDPHRFGCSRDVGAYLGLVPKRRQSGQRDPQLGISKTGDELLRKLLVNCAHHMMGPMGAESDLRRWGLELVAASLRAGKAKGARKRAAAAVARKLAVLLHRLWVEEEEYEPLRKRKSDEAAA

SEQ ID NO: 282189 - protein, 428 aa, unidentified
MLKQNTEPDPAPDFAAFLAIDWADEEHAFHLQVVGQSKIETGTLEQKPHVLGPWVAKLRERFGGRPIAVGLEQSRGALIHGLMSYDFLVLYPIHPTTVAKYREAFKSSGAKSDPLDAGQILEILTQHQDRLHRLNPDTVETRLLGRLVEDRRKAVDLRTTHVQALGANLKEYYPQALELTNDNLSSRLAGDLLIKWPTFEDFQQAKPSTLKRFYYGHNVRSPEVIERVLTLAQKSQALTTDPAIVESGRRLTQMYARLIQALHPAIADYDQRIQQVFNAHPEAKLFRDLPGAGPALAPRLLAFFGTDRSRYAAAFNVQSFTGIAPVTKSSGKSKVVYARAACPKFDRQTFHEFSRLSVTRCQWARNYVQYYTDKGKKYHTIVRALAYKWIRILFKCWQERTPYNEDKYMETLKLRGSIFATWHLQKKT

SEQ ID NO: 282190 - protein, 344 aa, unidentified
MDHFAGLDVSVKETSICIVDDTGRIVREVKVASEPEALLKVLGNPAYRFKRIGLEAGPLSQWLFSALAEAGLPVVCVETRHMQAVLKAQINKTDRNDARGIAQMMRAGLYRPVHVKTLRSQKLRMLLTHRKLLQSKAIAIENDLRGTLRNFGLKVGMVGKVRFEARIQELVENIPDMAVLVESLLIVRRALREQIVILHRRLLAIVRDDEVCRRLMTTPGVGPVVALTYRATVDVPARFRKSKSVGAVFGLTCARYQSGEIDWSGKISRCGDEMMRVMLYEAAQSMLRSKKWSWLKAWAMQIARRRGMKKAIVALARRLAVIMHRIWVDGTEFRWTREQAAAAA

SEQ ID NO: 282191 - protein, 364 aa, unidentified
MKKLTTKKSMTSKRLERQDEFSSYVGVDLGDKHSCLCILDRWGRIAEELRGRTTVKEFEEFFRKLPRSRVAMEAGSQSRWVSELAGKYGHEVYVANPHKVQYISGGDDKNDPGDAYKLAELSYVRPSMLHAISHRKRQEQVHLEAIRARDLLVRSRADMINAVRGMSKAFAETLVQCSAESFTTKAAGKLPEDLRSATAPLLRVIDQLSEEVAALDQWIEHVARQQYPAYQLLERVNGVGTLTAVTYMLTLGDAGRFQRSRDVGAYLGMRPRQKDSGSSSPQLGITKTGDAYLRKLLVNCAHYMIGKFGADSDLRRFGLRLAARGGKNAKKRAAVAVARKLSVLLHRLWVSGEAYEPLRNSQAA

SEQ ID NO: 282192 - protein, 359 aa, unidentified
MRIIGCDLHSRQQALAMLDTATGEVTKKTLKHEGENVREFYSTLSGPVRVGIEATGSMQWFVNLMEELGIECLVGHPAEIRAAEPRKQKHDRRDADLLLSLLVENRFPAIWLPTKELLDLRALLRHRHQWVRIRTRIQHALQAIALANGLRRGPSLWTQEGQHAIAALPLPPHAAYRRSELQAMYRKFETEIEKLNERVEEQVCGRPRARLLMTHPGVGPITALATEVFLGDPSRFADSKALASYVGMIPSEHSSGGRQRLGGLSKQGNPLLRFLWGEAGIHAVRRDPELQRFYRRKLTQKGLGKSRVAVARKLGIRLWIMLRDQIEYNEFCRRGQKQQTSGDACAGMPGPRYGAKVTG

SEQ ID NO: 282193 - protein, 417 aa, unidentified
MSEYAALVAIDWADQKHAVCLCDQRTGRREHTIVKHTPAALQEWALSLRQRFADQPIAVCLEQSRGPLIYFLLQYDFFVLYPINPATLARYRQAFSTAGGKDDPSDAAYLLDLLEHHRDRLRVWRPDDEKTRTLSLLIEQRRRLVNDRTRFSNRLTALLKGYFPQVLDWFDDIAIILVCDFLERWPELSQLQRAHPATVNKFLRAHHSTSKTTNQRRLAEIKSAFPLTRDPAVITASVLNVKALVAQLRTTIKAIADYDRHLEALCLTHDDYELFAALPGAGLIHAARLTAALGSDRSRWQSVDELLCFSGIAPIIERSGKQFRIRWRYFCPKFFRQTFHEYAAQSIQSSFWARAYYYSQRAKGKDHHAAVRALAFKWIRIIWKCWHTRTPYNEVIYLESLRKKGSPLLNFAADYKL

SEQ ID NO: 282194 - protein, 356 aa, unidentified
MSRDSKYIGMDVHKEAIVIAVLDGSGKLVMESIVETTASSILQFIHGLRGELHVTWEEGTWAAWLYDLLQPQVAQVLVCDPRRNALLKEGNKSDKVDARKLADLLRTGMLRPVYHGEHGLRTLRELARSYQTLSQDLNRVMNRIKALYRGWSIPCAGTQVYAPRNREEWLHKIEHAGVRRRAELLYQQLDGLQALRRTLRPELLAESRKHKAAKLLRQIPCIGPIRAARLIALMQTPHRFRSKRQLWTYSGLGIETRDSAQYRYVGGQLQRTKKPQQIRGLNQNHNHEMKEIFKGAATRASCGVGPLRDFYVALLAKGMKPEMARLTLARKIAAIALTLWKKEGRFDAEQLKPQAA

SEQ ID NO: 282195 - protein, 347 aa, unidentified
MSITMIGLDTAKSVFQLHAVNESGKVEIRRKLQRSELIPFFEKQEARIVILEACGAAHHWARMLTGLGHDVKLIAPEAVRPFVKKGKKNDAADAAALCAAASRPDVKFVPAKTLEQQGVLALHSVRSLLVKQQTMLANAMRSLAAEFGLIVPKGIGKLRELMELVDADATFPKRALQAIRALLDHCGALAESIETFEAEIVAHARHDKTARRLATIPGIGPITASLIAATVADIGVFKSARQFAAWLGLVPRQHSTGGKTRLGRITKAGNREIRTMLVLGATSMINRAPHWNSAAGVWLRGVLERRPVRLATVALANKMARIAWALMTRKEVYHATGRFIASAEAAA

SEQ ID NO: 282196 - protein, 400 aa, unidentified
MLSIGIDVSKGKSTVCGMKPGGEIVYAPFEVQHTIEGMSELVSLLRSSGEEVRAVLESTGSYHCPVVAALLENGIFVSVVNSLRMKRFCSQSIRKVKTDRIDAMQIALYGLAYWQELQPARLPEDTYRELQLLARQYYQMTSLLIKAKVDFNAICDQVLPGMQELMSDHAGRHKLSDFVLRYRHTAHILEMGETRFRKDYCKWAEKKGYRNCERMAALIFATAQNGIPVLPNAPSTQIVITEAIRVLHTVEASRDAILTQMQALAKTLPEYSLVREMPCIGDTLAPRLIAEIGDVRRFHSKRALIAYAGIDAPPYQSGKFCANNRHISKRGNRYLRKTGYEVMQSYVMHKPANDPIFTFIEKKRGEGKSGKLAMVAGLNKFLRVYYGKVTELYRSLPTIE

SEQ ID NO: 282197 - protein, 338 aa, unidentified
MLGIDLGKNLCSLAGLDETGAVVLRRRMKRASVLPFTAQLETCTVAMEACCGAHHLGRQLVAQGHLVRLMSPAYVQPYVKAQKNDERDAEAIAEAATRPTMRYVEIKSEAQLEVQSLHRVRGRLVAERTALINQLRALLLERGIAVPQGRCKLVRYLPEILADERNGLAPRLRQLIEDIREEWRSIDRRIKGYDHELAEQVRNEDTAKRLISIPGIGVLTATALVAAVGNGQTFSCGRDLAAWLGLVPRQATTGGKPRLLHISKRGNGYLRMLLIHGARTALPGLAKKDTPLGRWVKALLARAHRNVVTVALANKLARIAWAVLARDRQYVTVQAIGK

SEQ ID NO: 282198 - protein, 391 aa, unidentified
MIFVGIDVAKNKHDCFITNSDGEVLFKSFTISNNLDGFDKLYQKIESVMEDVSKVKVGLEATGHYSYNLLGYLLDKGLTTFVINPLHTNLYRKSLSLRQTKTDKVDARTIASMLMSDVNLKSYSDTSYHNEELKSLTRYRFDKVKERAKLKISISRLVCILFPELEKLVPTLHQNSVYELLYEFPGARQVANAHLTRLTNLVATASKGHYTKDTALVFREAARTSIGSNMPAKSLELKHTIKLIRELDAEIEEIENEIKTIMDEINSPILSIPGISYRMGAMIIAEIGDFNQFDSPDKILAYAGMSPSTYQSGQLDNCHSKMEKRGSRYLRYALYNATTYVCLWDPTFKAYLAKKRSEGKHYYVALSHATKKLLRVIYQLEKTGQQYIKAV

SEQ ID NO: 282199 - protein, 375 aa, unidentified
MRKLSQRWVGLDVHADTIVVAVAEETGNPAVLETVRTTQELLKVLRRLGTPATLHICYEAGPTGFVLQRELAAAGFECVVVAPSKVPAVPGDKVKTDKRDAQKLARFLRTGDLKAVWVPDARTEALRDLSRCRSAARDALHAARQMLSKFLLRHGFKFAEKAAKWGTRHLTWIESRPFDQHAQQLVLQNYLNEVRREEARLEDLEASLLKEAESWVRRPIVTALTSMRGISTLSAIILCVELGDFSRFESARTLMGFVGLVPSEDSSGKRKSRGRITRAGNSHVRHVLVEAAWSYRWVPRVGIEHRRRLATVDKQTQDLAWRAQERLHKRYMHLSMKGKQAVKVVTAIARELLGFVWDIARRAEGRLDATLIPQP

SEQ ID NO: 282200 - protein, 433 aa, unidentified
MIKINYISTLFVGIDVSSKSNVVYAMDFDENKYIASSFSNNQPGADMLAELISECMRKHPDLNTIIVALESTSVYSIHIANFLSSCELLMPYKPYVYCLNPKMTANYRKTFVGMDKTDAKDAYLIADFARVGRTKKCEPWHGSQYLALKRLTRHRLHLAECITREKTYMVSNLYLKFSELQLLDGDEQPFSNLYGSTSSAVLTEFLSLQEIIDTPEEELLEFLAKKSRNRIADISKTSDLLKKAARDSYRLDKCMYEPLNVSLASSFNCIQTYQNEMKLIDQAIEKCIKGMNPNAFTILKSIPGIGPVWAAGILSEIGDITAFHSSDALAKYAGLTWLKNDSGDFISEDNHISKAGNTYLRYYLGEASNSVRRHMPEYAAFYAKKYAEVTKHQHKRALALTSRKFVRLVFGLLVKNQLYTGEKLDAELNKESE

SEQ ID NO: 282201 - protein, 372 aa, unidentified
MTSVVYVGMDVHKASFSLCALDKDTGEIIRETKCASDPKLVEKFVDRLSEELGPRTEFLTGYEAGVLGFSLSKSLQILGVNCVIMAPSTMYSSGKNKRIKNDKMDAKMIARNLAANTYRSVHIPDEEDDDVKEFMRMRNTQKKSATRIKQQLGALILRHGFQYQGTKTKWTQAHIEWIKSLKLSDTLQLAVDEYLIQLAELIEKIARYDQLIEKFSHQERYEQPVNRLCCMKGLSTMNAMTIQVEISDFERFPSAPAFMSYAGLNPSEHSSGEHTHKGSITKQGNSVVRTTLVEASQALVKGRVGYKGRLVKARQVGQDASVISYADRASAHLQRTFHRMIEAGKPYNVAVTAVARKLAGYIWGMETGRIAD

SEQ ID NO: 282202 - protein, 415 aa, unidentified
MKKHNYRAKKVNDINWLQLREQFAGQTLVFAVDVAKEQQFALLSNTELSESVLIQWNQLEQTTWLINELKQLNALITVVMESTSTYGDAMRYQFRQAGFTIHQASAKRVHDAKEIYDGVPSLHDAKAAWLIAHLYQDGLTKPWHELDDKERELNAYRREYELHESQHKRNQNRLEAFLSRHWPEVLPLLALDSVTLESLLIDYGSPEQIAACAEQAAKDMHRWGKHCLSTEKIEAVIHSAATTLGQPCIEAERRYLQALAEELRHNRTQAKNAKLALEAVVKAEPELKEMGLTVGMVTTAILIGLHLDPRHFGCARSYLKALGLNLKEKSSGQDHGKLKLTKRGSALARKYLYFAALRLINSDPVISAWYQNKVAPRAKLKTVIALMRKLAKALWHVARGQRFDARKLVMTTVVN

SEQ ID NO: 282203 - protein, 367 aa, unidentified
MKTNTTPSPVSTSMPAVVSGFTLGLDLGDRTHHVCVLDAAGQIVRESSLPNTRPALAQLLAEFPRATVAVEAGTHSPWISRYLTDLGATVLVANPRKLHAISRNERKCDRRDAQMLARLARVDAALLHPIQHGSAQAQHALLGLKLRDALVRNRVSLINAIRFTLKSLGHAVRNPSSESFHKAVLADLPADCRPVVQPLLTVLANVTEQIKAMERDLVQRSKKDYPLTQRLQQIAGVGPLTALCFVLKIGDPERFSRGRDVGAYLGLCPRRDQSGGTDKQLRISKCGDGLMRRLLVSAAHYVLGPFGPACALREHGQRLSGTGSAREKKRAVVAVARKLAVLLLSLWKHGTDYEPRVTTSALVLTPA

SEQ ID NO: 282204 - protein, 312 aa, unidentified
MPCFVGIDVAKAQLDIALRPSGERWAVPNDAIGVMTLVDRVQALHPTLIVLEATGGLERAVTSALATAGLPVVVVNPRQVRDVARATGQLATTEALDARALAHFADVIRPTPRPLPDAQPQELRALLGRRQPLIVMRTAEQNRLAGTSARLTKDLEAPMTWLNAGIATLDDDLAALLRASPLWRENDDLLQSAPGIGPVCARTFLLELPELGTLTRQQIAALVGVAPLNCDSGTMRGRRTMWGGRAHVRTVLYMGTLVATRHNPRIKVFYERLLAAGKVKKVALTACMHKFLTILNAMLKQRTPWQAQEVQS

SEQ ID NO: 282205 - protein, 472 aa, unidentified
MLITYLLEAKTPYDSLSHIKACRRAPLLKQYSMTKLVNPMAAGIDISSKDHYVAVPQESFPHVRIFKSFTSDLHRLAQWLCSLGIKTVAMESTGVYWYHLYTILLDYGLEVNLVNAKAVKHVPGRKSDVSDARWLQHLHACGLLNPCFQPDNLTRSLRCYVRERKNIIREMSRQTQRMQKALEQMNIKLANVINDITGKTGRLIIQAVLDGERDPRVLVKHRDKRIKASPETLLKSLQGNWREEQLFCLEQAYAHYLFLQTRLKQCDLAIEKALQRMGKDPCARRALDKDRVRKNQPDFNVKQHLYNALGVEVTKIWGLKSITALTLFSETGPSLKDKFPTEKQFLSWLNVVPNNKITGGKIISSRVQRKKNRAGQALREAANGLWNADNPLGSYLRKKKARSGGGPAIVATARKIAAIYYKMVTEKTAFRPEIMMENQEKYWRNKLNSLEKAKKHIEAQLADYEINTNVVI

SEQ ID NO: 282206 - protein, 312 aa, unidentified
MAEQVVVGIDVSKDQLDLACWPEGLSECYPNSEAGLDQMLAHLQPLTIDLIVLEATGGYQRLAVSTLAANGLPVVMVNPRQARDFAKSTGQLAKTDKLDARGLAHFGHATRPQLRELPDDDQRQLQSLVTCRRQLIEMRTAELNRLQQASCAAMSEDITDHLRELDDRIAAIERQINEMIEGSELWQERIKLLCTAKGVGPVLAFSLVSDLPELGRINRKKIGKLVGLAPLNCDSGKSRGKRKTWGGRAPVREALYMPTLSAIRHNPAIRQMYERLIANGKARMVAVVACMHKLLTILNAMVRDKQPWQPNY

SEQ ID NO: 282207 - protein, 405 aa, unidentified
MQYAGIDIAKRAHVVGVRNEDGTPHGKPFRFANDQQGFASLLKRLAELGAGPDDCLLVMESTGHYWLALWEFAVANGYDVAVVNPVLTDAFRKADTLRKTKTDDIDAFLIAEYARFKGLGPSRVSPEDAEGLKQLTRYRHSLVSERTALKNRLTSVADRTFPELSAMVGGNDSATMLALMGRFGGAAAIARANVRTIEKVMREASRGRYGREEADAVKAAAKRSVGTGFAARALSAEAESLTRLIGVMNEEVKELDRQIADLLDPEVGAILRSIPGVGPVCASQIAAEIGDPDRFETPRQLFAFAGLDATKAQSGQLDGESGQHMSKRGSAHLRYALMTAADKARQNDPYFGDYYHHLTERRGKHHYVALSAVARKLCGVILALLRERRTYERRPPVAYPAEAAK

SEQ ID NO: 282208 - protein, 333 aa, unidentified
MDREYIGVDLHKSFFQACALTAAGERVWEGRFPRTPDGIGRFVARGVDARGAIAVEASGPTWAFVDALASTGATVCVVDPRKTKLKAGYAAKTDRLDARRLADALRRESVVSIYIPPPELRELREMCRGRHQVVRLRTRLAQMIRALLLRCDAGEPPGTRLYSPRALAWLAAVQLGPEATRTLRRLERLYREVHKDAHAADAELKQRAAADPIAVALTGLTGVGPVLAVTLRAEIGDITRFHRGAALACYAGVVPRVDQSADRRYHGRITRSGSPWLRWALVEAASHAIKRPDAVGRWARRLAVRKGAMKARVALARVLCDDVIAAWPRSPSV

SEQ ID NO: 282209 - protein, 353 aa, unidentified
MKKLFIGIDFAKEKFDAAIIEACGLKEFGNREYGTFTNDKKGYRQFFKWVKTNADKSVENEWLFCGEDTGSCSLGLSKWLYGKGLDIWIENAYSIKHSSGIQRVKSDKADSSMIAEYAWRHQDKAVLFEPLSESLSQLREVFLYRHKLVQQHIAMDVRKQDKEAAEPSKAISFIKRKSKHLMSEIDNAIKECDLMIDRIIESDAELKENYAIITSIKGVARQNGACLLIFTNNFRRFDLDARKIACYYGVAPFGKDSGTSIHSPAKTSHFANKLIKSLLGQAAHCAKKFNPEIREYYNRLIGRGKKPQVALNNVKNKLIRDYCGSCAKEGLLRPKTYMFYNAKFTDVKKMLNS

SEQ ID NO: 282210 - protein, 474 aa, unidentified
MKAKCRPMQGKWHEMNRKQRREIMRKIQSDDLRLEVLHPDAAGIDIGNESHYVAVPPTRDSQPVRRFGCTTAELKAMAGWLKQCGIRTVAMQSTGVYWIAVYDILEAADLEVYLVNARETKNLPGRKSDVQESQWLMKLHTYGLLRNSFRPPREIRTMRTYWRQRNDLVRTAGRHIQRIQKTLTQMNLQLANVLSDVSGMTGQAIIQAILAGERDPHKLAAFRDSRVKASEEQIARSLEGHWQEDLLFVLKQEQDGYEFCQKQMAECDRRLKQYLQQREDRSQGATLPEEMRKERRRKKKKGNAPGFELRAELFRMTGTDLSQIDGIDVTTAMTILSEAGWDMNKWETEDHFVSWLRLCPDNRISGDRIIGKGRLPTSNRVTLALKMAASTLRLSNTYLGAQFRRLRSKLGAPIAIKAMAAKLARLVYRMLRYGMQFVDRGAKFYEAQHRKQQINYLKWKAAKLGFQITEAPAA

SEQ ID NO: 282211 - protein, 338 aa, unidentified
MVLIGIDPHKATHTAVAVDTEEAALGELTVKADCHQVERLLKWAIDFPERRWAVESANGLGFLLAQQLVAAGEDVVDVPPTLAARVRVLGSGKTQKNDPNDALSTAIAAMRAKRLRSVVAENYGGVLRLLVDHHHDLGSLRTQAVCRLHALVRCLIPGGTGLRLSAARASVVLRSVRPTNAVDAERKRMALGHVADIRRLDAEIAASKARIVTAVAASGTSVTELYGVGPVVAAFLIGHSGDMARFVNRDHYASYNATAPIEASSGPRVRHRLNPRGNRRLNHAIHVIAICQIRHPGEGRRYFDRKVAEGKTTKEALRALKRQISNAVYRQLVNDSTR

SEQ ID NO: 282212 - protein, 373 aa, unidentified
MSQLNDLSRSLTSLEQDNAIIAVIEMSQSSWLVAGIVPGIERHPLKKLEPNEGELLRLLMRWRAEATKMGCTITRIAVAYEAGRDGFWLARWLRAHDIETYVIHPTSVAVSREHRRAKTDRLDTGLLKRVFIGWLRGEPDHCHMVTIPTLAEEDAKRPNREREGLVRERTRIVNRMKSCLARFGVRSFKPTLRKAPERLATLVTPEGVPLPANTLLELRRDMARLRFIMDQIKEVEEARGQRLEQAPQEKSHAMVRLLARVIGVGIETADMLVHEILSRSLRDRRAVARYAGLTGAPDESGSRRQEKGLAKAGNARVRRGMIQLAWRFLLFQKDSALAQWYRTRTESAGKKRKTMIVALARKLLIALWRKKRI

SEQ ID NO: 282213 - protein, 406 aa, unidentified
MVGSIDADGLFVGLDWGNAHHQLCVVDGAGRVVEQAKLTHDLAGLRELQTRLRRRGEVVGVAIERGEGLLVESLQAQGHRLFCVSPKMSARARERYRLAPTKSDAFDAFVLADSLRHEHRHWRPLATPSPLLAELRALTRDRERLVWNQRDVENQLRAIVQTYHPAVLHLFSSLDRDIALAFLRDYPTPAQAGRIGAARMAAFCCRHGYSGRTRPELLVQRLRANLLAASSGTTKGKAFSAALFVDQLDLLNTQVRAITKRVRDRLAAHPDAAIFLSFPGMGEISAATMLAEMGEDRARFPTADVLLAETGTAPVTRSSGRSRTVRFRYAANKRMRHAIDWWTFVAVRENPWARDAYQQARARGQQHNRALRGVGARWIRILWRCWKDGTPYDPTRHLKNEPKTTA

SEQ ID NO: 282214 - protein, 405 aa, unidentified
MDGATPARVAGLDWASRLHMVCVLDPDGQVRARFQVPHTGKDLRGLTRRLAKLAVGRVAIERPDGPVVQALLDAGFEVVVLPSRQVKHLRGRYASAGNKDDRFDAYVLADVLRTDGHRLHPLLPDSPETAGLRAVSRARKQLVDQRVALANQLRANLEVAFPGAAGLFAEVDSPIALRFLAQFPSAERAAWLTQARLGGFLRRVGYCGRVPTAELYQRLVHAPAGLQGSHGDACAAVTLSLVATLRAVRAQIEELDGEILERLATHADGHIFTSLPRSGRVRAAALLAEIGDCRQRFPDPTALECLSGAAPSTRQSGTHTTVTFRFACDKKLRQAVMDFAGDSRHANPWAAHLYHQARARGHRHPHAVRILARAWLRVIWRCWQDGTAYDPARHGAYQRLIAKEA

SEQ ID NO: 282215 - protein, 279 aa, unidentified
MMAILKQVAGIDVAQKELVVSLGRLDHELSLEIFDYKVFANDQKGFKELVRWGRKQAGNNIKIRYVMEATGVYHEALAYYLTENNSEVSIVLPNKISNYFRTLDVNTITDKTASEAITRFGLERQLEVWQKPKKVFRELKQLTRERNQLIADRTVLKNQLHAENAEAFPNRRSIDRVNKRIRLIDKQDLEIKAEIAAIVKKDQELAKKIDTMTTIPGVGQLTAVIVLAETNGFELIKSKKQLVSYSGLDVKLKDSGTSVKGKPRISKKGNRHLRKAADE

SEQ ID NO: 282216 - protein, 419 aa, unidentified
MSFKILKNNCCGLDVHKTWIYACIGITDSNGRTEYKQARFSSFTKGLQELCDWLVKYNCNDVCMESTGKYWIPVFNILEKNNLWVTLSHPKYTKPQKGNKTDRKDAKWICDLYMCGMVKPSFIPPADIRQLRDLVRYRFKLTCMITGEKNRAQNCLTVSNFKLDDVFSDVFGKSSRSITEQILQHPGETFDVAPFVDGRCKTPIEEIQAAVDGAISTEQAVKLRQCLNHIDELEKHQAEIEREIFRLSDKYESILNLIRTVPGFDKNPMTAIQVLSEIGGDMSVFPTAKNLVSWAGCCPRNDQSNHKIKSTRISRAGSYFKPVLVQVANALIKSKKHPEFTTRYRRIKARRGHKKAIIAICRMILTAIWHILTDLKPYTPEGFLESRPVNDSKVLTTSQALNLLKQRGYIIKDNTIPVT

SEQ ID NO: 282217 - protein, 377 aa, unidentified
MSKVRFLGLDVHADTIAVAVAEPDGEVRSLGVIPNRLESIRKMVAKLGPVKDLKACYEAGPTGYVVYWQLTALGVACEVVAPSLIPVKAGDRVKTDRRDATKLARSYRAGDLTAVWVPDADHEALRDLVRAREDARQDQHRARHRLSKFLLRHGRRPPEEVKKHWTLKYLTWIKEQVHFDQPALEATLLDYVHEVDHMAERIQRLEKAITEAIQKAPPVIRAVVEALQALRGVAQITAVTVVAELGTLSRFASPRHLMGYSGLVSSEFSSGNRIRRGAITKTGNAHLRRVIVESAWAYQYRPWLGGFLLKRQQGLDQEIKDIAWKAQWRLHTRYKKLSAAGKKKPQVVTAVGRELLGFIWAIAVQTEAQFQPQTKAA

SEQ ID NO: 282218 - protein, 337 aa, unidentified
MEDTIYDHYIAIDWAAKNMAIARMTKKSNKITAIDVPSDIKELQFYLKNLKGTKILAIEETTTSQWLYTELIDHVDKIFICDPHRNKLLLEGPKTDKIDACKLVQLLKAGLMKQVYHSTDKFLYLRRIVSGYEDLIKSGVRLKAQRYSLLRFCGKSGYEKENVKLDCKSDQFVLDGLQRQIMAYEQEKQGYEKEFKRLSRTYPEIRNQKSLPGIGDIHAVKIVARVVTPYRFADKGHYLSYAGLIKLEKVSGGKSYGKKNPRYSRQLKSAYKLGVMAALGGNNPINAYYEYLIRENGYTPYNARHKACRRLATLSFGIMKSGKKYQAHKRNGAGINK

SEQ ID NO: 282219 - protein, 350 aa, unidentified
MTSVARHFIGVDLHKKALQFCVLDDRGNLLHEQAVKIAPDAAGEMVFNSFRPWQGTCRVAVEAVGMNRWFVNGLQARGYDVVVADPIKLNLKVLGKKTDKRDAREIARRLWLGDIDRDAKTWYPDDAVYGDRKLVRTRRQMMKHRLALNNEIRAQLRAYNISPPAKTLHCKKGVAGLLAIEMPNPALTACLHALTRAMADLEVSIAELTEQIEKRVASDERLRTLQQQLPSMGALTTLTLVCELGDVHRFRNAKAIASSGGVVPRVYQSADTAHHGRMTKRGSRSLRSVLGQWSVRLMAHDDLVSAWAAPKKQRLHKNKVRMMLARKLLVGVAVSLRRDEPFDLRRCLGR

SEQ ID NO: 282220 - protein, 418 aa, unidentified
MLSARWFVGIDWASATHEVCVLDREGRVVERCQVQHTAAAVQTFVDALVARADGDPSAVAIGIEVPRGSVVEVLVERGFAVDAINPKQLDRFRDRFTAAGAKDDRRDALVIGDSLRTDPQAFRRVRLDDPLVIQLREWSRVDEELGLELTRLTNQLRDLIYRSGAGLLALCPAADEPWVWAVLEAAPTPAAQQKLSPARVRQLLREHRIRRISATEVHAALQRPAIWTAPGVVEAVAAHMAVLLPRVTLVAAQRRDAARQLTRLLDALEAQRPAAGDQREHSDVAIVRSMPGIGTRVAARMLAEASQPLVARAYHVLRACMGVAPVTTQSGRRRTVSMRYACSVRLRNPASHWARTGMQHDPASRSYYAALRRRGHSHGRALRSVADRLLRILVTLLSRGQIFDPHHVPSPQPVAAGA

SEQ ID NO: 282221 - protein, 366 aa, unidentified
MNFCGIDLHSNRFTCCFLYEDGNREKITFDVSSDAIERFKSMLNSNTSVIIEASTNTFKFIESIKDLVSEAVIVNTYKMKLIPMSGKKTDKVDAEKLAVYLKMCSSSGENLINPVYIPEGSIQELRSLFTTYNLMKRHIGAIKNRIHSLLKQHLQPFTKEYIFGKKTRSHIRLITINPVADYQLKLLFEELEAKERLSDDIEGRIKLEGAKYIKEIEILTSMTGISVITALAIIADVATVERFPNAKHFTSYLRTAPEVDCSNETVIVKGTNKNGRKLSVTLISQSLNHFRDSNPRLKSWYNKKEEHHFKKGKLRMALCRKVLAEIYHMLDKHEYHYYRNADLHNKKMKEYYQFLEVNGIELRKTA

SEQ ID NO: 282222 - protein, 315 aa, unidentified
MYTIGIDVSKKELVSAKVTKRGEIIERWTIPNEPVAIAHWLDALPHALLGAEATAEYHNELARQCIARGVPFKLLNPIVTKQFTRATVRRRKTDRSDAEVIARCLLNGDGYLLSMESLSPVRRLLRTAEKIRRIDCTLLRMEAQMRSFVKEADTGPLLRCARSVRKAAHAMQKQGLAMADETQTKLLSSIPGIGKTLSATISSEIGDCGRFGSGKALVAFAGLDPRVKQSGSTLSRNTRLTKRGSPYLRRAFFLAAMIGERSDPELKTYYEKKRAEGKRFTEATVANARHVAHRVYAVMKRGTPYVKKELSTTDT

SEQ ID NO: 282223 - protein, 341 aa, unidentified
MNEISIIGLDLAKNVFQIHGSGSDGSVALRKKLNRGRLLEFFAQLPICVVAMEACASAHYWGREIGKFGHEVTLINPSYVKPFIKRQKNDAADAEAIAEAASRPTMRFVSVKSAEKQASSMAFKVRDLLVRQRTQTINALRGHLMEYGLIIPQGIKHIPLLHEQITTNSDLPEVARVLCKGLLEQVVFLSEQIAVLEKELRTRARQDELASRLMTIPGVGPICATAIEALAPAAETFSRGRDFAAWIGLTPKQNSSGGKDRLGKVSKMGQRDLRRLLVLGATAVVRWARRYEAPAGSWLARMLLKKPPKLVAVALANKLARTAWALMARGGVYQAPASGTV

SEQ ID NO: 282224 - protein, 489 aa, unidentified
MKANSKENSKELRKTKKATQPTTQQPQWHRMNRKQRRELARSIQSEKISLEMVHPDAAGIDIGNEVHYVSVPPNRDSEPVRHFGCTTAELKAMADWLKQCRIRTVAMQSTGVYWIAVFDILEEAGFEVYLVNARDTKNLPGRKSDVQESQWLMRLHTYGLLRNSFRPAQEIRRLRTYWRQRNDLVRTASRHIQRMQKVLTQMNVQLANVLSDISGMTGQAIINAILAGERDPRELAAYRDWRIKASEEEIAAHLQGNWQEDLLFVLKQEQDVYQFCQKQMSECDRQIEHYLSQMEDRSQGANLPIEKRKNRLRKKKGNTPGFDLRQELFRITGKDLTQIDGVDVMTATTILSEVGWDMSKWKTENHFVSWLRLCPDNKISGAKIIGKGRLPTNNRATNALKMAASGLRTSNTYLGAQFRRLRTKLGASVAIKAMAAKLARLVYRMLRFGMDFIDRGAEFYEAQMHDLQVHHLRWKAAKLGFQLSEIPAA

SEQ ID NO: 282225 - protein, 357 aa, unidentified
MPTMPCLPAEVILGVDTHRDTHAVVLVDLLGRLVAAETFPTTRRGLRALIAWAQQRGTIRQAGVEGTGSFGAGLTRALRLEGIEVIEVTRALRVGGRHQGKNDTRDAEAAARSVLSGQATAEPKTRDGIVESIRVLRNTRASAVKARTQAILHVKNLIVTAPDELRESLVGLTNRQLVLRCAQMRRSQRRDSLALTRYALRSLARRHQDLDEEITELDGLLADLTAQAAPRLLDQPGVGPEIAARLLLVAGDNPTRLRNDAALAALCGASPIEASSGKTVRHRLNRGGDRQGNSALWLIANNRMIHHAQTRDYLTRRTADGKSNKEIRRCLMRHIARSIFPLLIADLRDAQQQSALT

SEQ ID NO: 282226 - protein, 343 aa, unidentified
MGEVSTIGLDIAKSVFQIHGVDVDGAVVMRKRISRAKLLEFFATLPACLVGVEACPTAHYWSRRLGALGHTVRLMPPSYVKAYLKRSKNDANDAAAICEAVTRPSMRFVATKSEQQQSGLMLHRSRQLLVCQRTMLSNAIRGHMAELGIICAKGRNGTAELLEIIADEHDDRIPSAARFSLDVLARQYAVVRAQIVAIEKRIHAWHRSSEESRRLEEIPGVGPIVATALVAEVGDWKEFTSGRSLAAWIGLVPRQHSTGGKERLGRISKQGNRHLRWLLVAGAMAVIRYARQHGTKRPWLARLMDRRPLKVAAVALANKIARMAWAMMVRGERFKEPKLLPAA

SEQ ID NO: 282227 - protein, 412 aa, unidentified
MQVLYPRCAGLDVHKDTVVACVRLALENKVVTEVRTFATTTKGLLALADWLTENECTHAAMEATGVYWKPVWHVLSDGEVDLTLANAAHVKNVPGRKTDVNDATWLAELLAHGLIRGSFVPDGPTQDLRNLLRTRKQLVRERTRHVQRIQKVLEDANIKLSSELSDLLGRSGRAMLEALVAGESDPVRLAALADPRVKSPREKLCEALRGHVREHHRFLLRLHLGQINAIDAAVATLDHEVDGNLAPFRTAVELVSTANGISSLSARTIIAEIGTDMSRFPTDGHLLSWAGMCPRNDQSAGKRRSTRLGKGSPWLKTTLVQCAHAAARKKGSYHQALYHRIRARRGAQKAICAVAASLLVAIYHMLKNGTPYQDLGADHFDRRSKPQQTRRLLRRLEQLGYAVKIEPVPTAA

SEQ ID NO: 282228 - protein, 418 aa, unidentified
MKSNKTEKIKTINQKTLIVALDIGKKVHYGYFRTPKNKDIKPFPIYNTGQSFKKFWKKLCRFKEEHMLDEVVIGFESTGPYAEPITNYLRKRPVNLVQVNPMHTKRVKDLTGNSPNKTDKKDPRVIADVISLGHSLTVIMPEGAAAQLRRLTHARERSIERRAAMNNQLQHLVFVIFPELVSIIKPSTKTGMYLIENFPDPESIVSIGIGVLCNIVRKISRGRISIERAEKLYNAAKQSVGITEGKESVILETSHLVFNIENENRYIKSLEEQMVEQLEQIPYSHSILSVKGIGHVTVAGLIGEVGDFNKFNTISEITKLAGLDLYEISSGRHKGQRRISKRGRPMMRKLLFFAAINMVKSNGIMHEKYKKMLDRGMLKMKALIAISRKILGFIFAIVRDNTTYIVNYTKQNHYKLAA

SEQ ID NO: 282229 - protein, 371 aa, unidentified
MKKNTIFVGLDVHKNSIDIALADSGRDGDVRFYGSIGGDLDSLHKVVRKLQSTGPTLRFVYEAGPCGYEIYRSLKKQGVDCSVVAPSKIPRKSGDRIKNDRRDALNLARLHRSGELTPVYVPTVEDEAIRDLTRGREDAVKALRTARQVLLAFLLRHGHRYSGVSYWSKTHWSWIAGIKMPHRAQQITLQEYVHAVHEQLDRVQRLTRQIQELVPQWNLAPLVKSLQALRGVSLIVAATTVAELGDLARFDSAKQLMAYLGLVPSEHSSGGTVKHGSITKTGNSHVRRALTEAAHTYCHPARESRVLLTRLAGLPQEVRQTAWKAQVRLCGRFRRLIARGKNRNTVVTATARELAAFMWAIARSLLPVIET

SEQ ID NO: 282230 - protein, 344 aa, unidentified
MKISTLSIDLAKNVFQVAGFNSNHKRECNKRLNRAKLNAFLANTPPCRVVMEACYSSHYWGRVFSSYGHTVDLIPAQHVTPFVRGNKNDSNDALAIYEASLRPHIKFVPIKTEAQQEILMLHKIRERLLQNRIAATNQLRGLLVDFGYVFPVGIKAFEQGIIALESDSELRPQLRIMVSDIYTEYKTLVKRIKAIEAMLTAHVERDTNAKILHSIPGVGVLNASAYAASIGNGQAFKSAKELGVWLGLTPKQYASGDKSKMSGITKRGNSYLRKQLIHGARALIARSHHKTDALSQWINQLREKKHFNCVVVATAHRLARLMWILLTKQTFYSPQYVQNTHKDA

SEQ ID NO: 282231 - protein, 326 aa, unidentified
MSDSTMPLGIDISKSDFHVALLKSAKRSKYEHFSNDADGFEQLSQWLEQPGVGAVHACLEATSIYGHALALYLHQQGHRVSIVNPLRVKGYSKSQLSRTQSDRADAKLIAQFCRDLKPALWQPSATEVSQLQGSTRRLDALEHMLTEEKNRLKVTPQDFEADIVAHIQFLQGQVETVKKRLHEHIQAHESLQHQQALLTSIVGVGERTAARVLAEIGAIEHFDSARQLAAFAGLTPQEHTSGTSVQGKTRLCKIGNRRLRKALYFPALTWWRRCPQARASGERLLAAGKAKMQVIGALMHKLIRVIYGILKSGKPFDPDKLLPRTT

SEQ ID NO: 282232 - protein, 383 aa, unidentified
MSMLADEVDVVIGIDTHKYTHTAAVLSASTAGVLAKMTVASATAGYEELYRLGQRYGERRAWSIEGTASYGAGLTEFLQARAERVIEMDHPNRAKRRNGVKNDEVDAVRAAREALARDKLAEPRCQGQRACLATLLCVRASAVEAAKQARTQFQSLVVTSPEPLRERLGKPKGLALLRAGADLADQDGDSPELRLMAGALRALARRALSLYQEAKSYQASMRTIVEEWHPELLAQSGVGTIVAATVLCAWSHPGRFRSEASFAMLAGSAPLDASSGLSTHHRLSRCGDRQLNRALHVVVITRWTKDKATIAYCQKRRADGKSDRETKRCLKRYVARSLFRLLESSSTGTETMVSGQGESHPLALSEPGVKVSLHRAPTGRPGG

SEQ ID NO: 282233 - protein, 351 aa, unidentified
MNATTVAVDLAKNVFQLAVADASWRVLERHRLTRGQFERWFANREVNLVVMEACGSAHHWGRWLRSRGIAVRLLPAHYVRAYVKRNKTDAADAVALLEACRAADIRPVAVKSVEQQALQALHRTRCAWMRTRTSRINTLRGFCREFGLVVPEGAVRGIAQIARFIADERSGLPALLRGPMRLMLEEIRLLEARIGSLEQELAALAKESPACGFLTSVPGIGLMTSTAMLAAVGDPKSFDSGRRYASFLGITPREFSSGEKRYLGRISKRGDRYIRMLLTHGARSLLHSATVARRAGRPVDRLKAWALAVQARTNHNKATCALANKLARIAWAVWTKNENYRAEPAPAIIGN

SEQ ID NO: 282234 - protein, 347 aa, unidentified
MLIIGCDFHPGFQQVAIFDKQTGEYQEKRLSHREEAEFFYRSLSGQGVRVGMEACGHYPWFERLLTECGVELWLGDAGKIRASEVRKQKTDRRDAEQLLRLLVEERFPRIWVPSLEERDVRQLLVHRHKQVGTRTQVKNQLQALALSQGVQRKRKLWTQAGRAELEQLELLPYAAARRQQLLATLDRLEQEIGELNQRVEAEVARRPQAVRLMSHPGVGPVTALAMVLTLGPAERFQSPKQVGSYFGLIPSEYSSGGRQKLGRISKQGSSLVRFLLVEAAQTAVRKDAELSRFYRRLAARKHRALAKVAVARKLAVRLYLMLREDWTYAQLCRAMVSVSPSHSVVES

SEQ ID NO: 282235 - protein, 443 aa, unidentified
MSRKQRTHLRGKRGQAFADRIRGIPLDRILCVSLDISKYFHVVMIHNALGEIVTPTFEIDIFQSGFDRLCQAIDEAVAQTRAQVVLVGMEPTSHYFENLARHLRDRSRPVTLINSYAVKQNRDQQLMRREKTDEIDVAAIGDLLRRGEGSPFQPASGVYLQLQQLDRVRLSKVKMRTMLKNQILGHLDRIFPGLVLIGAEATRRYTPLFTTDFWACQTLQHLIRVCPDPHRLIAMTPTDLVAAFHAQNFALGRLRAAKILGYARKVLLPDAELAAIRCELLRHDLALLEEVERHIADLEDRLRDLLTQTPYTIWAKLKGLSDIQVASLAAAIGDPAHYAYAGQVFRRTGLVSGRNDSGIRQRKGQGKRVVKTGDGYLRRAVLNGLRSLILHQPVLRRYDRRLQQSKPKGVAFVATARRALGILWATLRDQHPATLILQRGAMM

SEQ ID NO: 282236 - protein, 352 aa, unidentified
MNQLKYIGMDVHKAMTVIAVLNSEGKELAEAIIETKSTTIIDFIHGQRGRLHVTFEEGTQAAWLYDLIRPHVASVLVCDPRKIVTQGNKADKIDARRLAELLRTNGLTAVYHGEQSTRAVKELTRSYQEMIEDSTRVKNRLKALFRARGIDCTGSAVYSPDERKNWTDKLEQAAVRVRAGRLWEELDALEKLCKQAEDDLKTEARKHAAIKILQGIPGIGPMRAAVILGIAGTPHRFRSKKQFWTYSGLAVVSKITSEYQLVDGRISRSKKQPLVRGLNHNYSRTLKDVFKGAAKTAAAGAWKSHFDAMVANGQDSSLVLLTLARKIASITLALWKRGEGYDSKKVKILHAA

SEQ ID NO: 282237 - protein, 412 aa, unidentified
MNIRVEKACGIDVHQAFLAATILTSAGIKDTREFSTCLDGLLDLRTWILENGCQRVAIESTGVYHIPTYTILEGKVETIVANPLQIKYIPGRKNDDIDSEWIAEVCLNGQIKPSYIPCREIRDIRELTRTHVKFSNTRTVVKNKVHKILQRAGVRISGVLSDIFGKSGIIILNGIMDGKSIEQIFGCLTDKRMKNKRPEIKDAIKGELSQNDIFVIKECLETVKFLDTKIKEFDSRIFHSLTGLQKELDILMSIPGIGFTIAAAAIAEIGDIKVFPKPKNLVSWSGLAPAVSESAGKSSNGHITKHGNKYLRTILVQAANSIAIGKPNKLRFFYQRIKAKKGHKKAIVALARKLASIIHHLLANDEKYSEEELKEKKVKLPKFVSLQDLDMDGMIKILCEAGYTINKSSSAG

SEQ ID NO: 282238 - protein, 344 aa, unidentified
MKLIKKVIGVDISKDSFTVRFGTLDEELKQLISKPFKFANNLKGFNQLLKTIGKVHYFDLTGPSSKDIPVWFVMEATGVYYENLAYFLAENNFSLSIVLANKVKNFSKTLDNKSKTDDIDAAIQTQYGLEKKLKPWNPPSAIFKGLKELTREYQSIKESLTCIKNKLHAKSHSYKANEDTVKRLNQHKKFLNQQLKQVKDQIKKLIESDNDFNERIKTIITIKGVGLITVITAVAETNGFALIENKNQLTSYAGYDIVHDQSGTHKGKTKISKKGNSNIRSAFYMPALSAARYNNNLKRLYIRLCKTKINKKIALIAVARKLLILIYCLWKKNEKFIQNYPNVN

SEQ ID NO: 282239 - protein, 391 aa, unidentified
MIYVGIDVAKDKYDCFITNSNGEVLFKAFTFSNNQDGFNVLYQRIESVMEDVTKVKVGLEATGHYNYNLLGYLIDKGLTTYVINPLHTTLYRKSLSLRLTKTDKVDARTIAYMLMSDVNLKSYSDTSYHNEELKSLTRYRFNKVKERAKLKTSVSRLVCILFPELEKLVPTLHMASIYALLSEFPGAKHVADAHLTRLTNLLSDASKGRYGKDTAITFREAARASIGSNMPAKSLELKHTIKLILELGSEIEEIENEIKIIIDEINSPILSIQGINYRMGAMIIAEIGDFSRFDSPDKILAYAGFSPSTYQSGQLDSAYSHMEKRGSKYLRYALYNAAKYVCHWDATFAEYLAKKRAEGKHYNVAISHAVKKLVRVIYHLVKSNQQYIKVA

SEQ ID NO: 282240 - protein, 391 aa, unidentified
MIYIGIDVAKDKHDCFITNSDSEVLFKAFTIFNNLDGFNDLYQKIESVMDDVTKVKVGLEATGHYSYNLLGYLIDKGLPTYVINPLHTNLYRKSLSLRQTKTDKVDARTIAYMLMSDVNLKSYSDTSYHNEELKSLTRYRFDKVKERAKLKTSVSRLVCILFPELEKLVPTLHMASVYALLSEFPSAKHVATAHLTRLTNLLSKSSKGRYGKDTAITFRDSARASIGSNMPAKSLELKHTIKLIQELDSEIDEIENEIKIIMDEINSPILSIPGINYRMGAMIIAEIGDFNRFDSPDKILAYAGFSPSTYQSGQLDGAYAHMEKRGSRYLRYALYNATKYVCHWDPTFAAYLAKKRAEGKHYNVAISHAVKKLVRVIYHLEKTKQQYIKAA

SEQ ID NO: 282241 - protein, 375 aa, unidentified
MERVYIGLDVHKEQIVIGVAGIGDAHLYGQCSSDIRCFMKAMRGVERKYAVERAQLRICYEAGPSGFALARHLQRIGYAVEVVAPSLIPTKAGERVKTDRRDAKKLARLYRAGELTAVHIPDAEDEVIRDLCRARTDAIDDQTRAKHRLMMFLLRNGHRYGGKTAWNDAHRRYLRELVLVDPIQKLILEEYLQAVDRARDRVESLQEQMRLRLEGWSRRPFVEALQGFKGFQLVAAMIVTSELGDLSRFKHPRQLMAYLGLVPSEHSSGNSRHQGSITKTGNSHVRWILVEVVHAYRLPPKVSTHLTLRQEKLHKSINALSWKAQKRLHARYVRLLMRRLHENKIKVAIAREMAAFIWELGRVMQDADVHTTVAA

SEQ ID NO: 282242 - protein, 481 aa, unidentified
MAKRKTSTFERLQQKGLSRKELQRRLYSADPGLTIVHPNAAGIDIGKQSHYVAVPGDRDRQPVREFGAWTAALEAMAQWLQACGIDTVVMQSTGVYWMAAYQVLQQRGLDVQLVDARGTKNLPGRKSDVQECQWLMKLHTYGLLRRCFLPPERIRRIRTVWRMRGQHVADAGRAVQHMQGALLQMNLQLPNALSDLSGVSGQAIIRAILDGERDPEKLAELRDGRVKASREEIVHSLQGDWKEDLIFELRQAVAAYDFFQQQIAQCDQQLQAYLAALPSGEQKASGSSAGLASAAEKTGKGRSAKRQRKPKGNQPAFDLEAELQRILGVNAKSIDGLDVMTIQTVVAEVGPDLSAWKSEAHWSSWLNLAPKRDVSGGKVIRHTREHRTNRVGNAFRLAAQALFRSESYLGAKFRYLRAKLGAGKAVKAMARTLACLYYRLVTKGQAWLDRGTEAFEQQKQDRELASLQRKARSFGLQVVPV

SEQ ID NO: 282243 - protein, 353 aa, unidentified
MLIIGCDFHPSFQQVAIFDNQTGEEQVRRLGHREEAEQFYRSLAGQKVRVGMEACGHYPWFERLLAELGFELWLGDAAEIRARVVRKQKTDRRDAEHLLELLRSGRFPRIWVPSLEERDVRQLLVHRHKQVQARTRVKNQLQAMALSQGVQKKRKLWTAAGRSELEKLELLPYAAERRKQLLQALDGLEVEIEQLNRRVEQEVQQRPAAVKLQTHPGVGPVTALAMVLTLGPAERFASGKQVGSYFGLIPSEYSSGGQQKLGHISKQGSSFLRFLLVEAGQTAARYDAELGRFYRRLAVRKHRALAKVAVARKLAVRLYLMLREDWTYAQLCRAVVQASPSHPVVGGQNRTFE

SEQ ID NO: 282244 - protein, 345 aa, unidentified
MNYMGIDHHKQGSHVTVLDEGGKDVKVGWVRNTNRDMEDFLEELEDEIKAVVEAGRSSYAMVDLLEDLGIEVAVAHPSDVKAIAKAKIKTDKRDSRILAHLLRANLIPAVYRRSGRNRQEQRVMRQRMFFVRMMTRVKNRIKALLAQQREEVQRELEKVRDIFTKKGVEVVKEIELGGTDKQLLEEMFEFYWHLKERIKRSDEMMLDLYKRLPEAKIIDTAPGFDKFFSVLVATEIGDVRRFESDKKLHSYAGVIPSTHSSGERTYHGKIIKQGNRWLRWAVIEAVQPACKKDFDIRRFYQKHAKRKGHNAAKVATARRLLTIIYKMLKERRDFIPYKRDKSAAL

SEQ ID NO: 282245 - protein, 327 aa, unidentified
MTVDTLGHLEIPTTPAGYRWLLRWAQGLGDPAPRFGLEGTSSYRAGLARHLRRAGCSVIEVNRPNRQTRHARGKSDPVDAEAAARAVLSGEAAAIPKCDEYRVGMIRTLRVARRSAVQSTTQVTNQIKALIVTAPAELREQLRSLTGGALIETLAALRPGPITTPTAATKMTMRALARRHQYLGEEITALNAELDRLTQEVAPDLCALKGVGTDVAGALLVTAGDNPERLRSESSFAHLCGVAPLPTSSGKTTGRHRLNRGGNRQANNALWRIVITRLACHQPTKDYVARRTQEGLSKKEIIRCLKRYVAREVFHVLVSTRKLAEAA

SEQ ID NO: 282246 - protein, 370 aa, unidentified
MRIIGCDLHARQQTLAMLETATGEVMNLTLMHEDNSVREFYSKLPPPVLVGIEATGSMQWFLKLMDELGIECRVGHPAQIRAAEPRKQKHDRRDADLILKLLAENRFPAIWLPSQELLDLRALLLHRHHWVRMRTRIQNALQAIALANGLRRGPSLWSYDGQAKIAFLPLLPHAAYRRNTLQAMYKTMESEIESLTKRVAEQAGNRLGAQRLMTHPGVGPVTALATEVFLGDPQRFTNSKALASYVGIIPREYSSGEHQRLGGVTKQGSPLLRFLWGEAGAHAARHDPELKRFYRRKLVHKGLGKARVAVARKLGIRLWIMLRDEIDYQEFCRRGQMQQKTVRPVAGMPETGNGAKSHRQGDEATRLPGS

SEQ ID NO: 282247 - protein, 346 aa, unidentified
MNKFSKAKSDGNVCTGMFVGMDLHKNYLQLAVLDGKGKVLKNSRIHNDLSKVGRFFDRIGNSSDVKVVMESSCVWYNIYEYLSEERQLDVSLSNPFKTRAIASAKIKTDKLDAVKLADLLRGGYIAKCYVPDRKIMDLRQLVRHRIVLVRMRTKLKNKIHGITLMQGVRITDTSAFSNNYVQKLKQLNDYRIDAYLRLIDSLDSEIKKVSKEIQSRAEKEDVTKLLVTIPGIGYYSALLILSEIGDISRFPDSYHLCSYAGLVPTTHSSGGITYHGAITKTGSKHLRWIMIECVYTHMRISKNSNITRFYTRLAKRKGNSKAVVAAASKLLKVVYWVMKEKREYHV

SEQ ID NO: 282248 - protein, 312 aa, unidentified
MELFVGIDVSKAVLDIAVAPTGEAWSVTNSTEGMQQLVRRLGEISPKLIVLEATGGLERRAVAALAGASLPVVAVNPRQVRDFAKATGQLAKTDAIDAAVLALFADRIRPQVRPLRDEETQELEALVVRRRQVVDMITAEKNRLIAAPPSKRVRTAIGKTIKWLQKQLEEIDSDLDNAVKGSPIWREKDDLLQSVPGVGKVLSRTMLSLVPELGTLGKKQIAALIGVAPLNWDSGLHRGRRSIWGGRAQVRSVLYMGALVAARFNPVIRAFHARLVAAGKLPKVALVACMRKLLTILNAIVRDRTPWTREAA

SEQ ID NO: 282249 - protein, 358 aa, unidentified
MSVYVGIDVHRKRSQVAVIDSGGEVLANRNVPNGTETILGVIGGLPPGTPAAFEAAFGWGWLLELLEDYGFDPHLVHPLQCKAIASARLKNDKVDAAILAQLLRADLLPEAWIAPPAVRQLRALLRHRAQLVRVRTLLRNRIHAVLADHGHDRPSGCWSGPGRGWLASLPLPPVSREVIEDDLALIDALQVLIDRLDWEVRQHARSDPRVKILTQLPGVGPFTALVILAETGDITRFASARKLASWAGLTPTVRGSDRTVRHGHISKQGSAWLRWILCEAAQTAKRHPDFAASYQAIARRRGKKIATTAIARKLLARAWHLLADAERTASHQATATTSAAAPPAGMPATSREGSPSPG

SEQ ID NO: 282250 - protein, 376 aa, unidentified
MTKIIRIGIDTSKSVFVLHGVDAAEQPVLRRKLRRSQVLEFFRKLEPTKIGMEACGGAHYWARELQALGHEVVLLPPQYVKPYVKRNKNDAADAEAICEAMSRPTMRFVPVKTTEQQAALMLAGARDGLIARRTQLSNTIRGYAAEFGLTTAKGLDKIEPLLARIAASAELPKLAKELFAVYGRDYAQLQRQIMKIEARLMAWHKDNELSRRLVEVPTIGPIGATLLAMKVTNPHIFRCGRDFSAWIGLTPKDHSTAGKTRLGVITRAGDEALRSVLVAGAMAVIQQAQKGRGYSPPWLVELLKRKPPKLAAVALANKMARVVWKLMVSGERYNPARIEAQLAARERRGAALCGGSAPRPSLASRTSRAVVAMTEA

SEQ ID NO: 282251 - protein, 337 aa, unidentified
MNNYIGIDVAKATLQIYIPKNDLAIEITNSERGLKTLYSKLKKQYKKEIGDIVFVYESTGSYSTYLEQFSESKSIKCFKVGAYQSASFSKVVKNRNKTDIVDARMLSKMHIIANDEDIKIPSRDVKAHQIRSYIKYYQSLIKEEIRSKNYLEAATFNLEDKFVLNQVKKKIKNIQTEQVDIINKTMKIINSNEKYKKAYENITSIKGVGEKSGIILLYLFLRYPNASRQHITALCGLDPIQRSSGTSVQHKERISKQGLSLVRAILFMPTMTAILYNREMKLIYDRLVDRGKPKSLAQIAVMRKIILLAYSLYKNDERYDEDRYLNFTQIKVDEDME

SEQ ID NO: 282252 - protein, 397 aa, unidentified
MIAVGIDVSKSKSTVAILDSYGTVLATPFNMAHTQPEMTALASRLKEFNEPVTILLEYTGHYHYPVLKKLQEEGFPVCVVNPYQMKKYGDVELHKAKTDKKDALRIATFALEKSYRLVPYSFMEQKYEDLKFLSRQYQQRISFIVKLKVQLINLLDQTMPGITKILELKSRNPEKCALLLFIKRFKSFDEIQRIGKTRFLSAYTTLMKKTPDRYAPKKGLAIFELARESITTRGEDPYIWAAQDQCVDLLSTAQNAADEIITQMQNIAETIPEYNVLRAMNGVGDRLGPVILAEIGDIRRFHSAKALNSFAGNDAPPYQSGQFESRNRHISKRGSSALRKACFEVMQALKLTKPQDDPVYLFMLKKEQEGKPYNVAKMAGVNKFLRIYYARAMELYR

SEQ ID NO: 282253 - protein, 331 aa, unidentified
MKNVTQTIGIDVSKLTLDVCMRTTAVHKQFSNDTKGFKQLICWVIKQKSDLESSLFCFEHTGWYCLMLSYFLYENKCDYCCINPIEIKRSMGLRRGKSDKADAWEIANYAWLRRDELIPSIPPAKNLLELQRMMALRDQLVKQLTACKNLNSGMQEITVNRSKDISLGILSKSMRHLEKQIKAVEKAMDGLISQDESMVANYKLSKTVKGVGRVLAVQMLLHTHNYTRFASPRQFSAYCGLVPYPYQSGTSIHGRNKIHPISDRKMKSLLSMSAISAIQHDNELKLYYRKRVEEGKPKMVVLNIIRNKIVSRVFATVNRGTPYVEINKFLA

SEQ ID NO: 282254 - protein, 462 aa, unidentified
MKKKAQTTKKQKNKKNKVSVDQNWEPINPHAAGMDVGSREHWVALPADRAGEKVRRFGALTPDLEALADWLKAAGVTSVAMEATGVYWIAPFQVLERRGFKVLLVNAKQTKHVSGRKSDVLDCQWIQRLHTYGLLGGSFRPADPYCVVRSLLRYQGELVAARSVQIQHMQKALLQMNLQLGHVISDLSGESGLAILGAILEGERNPLKLAALAHQRIHSSREQIAKALIGDYRSEHLFVLKTAFELYHVYEAKITACVEELGRELSHLPDRVNVAAKPLPPKAKGKKIDEALRLGLYQKMGVDLTAIEGIGATAALTMLTEVGPDLSGFKTEKHFTSWLGLCPDNRISGGKVLSSHTRPVVNRLSDSLRLSAAALEHSASALGAYHRRMKAKLGAAEGITATAHKLARILYRLVKHGEDYVREGLEKYEQKYQEQRLKRLQKQAQSLGFQLVEAQTVAAAVS

SEQ ID NO: 282255 - protein, 325 aa, unidentified
MAKRITVCAGIDTGKRKLDVAIDGSCEQLQVENTAEGHKVLLEWLQRHKVKRIGIEASGGYEQPVVAALRRKRFVVVVFQPAQVRAYAKFHLQRAKNDKIDAALIAACTAAVKQIYPAPDPRLSPFAEQLTMIDQIGEDITKLKNRIETCRNERIRAVWKEDIARLAKRERTELKALVAAIRRCPDLAERLELIHSVGGAGLPTAVAILVRMPEIGQLTREQAAALAGLAPYDDDSGDQVGARHIDGGRERLRRALYLAALPASFRWNPQLIALYQRLRAAGKEHKRALIACARKLLIFVNTVVARGTPWQGEPPAARTANPSTA

SEQ ID NO: 282256 - protein, 310 aa, unidentified
MEPIFVGIDVAKDRLDVHVQPSGQAFSVSRDDAGLAELVRRLQPLGATLIALEATGGYEVVVAATLAAAPLPVAVINPRQIRDFARATGRLAKTDALDAQAIAGFAAAVRPAARTVADADARLLGELVARRRQLVDMLGAEHNRRRLIEPPALKRRLDAHIRWLERALRELEGDLDTTVRASAIWRATEDLLRSVPGIGPITAYTLIADLPELGRLDRRKIAALVGVAPINRDSGTLRGRRMIAGGRASVRHVLYMATLTAIRHNPVIAAFYHRLVSAGRPGKLALTAALRKLLVILNAILRDQRPWRPA

SEQ ID NO: 282257 - protein, 341 aa, unidentified
MTIVGGFDLHRRQLTYDYLDLDSGAVERGRIVPADREHLRQFLARFQGNGEVTFAVEGCTGWRYVVEEGKRAGIDVHLAEPAETANLRGRKHRAKTDRADARHLRQLLARGDLPESWIPPDHVLEARARVRLYKDLDEERTSWLQRVHATLYHQGVPVIGSLTNEEGRARLGSAELSSAARQAVAMGVRQIERLDGELVPLRAELAGFARRQAGCRELRTTHFGIGPVTSVAIWAEMGDTRRFASSDDAVRHAGLDITVWASDTKRAKGHLARQGPPTLRWALYEAAVCSSRPNSPDHDYFLAVKHRADGHLAVISVARKLAQRVHHTLRNLGDQAWLPAR

SEQ ID NO: 282258 - protein, 336 aa, unidentified
MPMNQLGIDVSKNTLDLCLLREGIKGRIKTRKLKNTADAAKVVAEWLKKQSCELGEVHIIMEATGVYHEPLAYGLHFAGARISLANPHRTREFARGMNILTKNDKVDAWMLACYGSLKEPEAWTPPPESVRYLRALLRRRDALVADSTREKNRLEKSVFTDSPDAVRASIENMLQELSNEIEHLDVLIQEHIKTHPELNQDFRLLTSIKSVGYLLGLNMLAILKSHSFESAEQAAAFLGVVPVERRSGTSVKGKPKLSKIGPPEIRTKLYLAALCGLRFNPVMKQMYTKLCQRGKSKMCAIGALMRKLVHWCYGVLKTQLPFDAEYNQQSYYKTIF

SEQ ID NO: 282259 - protein, 337 aa, unidentified
MQHIAIDLGGKESQICVRDETLRIVDEKRYPTRRLGDYLAKQPASRVIVETSAEAFAVADLARQGGHDPRVVPATLARTLGVGARGIKTDRRDAQVLSEVSCKVDLRSVHIPSEQARAWRSICNARDALVASRTKLINTVKSQLRCKLVLTGARTSGILPEKIRQHWRDLQGDVPDHVERLLVVIDVLNQQVKLADKQVRELAKSSEVCRQLMTVPGVGPLTAVRFVATIDDQSRFSTAHDLQSYLGLTPGENSSSTRVRRTRLTKAGSPQMRFLLVQAAWSAMRWAPDHPMVMWANRVAQRRGKQIAAVALARKLSGILFALWRDGSTYDRTKGID

SEQ ID NO: 282260 - protein, 362 aa, unidentified
MRKNSKFGSAIPSQMTIGLDLGDRYSYFYTLDAAGENIESGRVQTTRSALEKRFRNGEVARVVMEAGTHSPWVSRLLTEWGHDVLVANPRQLALIAQNDSKDDPIDAELLARLGRVEPQLLAPIVHRGAEAQADLAVIRARDAVVASRTQLVNHVRGAVKSFGARLPKCSPRSFARKAELEVPEPLRAALEPVLQVIGEMTEQIKGYDRQLETACQEHYPETELLRQVGGVGVVTALAFVLTLEDAQRFRRSRSVGSFLGLRPGRDKSGAQDPELRITKAGDRLLRRLLVGSAQYILGPLGPDCDLRRWGLKLASRGRKNAKKRAVVAVARKLAVLLHRLWVGGEVYEPLRLAPPAAVATSA

SEQ ID NO: 282261 - protein, 426 aa, unidentified
MADTNHPIAALHWVAIDVARYWNAVLVETASGQRHRFRMTNSAADMQHLIDFLRGLGGRCRVGLEPTGDYHRPIAHRLLTAGFDVVSISSVAQSRFREAMFNSWDKNDPKDAAVILEMLKQGRVQRYVDPLLAGHHDIQELSKTYYQISRARTKVQHAIINHHVPLYFPEMHKYWCSTRNEWWVKFMIEFPTPAHVRQHTCEEFIERASALVGRRVHRVAKLTEIWETAADSGALPHDLQSVAVQTFRFTLRHYQQLNDLRNQLEQQAQDLLANDADYNNLMSLPGVGPITALTILAEAGNLRRFGHHRQFLKFCGFDLAKSQSGVHRGREQLSKRGNARLRLAFWLAAVVAIRIRENSFREKYDRYVSTNPTDPDLKRKALTAVAAKMARVAYGMIKKNQPYRRFFEQSLPSGSIPCREAVGAPT

SEQ ID NO: 282262 - protein, 399 aa, unidentified
MLKGYDEVAVFLGLDVGKEGHHAVAQDRSGRKLLDRALPNDEAKLRELYGRMKAHGPVLLVVDQPATIGALPVAVALDEGVTVAYLPGLAMRRIADLHPGSAKTDARDAAVIANAARTMPHTLRALQLDDETIAELTVMSGFDDDLAGQITATSNRIRGLLTQIHPALERVLGPRLDHPAVLDLLETWPTPAALAAAGKARVRTRLLKKAPRLGGRLAEEIFAALAAQTVVVTGTNAAGVVLPRLAAQLAALRQQRAEVAEKVEELVAAHPLSKVLMTMPGVGVRTCARILTEVVCKDFPTAGHLASYAGLAPVTRRSGTSIRGEHPPRGGNKVLKRSLFLSAFAALNDPVSRAYYDRKRAQQKKHNEALIALARRRVDVLYAMLRDNKPYANPTPAAA

SEQ ID NO: 282263 - protein, 452 aa, unidentified
MMSRKPVLLLYYLWLVYLRECESVGSCHSVYSWIGFVPSCHASLHDLISTVENRVFYERRSFLMTLYVGIDIAKYVHVASIYDPSTGELILDSLHFDNNLKGFKLLLSKLKSLHDSDVVIAFESTAHYHQNLFNFLSDQNYKCYLINPYLTSRFRSVSLRNAKNDNIDSRAIAYFISLKHKDLLEEEFQMNELKELCIHRDDLMKQSSALKTKLLTYLDRVFPELESIVEKSGIHSKAVRAILKDYPTAKAISSVRVDHLIKLASDASNNRFPSDKVRKIKEAARSSVGFDSLALALKIRQTIQSLESLEKQIDEVEFSISSLPTVMDSPLHKLKGINSIEIAYILSAIISITRFSSEKKLVAYAGLDPIIRQSGTWQASRTRMSKRGNKLLRYALIWTANNMRKHDSALKDYYEKKKSEGKSHYNALGHCAAKLCRYIFFILNHPDLDFVM

SEQ ID NO: 282264 - protein, 447 aa, unidentified
MDREISRLEEFWRLRKEIRSSEDTLVVGIDIAKDKHSAFLGTPAGKTLYRRLIFENTREGFEKLLLQVRALQVQHGLNQVLFGMEPTANYHKPLGEFLINEGHNVVLVAPEAVKKNRSLLDGRWDKNDGKDCGNIADLISQGKCLYYEYPSLELRDLRNLLSLRRKLKKLEHGVRMRIRNHLVAQYFPELDEHCHWGEHEGLAMVRWCLDPAVVAELSDSELLARLHTQGRTLAQRRRLSALRQKAPTSIGCRFGPSVEFEGRMVVKLLKEIRQTLSDTEEKIEQVCLKFAQYPCLLSIPGFGPTLSAMVLGAIGNPWRFRSGPQVLKMVGLDLSASQSGKSKHGLPSISKKGKAELRYALYQAAWIASSRDKHFIAYFTDQLRGREKEKGIKTKKRVKLAAKMMMIAWSLMKKKESFDPRYLLSHEPVSSNDGGIPRVMSNGDRGL

SEQ ID NO: 282265 - protein, 343 aa, unidentified
MQAVTTIGLDIAKSVFQVHGIDAEGNLVVRRQLKRRYVLSFFEKLQPCLVGIEACASSHHWSRELQALGHTVRLMPPAYVRPYVKRQKNDAADAEAICEAVTRANMRFVETKTPEQQSCLMLHRTRHLFIRQQTAVINAIRAHLAEFGIVAPVGRQGVDELLRVVADPSDKRLPEVARACVAALGSQLRMLKTQILQFDRMIMAWHRSNEVSKRLDKLPGVGPALATALVASVADPKAFRSGRDFSAWIGLVPKQNSSGGKARLGNISKQGDRYLRSLFTAGALAVIRYAKIHGTGHRPWLTALLARRPTKVAAIALANKLARMAWAMMARGECYKEPVALAA

SEQ ID NO: 282266 - protein, 386 aa, unidentified
MDHVAIDLGGRESQICVRNATNDIVLEKRLATARLDEFFRTLPTSRVIVETCAEAFAVAGQAKDAGHDVRVVPATLVRSLGVGHRGIKTDARDARALSEASARVELASVHIPSELSREMKACAGMREVLVRCRTQLVNNVRGWLRGRLIRGLTASTANFPARLRAHFAQQGRELPPYLERQLDTIDGINEQIAAADAEIKQLAKDTEECCRLMTVPGVGPVTAVRFLAAVDEIGRFADAHRVQSYFGLTPGEASSSDTKHRTGLTKAGSSVVRWLMIQAAWSAYRTRPNDPMVLWAKAIAERKGQSNVAIVALARKLVGVLFALLRDKSTYNASRASTRRAEPSPPKAIVSGAKLVREARAGRASSPPSSARPPIRGRSETAAKAK

SEQ ID NO: 282267 - protein, 353 aa, unidentified
MKSIVKQSVGIDVAQDELVVCIGRMYDNWEAELYAHKKFTNTDKGFAGLLNWVNTQTTAQVDIRYVMEATGVYHESLAYYLDEQGCAVSIVLPNKISNYFRSLDVKTITDKTCSQAIAQFGLERKLENWKRPKAVYRRLRQLTREREQIVQERTVIKNQLHAEQSEAMPYRKSIERIKQRIALLDKQDKEIQEELGAMLKEEQEVQSMVVILCSLPGVGLLTAAIALGETNGFELIRNKRQLASYAGFDVKEKESGTSVKGKPHISKRGNKYLRKAMHLPALAAIRHDQRFKAVFARLVCKHGIKMKAAVAVQRKLLEMMFTLISKKMNYDKDYFTAPQGEAAVILKEEGLKN

SEQ ID NO: 282268 - protein, 381 aa, unidentified
MKRIIYVGMDVHLSSYTMCCVEPSFKDEDKIFGHMRLEPSVSSVKLYLTKIAERINDPGRSIHFICGYEAGFIGYSLYHEMNAAGLTCVILAPSTMPQHPGHRIKTDKRDAEHIAKSLAYGTYRAVHIPTAEDEQTRDYLRMRNDHQLALKKVKQQINAFCLRLGKHYTSGRTKWSQAHLHWLRNMELPALHREILDEYLTTYETTSTRIQAFDQRIEELASRDRYHEPVKQLSCFIGIKTYTALSLLAETGDFTRFARAEHYASYLGLTPSEKSSGETTRRGNITRAGNTQMRTLLVEAAHCMARGRIGYKSKVLRKRQEGNSPQVIAYADHANERLRRKYYHMIRHGKKHSVTIVAIARELACFIWGMMNGCLTARPAG

SEQ ID NO: 282269 - protein, 338 aa, unidentified
MPLYGGIDLHANNSVVVLLDEQDQVIYQRRLSNHLPTILEQLAPYHSDIKGVVVESTYNWYWLVDGLMEADYRVHLANPAAMQQYSGLKYTDDHSDARWLAQVLRLGVLPAGYIYPKAARAVRDVLRKRAHLVRQHTANVLSVQNILARNTGSRFSAKRIHEFTKADLEGLLPEANQVLAVTSSLALLDCLSQQIKTLEKAVTKSLKHTPAYEQLLTVDGIGTILAQTIGLETGDIGRFPTVGNYASYCRCVKSTKISNGKRKGQGNVKNGNPYLEWAYMEAAQFAIRFNPTVQRFYQRKHAKSHLMVARKAVAHKLSRACYYIMRDLVPFAVHKAFG

SEQ ID NO: 282270 - protein, 350 aa, unidentified
MVVVGADVHKRTHTFVAVNEAGRKLGEKTVMAITAGHAEAVMWAREHFGADVVWAIEDCRHLSARLERDLFALGQKVVRVPPKLMAQTRASARTRGKSDPIDALAVARGFLRESDLPVASHDEVSRELKLLVDRREDLVAQRTATINRLLWRVHELDPAHAPKARSLDLAKHRGILRDWLDTQSGIVAELARDELADVTRLTETINALAKRIGERVRTVAPVLLALPGCGELTAAKLVGETAGVSRFKSEAAFARHAGVAPVPVWSGNTRGQVRMTRSGNRQLNAALHRIAVTQIRLDGLGRTYYRHRLAQGDSTPEALRCLKRRLARVVFGHLHTDHNNRQKPCQMAAA

SEQ ID NO: 282271 - protein, 344 aa, unidentified
MLHARLDLSRRRLDICLLDEYGGLVAETAAPPDADGLRGLAERLAGQRVRAVIESMNGARFVHDSLEEHGWEVLIADAQKVKGLAPLACKTDKIDARVLAELSWRDLVPAIWLPDPTIRRERELARYRLHLVRHRTTLKNRIHATLITFGHPCPVSDLFGLAGRELLDRLAIPDPWRRNVDVSLGLIDDLELQIARLTVELKRQGADHRYIPLLVTAPGFGWINAFTVASEIGDIERFASPAKLCGYTGLCPRVIQSGSTDRRGPISKHGPRYLRWALFEAALNACKHPLYAERYQRTKRRLGRQRGPKVAQIDLSRKLTEAIWQMLTRNQPFAPAGAPCRLAA

SEQ ID NO: 282272 - protein, 392 aa, unidentified
MDKVWAGIDAGKEFHWAHVLDASGTELLSRKVENDEADLLGLIDEVLALAEQAVWAVDQPGGSAALLLALLWEREQRVVYLPGLAVDRARDAYPGESKTDARDAHVIADQARMRPNLGVLAPSEGDLAELQLLLARRRDLVTDQTRSISRLRDALVSLFPALERALDFNNKGALTLVAHYQTPATIRRVGLSRLTCFLKNRGVKGAEGVARKALTAAKAQSVILPAQSVAARIVAELAGEVLALKESISTLDGELEKRFFARPEARILASLPGMGPLLGAEFLVTVGDLSAFESADRLAAYAGLVPAARDSGKRTGNDRRMRGGNKVLKRVFYQSAFASLRSSPESRTFYDRKRREGKRHTQSLIALARRRVNVVWAMLRDGTTFQKSPSAA

SEQ ID NO: 282273 - protein, 319 aa, unidentified
MVDRGRFRTNPQGVEKWFKNLAPVRVAMEAGTHSIWISEQLQLLGHEVIVANVRELRAISHSDRKSDQVDAEKLARFARLDPKILRPIAHRTLQQQQALTVIRAHDLMVRLRTAAVNAVRGLTKSCGHRMPASTTACFAKRGLAMLPAGLAPALGPVLEQIAEMTTKIKQYDGQIRQLSQTEYSETQALLKVNGVGPITALTYVLTLGDKQRFQRSRDVGCYLGLRPRRSQSGDRDPQLGITKAGNGYLRSLLIECANHILRPPGKDSSLRRWGLALAARGGKKAKNKAVVAVARKLAVLLHRIWVTQEPYIPFYAEAA

SEQ ID NO: 282274 - protein, 328 aa, unidentified
MLGIDVSKETLTAAFVTAETRHCAWEMTAPNTAQGIRQLLARTAPTDAWVVEPTGVYSQAVVRAGQAADRAVLLAQPKRAKAFLAAVQPQAKTDRVDSRGLALYGLSAALRPFPVKSEAMERIAQLLTARKGISESLARLRQQREALPHAAAPLAAAITALAQQQRAVDRQLAQARTALPVVTALQEVPGIGPVTATAVAACLTTKRFDHPDQFVAYIGLDTRVRESGQQQSRRALSKQGDAERRRLLYLCAQANLRSRDPENPFKRQYEGEKAKGLTTTGALCAVARKVGRTCWSLERHGTRYAATRVHHQPTMGMTDRTVECSKTP

SEQ ID NO: 282275 - protein, 376 aa, unidentified
MMECRCEGSEVSNPPRGGRRPWSLRLEQPSVSFGTAAAGTHDRTVARLPIARTRQVTVSKIICGVDVASRSLQARIGPEGPAGRFANTAKGIAELAVFCRQHQVELVAMEATGGYEKQPFALLWAQGVAVAILNPRAVRHFAEGMGWLEKTDHIDAGMIAWFAQVKRVAAMAPLSTEQQRLKALVTRLRQLTAMRTAQRNQQRLVEDPLVLKSFKRVLAVLAAQMRQLELAIAELIAADPLWHKLDQTFRSIKGVADRTVANLVAEMPEIGTVSNKAISKLAGLAPMARDSGQHQGKRVVRGGRREIRNLLFVVSMIVRQFNPDFAAFHQRLTAAGKPKKVIRIAVAHKLLVRLNAKARQVRGELAGAKVLPCEVG

SEQ ID NO: 282276 - protein, 408 aa, unidentified
MQVLYTRCAGLDVHKDTIVACVRCVSPPMHQEVRSFGTTTAELLKLADWLAEHDCTHVAMEATGVYWKPVWHVLEAEFELVLANAAHIRNVPGRKTDVNDAMWIADLLAHGLIRSSFVPPQAIQQLRDLTRTRKQLVREVSQHSLRIQKVLEDANLKLGSVLSDVLGKSGRAMLDAIVAGQTDPACLAALAQGTARNKTAELREALRGRITDHHRTMLRLHLQVVDALQRTLAQLDAAVGKALAPIQQRARLLTTMPGISDLTASVVVAEIGVDMSRFPTAGHLVSWAGLCPRSDESAGKRRSTRVRKSGTWIKTTLVTAAWAAVRVKTSYLRAQFLRIKARRGAKKAILAVAASMLTAAFHMLRDGTEYNDLGGEHFDRQEKSKTIRRLLKRLQDLGCDVPIELHTA

SEQ ID NO: 282277 - protein, 348 aa, unidentified
MTIAMIGLDTAKNLFQVHGLDEGGRAVLRRKLPRSELVGFFEQQPRCTVFLEACGAGHYWGRLLSGFGHEVKLIAPEAVRPFVKRGRKNDAADAAALCVAGTRPETRFVPIKSVEQQAVLALHAGRSLLVKQQTMVANALRGLAGEFGVIVPRGLHKLEELMALVSAEEGIPAAGRQAMAELYAHGRAVAERVATLEEQIVRHARQDATARRLATIPGIGPITASLIAATVGDHIGVFRSARHFAAWLGLVPRQHSTGGRTRLGGITKAGNAEIRRLLVLGATSMVWRATRWDSKAGLWVRGVLARRPVRLVTVALANKLARIAWALMTRGEVYQAQGRAPAAAATVA

SEQ ID NO: 282278 - protein, 412 aa, unidentified
MDPIIERVAGVDVGQAFVVACVLVGGPHERARKDLRTFRTMTSELLAMRDWFSEKGVTHVAMESTGVYWKPIHALLEDGFEVVVGNAYHIKAVPGRKTDVKDAEWLADLLRHGLISKSFVPPRPIRVLRDLVRYRRRLVGGRTAERNRLLKLLETANIKLSSVVCDVFGVSGKLMLRALLEGRSKPEDMAQLARGRMRRKIGDLELALDGRLDEHHRFLLALQLRRLETLEGDIAQVDARIDEQLEPYRDKQVLLAQIPGVDRVLAATLIAELGVDMSVFRGPRAVAAWAGVCPGNNESAGRRLGSRRRRGNVYLTTALVEAALGASLKHGSYLRDKFFRLKARRGHNRAAMAIAHKILIAAYHVLSTGADYKDLGAGYLDHLDKTKVANQLVRRLNRLGYQVTLTENDTAA

SEQ ID NO: 282279 - protein, 347 aa, unidentified
MDQIIRIGMDTSKHVFQLHGVNAAEEPVLRKKLRRQDLITFFDKLPPTVVALEACGGSHHWARLLQSLGHQVKLIAPQLAKPYVKRGKNDAADAEALCEAMSRPTMRFVPVKTPEQQAALMLVGVRDRLIRQRTQLVNVIRGYAAEFGLIAPKGLCRIEPLLERVKTEETLPALARELFEMQATEYARLQVQLEEVEDRLMAWHRAHEGSRRLARIPGAGPIGAAMLVMKTPAPEAFRSARHFAAWLGLTPKDHSTAGKVRHGVITRAGDEILRSVLVVGATAVIRQLRRGQCAPASLWLVELLKRKPPKLVAVALANKIARIAWKLMVTGESYKGPSARPASACVV

SEQ ID NO: 282280 - protein, 343 aa, unidentified
MESYVGMDVSLKETSICVVDGNGRILSEATVTSEPEVIANYIQKTAPDVDRIGFETGPTATWLWHELKSLGLPAICIDARHAKAALSMQINKSDRNDAAGLARIMQCGWYKEVQVKGLSCHEIRAILNSRAQLIKIKGDLENQIRGLLKNLGLIVGKARGNAFRNRVQDLLSKNDRLSDAVLPLLEVRETVIGEVADLSKRLLAMARNNGDIRRSMTVPGIGPITALAFHTAIDDPNRFRRSRSVGAYIGLTSRRYASGEIDWSGRISKCGDPMLRSYLFEAAGVLLTRVPQWCKLKAWGHRLWKRIGFKKAKIAVARKLAVILHRMWRDGTDFIWSHKDAAA

SEQ ID NO: 282281 - protein, 449 aa, unidentified
MKEQQKAYATYLAFDWSDETHRFALRAADCDQPTEGDLKNRPEEMHDWFLELRKRFPEGKIAVILEQGRGSLLYFLRTLDYVVIFAVNPKAVARYREAFQVSGCKDDPTDTLLMLDLLYKHHQQLRPVEADEESVEALRMLVEARRGLVDERTKLVQKLNENLKAYYPQAIDWVGDLTSLQACDFLNRWPDLLILKRAKPHQIRTFYHQHRSRQKVEERIKQIVESRPLTTEKAIIISYGHVTKALANAIKQLTLSIKDIDKEIRQTYAQFPDRELYNSVPGAGEVLEPRLAAFMGTDRQRFNSAIEIQNASGISSVTKKSGATKVVLHRYACSKFDKQTFHEFAACSISWCDWAKAQYRYLTKERGKSHHAAVRALAYKWIRILFRCWKNHVLYDEEIYLKALRRRNSPVLKYITPNKMVFTNKVDAAPNKAHQPEVISEFLSSTKTF

SEQ ID NO: 282282 - protein, 348 aa, unidentified
MLHAGLDLSRRRLDFCLLDGAGERVEVGAVAPDADGLVDFAEGVERRHGPVAVRAAIESMTGARFVHDTLERRGWEVELADAVKVKGLAPLACKTDRIDACVLAELSRRDLVPAIWLPDFAVRAERERARWRLHLVRHRGSLKQRVHAQLMTFGHACPVSDLFGARGRRLLARLDFPEPWRSDVLAAVCLIDELERQIHTIERELRRLGAEHRYVGLLQTVPGVAWVLGYTIAAEIGDITRFATPAKLAGYSGLCPKVRQSGMMDRRGHLAKNGPKYLRWALVEAATNAVKHPAYKDRYQHTKQRLGRQRGAKVAQIDIARRLTEAIWHMLTRNQPFSPAGATRSLAA

SEQ ID NO: 282283 - protein, 266 aa, unidentified
MFQVHAVDAKGEIVVARKLMRSQLIPLFAELPPCVVAMEARSSGHHWGRALIELGHEVRLIPPAHVKPYVRRNKSDQVDAAAIYEAMSRPGQRFVPVRSIDNQAELIRDRARELLAGQRTAALNALRGHLAEIGLIAPQGAHHAYGLKRMAVDGFNENGEIVVPDCVRGALRSLVGQIDALDEAIGAIDRELAASVKADETAKRLMTIPGVGSVTASAIRATIQDASAFASGREFAAFLGLTPRQNSTGGKTRLGRITKMGDRYLR

SEQ ID NO: 282284 - protein, 347 aa, unidentified
MRFYNNQHPFYCGIDLHAGSMYVCIVNHDGEIVLHKNMKAAPEPFLKAIAPYRDRLVVAVECIFTWYWLADLCAHERIAFVLGHALYMKAIHGGKAKNDKIDSQKIAVLLRGGMLPQAYVYPAERRATRDLLRRRMHLMRKRAELLGHVQNTNSQYNLSEIGKKIAYKANRAGVAERFPDPAVQKSIEVDLALIDHYDQLLMDLELHIVRTAKQHDANTLYRLQTVPGIGKMLSLVLLYEIHDIDRFPRVQDFASYCRLVKCAKESAGKRYGTSGKKIGNAYLKWAFSEAAVLFLRNNPKGQTCLARLEHKHGKGKALTVLAHKLARAVYYMLQRDTVFDMDKFLTS

SEQ ID NO: 282285 - protein, 286 aa, unidentified
MLSETKVAAEVDLIVDCLRRCSVEIKQVGFEAGTLTQYLTYGLQAAGFEVICLEARQVAATLAAMRNKTDRNDARGLAQILRSGWYRRVHVKSLESHQVRALLSSRKTILSKCVDLENELRGLLKIFGVRLAPRVGHGSFDQAVRTTVTADPLLARALVPLLDARTVLYKTYLKLDNAVKAIVRSDPICQRLMTVPGVGPVTSLTFKVGVDDPGRFRSSRTVAAHFGLTPRRYQSGETDNPGRISKAGDADVRRALYTAAHALMTRSDAWSTLKAWGLRLAKIRGR

SEQ ID NO: 282286 - protein, 362 aa, unidentified
MTKTSHLAFDVHAATIALGRLDDGAEKPEVWEIANEPAAIRKTVQRVRKGRELRCCYEAGPCGYVLQRQLAAMGIPCDVIAPSLIPQKPGDRVKTDRRDAAKLARLHRAGELTAIGVPTEDQEAVRDLVRAREDARRSRTDARHRLTKFLLRQGLRFPTCNWTVKFWTWVKSLSFCRPEQAKVFEHYVDMVLHHDRQIEDLEKHIDAVAERDPFKVMVERLSCLRGISTLAAMVILSEVYDLRRFATARQFMAFLGLVPSEHSSGQKQRRGGITKTGNGHVRRILVEAAWAYRHHPGISSRQRKLLTHQPAVVADVCRKADLRLTRRYRRLEARGKRSQVAMTAIARELAGFVWAIARVQPA

SEQ ID NO: 282287 - protein, 413 aa, unidentified
MDVLHPRCCGLDVHKSSISACILLRETGRVQKHQRRFGAMTQDLRELAEWLRQFGVTQVAMESSGVYWKPVWNILERQFTVVLANAQHIKNVPGRKTDQKDAEWIAQLLQYGLLRPSYVPCEIIRDLRDLTRMRASLSQEASRLSSRIQKVLEDANVKLASVASNALGKSGRAMLEDIISGEDDPEHLASLALGHLRVKIPQLRLALEGKIRSHHRFLLRRLLDQLQFVEHEIALLEERLEDIGGQRPELSQAVARWDTIPGVDRVAAWALLAEVGDNMAQFPTAEQLASWAALCPGNHESAGKRLRGATRQGSPWLRRMACQCAWAAARTKNTYLSSQFRRLAARRGKKRAIIAVAHTLIVIGYHLQTNQSNYDDLGGNYFDRIHSDGLKRYLVKRLQQLGLKVTLEPIEAA

SEQ ID NO: 282288 - protein, 386 aa, unidentified
MIYVGIDISKYKHDCFICKDTGEVIVENLSFDNNKKGFQQFLDLLKPYDNSNVHIGLEATGHYGLNLKLFLEKNNYSFMEFNPLLVKEFYKSLSLRKTKTDKVDATVIAQKLMSVPYKPNSNLFYHKYSIKSLTRLRETLVKQRSKYKVQLTNILDMIFPEFKPFFSNYFGATALYILEKYKTPEKIANMRDFDSLNKISRGKFTYAKFVKLKDLAKNTIGESNDIFELELTSILNLYKNIDEQIIELDKQISTIIKDLNPPTLSIPGIGVITCASIISEFGDISKFSNPSKMLSFAGLEPGIIESGTMSSKGKMVKRGSGYLRYSLMNVALTVIKFNTTFYDYYYKKISEGKCHRVALSHVAKKLIRVIFILETKNIQFDPSLLK

SEQ ID NO: 282289 - protein, 355 aa, unidentified
MTSVKYIGMDVHTESTSIAVRNSLGKIVMECVIETKASTILQFIDGLRGDLRVVFEEGTWATWLYDLLKSRVTEVLVCNTRKNAVRKGSKSDRIDARKLAEQLYMNNVKSVYHGERGLRMMKELARSYLTITKDLVRVMNRLKALYRSWGIPCAGTEVYALRYRAEWLAKISEAGVRRRAEHYYQQLDALWPLRQEARRDLLVESRKHKIWKLLRRIPAIGPIRAAILIAVMQTPHRFRTKRHLWTYSGLGLETYDSAEYRSVRGQLERSRKQATVRGLNKDYNHDLKDIFKGAAMRASTAAGPLRDFYDNLLAKGRKPTMARLTLARKIAAITLIVWKKEVRFDANYLKPQQAA

SEQ ID NO: 282290 - protein, 331 aa, unidentified
MTRLPNRANDAPLTIGVDVAKATLEVGFSDGESTLALNNDEAGHEMLIKRLAALRSNGATIGLIVLEATGGLELEVATTLQLAGYAVVVINPRQARDFARSMGYLAKSDHIDARVLAHLGQTLLQRDDLRKLVKPLPDERQRMLQAMVTRRRQLVGRRIAEQQRAGAPDKRMRRSLNIIMKALDREIARLDKEMQAFIGEHHAELAALLDSVKGVGKTTISTLLAEVPELGELNGREISALVGVAPINRDSGTMRGKRTIFGGRAQVRKVLYMAALVASRYNPVIKAFYERLLGAGKPKKVALTACARKLLIILNAMVRTRQPFDIARHLA

SEQ ID NO: 282291 - protein, 350 aa, unidentified
MVVVGADVHKRTHTFVAVDDVGKKLGEKVVAATSSGHAEAVMWVRERFGAAMVWAIEDCRHLSARLERDLLTAGQKVVRVPPKLMAQVRASARSRGKSDPIDALAVARAFLRDPDLPVASHDEVSRELKLLVDRREVLVAQRTATINRLRWRVHELDPERAPRPNGLKNAKHRDMLRAWLETLPGLVAELARDELADITRLTETINALAKRISERVRAVAPALLAVPGCAELTAAKLVGETAGVTRFKSEAAFARHSGAAPIPVWSGNTAGRVRLTRSGNRQLNAALHRIAVTQIRLDGLGQTYYRKRLQVGDSSAEALRCLKRRLSRVVFSRLHTDHQNRTQPCQPAAA

SEQ ID NO: 282292 - protein, 329 aa, unidentified
MTTNPPQIVFNHIVAFEVSKEKLVVHTLPDDEQWTIDNKPQAIRRLIKAEIKRNRKKQLGQMLVICEATGGYERHVLDGALEMGLSIHRAHGTRVRHFGHYRGLLAKTDPIDAHLIAQYGLKTENIRLYSPPPPDTAALRALHARRTEIQQMLIAETSRLDHAQHKSVLKSLKAHIASLKAALAAIEADIAQLVEGSEMLRKKVALMQTVIGIGPISAMVVLAYLPDIGQLTKGQAARLAGLAPINNDSGKKRGTRHVEAGRTAIRRALYMAASVAMRANPILKAFSDRLRSKGYPFKYVVTAVMRKLIVILNAVLRDGQSWKGAQMAA

SEQ ID NO: 282293 - protein, 448 aa, unidentified
MAKKVSYRAVPIERLTSALLAAMLVGASKLIVAIDVAKLKMMAGFGSEDGSVVRLVRFESPMQTREFVELVVATGQALRVPVEALMEPTGTYGDGLRALLVSRGVSVFMQSPKRVHDAREVFDGVPSLHDAKSCVVMAQLHRQGVSRAHSPLSEDRVRLRALVRRREVFEKPLQMHLSELEGLLGRHWPELLIDMDVWRRKTPLELLVAYPCPAEVALHREEAREVMRRASRNTIKHDEIERVLDSASRSIGTSASDEEREVIRAVAREALHVRGSIATIDKLIEKTAEEHEATRGIAKVVGRVTAVVLVAYLGPLSEYASPATLEKACGLNLKIKSSGNVVGRPSITKRGSSEARAWLYLAAVRLVKNDPLIAAWYRTRGGYRGDRKLTALIAVMRKLARALWHVARGATFDATKLVDGRALDVTPRTPLASSTSSPTSHVAPPPMG

SEQ ID NO: 282294 - protein, 416 aa, unidentified
MTFKVVRFICGGMDVHKNLIVATIGTTDRQTLITEYIQQSFSTFYSDLIRLKEWFISHDCYDVCMESTGKYWIPIYNVLETELNICLTHPKYVKAIKGKKTDKRDSKWICDLYKCDLVKHSFIPKKEIREMREIARYRCKLVYMRSSERNRYQNCLTVSNISLASAVSDPFGKTATNIMKELMQSEVIEDDKILKLIHKNCKDKDKILDSLQEYHIESDQRFKMDTVMNHIEYLDKQIQACEAELIKRAYPLRDYFQHITHIKGISALSAILIVSEIGTDMNQFESDKQLVNWAGLSPANNESANKKKSVRISKAGQYLKPLLVQCALSSIKDKNSYFGIKYCRIKKRRGHKKAIIAIARMMLVCIYHMILTGEEFNPCDYESLTNPKPKKEPIMTVESALQFLKDSNFDFSSIQL

SEQ ID NO: 282295 - protein, 385 aa, unidentified
MAPIRMPEAVIGLDVGKSSHWACVATRDGEVLLSTPVANREDDLDSLFGRFPDALVVVDQSRNIGALALARARAAGMSAAYLPGLAAHGAARLFAGDAKTDERDAMVIAKTALGIPDALLPVGDPGPTIAAARALAAQRNFLTCENTRNKNRLRSILLESCPAFETLVDLSDGPQLRLMASLGGAWSVADAGPRRAAALTRGAARGKIEALVRSTTSSTRPDASVVAAEDRAVKLLARRISENSAEIEAITAEISALLEGDDTYRCLLTVPGIGPKTASELAISIDIEDFPSHDRLASYCGLAPRNRQSGTSISSVTASRQGNKRLKNLLIFSCNCLTRTEGRWGDYYTRCRERGMSHGKALKALARKRLKVIYAVMRDRVPYAA

SEQ ID NO: 282296 - protein, 340 aa, unidentified
MQRLYGAFDLHSSNSYLGISDDKDRRVYKKRLPNKPDVILTELEPYRENLTGIVVESTFNWYWLVDLLMEKGYRVHLANPAGIQKYKGLKHSDDQHDAFWLAHLLRLGILPEGYIYPKEERPVRDLLRKRGHLVKLRTSLINSLQGIISRNCGVKMSGNNIKQIKVNNVAPLLAGQEDLALSGEVSKEVIDYLGKQIRKIELVVLRKITLKEQYRCLLTIPGVGKILALTIMLETGPIERFSGAGNLASYCRKVPSNWTSNSRKKGQGNKKNGNRYLAWAYSEAAEFARRYDQHARSFYNRKVSRTNRMVAHSALAHKLTRAAYYVMRDQVEFNPQKLFV

SEQ ID NO: 282297 - protein, 372 aa, unidentified
MMLWTAPTLRHQSAKGWSREANHVEGEPSMGEVSTIGLDIAKSVFQVHGVDATGAVVMRKRLGRAKVLAFFAGLSPCLVGLEACPSAHYWSRELQALGHTVKLMPPSYVKAYLKRSKNDANDAAAICEAVTRPSMRFVSIKTEEQQTGLMLHRSRQLLVRQRTMFSNAIRGHMAELGIISAKGRNGTAELLQIIGDVADDRIPPVARFCLDLLARQYLTLNAEVSSIDKRIHAWHRSCEESRRLEEIPGIGPIVATALVAEIGDWKAFRSGRSLAAWIGLVPKQHSTGGKERLGSITKQGNRYLRWLLVTGAMAVIRYARQRGTKRAWLIRIMDRRPAKVAAVALANKIARMAWAIMVRTERYREPKLLLAA

SEQ ID NO: 282298 - protein, 346 aa, unidentified
MTIVGDRPAITGGVDTHGEVHVAAALDRIGGLLGVREFPATITGYASLLGWLGEFGDLGVVGVEGTGSYGAGLARHLTAAGVRVVEVNRPDRQDRRRQGKSDPLDAVSAARAALSGKASGAPKGGDGAVEAIRALMVAKRSARRERTEAINQARALIVTGPDELRARLAGLGPAALAAAIAALRPRPGAVPGYATRVALRELGRRVQFLDAQLGRLDELIGPLVSARAPGLLALHGVGPDTAALLLVAAGDNPGRLRSESSWAHLCGAAPIPASSGKIQQRHRLSRGGDRQANHALWRIVITRLSNHPATRAYADRRAKEGLTKKEIIRCLKRYVARKTYHYLRDA

SEQ ID NO: 282299 - protein, 391 aa, unidentified
MTKPKTKTVNDFSRCLDPLDMDATLIAVIEMSQSSWLVAGIVPGVERQPLKKLAIDEHALLNLLNRWRAEAEKQGHRITRIAVAFEAGHDGFWLARWLAAQGVEAHVIHASSVAVTREHRRAKTDRLDTELLKRAFLGWLRGERGHCKMVAVPTLAQEDAKRPSRERETLVGEASRIITRVKAAFVRLGIRGFNPKLKAAATRLETLRTPEDEPIPPNTLAALKRDLERHQIVKKQIREIEQTRLDVLKQAPEKGPHAMVLLLARVIGVGVETADMLVQEVLSRTMRDRRAVGRYAGLTGSPDESGAKRRDKGLARSGNARVRHGMIQLAWRFLLFQKDSALAQWYRRRTADAPSTRKTLIVALARKLLIALWRLARDGVVPEGVRMRPAA

SEQ ID NO: 282300 - protein, 353 aa, unidentified
MKTKTEQLEIILGVDTHLDVHVGAIISQTGKLLGTRSFSARSSGYIELLHWASSFGLLFRAGLEGTGTYGAGLCQLLIENNVKVFEVNRPDRSKRRLKGKSDPIDAENAARSVLSGMASAIPKQHSGACEAMRMVSVARRSAVKAKTQTINQLRSLLVSSPQNIREKLLKVKALDCINACSKINCLGDTVVLKTLTQTLKLLSKRWLALAKELRQLDKQLESLTSEYAQQVRSRFGVGPQTAATLLTVAGDNPERLKSEAALAALCGVNPLPASSGKTVRHRLNRGGNRAANNALWTIAMVRMRSDPRTREYVVRRTKEGLTTKEIQRCLKRYIVRELFPLILDDLGRSKAIV

SEQ ID NO: 282301 - protein, 410 aa, unidentified
MKRDKYIYIGLDLHKFQHTAVILDCWNEKLEEMTFQNKPSIFPSLLEYVNRYLTEDLTPVFGLEDVGGYGRDLALYLIEQGYIVKFVNSSLSNAERNSYAMTQKNDNWDAQCVARVLIRDLPYLPEATPSDIHWIIAQLVGRRNALVKTQTSLKNQLHMQLNYHYPSYKDFFSEVDGKTALAFWESYPSPSHLEGETVEDLRKFLLEVSNNACSTRKAEQILTLVQADGEVKREYQTSRDFIIQSIVRDISFKKREIKKVDRELKVTIQKLGMQLETMPGIDTVTSSALIAEIGDIHRFANSDKLARYAGIAPIKMGSGGKETMKKTKQGNRKLYDVFYNLAVQQVQVSKGSKIPRNPVFYAYYNQKLSEGKSKSQALLCIMRRLVRIVYGMMKNKTAYILPRMPETKAS

SEQ ID NO: 282302 - protein, 350 aa, unidentified
MRFYQAQEHSKYFCGIDLHTCTMHLCILDQAGRIQLHKNIRTRPDAFLKAIDPFRDGLVVACECVFCWYWLSDLCEREDIDFVLGHALYMKAIHGGKTKNDRIDSEKIAILLRGGMLPEAYAYPKAMRATRDLLRRRSRLVRMRSELLGHVQLSKFQYNLAPFKKKLAYHAGRCGVAEHFEDSIVRRNVNLDIAAIDYLETAIKREEKFLTSQTNFYDGQAFFLLRTVPGIGAILAMTIFYEIEDIARFARVQQFASYARLVKGQKSSAGKYLGSQGGKMGNAHLKWAFSEAAILFLRESERAKKYVARLESKYGKKKALSILTAKLGRAVYFVLRRREVFEEERFFAAV

SEQ ID NO: 282303 - protein, 355 aa, unidentified
MTSAKYIGMDVHKESISIAVRNAAGKIVMECVIETKASMILQFIDGLRGDVQVTFEEGTWAAWLYDLLKPHVTKVVVCDPRRNALLQEGNQNDRVDARKLAELLHNNQLRSVYHGDHGLRTLKELVRSYLTITQDLSRVMTRVKAIYRSWAIPCSGKQVYASRHRAEWLGKISEPGVRRRAEFYYQQLDALRCLRQEVRRELLAESKKHKAWKLLCQIPSIGPIRAAALLGILQTPHRFRTKRQLWTYGGVGIETSSSADHRVVDGQLERKKKSVEIRGLNRNYNHDLKNLFKGAAIVAATKPGPFAEFYAELLARGMRPEMARLTLARKIATIVLIVWKRGVCFDAQHLKPQTA

SEQ ID NO: 282304 - protein, 346 aa, unidentified
MEYIALDVHKNYTWARVENGKGDRLYESRLAHVHGSIKNFVNRWTGGSPVAVETVGNWYWVVDEIEAGGGTPQLVNARLAKLMMGNVNKSDKLDCKGMNRLQRTGTLPTVWIPPSSVRDVRELPRTRMVLSRQRTQLKNRVHATLGKYGYTVQGASDAFGKKGRKIVEELLLKLPPHTQQALRLILNELDHVRDNLKEIEGQMIEVFSPCPQTHWLTSLPGVGNILAVVIWSEIGTIERFNRAEQLASYSGLVSRESSTGGKIRLGPVRRDVNVYLKWAFVEAANSSLLNAERCGYGHISRLYQRIKPRRGHGKAKVAVARHLSEASFWMLKKGEPYREPMSSTQR

SEQ ID NO: 282305 - protein, 326 aa, unidentified
MYILGIDLAKKTFDVTLLTPAGTRHHHTFPNTPTGFRDLWRWARAHGARSIRACMEATNVYWEALAQYLVEQGATVHVVNPARIKGYAQSQMLRNKTDKQDSATIAAFCAAHDLAAWVPPTAAQRKLRALVRHRDDLIASRIQQTNRLEDTTDPDVRASLEAVVATIASQLLSIQQQITAHLHAHTELREQHDLMDAVPGIGPVTAQKLVAEFYDLASYTSAKEVGADAGLTPANYESGTSVRRRPRISKIGKASVRAALYMPAITVMSRNTEFKAFAARLAARGKSYGVILGAVMRKLLHIIYGVVKHKAPYDPRKVLGSAASTT

SEQ ID NO: 282306 - protein, 425 aa, unidentified
MPYKIAGIDVHKKMLAVVVADIEKDEYQFERVRFGSAPEELRRLCTWLLEQGVEEVVMESTAQYWKPVWGYLERFWKPGCQPGEEGNGRAGVLHLAQAHSNRGRRGRKRDFPDAERLVKRLVAQELVLSFVPDPTQRLWRTVMRRKQQLIRNRVQLQNRLEALLEEAHLKLSSLVSDLLGASARRMLKAIAEGEKDPAVLAAMADKRLRATAAQLCDALEATAELNPVYRRLLKMVLEELALLEQQVGQLEQEMASLLRPHEDEVKRLAEVPGFGVDSAQQIIAEVGAKAASFPRKEQLSSWVGWCPGEEESAEQNKNGRSPKGNRNMKRILNQCANAAVKAKGSIFELLYHRWIVRLGHKRTIGAIAHKLSNIIWLILHRGVRYEERGPAVSQKARQARTTKMIKELRKLGYRIELSDMQPAVS

SEQ ID NO: 282307 - protein, 356 aa, unidentified
MSEGSWVGLDVHARSLVAGVLDGGSGEVRSLRLPPGGEATVAWLQTLPAPVRVVYEAGPTGYRLARACADAGIDCVVAAPSRVRAAADRVKTDRRDAERLARLLRLGEITPVRIPTLAEEAARDLVRAREDARGDLMRARHRLSKLLLRHGLVYDATAWTRTHDAWLRRQRFDGGPLAIVFDECYGRMLDAKSRRDALDKAIAELAATPPYVDVVSRLVCLRGVSTLTAFALTVELGDWHRFRPESLGPFLGLTPSEYSSGERRRQGAITKTGNSHVRRLLIEAAWHQRSPSRRSVTLERRRDGKPLAVQAQAERSGRRLHARWHALEARGKPRTIVVVAVARELAGHCWALATME

SEQ ID NO: 282308 - protein, 407 aa, unidentified
MVAVMIGVDPHKGSHTAVVIGGAEQPLGELRVAASAGQAEELVAWAAEWPERTWAVEGAAGLGRLLAQQLVAAGERVLDVPPKLASRVRLLEAGDTNKNDPNDARSVAVAALRSKAVRQVAAEDHHGAVLKIWARRHRDLARSRNQVACRLHAVIADLVPGGVRKEITAGHATSVLDRITPAGPVETARRDLAAQFLDDLRRLDTQLAETKKQLAAAVRASGTTVTEVFGVGPVIAGTVIGDTGDISRFASRGHFAAYNGTAPVEVSSGARKIYRLSLRGNRRMNHAIHMAAITQIRHAHSDGRAYYDKKIAEGKTSKEALRCLKRRISDAIYARLRADARKTVTAISAGPGGQTGNGSDSSAASSHPARQLFGQATPGPATTLRPRTPARVPAARNRRPKDLETIS

SEQ ID NO: 282309 - protein, 343 aa, unidentified
MDVSTIGLDIAKSVFQVHGIDGSGEVVVRRQLRRRQLLRFFETLGPCLIGMEACATAHYWAREIAALGHEVRLMPAHYVKAYVKRNKNDVADAEAICEAVTRPSMRFVGLKSAEQQSVLMLHRTRELLVRQRTMLVNAIRGHMAEFGIVAPVGLPRIKELLAVIADPDDCRLPPGARACLESLARQFLSLHEEICTADKRLHAWHRSSELSQRLATIPGIGPITASALAASITNPELFRSGREMAAWIGLVPRQNSTGGKVRLGRISKQGDQYLRWLLVAGAMAVIRHAKRRGTTNQPWLDDLMARRPTKVVAVALANKMARMAWALLRQGGTYRQPMVATNA

SEQ ID NO: 282310 - protein, 422 aa, unidentified
MICAAVERCAGIDVGKTFLAVCVMTGPLTDEAIVQRRRFGTTVVELQALREWLKQERVTHAVMESTGSYWKPVFNILEESVQIYLANSQEVKNRKGHKTDDKDGWWLAHLLRHAMIRPSFIPLRPIRELRDLSRRRKRLLGNATAEKNRIQKVLEDANVKLGSVLSDVFGVSGQLMLDALLNGQNSPSEIARLAQRRAKSKVAEIQQALEQHQLRDHHRRLIRYSLSHMAFLEQQIMDLDRDILAKIQEAGLEPAWELLQSVPGIQQRGAASILAETGADMKQFPSSKHFSSWAGVCPGNNRSAGKNHGSRTTGGNPWLRSTLTECAWAAAAIKNSYFKEKFWRIVGRSAGKKAPALVAVAHNLLVEIYEVLRTGQPYQDRHASRLPELQKQRMIRHHLRRLGKLGVTVRCNPSAVARAKET

SEQ ID NO: 282311 - protein, 466 aa, unidentified
MRTIGLDLAVQTAHKAVVLDEAGHFCTPILTVHTRPSELDQLLVRAREGAPSTEVQLVMEPTGMAWFPIAVYYARQAVPMYLVNSQEVADLRRYYQRHAKSDRIDARVLARLPLVNPDKLHRLVLPAATTFACQRACKQLDHFATQITAVKNRLQAIDRFAWPGLEEQVFADPFAPAARFFREYWYDPQQLVQGGVEAIRQQWMASTVDADAGDAWVEPLLTLAQQVLTLYGTDGQYLDFAQLQAEVRRDQAWLIWLEQQHHTVRMHTARPLYRAIHPSRNLETLKGVGQDSAAVYASFIGDPHRFSSTRLFRGWTGMVPSSEQSAENEAKGLHITQAGPDLIKKYAYLDAEIARRYDPQIAAIYYDQMMRKGKHHKQAVCACATHLLDRVLAVLRADKPYEMRDTDGIAVSGQQARELIVERYTVPQEVRRRTNKRNRHQQADQRAERRARLEPELQSLLGGQLS

SEQ ID NO: 282312 - protein, 377 aa, unidentified
MSKVRFVGLDVHAETIAVAVAEPDGEVRSLGVIPNRPESVRKLAKKLGPAEQLRVCYEAGPTGYVVYWQLTGLGVRCEVVAPTLVPVKAGDRAKTDRRDAIKLARGYRAGDLTPVWVPDAAHEALRDLVRAREAAKKDHLRARHRLGKFLLRHGRRPSARMTPWTQRHLTWINQVVQFEQPAQEATLLDYLHEVEHAATRLERLERAIEDASVRAPPRMRAVNDALQALRGIAKISAVTVVAEVGELSRFARAPHLMGYCGMGPREDSSGERHRRGAITKTGNAHLRRIVREAAWAYRHRPTVSGALRKRQATLSPEVTAIAWKAQHRLHSRYRRLIGRQKCQQKVVTAVGRELLGFIWAIGVTVERQQPQAQPAAV

SEQ ID NO: 282313 - protein, 340 aa, unidentified
MKYSYIIGIDAAAGKFDFDLLDPNEVEVGYGEIQLENDGTKHWYKALLKNLQCEAESILVCVENTGIYSISVAYDLHLAGFAVWLEDALQITYSSGRINSKTDRLDAARIARYALRNHNDYKSFKPDEKILVNLKSLRKQRQRLLKSKNQLGNELGEERRYVPDEIRADEDIYEPTKSVLTAIDKAIKKIEAEITKLIKRDERYSRMVKVLTSLPGIGSVTAIELVVKTNAFAKGYDYVKIASYIGIAPHKRQSGKRLNKKPKTRKNVDKKAKSCLYMGMLRHVNSNNRIGHFYRSKIAEGKQHNSVINAVSNIMLKTACACLRKDELYEEKFAKNLQTS

SEQ ID NO: 282314 - protein, 370 aa, unidentified
MSVRRILAKTIDTDLEYEAIGIDLAKNCVSAALLTTDGEVVCIDRLDYSELEKSAQALSSTTFAMEPCTEMNYLVQKLEAWGHRCLVIGGKNVQNYVENHFSGQKTDLNDAQALAFLAQDTQLRTIKAKDVEQQKYASLTTLREQYIKQYRQTIVSLKGICQAWGLNISKGISGKARLKDLIENHAAFPEELRESLVDMVTHAQTTQKVLNKITKTLEVLAKNDKVCQLIQTIPGLGTICSCRLRATIGDIKRFKNPKDFPAYYGLVPRSIATGHNEKKGKITHRGDRTMRSLMVQGAGCVIRLATCGKLKSKQLTKWILKKQKEKMPWGKLVCAVAAKLLRIVRAILISSKPYNPKIAGVAKCSLSKGS

SEQ ID NO: 282315 - protein, 348 aa, unidentified
MHSTTVAVDLAKNVFELAVTDCKGEIGERLRLNRARFAAFFVQRPPCRVLMEACGSAHYWARRISAHGHRVELLPAQYVRRYVRRSKTDRADAAALIEAARCTEIRAVPVKTLEQQQVLGLHRLRAQWMSTRHRYLNTLRGLLREFGVAIPQGAHIGRAQIARQLRQPSQELPAALRPLLSEMLADLDQLEQRVNQVERQLASITRADPIVQRLREIPGIGPLTRTALRASVGDIGRFPCARRFASWLGLTPREYSSGERRRLGSISKQGDVYVRTLLVHGARAALLAAHRLQRTGHPPDRLRLWALKCQRQRGHNIATVALANRLARIVWATWKHERRFDGNWAVTA

SEQ ID NO: 282316 - protein, 411 aa, unidentified
MNNTLFVGIDISKRSNVATFMNCEGKVVGRLTFSNNGSGADRLVAKILSYYEKEDFEAIRIGLENTSVYSKNLVWFLYEHEALNEHKLSIIPLNAIMVANYKKSFLDMDKDDITDSFAIADFIRIRPGLLPFKLDDRQEALKIMTRSRYNYVQALSRMKSQFLTRLFLSFSEMEAGKPFYSIFSKTSLSLLEEEFTLDELAEKPIPELVEFLQEKGGGKFQNPEEIAKVLKKAASSSYRVPTMVRESLNRTMASDMEIMRILENEIHNCDKNIEKLMKSVPAILVSIPGIGPVLAAGIMSEIGDISRFQKQESLGKMAGFKWKRNQSGKKESEDKAAVLSENKKLRYYLVEAANRVRIHDPVFEAYYRKKYAESKTHAHKRALILTARKLVRVIFYLLKENKLYKPDVGIS

SEQ ID NO: 282317 - protein, 363 aa, unidentified
MDNATRLGLDVHKETIAVALLRPNQETPDERVIPNTPEALRAVVAPHRSRLIACYEAGPTGYDTYRQLRALGIDCEVIAPTLIPRRAGRRVKTDRLDARNLLRLHRAGELTAIRVPSSTEEALRDLIRVREDLKDDRGRTQRRVKSFLLRQGRRYPGTGSGWTDKYDLWVRSQHFAEPAAEAAFRYYLGALDTRRSQEKAIQAEIESAAEAPPLAEAVGRLRCLRGIGTLFAVTIAAEVCDFRRFPSAASFMAFTGLVPSEHSSGARERRGSITKAGNAHLRWVLVEAAWSYRHRPGIGVELRKRSEGQPPEVVAYAWHAQCRLCSRFRRLAVTKDRNVAVVAVARELAGFVWGMMTDRTLVP

SEQ ID NO: 282318 - protein, 402 aa, unidentified
MNAVGIDVSKGKSMVAIMRPFGEIVSSPFEIKHTTSDINSLVELINSIEGESRIVMEHTGRYYEVLAHQLSEANLFVSAINPKLIKDFDNDSLRKVKSDKADAVKIARYALDKWQNLKQYSVMDELRNQLKTMNRQFGFYMKHKTAMKNNLIGILDQTYPGVNTYFDNPARSDGSQKWVDFASTYWHVDCIRKMSLNAFIDHYQNWCKRKKYNFSQSKAEEIYGKAKELVPVLPKDAITKLIIKQAVDQLNSASATVESLRTLMNETASQLPEYPVVMAMKGVGSSLGPQLMAEIGDVSRFTHKGAITAFAGVDPGVNESGSYEQKSVPTSKRGSSDLRKTLFQVIDVLIKTHPQDDPVYQFIDRKRAQGKPYYAYMTAGANKFLRIYYGRVKEYLSSLPES

SEQ ID NO: 282319 - protein, 377 aa, unidentified
MQPIDTNPAVHLAIELSAATWLVAAHLPGCDKPHVHRIDGGDTAALLALIASLRARVAPGLGAQIGVVCCFEAGRDGFWLHRLLTANGIVNHVLEPASILVNRRARRAKTDRLDAMGMLRVLAAYLRGDRQSCSMVRVPTPEEEDAKRTHRERESLVQERLRIENRIEALLFTQGIRKRPSLRSWERDLAALRTGDGREIPNHLRAELDRLRRRLVMTLELIREVEAERDVAAETKPQDQTCLKIAALRRIRGLGDNFSAVLTREVFYRSFDNRRQIASYVGITPMPYQSGGMDRDRRISRAGNPRARTTMIQLAWLWLRYQPGSELAEWFRKRVGTLAGRTRRIAIVAMARKLLIALWRYVETGVLPAGAEIRAEA

SEQ ID NO: 282320 - protein, 397 aa, unidentified
MFQKSKSTIAILQPGGTIIRKPFNVPHTSQNLIELADYLGSLEGSTKIVMECTGRYHEPMLKALYEAGLFVSVVNPHLIKNFGNNSLRRVKSDPADARRIARYTLDNWAELRQYSDMDDTRTQLKTLNSQFSFFMKQKVAAKANLIALLDNTYPGVNKLFDSPTREDGSKKWVDYAYSFWHVDCVRRIGLKTFTERYRAFCRKHHYIFQPDKPEKLFHASKELVAVFPKEKTYKLLIQQSIQQLNLASGHVERLRQEMNALASTLPEYNTVMGIYGVGKTYGPLLIAEIGNVSRFTHREALTAFAGVDPGVDESGQHKSKSNRASKVGSARLRKTLFQIMTTLLQNAPEDDSVYRFLDKKQVQGKPYYVYMTAAANKFLPIYYGKVKECLRNLEQAE

SEQ ID NO: 282321 - protein, 342 aa, unidentified
MEHYAGIDVSLECSSVCVVDASGRIVREAKVASEPEALIAWFRSLGFGLERIGLEAGPLSQWLFAKMKAAGLTVELLETRHVRDAFKAMPVKSDRNDARGIAQLMRLGWFRPVHCKSLSAQETRATLTARKLVQSKLLDVENSLRGILRGFGLKVGKPPGRKFAGRINELVAGHPHLQQIADALLAVREALRKEFAAFEKQIRSMVRADQQARLLTSVPAVGPIVALTYASAIDDPGRFKSSKQVGAHFGLTPKKHQSGETDYTGRISKLGDSAVRTALYEAAHIMLIKPVKGCTQLKSWAMRIARRAGTSKAKVALARRLAVIMHRMLVDQAPFNAAAAAA

SEQ ID NO: 282322 - protein, 333 aa, unidentified
MEKNNKLDFGGQHIYVGMDVHKKSWSVSIHTEQFEHKPFTQPPEVEKLTYYLERTFPGATYHTVYEAGFSGFWLHDQLRAKGIDCMVVNPADVPTKDKERAGKRDRVDCRKLARGLRNGEINGIYVPPRVKVEDRTLVRTRQSMVRKQTRCKNQITSILFFYGIVIPEEGRWSRRFINWIESIRMERASGDFALKAHLEELKHLRQIIANLNKAILSLSRTEEYMADVLLLKSVPGISTLTAMILLTELADLSRFSSLDKLASYAGLVPDIRSSGETEYSTGITFRRNAALRALLIESSWVAVRKDPALTMAFNKLSARMKKTKAIVHIAGSF

SEQ ID NO: 282323 - protein, 394 aa, unidentified
MRFIGIDVGSETHVVAVVDESGKVVFKATSFSEDADGYAKFRQILGAPGDAMCALEATGHYWQNLFAFLAAEGFPVALLNPLRTHHFAAEDLRRAKTDAIDALSIARFAQQKRPAVTVLPDEATLELREMVRLRDRMMEDLGDRIRQLHRTLDLTFPEFPRLVRDLSSYKATALLLRFPTATAFREASPGNIAEMRYDGRHRIGPELAAALCDTAGRSVGRHEGPSYRLQTQYACEDISTLRERLKTLDEDIHRSLGQHRVGQLLTTIDGIGPNTAARVIAEVNLLAFRDAGALAAYVGVAPSVNQSGKRVPQRGGLHSVGHARLRAKLWMPTLRAVRNNAWLRHFYEGLVARGKPKKLALVAALRKLLSAMLSVARSGKPFEPRLPEAAISLA

SEQ ID NO: 282324 - protein, 342 aa, unidentified
MHHVAIDLHDQYSQICVMNQAREVLAEAKVPTTEGTLRDFFHRREKARVVFEAGPHALWVSELLSALGHEPVVCHPRRVRLIAESRNKNDRVDAELLARLSLSDLELIKPIHQRSRTTLEQRSVIRARAALVETQKQLRTMVRGLVKPFGVRLPAAKKRALTALAHAELPAQVAVSVDALLKTLATMAEQIGGLDARVEQLMTDHPAVARLQTIPGVGPLVAAAYILAIEDPTRFAPSDIGPYLGLTPSNRSSAGKKLHPKDRGRPGDPYVRSLLVQSAWTLMNSRSESDLARWGRDRIDRIGPKKAAIAVARKLATLMHHLWLHNQDFCPHPKPNRQIVTA

SEQ ID NO: 282325 - protein, 347 aa, unidentified
MRFFTDPHQNYCGIDLHARSMYLCVQNREGKVVLHRNMQARPEPFLNAIEPFRKDVVVGVECIFTWYWLADLCAEHNIPFILGHALYMKAIHGGKAKNDRIDSRKIAALMRGGTFPVAYVYPAKMRATRDLLRRRNHLTRKRAELLSHIQNTNSQYNMEPFEANISYKKNRIGVAEQFADPDVRMSIEADFELIALLDELKNRLELHITRNAKDHDPQALYRLRTVPGIGSIISLGVLYEIGDINRFARVQDFASYARLVKCTRESAGKRYGTGGGKIGNAHLKWAFSEAAVLFLRGNPEGMKFKKRLEKKHGKAKSLSILAHKLGRAVYYILKRDQAFDMNRFLKN

SEQ ID NO: 282326 - protein, 412 aa, unidentified
MQAIIERCCGLDVHQGAVVACLLIGAPGAQPTKEVRTFRTVTRDLEALRDWLRAVGVTHVGMESTGVYWRPVYAVLEGHFELIVGNARHIRNVPGRKTDVKDSEWIADLVRHGLIAKSFVPPRPLRELRELLRYRRKLVESQAAERNRLLKLLETANIKLASVASDVFGVSGRAMLRALIAGEASAEAMADLAKGQLRRKRADLILALDGRIEEHHRFLLAMQLRRLEAIEADIATLDLRIGERLEPYGPQHALLMQIPGVDWLVAAVLIAEIGVDMSVFLSVYHLAAWAGVCPGSHESAGRQKSGRARKGNIHLRTILVGAAISAARTKGAYLKDKFHRLKARRGALRAALAIAHKILVSAYHMLAKNLPYRELGEAYLDQIGQTRTVANLKRRLQRLGYRVTLEPTVQAA

SEQ ID NO: 282327 - protein, 400 aa, unidentified
MDKEKKKVKITVGLDAHPDSITAAIVVGDKPADAIVDKISDAVAINDMERWFKKSVPCDAVVVLEASGNSFDIFTRLSAIGYRTIVLDSVQVGKVSKSYCNTDKISAVRIAKTYLTGLSDEVWVPDPVTRERREVFSAYQQSVKDCTRHNNRIKSMLNSYTIRLKKQDRNLADEKVRNKIYASRDWSETQKALFEEAFDDLDRAADKRNRMRRIMAAEVLKESKMLQLMRIFGLNVIASYGLIAMIGEPGRFLNPKKLSAYFGLCPKIKQSGNVARLGGISKKGRREIRALLVQAAQTVLRYQSKSNPLYHWAWKVRFKKGRNIAVIAIARKIAVAVWYLLMGKPFKAKENTLTIRRKLIGLAKILGPQQIHSMGFGTYAIFVDHHLNLIELFACKGGHT

SEQ ID NO: 282328 - protein, 345 aa, unidentified
MELFTLGIDLGKTVFHFVAVNARGQVVVRKKGSRTQLLRFTSNLPECLIGMEACGGSHFLGRALREQGHDVRLMPAQYVKPYVKTNKNDYIDAEACSEAVTRPTMRFVPIKTDDQLDLQSLHRVRERWVVRRTAVINQIRGMLLERGITIRKGRHYIEESLPGILEDADNKLSGALRVLLTQLRSEMQYLHGQIEETNKLIARICGELEQCTRLVAIPGIGPITATATVAAIGNGAAFKKGRGFSAWLGVVPGEHSTGGKQKLTGTSRRGNKYLRKLFVQGAHTVLLQKTKQSSSLSTWLVNLTSRKRPQVATVALANKMARMAWAVLFKGEAYRPPTVPQVIAA

SEQ ID NO: 282329 - protein, 332 aa, unidentified
MKYKVFIGIDVSKLTIDVHLHGIGASKTFSNEEKGFALFLSWVKKHSKQSEPAEMIICFEHTGMYSIKLATYLNDIGIPFAMIPALQIKQSIGIRRGKNDQIDAQRIAEYAWLHRETIQATLLPAKSILKLQSLLTLRNRLVCDRGGYEGTWKEQKKALEGKEHKGIFQVYKSLIMNLTVQVKKIEEQIKAVIESDEAVKLNYQLLTSIKCVGPVLAANMIAYTHNFTRFATWRKFACYVGTAPFEHQSGTSIKGRTRVSSLSNKQLKKLIHMVAICACAYNPEMKTYYKRRVSEGKNKMSTLNVLCNKIISRMFGVVNRGSGYVDLMKYAA

SEQ ID NO: 282330 - protein, 346 aa, unidentified
MKITTIGVDLAKEVFQIHGVDAHGKAVLRKQLRRGEMAKFFANQEPCLIGMEACGSAHHWARKLGEFGHTVKLMAPQFVKPYVKTNKNDMADAEAICEAVSRPNMRFVPIKNIEQQAILSVHRARQGFVKARTAQANQIRGLLSEFGIVMPQGIKSIAKRMPDILEDAENSLPGTMRKLLERLNDNLKEMDRQVAELELQIKLWHHANEASRKLEALPGIGPITASAIVATVGNATEFKDGRQLAAWLGLVPKQHSSGGKQALLGISKRGDTYLRTLLIHGARAVIRFAENKTEPNHWLCKLMARRNKNVAAVALANKNARIIWALLSKGKAYEQDYIPTAKTATA

SEQ ID NO: 282331 - protein, 368 aa, unidentified
MNNYTLEVARTAGAKELKNQKAAKAKRIVMGTDVHSRSYQAARKIDNGPIGAVAKFRSQEELLLYVEKQKEQAEEVVVVYEAGPLGYVLYRALKARGLRCYVCAPDSREQKRKRRKNNTIDTRTLTSNLFNYLHGNERALQLVRVPTEEQEQARWQSRQHDQLVEERKRLGAKGNALLLSRGFGSWKNWWRPKAFSRLSQLVPGWLLELLETWVDLLRKLDEKIRRAKVALAKRCSGLRPKGVGAPSLVQLQSEVLDWGRYRNRRKIGCLAGMVPSEWSTGDTQRRGSITKVGVGAIRRIITEMVWRIILFQPQYKAVQKWQEVLRGSNRGLKKKAVVAIGRQLMVDLWRLQTGRISAQELNLVMIGG

SEQ ID NO: 282332 - protein, 444 aa, unidentified
MKVIKVSALRERGLRPVGRVAEPQVVGHAPQTTKERRANTMKTYILRETKTVEPQKSVRRPRPQTTIPAPAKGPLLFTGLDVHNDSIAVSLAPSDSTEVRRYGIIGGEHDDVLKLAKKLQAAHPESTLKFCYEAGPRGFALCRCLRSHGLDCILVCPSKVPRKPGDRVKTDRRDADQLARLYRAGELTGIYVPEPEDEAMRDLIRARFQVGKGQHRARQQLKMYLLRHNLRYGGQTSWSAAHLRYLAQIKMPFPVQQIVFQEMLEVITEATERLERYDREIERAVPNWRWEPVVRALMSLRGMALLHAATLVAELGDFRRFDHPSQLMSYLGLVPSEHTTGKDRQQGGITKMGNGPARRALVEAAWQYVAPARISPPLRKRQEGLPKAVTDIAWKAQCRLHHRYLHLTRVGKKKSQVAVTAVARELSGFVWAIGCLVQPRAAQP

SEQ ID NO: 282333 - protein, 412 aa, unidentified
MKDLLEISCGLDIHKEKIVACILTGPLGKPTHSEIREFTTLIPDMLALRDWIISENCHHIAMESTGIYWIPIYEILEDAFSGDITLLVVNARHMKNVPGKKTDMRDSEWISTLLRAGLLNASFIPEKRIREFRDLNRYRKSIIRDITSQKNRVEKFLQSSGFRLSSFISDIFGASGRNIILHLMEHGQIDKISLDSYLKTKTRKRIDEILMSVNGTLSEHQKSFLKILMCHYDSMKEHLIEIETHLQEDMLPFALQIEQLNTIYGISTTASCAIIAEIGTDMKPFKTAEHICSWAGLCPGNNESAGKRKSTSITKGNPYIKSMLCEIAWVIAGKRNTYLSAWYWRIKQKKGARKAIVALARKLLVIIYTMLKQGTNFDENCFEVRRKNCEQKQLSRYIRELEKHGYTVEAQV

SEQ ID NO: 282334 - protein, 407 aa, unidentified
MDILIERACGLDVHKDNITACIITPKGKEIETFSTKTVYLIGLVDWIKEHKCTHVAMESTSVYWKPIVNLLEAEDIEFLVVNAQHIKAVPGRKTDVKDAEWIAKLLRHGLLKASFIPDRKQRELRELVRYRRSIIEERARQLNRIQKVLEGANIKLGSVVSNITGVSSLDMLRSIANGVEDLDVLANYGRGVMKQKKEQLKLALQGYIQDHQRFMIKTIIDHYDYLTNTIDMLDEEIAQRMSEYQEDIERLDSIPGIATRMAEQILAELGTNIKKQFPTAPQMCSWAGLVPGNNESAGKRKSSRTRNGNKYLKSALIEAAHSLRGSKTYLGALYRRTAARKGRKRAAIVVAHAILRIAYYLLTRKEMYVDLGEDHFDKQRKQSIVNHSLRRLESLGYTVDIKEQEVS

SEQ ID NO: 282335 - protein, 376 aa, unidentified
MNEKLRFLGLDVHAETIAVAVAEPNGEVRSLGTIANREDSIRKFIRKLGSPEHLRACYEAGPTGFVLYWQLTQLGVKCDVVAPSLVPKKPGDRVKTDRRDALKLARSHRSDDLTAVWVPDEGSEALRDLVRAREAAKQDQLRAKHRLTKFLLRTGQRPPLGVKAWTEKYVEWVQQVRYTHPAQEATLLDCLNEVQHMEERVKRLEQSIVEVIQLAPAPMQEVVRGLQALRGVAHISAVTIAVELGNITSRFERARDLMGYSGAFPSEDSSGKRIRRGGITKSGNAHLRRIVVESAWSYRHRPAIGARLRRRQEGLPAEIIEIAWKAQNRLHKRYMTLMARGKEQRKTMTAIARELLGFIWAIGIKAEAACKQQMAA

SEQ ID NO: 282336 - protein, 479 aa, unidentified
MEQEEAGQPPPRRLVGIDLGIASRHSVRVLEADGRVVCRSSCVPTVESLGRLEQAALAGAPEGTRLVVVFEPTGPAWLPIAVFFAQRGHAVHRVSSAKAADLRRFLRRHAKSNGIDAETLARIPLADPGGLQPLELPGTAAAALDRRVRACARLTQAAAEHKTRIKDLVRQLMPVTPLTGDIGQADLEVLEHYSDPRALLAAGLAELTQMITAASHHQQGHDRARQWRDAAAAAVELYQDHPAVPFAELAAEVATEIRLLRAIQTELAAHAAARERHYVQADPGQLARSLPGFAEISAPVLVAAIGRPGRFRDGTKFKSYVGLAPKASETGETDRKGQSMSKAGPSLLRATFYRAADTARRQDPQLARIYYVQMTERGATHLKACCIVAGHLAERAWAVLNRGTPYEICDNQGNPVTPAEAKKIIADRWTVPEEIRKRRRNRKIAGKAPQPPLTRPDTRGDLPRPRSSRPHAKAVNPAT

SEQ ID NO: 282337 - protein, 388 aa, unidentified
MNYAGIDISKYKHDCFILGCFGEIVNDGFTFSNNAEGFRQLQSELERCGKGNIQIGFEATGNYGINLKLFLERIGFDFMEINPFLIKEHIRGNTLRRTKTDRLDAKAIAGYMLEKSFKPHPSEFYPKFALKQLTRLRSSLVTGRSRYLIQLTNVLDCVFPEFKPLFDNKFSVTALYILANYQSPEAIANMNSRSYDILRRKSRGKFSMSKFVKLKELARNTVGVFDECYRIELETLLDLYCQIDAKIQETEAEISKIIKKLNPPTLSIRGVGSTSAAAIVSEFGNFSRFENPNKMLSFAGLEPGYFQSGTSEHNGHMVKRGSSHLRCALMNSANSVKLHNEVFAVYYHKKIAEGKPHHVAMSHVAKKLVRLIFALETKGEMFDSSRLR

SEQ ID NO: 282338 - protein, 387 aa, unidentified
MPQPNDLSRSLVALDQNSTIIAVIEMSQSSWLVAGMLPGIERQPRKKLEPSPERLLALLRRWQDEAVRAGRTITRIALAFEAGRDGFWLARWLEARGVEAHVIHASSVAVSREHRRAKTDRLDTELLKRGFLGWLRGERGHCSMARVPTIAEEDAKRPNRERDCLVGERTRIVNRIKSTLARLGIRNFKPILRKAAERLATVHTPEGMPLPPNTLAELQRDMARLGFVVSQIREIEDARQKRLEQQSETGPHAMVRLLARIVGVGVETADMLVHELLSRPMRDRRAVARYAGLTGSPDESGAQRREQGLARAGNARVRRGMIQLAWRFLMFQQESALALWYRARTADSRSGTRKTMIVALARKLVIALWRFVTTGEPLEGVVLRPAS

SEQ ID NO: 282339 - protein, 428 aa, unidentified
MADLLEGTLPLNLVAIDIARYSNAVLIELSDGKRQRFRMTNSAPDFDRLLSYLQALPGNCRVALEPTGDYHRPLAHRLLTAGHEVVSINSVAQARYLEAMFNSWDKNDPKDAQVILEMLRRGTYQRYVDPQIAGHHDLQELAKTYYQVSRARTKVQHSLINHSLPLYFPETHRYWCTTRNEWFVRFLLEFPTPTYVRALDRESFVAAAWDLVGRKVNKRAKLEEIWETAAHTAALPHAPDCLAVETFRITLRRYQELNVLRAAIEARAEAELHDNIDFAHLKTLPGIGSVIAMTILAEAGDLRRFGHHRQFLKYCGFDLAKIQSGTQRGREQLSKRGNARLRLAFWMAGMAAVRMKENSFRSKYERYVHADPDDADLKRKALTAVAAKMARVAYSMIKKNQPYRQFFELGLPSGSIPLSAAVGAQATP

SEQ ID NO: 282340 - protein, 317 aa, unidentified
MDAKTEADRFIGIDVSKARVDVHVRPDGTAFYCTTDPDGLAELVGRLMPLRPRLVVLEASGGYEGVVAAALTEAGLPVAIVNPRQVRKFAGAIGRLAKTDAIDAAVIAHFAQAVHPAARPMPDDLALRLAELMARRRQLVIMINAEKQRLARARDQITQRSLRAVLKSLEAERARIDKAIDKLIEASPVWCAKQDLLKSVPGIGNVVARTLIAELPELGQVGRHQIAALAGVAPMNRDSGRYRGKRKIQAGRVEVRAPLYMACLVAIRHNPTLKRFYRRLRDAGKPARLALVAAMRKLLTILNAILRDRKPWASAQS

SEQ ID NO: 282341 - protein, 331 aa, unidentified
MVDDKRYVGIDVAKARLDVALGLNGERFAVANDERGIRALLKRLEPNDLVIIEATGGLEVPVASTLATAGIAVAVVNPRQVRDFARATGQLAKTDALDAQVLVRFGAAVKPQVRALPDAQAQALEALVNRRRQLVEMLTAEKNRRANSPKVIHKSIDEHIHWLEKRLAGFDDELTALVRATPIWRERDELLRSVPGVGPVLATTLLAYLPELGALNRKQIAALAGLAPFNRDSGSLRGSRCIWGGRAQVRRVLYMAVVSAVRSNPVIKNFYAQLRARGKYPKSALTACMRKLLVILNAMLHNNTYWHATALTSSTSALYPLVGAVSEHGCC

SEQ ID NO: 282342 - protein, 342 aa, unidentified
MQISTIGIDIGKNSFHFVGFDARGAIVIRRQCSRTQLVRALANVPPCLVGMEACCGAHHLGRILIAQGHDVRLIPPQYVKPFVKSHKNDLLDAEAIGEAVQRPTMRFVPLKTMEQLDLQAIHRLRTRLVGRRTAVINQMRGFLLERGVTCPIGREALVKRLPEVLDNPALGLSVRFCRLLKQLRDEWRLLDDDIEEVDHEILSLARDDEACDRLMQVPGIGPLTATALVAAVGNGAAFGKGRDLAAWLGLVPRQHSTGGKTMLRGISKRGNAYLRSLFIHGARSVCRHHHQKPHRLGRWLTSLEARAHPNVVAVALANKLVRTAWAVLQRNSHYDGRLLANA

SEQ ID NO: 282343 - protein, 478 aa, unidentified
MARTRKKPVPAPAGEGVEVIDAPVQVIARAAAIDVAKGSGMVCTRLPSETRAGRRTQRVWEVTATFAAVVTLMDHLVNQGIERLVLESTSDYWRIWYYLAEAAGLEVWLVNARDVKHLPGRSKSDKLDCVWLCKLNERGMLRRSFVPPGQIRDLRALTRLRARLVHDRTRHQNRIEKILEDSLLKISSLISDLMGVSGRRMLAALVNGERSPKALAALGDYRLRATPAQLEAALTGRFRDIHAFEIGMLLELTDDLTAKITRLDQQITGLLEQIPGISGACTSCGVIGGGHAPACASDQAQVLSVIERLDEITGAGPDTAQVIVAELGTDMTQFPTPGHAAAWAKLTSRTIQSGATTKNGRTGKGNPYLRGALGAAVMTAANTDTFLGERYRRLARRRGKQKAIVAVARTICEIAYLIINDPGFRYIELGAGYYARLDPERQTSNKIRELEKLNPGMVVTLTPREPDPGTPATQTPAA

SEQ ID NO: 282344 - protein, 314 aa, unidentified
MNVTYIGIDISKAHLDLAMAGTGPVRLANSEAGVAGLLERLAGIERPHVVCEATGRHTRRLARGLGAGGIALSRVNPRRVRDLARASGQLAKTDAIDAAMILRFAQTMQPQPDPPPQPHATELADLVRRRRQLVDMLASEKQRAAEPESDPIRASLAAHIAFMNAQVKAFDTAITAAIAADTALKARAGLLCSIPGIGATTAAVLVAALPELGLIDKKAIAALAGVAPFVRESGQFRGQAHIAGGRLSVRCALYMATLSAIRANPPIKAFYKHLRDAGKPAKLAIVAAMRKLLITANAILATNRPWSASLTNHP

SEQ ID NO: 282345 - protein, 347 aa, unidentified
MNRNQPQECAVFGIDIGKNPFHVVGLDCSGAIVQRVKFRRETLLQFFERAHRTLVGMEACPGSQWLARKLQTMGHSVRIIPAQFVKPYVKSNKNDIIDAAAIAEAATRPTMRFVGVKQADQVDLQMLHRVRSRLVSARTNLICQMRAYCLEHGVAMRQGAGVFKVDICRVMDDLDNDLTPMARSVLRDLHDDFRRLEARIKQVSDDIEKIADTDERARRLMTIPGIGPLGATAILSAIGDPTRFSKARDVAAWLGLVPRQYSTGGKQNLLSISKRGNNYLRRLIIHGARSCMLHLDRGKDRLGVWIDTLRLRMHVNKVTVALAAKLARIVWVVLTKPGATYMRQVAA

SEQ ID NO: 282346 - protein, 340 aa, unidentified
MHITRIGIDLAKNTFSICGVDVNDKIVLERTLKRKELLAFFAKTTTCVVAMEAGSGAHHWARELMKLGHDARILDPKFVVPYRTGNKQSKNDRNDARAICEAAGRPHMRFVPIKSDEQQATLIIHRRRRALVTEHTRTANQIRGFLAEFGVIAPKGVNSLKREWHRLRTDYALHVPAMAWEEIDPLYRHLLDVHQQILAYDRRINALNREDARAQRLLDINGVGPVTASAIVATVGDATLFKNGRQFAAWLGLTPRAYSTGGKSRLGRITKRGDVYLRTLLVHSARSELRLTHKRTDNKSQWAEHLRESKSWNKTAVALANKHARVIWAILAKGETFKPV

SEQ ID NO: 282347 - protein, 334 aa, unidentified
MQNITLIGIDLGKHSFHIHCQDKSGKALLRKKFTRTKLMQFLATCPPSVVVMEACAGAHFMARCISDFGHETKLISPQFVRPFVKSNKNDFVDAEAICEAASRPSMRFVQPRTETQQAMRALHRVRESLIRDKVKTTNQIHGFLLEFGISLPIGDAVIKRLSLVLAEHEIPEYLSRLLVRLHTHYFYLVEQIAELESELSQSINADDTAQRIMTIPGVGPITASLLSSQLGDGKQFSCSRDFAASTGLVPRQYSTGGKSTLLGISKRGDKNLRRLLVQCARSFIMRLERQHGKLAEWVREQLNKKHSNVVTCALANKLARIAWAITTQKKEYQA

SEQ ID NO: 282348 - protein, 343 aa, unidentified
MQVNTIGIDIAKNVFQLHGVDAQGKVTLVRQLRRNQMIAFFAKLPACLIGMEACATSHHWAREITKLGHEVKLIPPAYVKAYVKRQKNDAADAAAICEAVTRPSMRFVPIKSAEQQSTLAIHRTRNLLISQRTQLINALRAHLAELGLVAEQGCDGLARLIAMLKDESMLQSLPAAMLEALRAMVAQLAALQAQIGELDRCIKAQHRASDVSRRLATIPSIGLIGATALTATITDPSAFKSGRDLAAWIGLVPRQNSTGGKERLGSITKQGDRYLRRLLVAGAMAVVQQARRHPEKYPWIARLLARKPAKLVAIAIANKTARIAWAVMTRGETYRSPVLLATA

SEQ ID NO: 282349 - protein, 407 aa, unidentified
MKRFAGIDIGSERHVVAVVDEQLAVLVKPSAFGEEAAGYQRLVELLGSPQDCLVAMEATGHYWRNLFAYLVSEGFSVALLNPIRTRRFAEEELERTKTDSVDALGIARFAAQKDPPASQLAAEGLDELREAVRLRERLLQDCGDHVRQLHRALDLSFPEFTRYVRSLNSELATTLLAHYPTAAAMGKVSVKRLANLRYDGRHHIGETLARELHDAAKLSVGRHQSEPYQLRIRYACEDIVRLRQRLRELDADIARRLERHQVGKLLTTIEGIGPQTAACIIAELGDPARFGSIKALASYVGVIPRLRQSGKRRLSGRRLLPLGNARLRRALWMPTLSAIRVNPWLRGYYLRLRAAGKRPKVALVAAMHKLLSAIFSVARRRQPFVTSLVFPPAAAAVAGDAVLQKPS

SEQ ID NO: 282350 - protein, 360 aa, unidentified
MIVQGTSVGLDVHALSVVAHAVDEETGKVARARLCPDHGEVLGWLHQLRAPVRVTYEAGPTGFGLARAITEAGMECVVAAPSKLQRPAGDRIKTDARDAAHLARLLRLGEITGVRVPEREIEAVRDLVRAREDARADLMRVRHRLSKLLLRQGFVYSGGTPWTCAHEEWLRRHRFDDVHLKAAFDHGFDAVLAATAARDRLDEQIMVVAASPRFADPVNRLGCLRGISALTGLALTVEIGDWSRFTGSSIGAYVGLVPSEYSSGNSRVQGSITKAGNTHVRRLLIESAWHHRKSYSTSGPTLRARWAKVDPALRARGHAGNRRLNKRWRGFTERGKNPLVANVAVARELAGWCWSLATMQ

SEQ ID NO: 282351 - protein, 358 aa, unidentified
MVSQISTRSIPGAPVRRVCAAARGKRLIAEPLVSLSLPLPLGPDSLLADPAFVGVDVSKSWVDFADTNGRKGRVENEYAPLKAALLGPWSNCANMVCEATGGYERVLMRVAREVGAPLRRIHPNRARAFGQATGRLARTDPLDARTLAKFAAFTVDEPCAPLPDPKAQELADMVSRLTQLTDLHQSEACRVKMLVGPAIKKSILAVMKTIKAQIDAMQEAIDAFVAADSRLSENTKILRSCKGVGPKSAQAILGMLPEIGTLNRRKIAALVGVAPITKASGSSINHATITGGRKGLRDILFMAALTASKHNPTFTSFYDRLRAAGKPHKVALIAVLRKLITTLNAMINSRQMFDSALT

SEQ ID NO: 282352 - protein, 344 aa, unidentified
MKHYIGLDVSMKETSICIIEETGSIVFEGKEITDPKLLADRLKRLCSSIEKVALESGSLSNWLTNELLKEGLPAVCIDARHMSKVLSTRPNKNDRNDAQGIAQALRAGYVREVSIRSQGKTDIGVMLTARKMLECQRRTVKNTIRGLLKSYGIRIQTSGPKLFIEKVREHIRNMPLLCQLSIESLIKSYQVIDDQVSELTGHLNRIGMKDEDVRLLMTIPGVGMITALSFMVVLQNPRRFLNSRDVGAYLGMTPRQYSSGEVQKTGRISKCGHGQMRSLLVEAGTVMLTRTKSWCKPKAWALKIARKKGMKKAAVALGRKLSVIMHRMLITKEEFRFGEKLEAA

SEQ ID NO: 282353 - protein, 400 aa, unidentified
MALAVGIDVAKETHWAAIRVAETGKVLASHPVDNTPQPIADLIAEIRAAEADHGPATVGIDILGGIAALAEAMLLAEGLMVVHVPGLAVNRARRATRGGEHKSDPKDAAVIADQVRVRDDLRTVEPAREIDVELRLLAGRRSEIVVDQTRRAARIRDLLVSVFPGLERQVDVTTLTGLHLLTRYVTPGEIRRAGKARLTAHLRRAGRVRQTTIDALAAAAAAAAQAQRIAVPGEAVAAGLIRSLAAEALAGRDQLAAIDKQIGEVLARHPDAALIRSLPGMGATLTAEFLAITSGVSRFPDGDRLAAAAGLAPVLKQSGKVRYLHRATAGDKALKRVFYQSAFIATGCDPASKTYYRRKRAEGKTHHQAVLALARRRVNVLHAMLRDQTPYKPGHVSAAA

SEQ ID NO: 282354 - protein, 458 aa, unidentified
MKPEIYVGIDWARTQHTVCLLNIEGKRMGLFKVEATAKGNDVLLREIRKHKAPCVIAIEREDLPVVSFMREEGFTVLIVEPSRTRFLRDEIRKGGSKTDEIDARAIAEYARTKAHLLTERHPDMEPATVWIRKLYSHRRSMVSERSAKTFRLKDLLSRVAPGYYYAFEHIGPSATRFILRALEGKLHLRAEDIEPLARATGFNRPDSITRIKKFLCSEPVSPEMRFHMEEIRYLCEDIITLSERIKKAEKDMARAYEGHPGSELFKGIPGVNLVLGCGIISLLSRGFSSPEHLAAFSGVAPRVSRTGKGPGLVCYRKACNKQARDTLTQLARSSILWCSWAREMYHRLRKRGKRHYHALRIIARVWTRILFAVWRDNRPYNENIYLAARERQRSCLSKSSPSPGPSSSGSLSPCSTVAADPSSPSPPRATVSRHREVPGPDQPLLQVGPYSERKRSGG

SEQ ID NO: 282355 - protein, 455 aa, unidentified
MEKNTLLKENLCHDISIGCDVHSNNVVCCCLKKMDDGNILQTKERFSTDYKSLPSFAEWCKRYDPGVVVMESTANYWMSPYDVLEQAGLPITIVNPCYVKGMAGHKTDQEDAHWLAQIGMNGSYKQSYIPDQYYRHLQVAERNLSKQIDTLKDYKNRETKCFVTAGYRLSVFSDEFGKFAMMAKDAILEGKTPEEIYSLLSKEKAFRRLKASKQELLEAFHGNMTEPIKHAIESNRRIYTAIEQEIASNKEYILSEVKKSDGEAFQLLQTIPGINELSAATILIEIGGTAKFLENFTKAENFVSWLGLCPGNNDSNSKRTGKKGRHGNKYVRKSFCEVAQASSRTKGTTFRSKFQSLRIRLGVKRSIVAIAHKIAKMVHYVLKHHCAYRDPMIDYKALSCQKNKSRWLKQLAACKDIELVAVNKVTGETINSKDFQKYEQIRRADALKKAVAGII

SEQ ID NO: 282356 - protein, 414 aa, unidentified
MWRRRATKFSSRLPATGGRRRLTVLNSRSEHDRFVTTLASYDRPVICAFEATGNYHRPLAWRLINAGFEARLVSSMALARTREALHNGWDKNDPKDAQVILHMLQIGATQCYHDPLAAGINDAQELSKTHEAISRAKTEIQHRILTHYLPLYFPEVERFKGNSRSDWFFAFLERFPTPASIIALSKEAFLEAAWPVIGRKVSKERLLADIYETAKASIGLPLPPESPAIRMFRMIIAEARSLIRQRGEIELMADSLLQDNVDYQSLRRIPGIGPINALTIIAEAGDLRRFGHHRQFLKFCGLDLAALQSGAFRGQTKLSKFGNARLRRTLWLAGQVAIRQRDNSFRDKFERYIARDRDNPDLRRKALTAITAKMARVVHAVIKSGSDYRPFIEGPVPGGRTSLSKCREGASATL

SEQ ID NO: 282357 - protein, 294 aa, unidentified
MTIVGCDFHPGWQQVAIFDSETGEIRELKLENGNGEVERFYRELSSPALIGFEACGNTQWFEDLLHQLGHEVWMGDAAEIRASYVRKQKTDRRDAAHILKLLLESRFPRLWRPSAAERDLRQLLIHRQKLVGIRARVKNGLQHLMLNKGVQMKRKLWSEAGQKALRALPLEGWAAQRRQDLLHLLSSLDPQVRQLDMAIERAAQENPRARLLMTQPGVGPITALAYVLTMGDVSRFKRGKQVASYLGLIPSERSSSNRRRLGSISKQGNSFMRMLLVESAQTVNRLDEGFRKQY

SEQ ID NO: 282358 - protein, 526 aa, unidentified
MASSNKHAKLPPCDEGRYTSDGLRNVTLEDGTRVITSPLNDIKRPVCGAVDVHKSVLMAAACVTDKESLSAVFYVRQFTTSNSDIRLMAGWFVSYGVRDVCMESTGKYWIPVYDILEQNGMKPVLTHPKYVKQAKGKKTDFRDAIHIANLFRMELVAASFIPPADIRDLRELCRYRLKLTDIRTSEKNRIQNSMTISKVRLDSVFTDPFGKSASDIMSYLIQTDPKEVSEKKILSFVRHGVKASPEEILDSIHGYEFLGVQRDKLEIIRTHMDNLNKCIGMIDEKLSYYHWKYRKVIRHLVTMIGISEESALYILGEIGADMSVWRDSASLASWAGLSPANNSSAGKNKTTRIGKGGHYLKPLLVQCALAAIKSTKKHPYFYHKYLTLKKRRGHKKAIIAIARKMLVAIYHMIRDDKDFEPIDYEKVVTRKQSQKELNLTNIIEFLGEQGVDPETIRTVETQCSQTGQAGEETKTGKPRKSRQKKQPKSKTEATPTEQKPAKRRGRPLKSPQTKSQSSTQPAAATA

SEQ ID NO: 282359 - protein, 317 aa, unidentified
MAMQVGKLIVGADVAKAELVIHHDERDEIVRLKNSKPEIRKWLKQQPLNTAIAVEATNVYHLDLVELAHRLGFEVYVIDGFQLSNYRKSVGGRVKTDPSDARLLSRFLKNEGEDLRPWSPPPAVYGKLQSLLRRRAALVSARTAMTQSWANEGLLKTAFNTFVRSIDRLDQLIQKKIKDVLREAGLHEQVARCQAVEGIGFLTATALVMAFTRGEFKSSDSYIAFLGMDLRVSDSGQKNGRRCLTKRGCSEIRRLLHNAAMAASKSPVWKEDYKRYLNNGKATTQALVILARKLARVAFALMKNQDEYTTKGVKTAC

SEQ ID NO: 282360 - protein, 421 aa, unidentified
MTEEIEWFVGFDWASQTHVVCLLDRHGETIGEREVAHGGADLSELCDWLVAKSGAPPARIGVAIETPRGPVVETLLERGFAVFAINPKQLDRFRDRFTVAGAKDDRRDGRVLGDSLRTDRRAFRRLAVDDPTLIELREWSRIAEELKEERSRLANRIRQQLWRYYPQMLQAADDLAAENFLALWEFAPTPAKAARIDEAGLAKVLKDHRVRRIGAAELLRVLRQTPLEVAAGATEAAVAHIKIAAERARLVNRQIREAEQKLEALCARLEQPGDGERESEPGQRFGQRDVTILRSLPGVGRTNLATLLAEAAEPWRRRDYQVLRVLSGAAPVTRRSGKARQVVRRSACNERLREALYHWARVAMQTDPQCRERYAALRRRGKSHGRALRTLGDRLLAMACAMLRNQTLYDPNYKSASPVAV

SEQ ID NO: 282361 - protein, 414 aa, unidentified
MDVVYERCAGIDISKADVKVCIRVPGRGKGTRRRGEVRTFPALTSGLLEMRDWLLAEGVTVVGMEATGSYWKPVFYLLENDMDCWLLNARHMKAVPGRKTDVKDSEWIAKLVEHGLVRTSFVPPRPIRQLRDLTRYRTDVVRERAREAQRLQNLLEDCGIKLTSVVSDFLGVSGRRMLEALIGGTRDPKMLAELAAPNLRTRREVLVEALTGYFTDHHAFLARTMLDRIDEATAMERRLNARIAEHVRPFQRQVELLATIPGVSAHTAEVILAEIGADITRFPSAGHLASWAGLCPGNYESAGKSPSGRTRPGDAWLKGVLGQAAISACHTKDTYLAARYRRLVGRRGRRRALVALQHSIIVSIWHMFTHDKEYADLGGDYFLERTGKTRATRRLVSQLNHLGYQVTLQPVQAT

SEQ ID NO: 282362 - protein, 342 aa, unidentified
MSTIKTIGVDLAKNVFSIHGVDAYGKCVLRKTVKRNKLLDTFAKLPPCLIGMEACSGAHHWARELLKLGHNPKIMASKFVIPYRQNEKNDANDAEAICEAVSRPKTRFVSIKSEEQQAVLCLHRIRQGLIKTRTATINQLRGLLSEFGIVMPQGRYSAQNTIGSVLEDAENGLPILARELLQDLSNKIQNLNLEVLHYDRRVSALVHEMASAKALMDIPGVGEHSASAIVATVNDAKQFGSSRQFSAWIGLVPRQYSTGGHVHLGRISKRGEKHIRTLLIHGARAVIARCKEKTDRNSIWLNQLVERRGYKRAAVALAAKNARIIWALLTTGKEYKINYVNG

SEQ ID NO: 282363 - protein, 362 aa, unidentified
MRPAPNMRVGGQAMEHYVGIDVSLELSSVCVVDVVGKIVAEAKVESHPAAIINFLRKLGLSIERIGLEAGPLSQWLHAGLTKGGFETVLLETRHVKAALSAMTVKTDRRDARGIAQLLRMGWFRPVHCKSPGSQEVRALLVARKQLLGKLLDVEFSIRGILRGFGLKMGVVTRSGFEARVRELCAGQAMLEQIAEAMLAARAALRKEYSKLHKAMLALVRRDEICRRLMSAPGVGPLVAITFKTAIDDPARIRKSKAVGALLGLTPRKYQSGETDVTGGVSCVGDEMARTALYEAANAVLSRVTRFSALKRWGMDVAKRRGTKRAKVALARKLGVILHRMWMEGTSFRWTKEASKAPQVARA

SEQ ID NO: 282364 - protein, 316 aa, unidentified
MSELVYVGIDIAKNSFEVAVTGELQTLNLANDEAGHAQLCQCLAPLAPRLILMEATGGYEQDLALALAGAGLRVSVVNPRQARDFARCVGKLAKTDRIDAQALRSFASMLDAQGHQPRALADDERRELTALVVRRRQLLTMLVSERQRLGVAHRKAKPSILAIMDAIAAQLHDVDDELKAHVQTHHADLAKLLTSVKGVGPTTACTLLAQLPELGQLNRKQITALVGLAPMNRDSGTLRGQRHIFGGRADMRRVLYVAALVGTRFNPVLKAFYAKLLAAGKAKKVALVTCMHKLLVILNAIARTRSPWRDDFAERL

SEQ ID NO: 282365 - protein, 330 aa, unidentified
MTPITVAWLGIDVAKDKLDCVLLNAAAKRKHKVVENDIQGFTDLTQWLTQHLPPDTAADAIHVVMEATGVYWEAVALHLADAGYRVSVVNPAQIKAHGTSRAVRTKTDKVDAALIADFAQTMKPALWRPPSPSERALRAQVMRLDGLIRMKTQELNRLPVAAEAVSDSVARHIAWLDAEIDHLTADIKRNIYDDPDLRGKAALLDSIPGLGERTIPLLLSFIADITRFATARQVAAYAGLNPKLHESGSSVKGKPRLSKIGHASLRKALYMPAMVTLYRTAWGKSFRTRLSQAGKPAKLIIGAMMRKLLHVAYGVLKSAKPFDPTLHNNA

SEQ ID NO: 282366 - protein, 416 aa, unidentified
MNAVGIDVSSRKSTVAVLRPLGEVVCLPFDVTHDIAGLASLVEKLKALDGETRVVMEHTGRYYEAVEKALHEAGLFVCAVNPLLIKEYGANSLRRVKTDKADAVKIARYALDNWADLRDFTPMDAIRYDLKTLNRQFQLASKQRTASANNLIALLEQSFPGIRKCFDSPVRSDGTQKWVDFAHSFWHVDCVRKQPFAAFCERYRKWCKRHAYLFKLSNAEEVYALTKRAVVLTPKSKVVKVLVQEAANQLISISRSVEVYRAEMDRLAAMLPEYPVVMAMYGVGKSYGPQLMAEIGDVRRFERKQALVAFAGIDPMPNQSGDKNVRSNKSSKRGSPYLRKTLFNVIRTYLQCAPQDEPVFQFLNRKRAEGKPFYVYMLAAANKFLRRYYAKLRDYFASLDTLQPVAPIPTILKATL

SEQ ID NO: 282367 - protein, 347 aa, unidentified
MEVTTVGIDLAKNVFQLHGSDARGRIVLRKQLGRRQLLAFVARLPRCVVAMEACASAHYWAREIEKLGHQVRLINPRFVRPYVKANKNDTSDAEAICEAAGRPAMRFVAVKTAGQQDVQAVHRVRQQLVKSHTALMNQVRGLLAEQGIVIPQGAAHLHRSLPQILADEDNQLSGVMRELLNEIRERLKYLEERMRQYELRIRRLFREDERCQRLAQVEGVGPLTATALVAAVGNAAEFKSGRELAAYLGLVPRHRASGGRTTMLGISKRGDRYLRTLLVHGARAALRVNQHRQTTRGAWIERLKFRRGSNIAAVALAHKNARVLWALLRTGECYRPTPFSARVPQAG

SEQ ID NO: 282368 - protein, 366 aa, unidentified
MKKTSTVQALKNEIFKGRKLTIGLDLGDRWSFYCVMDEAGQIILEQTLPTTPEAMKQTFGKIPRCLMALETGTHSPWVSRLLSELGQEVIVAHAQKVQWITKSSRKDDRHDARTLARLARVDPELLGPVRHRSAQAQLHLTVIRARAELVRARTALVNAARGLVKSYGQRLPKCGTYQVSEKLAEGLSAELREVLVPLFKEIESLNEHIKEYDERMEKLAKEMYPEVALLQQVKGVGTQIALTYVLTIEDPHRFAKSREVGCFLGLRPGRRNSGQSEPQKGISKEGDRYLRTMLVQGAHYILGPFGEDSDLRRWGHKLAERGGKNAKKRAVVAVARKLAVLLHRLWVGGEVYEPLRNSQKAMREVA

SEQ ID NO: 282369 - protein, 341 aa, unidentified
MKIRSIGIDLGKTTFHLVALGERSNILWKKKLSRKQLLALTANLPASLIGLEACSGSHFLARALREQGHDARLIPAQFVKPFLKSNKNDFLDAEAIAEAVERENMRFVPIKTDDQLDLQALHRVRERLVSRRTAVINQTRAFLLERGVTFRKGPASLRRQMPEILENADAQLSPRIRALLATLWEEWKQLDEQVDSFNTQIESIGSDDAVCQRLREIPGVGPLIASAVVASIGNGAAFHKGREFAAWLGLIPKQYSTGGKAKLLGISKRGNRYLRTMFIHGARSLVLRVNRERCPLGSWISSLEARAHRNVVIVAMAHKLARITWAVLSSGERYRPALKAA

SEQ ID NO: 282370 - protein, 388 aa, unidentified
MSSTSNPRELTEIAFRPDHATVYVSLELSRSKWLVTSLSAWRDKMSKHSVDAGDGAALLDRLARLRMEAEQRLGTPARVVVIQEAGLDGFWIHRLLEAGGIESHVVEPASIAVPRRHRRAKTDVIDGEMLVRTLAAFKRGEPRVCSMVVAPSPEEEDRRRVSRERRTLIKERIEHANRIKGLLASQGISGCEPMRRSFRDRLESLRTGDGRPLGLRLKAEIGRELDRMDLVLRQIAAVEADRDALVRPDHADVEAPAARLMKLRGIGPEFAAVLWLEGLFRRFANRRQLAAYAGLAPSPWQSGRVDREQGIAKSGNPRLRTAMVELAWLWLRHQPDSALSRWFRERVGSERGRIRRIAIVALARKLLAALWRYTTSGELPVGATLKTA

SEQ ID NO: 282371 - protein, 473 aa, unidentified
MSKGSGNGTTRGDRRRNARRERLRALLPRDGAVVGIDLAEDKQALAVIDHDVRVLARKTVKAKAFRLGEALDWAVAQAKVKGFARVTVACEPTGPRWLQVQRLCAERGLPLVCIQPLISHIAREQQDYTTHKTDESDCVMIARLAIELHCYIPEELDETWAHLRHLGRRRAQLITAATASAQRIRDFLSVAWPTVTETCVQPLESSTWLTAMQVVTGRCGADPGKLAVMGVEAFTALVRSAVGGWGGKKAWGTICGRVFAALTDTEGVVTWSRRGLLRRVADELGDLQRTRAQLRTVEADMVMVLGELGLSRLGDIPGLTAVGAAAILAETGDPRHYDSSSSLVKHAGLAPSDNASGAFYGEAHISRRGRPGLRLTVWRAVWPMLRFNPVMAAKYQAMTSAADAAALAAGTQDGKGTRPATAAAAAARARRAKARVACAASLLRWIYTIVVHDTSWDPAAASGAAARYQAEAA

SEQ ID NO: 282372 - protein, 290 aa, unidentified
MGQYVGIDLHRRSTTIYRMAEDGEVLGIERIMSQPFELAQAMAAAGPEPEVVLESTYGWYWAADLLQELGAHVHLAHALGNNWGNRRVKNDERDAKDLAAMLRLGRLAEGWIAPPEIRELRELVRHRHSLVRYRTSVKAQIHGVMAKNGILPVVGELWGPTGSAQLDRLELPAAYARRLDSLRHLLEVYDRSVAELDAHLHRDLKDDASYRVLRTLPGVGKVIAAIFVAEIGDVSRFETAKKLNSWAGLTPKHRESDEVVHRGAITKQGSPLVRWAAIEAVGNYRAKGYE

SEQ ID NO: 282373 - protein, 329 aa, unidentified
MTESGYKRTHSQKPSAKELFEHLKKHYPDGKYQAAYESGFSGYSTYYALKEYGIECMIIHAADVPTSQYDHVMKTDAIDSEKLAKSLKGGLLRGIYIRDKEELDDRSLVRLRKTLQKQLGGYKSRVKHLLYNNGIDYPDCFENSRSHWSNHFIFWLENEVKLLSSTRHSLDLLLEQVKLFRKNLLKATRMVRELSKKSLYTQRYENLISIPGIGIVTAMSILTEIGDASRFHNQREFASFLGLIPSCHSSGESIASAEKTFRGNKHLGALVIESAWISIRHDRAMAMAYGEYCKRMKAQEAIIRVARKMSNRILSVLKSGKKYQYDKIR

SEQ ID NO: 282374 - protein, 406 aa, unidentified
MPVYIGIDWSEDKHDVVFLNEAGAILAQLSMAHTATGLLNLEKTRQYAGIPLAECWVALETAHNLVIDFLWSRGYQQVYVIPPSVIKSCRGRFGSSGARNDPKDGRLIADVLRTDRTRLQPWRPDSLLTRQLRAKVSLINHLTRSTVRLSNRLRAVLLRYYPAAVEVFSSLMLQTSLQFLQGYPTPQQAAQLTWAEFEAFARQQGHRQPTKLAEAFARLQQPYPEASADTVQVYQAEVPVLANLLSTTLQAKKQTLTQLQTLLEQHPDHFIFASLPGTGPFLAAALLAKFGDDRQRFPSPASLQALAGTCPVTDQSGKRRLIKFRRGCDRSFRHIVQQWSRHSLQSSIWANAYWQQVRPHSHSDSHAYRCLGNRWLAIAWKLWQTRQPYDQTYHLQQRALRSKPRR

SEQ ID NO: 282375 - protein, 384 aa, unidentified
MNKLDSKVACAGMDVHYKFSNVTFRDIDGRIVSRQRLDHPDRQGLAVRLGRWPQGVPVVMEASFGWGWLSDVVEAAGLEVHLSNCFKVEQMRKARGWVKTNKKDADLVSLLPFEPSDWWKVWRAPPAVRNRREQMRFRGDLVASQTEVKNRIHAIFHRHGIFHEFSDLFGGRGRRFLVELCIGGSAYLSPEALQALRGQVRLLDHLRRQLADVARVLRKQLAKTPLIRRLDHIDGFGLILSHVLTAEIGQIERFRSHKALASYSLLAPRSNDTGQEDPSQSPKGRHLGLRGNRTLKWAFLEAARGAVRSGGRWRAIYDRVTAGGTKDRNRGYIKVARELVKVVYVVWAKGVDYQANPPARPGRKTPKNKSRSGTGQLYHPMVHA

SEQ ID NO: 282376 - protein, 359 aa, unidentified
MATKRIAQAEAVRVTVGVDTHKDTHVARAKDQLGRRLGERTVPTTPAGYRDVLAWARGLGQVEAFGLEGTGSYGAALARHLRREGEVVVEVIRPNRQARRRNGKSDPADADAAASAVLAGDAAGPPKAGDSTVEMVRALRVARSTAIKARTQAINAMDALVVTAPEALREALRGLSKTKLVRTCARLRPGDLGCPTTATKTALRSLAVRHEALEAEVKALDGQIVPLIAKAAPRLVALFGVGPDTAGALLVAAGDNPERLRSEAAFSMLCGSSPVEASSGKVTRHRLNRGGVRQANAALYRIVVVRLRFDQATKDYMERRTAEGKSRKDVIRCLKRYVAREVYAVLVPTPAGDAVDAVA

SEQ ID NO: 282377 - protein, 404 aa, unidentified
MVYLGIDWAEAHHDLCLLSETGTVLGRGRVSDGVEGVARLHEMVAEHASDPGEVAVGIELDRGLLVGTLLASGYEVYAINPLSVDRYRDRHRVSGAKSDAGDAKVLADIVRTDRHNHRQVAGDSEAAEAIKVLARAHKDLIWSRQRQANRLRNLLREYYPAALACFGSDLTSRDALSVLERAPSPGQGRRLTVAQISAVLRRGGRERNLARRAQEISKALRGPQLEAPPTLAAAYAASVRALVAVLREIAAQVEQLQRELERSFRSHPDAEIYLSLPGLGDVLGARALGEFGDDRTRYADPRSRKAYAGTAPITKASGTKRVVAARFARNAHLVDACHLWAFAALSRSPGARRYYDVLRARGKTHNQALRQLGNRLVGILHVCVERRQLYSEEVAWPELEEAAA

SEQ ID NO: 282378 - protein, 457 aa, unidentified
MYRELHSLRQALREELKGTLPPLTGVEPDKMLETYLNQLTLYVGLDVADKTVTLLAINANQEELGHLLDSSNTLTGYVQIGDWLDSLRVQHHLRIIAVACETTGVYYWGVWDFLAQRPNVARVLYNPRTTEHMGEVLSKRVRTELVDALLLAEQLRLGSTPEVVLTDNAELLSGRLCSRAARDAAQTLNRKKNQLRSLLRGYNPVISQVFPGQKFHHPAVYAVLQQYVFPDEVVAAGVEALTTILTEHSRSAFGTEQAQKLVDLCRGYLAHPIRREIVRQRVQDLIEEITLIHKHQHAMLKAGYALIKDRPEAKVLKASTGAGISNTLALVSELGDIKRFPDGEHAASFLGLTTSKHISGTSIYHSKHITKQGAPNGRYAAVNMALHLAVRVPKYQAMYKAIKSRKPPRKGHFVALVAIARDFVTNVLYDMWRYDRPFFIKVEDYRQYRKEHPRPTS

SEQ ID NO: 282379 - protein, 358 aa, unidentified
MELGVSVTVGVDTHADAHVAVALDHLGRRLGEAVVPNEVTGYRSMLEWALNLGELSCVGVEGTGSFGAGLSRFLRSRGVRVLEVNRTSRQHRRRHGKYDAADAEAAARAVLSGDATGTPKSADGQVEMLRALKVARRSAVKARTQAANQLHALVMTAPDRLRADLRGLPAKRLAEKASRFRCKVELADPTEATKFALRSVGRRYQQLSEEIADLEEQIERLVEEASPELVALEGVGPDTAATLMIVSGDNPDRLRSEAAFANLCGAAPIEASSGKTVRHRLNPHGNREANRALYVVALNRMRRDLRTRTYVARRTTEGKSKREIIRCLKRYIAREVYRALVVTRPELVLGEEDLVSSA

SEQ ID NO: 282380 - protein, 349 aa, unidentified
MTEQRRSYAGECVYVGVDVHKETYAVTCVCHKQIVKTATVQAEPAGLAASLLRWFPGATLYSAYEAGFSAFVLHRALTTAGITNIVVNPASIAVAANDKVKTDRRDAKKLAIDLADGRLRGIYIPTEAEELARLLPRTRAQIVEHRATIARQIKAKLHQFGLIAPSSRRMLSHRYLREIVAWSLAPELRVSLTLLAEQWRFATCQLIEIRRLLQEQAAAQAELEKVYRSVPGIGAVVARTLATELGDMTRFANERALFSYTGLTPSEYSSGPSVRRGHRSRQGSGRVRHLLIETAWRALPRDPVLQEIFDRIAATRGKKRAIVAIARRLTGRIRACFRQGTTYAVGTYA

SEQ ID NO: 282381 - protein, 332 aa, unidentified
MSSHEIVGIDVAARKLVMIGERVALAEYENTAAGRSKLAKALSRSPQPVRVVLEATGIYFLDLACELAAAGIAVMVVNPKATHHFAEAILQRRKNDPVDAAMLREFGRRMDFVPWQPPRHELFAFRALTREAQALSKAVAAAKNRLHAITATQLAPDTLIRALERQIAQNQALVDELVAAALAETKTNRELARLVARTDSAPGFAAKPAPGSEQGAAVLVVGELAVLPPMTARQWVAQAGLDVREESSGTSLARRPRLSKRGNKRLREALFYPALTAARCCPLAGAFVERLVAAGKTRLQAIVALMRKLLHGLHAMWRNDEDFDAEKLFAPA

SEQ ID NO: 282382 - protein, 385 aa, unidentified
MLLDHLSDGPTAIRTQFGAIFVSLELSRSTWLVTSLSPGQGEKMSRHSVEADDVAELMKLFADLRRKAEVRTGLSYPIITIQEAGLDGFWLHRVLQREGIESHVVDPASIATPRRRRRAKTDRLDGETLLRALLAYKRGEPRVCAMVVAPSVEEEDRRRPCRERRTLIAERIAHVNRIKGLLFAQGISDYAPLRRDRRARLKALRTGDGRELPSHLKAQISRELDRLELLLTQIEAVEAEQDALLAEGKQPATPDPASMLLALKGMGANFAAVLWSEAFYRQFANRRQVAAYAGLAATPWRSGRIEREQGVSKAGNPRLRTTMIQLAWLWVRHQPQSALAIWFKAHSQRGRKRTIVALARKLLVALWKHVTQGVVIEGAVMKSAA

SEQ ID NO: 282383 - protein, 475 aa, unidentified
MNIKGSKKKNQVLSVNIFEQQGIIAKADAIKAGLKASTWHELETRGKFDKNDKLSFVSDDMLILGCDIGSETHYVRAIDTRGRELSKSAFGFSNTAEGFESMLDWSAKLAAANDKKQIVLGLEPTGHYWFCLTTWLVAKGISVVQVNPYAVKQTKEVEDNSQLKDDIKDPKLIANLVKDGNFGMPYLPEKLYADIRRLSMFRDQLNEDRIRNLNRLHREMKIYFPEYMDAFGKIDGTFSLELLKAAPFPDELAALGTEGMKQIWHEAKLRGRGYANASSILEYARKSVGIKDGADASRQAVKWFVSRIIELDGQLSDIENKLNERCMEIPHAKNILAISGIGENILSGILAEMGDISRFDDVKEIQKLSGLGLVACSSGKHTGETTISHRGRKRLRYWLFQAAKSAVAHSEEFKELHVYYTTRKQNPLKKMQSLIVIACKILRVIFTILTKGTTYDPKKLLGDIVRPNQAVPQAA

SEQ ID NO: 282384 - protein, 425 aa, unidentified
MDVGSEQLHVSVAGGPPKVFGTTTGQLHELSDWLKAQGVRSVAMEATGVYWLCPYEVLEHAGLEVVVVNGKYVKNLPGRKTDMKDCQWQATLHAHGLLKPGFVPPEHIRRLQDYLRLRTDHIAMAASHEQHMQKALERMNLKIHDVISDLTGVSGLKMIKAILAGERRPGELLVLCDVQIQKKKAGALRAALEGTWKREHLFALRQAHELWQFYQQKIAECDQQIECVLQELAGPEDPQAPAPPAPTKRGGVNTPQIAGLHSLLWRLCGQKDPTTLPGVADYVLLQLLGEVGTDLGKHWKTEKHFTAWLGLAPGSRQSGKRRGSQKRGRNRAGRLFCVIARSVGRSVDAALGGFYRRLKGRRGGLVANLALARKLAELFWRLMVHGRAYVEEGLKRYEAKVAQTEQRLLQKLARKYNLVLQPKVP

SEQ ID NO: 282385 - protein, 449 aa, unidentified
MGNGSGVSRGDRNRNARLVRLRELVPVENAIVGIDLADKKQMVVVTDHDSKVLARKTFRCQAWDLGTALDWARERAIAKGWSGVTVACEPTGHRWRVLGQLAAIRDMPFVCVQPMLSSWARRTEDLTFDKTDEKDAVIIARLTAQLRCYVPEPVDETWGRLRHLGARREQLITDMVSQVQQMRALLECVWPAALDTAKQPFRSRTWAVAMSIICDRDGGDFGRTQRLGAARFEQLVRREILHRGGQKASLRIARKLFRALADSTGVTAHRLGALERVAFLLADWQSAATKLADTEARMGAVLDELHLTELATSIPGLSAVGAAAILAETGDPRRFATGRALVKHAGLAPREKLSGTFVGRTKLTGQGRPGLRLAAWRAVWGSQRNNAVYAARYKYLTSREKNKLTPTQAQTVIAAAILRQLHAIIVTGQAWNPDIASNGTTGRTMSAAA

SEQ ID NO: 282386 - protein, 337 aa, unidentified
MKYVGVDLHKRQFTVCWKLEEGIKLEKYPLNKKGLEEFKKKLDKSTEVALEATGNSKYFYDEVIDYAKEVRVINPMQFKVISQSVKKTDKEDARVIAEYLSKGLIPEVRIMKKETREIKSLIQTRDKLVKLRSSLKNKIHGILTEQGICSHKEMFSSEKALKIVQEMPCSETSKFEIEVIVEQIKSLNQSIKKIEEKIKEKGKGLKGGKNLQSITGIGELSSAIILSNIEEIKDFENEKKLSAYAGLVPRVYDSGDSIKHGRITKRGNKILRTTLVQVALVAIKYNQYLRNFYLRLKQKKGSGKAIIATARKMLGIIYRTLKNDWVFSDFNNFVLAN

SEQ ID NO: 282387 - protein, 449 aa, unidentified
MGNGSGVSRGDRNRNARLDRLRALVPVTNAIVGIDLAGKKQMVVVTDHDSKVIARRTFRCRAWDLGSALDWAAGRAAAAGWAGVTVSCEPTGHRWRVLGQLAAERSMPFVCVQPMVTSWARRTEDLTCDKTDEKDAVLIARLTAQLRCYVPEPVDETWGRLRHLGTRREHLITEAGGQVQQIRDLLECAWPAALDTARQPFRSATWVAALSVIAGRDGGDFTRTRRLGAARFEQVVRREITRRGGRKPCLRIVRGLFSALSDPAGVIAHRPGALERVQLLLEDWQLTKDRLAETERRMTAVLGELGLTGLATSMTGLSPVGAAAILAETGDPRRFATGRALVTHAGLAPREKLSGAFTGRTRLTGQGRPGLRLAAWRAVWGAQRANPVYRARYQHLTSRKQNKLTPTQAQTVIAAAILRQLHAVITTGQAWDPVTATHGTRRQTKALAA

SEQ ID NO: 282388 - protein, 343 aa, unidentified
MQISRIGLDLAKYVFQVHGVDAQDEIVLRKTLRRDGVAQFFAELEPCIVGMEACCGSHYWERVLTDLGHEVRLISPQFVKPYVKSNKNDRNDAEAICEAVGRPSMRFVPPKSPEQLEIQAVHRIRQRVVASRTRLVNQVRGLLGEHGVVVARDITRIRRALGEIADSNESGFGDIFIDMLRDMRDELGELDIRLAGYNRRIKNLFRSNEMCQRIGRIEGVGPITATALVAAIGDKSCFKNGRQFAAWLGLVPKQHSSGGKARLFGISKRGDRYLRTLLIHGARAVLSRAAGKTDARSQWIGRMRERRHPNVVAVALANKNARIIWSLLSKDQEYRPAHEVSFS

SEQ ID NO: 282389 - protein, 413 aa, unidentified
MQCNCFVGIDVSLKSNAVCVLDSQGSKLCSFTVRNDREGSQTLVDRVCSCLSKAEVAPSIKFGIEATSIYGLPLLYFLKQEQTLKNLDAHYYILNPKQVNGFKKTYSDLPKTDPVDAFIIADCLRFGRIGTKEAYMDDVYSSIQKLTRARFHVAQDLAAEKNRYLSSLFLKFSAMTQVNLFSDNFGATAMALVEEFETVDDIANTSVEELAAFLNDHGKGRFADPNELAHTIQSAARASYRLPKTVLGSVNQTMAVSARTIRFYEKQLKDYDKAIADLVSTLPGNPLATVAGVGPVYSAGIMAEIGDVSRFKDQAALAKYAGFAWSRHQSGEFDADQTHMINSGNHYLRYYLIEAANKVRMHDPDYMAFYQKKLGETKTTPHKRALALTARKFVRLVYALLRDNKFYLPSSTE

SEQ ID NO: 282390 - protein, 385 aa, unidentified
MASQNDLSRSLVALQQNNKIIAVIELSLNSWLVAGIVPGGERHPLKKLSVDEKLLLQLLYRWRDEAVKAGHMITRMAVAFEAGRDGFWLARWLRARGIEAYVIHPTSVAVPREHRRAKTDRLDTELLKRVFLGWLRGEPDHCSMAAIPSLQEEDAKRPTRERENLVGERTRVVNRMKACLVRFGIRNFKPTLRKAPKRLNALCTPEGDPLPPNTLAELRRDMARLRFIIDQINEIEAARLQRLELAPAEAPHAMVRLLARVIGVGIETADMLVHEVLSRNLRDRRAVARYAGLTGAPDESGNKRREKGLAKAGNARVRRGMIQLAWRFLIFQKDSALARWYRTRTESAGKKRKTMIVALARKLLIALWRLVTIGEVPAGVVLRAA

SEQ ID NO: 282391 - protein, 352 aa, unidentified
MPFYIASDFHAHQQTVAWCDTETGETQITTLKHNLEQVRVFYASLPPGIVGVEASSKARRFEDLLEETGHQLVVGNPVLIRRRATSRHKSDRRDAELILQLLLRDEFPAIWRRSREQTQVLEILKLRHSLVCQRTQVYNRLQALAKSCGLGKARTRTTAFQERFKASDLDEVEALQRSQLLQLIGNFDGQLKELDKWLAKRAALDPQVQLLVTQPGVGNLTALALVNSLGDISRFTHPTKQVPAYFGLDPLEKESAGKRQAAGTSRAGSAITRFLLGQAAQSAARRDPQLKAFYKRLAKKKPKGVAKTAVARKLLIKLVIMLRDAITAEEFDRRGGTSGGGSKSSWIERSVV

SEQ ID NO: 282392 - protein, 430 aa, unidentified
MNSTDISPSAIQADPRNYIAMDVHSNNVVVCVKRNIINAKGCLVGQTIAEKTIATKGSYSGLTQFLARYADSQQHTMVAESTFNWYWIANIAEERGWNMRLADPSTVSQASIKAANDRTDADYLAERLRTNSLKTATIMPRKQRAARDLMRHRLNVMHEVAEKKIRLSNLCHNHLGHPLHGKELQGLQLAFKTEGMAAIYKMGFDTSGSEFIIADLLLGLKQAQERLKHLEEQVFQIIDSNVEFQSSRALLLRTIKGCGNILSSILVTEIGDINRFHSMGDFVSYCRLAPTSKLSNGKSKGKGNAKNGNAYLSWALTELATLMARFNRPVQRYLDRKLERRGLRVVAIRSLAAKLARCVYQLLRKNEPFDLFRAFGAAAEPLVPQPAQTEDAVEVKEPKRVKSVRRSKAKTAAVDTAALLAPKQLSLGVV

SEQ ID NO: 282393 - protein, 344 aa, unidentified
MGEVNTIGMDIAKSVFQVHGVDAAGSITIRKRIGRAKVLEYFGELPPCLVGIEACPSAHHWGRELQSLGHTVRLVPPSYVKAYLKRSKNDANDAAAICEAVARPSMRFVPIKTTEQQSALMLHRTRQLLVRQRTMLSNALRGHLAELGIVSAKGRNGTAELLEIIADGADSRVSPAVRGILEVLARQYGVIGTEMASIDKSIMALHRTCEASRRLAEIPGIGPVGATALVAEIGDWNAFSSGRSLAAWIGLVPKQNSTGGKDRLGSITKQGNRYLRWLLVVGAMAVIRYARKHGTQRRPWLARLMERRPTKVAAVALANKIARMAWAIMVGGERYREPKLPLAA

SEQ ID NO: 282394 - protein, 370 aa, unidentified
MAKRSMFVGMDVHKESIDVSLAEEGRDGEVRHYGVIPGDLDAVAKVVRALRAPSRRLRFVYEAGPCGFGIHRYLTAQGEECVVVNPSSMPKRSGDRIKTDRRDGDALARLHRAGELTAIYIPTPDDEALRDLVRAREDAVGLSTQAKHRLKAFLLRQGRRYPGRAGWTRPYRRWLADLSFPLAPQHIALQEYRDTIDETERRVERLTDQLRQLTPAWRWAPVVEALQALRGVSFVTAVGLVTEIGDIRRFTHPRELMAYLGLVPSEYSSGSSVRRGGITKAGNPHARRLLAEAAWAYQGVPRIGRQMLYRQEAVSKTVCDIAWKAQLRLTSRFRKLVARGKAKPKVATAVARELTGFIWAIAREVPAPPA

SEQ ID NO: 282395 - protein, 382 aa, unidentified
MDTLSNTVAAIDSEQQKAKLFVALELGQATWVVALHSPIADKISIYRIEGGDTDQLMALIEKKRVQAARRLGRAAQVVSCYEAGRDGFWLHRFLIRRGIDNRVLDSASILVDRRARRAKTDRLDARALLRVLMALVRGEEQVCRVVRVPSIAQEDERRLSRERQRLLHERNSHIARIKGLLILHGVRDYRLIERDWRERLDAVRTAEGQALPPRAKMEIERECHRLWLVKQMLAEVEREIEQMIAHDGAVAGKLIQVRGIGQTFASVLTHEVYYRSFDNRRQVGSYLGLVSIPWQSGSVRRDQGITRSGNARARRCAIELAWLWLRHQPGSALACWYRTRVGTMTGRMRRIALVALARKLIVALWRYLQNGIVPEGAVLKAA

SEQ ID NO: 282396 - protein, 367 aa, unidentified
MAKYLMIGADVHEEYVMTKWSIDQGKASKSSFRMTEAGQNKMIAMLHKIAKEYNVEEIVFAYEACCLGFGLYDNLTEASIKCHVLAPTKISRSNKQKRSKCDEKDAENILEILKAHLLAGNSLPDVWVPDHRTRQDRLVVRRRLALADKRTAVKTQIGTILKKAQLRRPKEIATNWTKAYMNWLYEICDAQVGVLQYGSILSLESLLRELKMLEREIEIQDENIKTLSKDERYREATQQLCQLHGVRTLTAMVFLTEMGDMSRFSNRKQIGAFFGLSPSSYETGENCDKKGHITKQGSGRLRKVLSQASWCRTNIDPAYDRIVSKNPNKKKKALVALMRRLGIIMWHIARDVQERTGCFKNPQPALT

SEQ ID NO: 282397 - protein, 370 aa, unidentified
MKEQENKRNKITIGLDLGDRRHRFCVLGEKGEVLEEGSVGNNRAALSELGGRYPEALVVMEAGCHSPWVSRHLEQAGCEVVVSNPRKTRAIYQHERKSDRRDALMLARIARMEPALLYPVRHGSEEAQQDLLRIKLRDSLVRARVALINSLRFTLKSLGYSIANPSTERFHKVIQSALPQSVAQVIAPSVQALEELTLRIKLLEREISDQARSKYPDTAWLEQIPGVGPITALYFVLKIEDPARFKRARDVGAFLGLCPRRDQSGENDPQLRISKRGDAYLRRLLVSSAQYILGPFAPPSALRQYGLALASGATARAKKRAVVAVARKLAVLLLTLWKNKSSYQAFPQRSSSEKMRTNDLERLRCIAGSV

SEQ ID NO: 282398 - protein, 278 aa, unidentified
MVPTPVGIDMAKDTFQAELVLPNARKCKEFTNTQSGFLEFTKWCHSFGATKLLVCMEATGRYGDALVTFMFALAHDVRVANGRRIRRFADALGLLNKTDKADAHAIAEYALHHGAQIPKWKPLSAARQELRDLRCLINGLQKTLNEYGNRQHLDIQSAVVREHIDQLIEFVEGQLETAKERASQVIDEDEQLKTDKAILMKQIGVKEAVSTVLLTRVDFRSFKSARQVARYLGLTPKREQSGTSIHRNGRISKEGPPKLRMHSWLFRIYFKEVARSSL

SEQ ID NO: 282399 - protein, 312 aa, unidentified
MSEFIGIDVSKAQLDVAAHLSSNSFAVENTEAGIKRLCEQLKALAPELVVMEASGGYERLCVAALAAAGLPVALVNPRQVREFARATGVLAKTDRLDARVLAHFAAVVRPPVRPLPDAQHQVLEELLARRRQMVAALVAEKNRLGLARTRLVKRTLREVVSTYERLLELIDRELDDLIKASPLWREKEDLLRSFKGIGPVSARTLLAELPELGLLNRKQIAALVGVAPIARESGSWRGRRSIWGGRGQVRAVLYMATVTAMRANAQIRVFYQRLRQAGKPGKVALVACMRKLLTILNAMVRTHTRWQQPSAA

SEQ ID NO: 282400 - protein, 407 aa, unidentified
MRAIYERCCGLDVHKKTAVACRLTPDGSQTRTFGTMTDDLMQLRKWLLEAGVTHVAMESTGVYWKPVFNLLEDHGMELLVVNARHVKAVPGRKTDVKDAEWLAELLQHGLLKASFIPDRESRERRELVRYRRTLVEQRAHLVQRIQKLLEGANIKLGDVASDVMGVSGRAMLQALADGVDDPAAVAGMAKAALRNKLPELERALTGSVRPHQRFLLRSQFRLLASIEAEIATLDQEVAERMHPFQVALERLDEIPGIGRRAAEQILVETGTDMSRFPTAGHFASWARVCPGNNESAGKRQHASIGGGNRWLRSALLEAAWTVSHSRKQTFFTARYRRIAARRGKKRAAIATAHSLLIAVYHVLRDGVVFQDLGPSYFERRNQDAIVRRSLHRLEALGYKVRIEAMTA

SEQ ID NO: 282401 - protein, 393 aa, unidentified
MEGRMENTPSAGVNYDPVHCFVAIELSKSSWIVGFQTPLSKQTSQYQLKPCDAKPLLELIERVRIRISRELGRPVEVMSCYEAGYDGFWLHRVLEAHGIHNHVLDPASLQVNRRARRPKTDRIDADRLVRALIRHLLGEPEACSVVRVPSPEQEDARRLHRERGRLIAERVAHVNRIKGLCASQGIYDYEPVRKDRLQRLEKLRTGDGRPLAPQLKAEIVREIKRLQCLLEMIATVEAERDAILESEKSRHLNADKIKMLAKLKAIGPEFSTTIVGEVLYREFANRRQLGSYVGLASSPFRSGSLGRDQGISKAGNPKARAMMIELAWSWLRYQPDSALSRWFRERVGNLKGRPRRIAIVAMARKLLVALWRYLQTGVIPTGANLKTNRLKQA

SEQ ID NO: 282402 - protein, 351 aa, unidentified
MQRFIGLDAHGQSCTFCVMGPSGRRLGHHVVETNGKALVERLRAIAGERHVCMEEGAHSEWLYELMQPHAKRIVVTQPLGRRGNKSDQIDAWALADLLRRDALERSVYKSPETFTALRQAARGYVAVQRDLVRAKCRLNALYRSRGETPNAEIYDKVDRAQWLQKLPPSQRSLAELLSEQLDGLIQAHQTAEAWLLKEAKRVPVTRLLATVPGIGSIRAALLVAIIVTPARFRTTRQFWSYSGLAIVTRSSSDYVRENGRWVRRPVAHTRGLNRNRQPLLKAIFKGAATTVINMPRHPLHQGYQRMITEAGIKPNLAKLTLARRIAAATLAVWKHQEDYDPSKQRRAPPSA

SEQ ID NO: 282403 - protein, 354 aa, unidentified
MKRMIKYVGLDVHQATTVVSVRDGSGRVILRCVLPTEDAGLLEFFGLMRGAVHVAFEEGTQAQWLHDLLLSVVERVVVCDRRGETRRGNKGDQVDADELSRLLRSGDLRPVYHGGHERATLRELTRTYRGVVEDGTRVMLRLRALFRARAIPTRGTRLFSPASRPEWLAKLKDRGGRFRAETLYTELDVLRELRPRVKAAMMAEARRDPAWQILRTVPFLGPVRVATLLATMQTPWRFRTKRNLWAYAGLAVVTRSSADHHFVDGKLQRRRRAPLTRGLNPNHNRVLKDVFKGAAVAAIGRKGALQDFYHGMLQRGMREEMARLTLARKLAALTLRLWKEGERYDPTKLTVQMK

SEQ ID NO: 282404 - protein, 419 aa, unidentified
MNKIETKKQRIVNTKTLIVAIDIGKGTDTGYCRCPSGKDIKPFEFSNDSQGFKELWDRICWEKTSNHLEEVVVGFESTGAYGEPLVHYLRQKPVKLVQVNPVHTKRMKELQGNSPGKTDRKDPKVIADIIGLGHALSVVIPEGAAAELRRLTLARERTIHRRTALYNQVQDLVFILFPEFLQVMRDVKTKSARYLLRHYPTPQDMVACGSEGLALILKRVSRGKLGKARAQALYDGAAQSVGLQEGRKGILLEMEEIFSALEACHRFIEKLGEEMLPYLEQIPYSDSLLSVKGIGAITVAGLIGEVGDFRQFHTLREVMKLAGLNLFEISSGKHKGNRHISKRGRPVLRKLLYFAAINTIRKGGVMHASYQRYLERGMPRTKALIAIARKLLRILFALVRDHSRYIERYSKKEVLKLAA

SEQ ID NO: 282405 - protein, 335 aa, unidentified
MKKYVIIAGIDVSKAKLDVRLVSDPSAKIHPHLIVTNNEKGIKEIISVLKKQKVAISDVLFCFENTGIYSMPMAIYFSRNSFDYWEIPAIEIKKSKGLVRGKNDKADALDIAFYAVSHSHKLKLCAVAEDCIMKLQLLYSEREKLIKAIHALQSSTEVTDFLPKDVFKDVISINKKAITNLKLILKQIDNAMMLLVKSNLKINSCFNLAKSVPGVGTQSAIYLIIKTRCFTKFKNWRKLACYAGIAPFEYSSGSSIKGRTKLSHLADKRMKSLLNMAALSAKRTDKELGDYYGRKVKEGKNKMLVMNAIRCKILSRIFAVIERETPFVNTQKFAA

SEQ ID NO: 282406 - protein, 338 aa, unidentified
MQEQQYVGIDLHRRRSVIVRMNDAGEVLGTVRINNDPLKLAMAIAEAGPDPEVALEACYGWYWAADLLVAEGARVHLVHPLGLHWDSRRVKNDVKDPTELANRLRRSDLPEAWISPPEVRELRELVRYRARLVALRTSAKAQVHAVMAKLGILPTQVDMFSSTGQVVLDEMPFEGVYGLRVESLRDLLEIFDREVSMVEREIHRLLKDDRGYQAIQVLNGVGPITAAIFVAEIGDVTRFPSARHLCSWAGMTPKLHESDTKSYKGRITKQGSTIVRWAAVEAVVRYHGGDVIAPAYRRIAERRGNKIARVAAARRLLTLVFYGLRDGEIRCVARKEAA

SEQ ID NO: 282407 - protein, 349 aa, unidentified
MLIIGCDYHPSFQQIAFVDMDTGELQERRLEHREEAEKFYRGLGVQRMKVRLGMEASGHARWFERLLGELNFELWIGDATEVARKRERKQKTDRQDAQHILRLLLKDDFPRIWVPNWENRDLRQLLWHRHRMVQARTRIMNQLQAVALNEGLRCKKRLWREHGREQLESIRLAPWASRRRQDLLELLDRLNPTITELSQAIEQEAEKFPEARWLMTHPGVGALTALAFVLIIGKADRFQCGKQIASYLGLVPLEDSSGNRRRLGHITKQGSSMLRFLMVEAAQVTVRSLPEWRSKYFHLMMRRGRKIAKVAMARRLAIRLYWMWRKGWDYEQVKKFGSHAGKLGTGDGV

SEQ ID NO: 282408 - protein, 344 aa, unidentified
MLFYCGIDLHAKESVLCIIDAQDTIHFRNKVPNQINHILEVLNSFSPKPKVALEATLNWYWLVDGLQEAGFEVKLAHPFGLQVIKKAKVKTDNRDAFHLARLLRLDALPESYIYPKETRPLRDLLRKRQKIVSLRAAEYTSLHRTLLQHGIVDIPAKQAKEFKSKEIEQYFKHPVIQYRCAMELERIRFYTRQVKILEEIIFGNAMEHQDFLLLQTIPGVGKLLASIILYETGDVNRFPTAKQYCSYSRVVPGIAQSSNTIRRGKGSKQGNPYLKFAFMQAASLAVRFDGPIRRFRLKHMGRRRSKARKLISVSIVAHKLAVAAYQILKDKKIFQVESMFAPYV

SEQ ID NO: 282409 - protein, 346 aa, unidentified
MLYAGLDLSRKRLDFHLLDAAGETVEVGASPPDADGLDGLIRRLARHREPIRAAIESMNGARFVHDRLELAGWQVEIADAQKVKGLAPLACKTDRIDAWVLAELCRRELVPAIWLPDPLVRAERERARWRLHLVRHRSSLKQRLHAVLLTHGQPCPVSDLFGVRGRQLLARLGLPEPWQGTIEASLRLIDKLDREISDCERELRRLGAEHRYVPLLLTVPGISWVLAYTIAAELGDINRFPTPRKLAGYTGLCPRVYQSGERDLRGPLAKQGPRYLRWALVEAATHACTHPIYRERYTQTKARIGKQRGAKVAQIDLARRLSEAIWHMLSRNQPFAPKGATDPLAA

SEQ ID NO: 282410 - protein, 338 aa, unidentified
MNIVFLGIDLAKNVFQLCGLNQAGKPVYTKRTGRKELLQTLANIPACLIGIEASTGEFYWQREFEKLGHKVKVISPQYVKPFVRGQKNDGNDAQAIAVALMQPTMQFVPPKSPEQQDIQALHRARQRIVNHRTATVCQIRGLLLDRGIPIGSAVSRARRAIPLILEDAENGLSSRMRRTIAELYDLFNDLGRRIHFFDKEIETVFRQSEACPRIAKVKGIGPETATAVVAAIGKGTEFKNGRHFAAWLGLVPRQHSSGDRQVLINMTKKGDKHLRTLFIHGARAVVRVATNNNDGHINQWVNQLKERRGFNKTTVAVANKNARIIWSMLRNETGYQVV

SEQ ID NO: 282411 - protein, 430 aa, unidentified
MSNHLQVGVDFSQKNADYCLLFPDGRPLEPHIAFANSMSGYAQAKQLLLDALETYSFDGIDLSGEATGYYWLPYFLQLAADPDFAPHNLRLFLLNPRWVKWFEHCFPDDDKCDRKDPFYIADRTRTRNPATAWLPSDYLSLRFYTRLRFHLVHNLAREKCYFSAFLFLKASSYRCLKPFSDVFGATSRLVLTEYPTPDDLAALPVQDLAAQLYELSGHHLPDPVSSARKLQQVARESFPLAENLALPVQRILDITLAHIRFLEAQVEQVEAWIAAELAAYPAIAQLATIPGIGPVFSAGLGAEIGDIQRFLQGDKWDPQRKRLRKRNLRDAEDAVAKIAGLWWPRSASGDFEAEERHMAKSGNRYLRYYLIQAANLMYLHIPEYAAFYKRKYKEAAKHHHKRALVLTARKSVGLVVGLLHRNEPYRSKGA

SEQ ID NO: 282412 - protein, 362 aa, unidentified
MTSIAPSEVSIPAAVVGVVVGVDTHQDEHCAAVLDLRGAHLATCTIAASPIGYAQLCSWATRFGPVTAWGVEGTGSYGAGLARHLTAAGQAVLEVNRADRQARHQHGKSDPLDAVQAARAVLAGTTAGTPKTNDGVVEMIRNIKRVKDSATKAKTAAINQLHAAVVTAPDQLRQQLRTLDGARLLRACARLRPGPLSDPTAATKYALRALARRAQGLQAECDDADRHLDILTDQAAPTLRAAYGVGPDSAAELLVAAGDNPDRLASEASFAALCGVAPVPASSGKTNGRFRLSRGGNRRANAALYRVVLCRLRYDPETRAYMERRTKEGMSKKEIIRCLKRYLARTLYQAVLSDYTAITAMT

SEQ ID NO: 282413 - protein, 343 aa, unidentified
MGYYVGLDVSLKSTSICVLDAGGIVVWQGQSDTHPEMIAARLERWRNSLAVVGLETGSLTPWLYRGLSAMGLAMVCMDARRASDAMKARPVKTDRADARALAEMLRSGWYTEVFVKSEESHRMKALLSARDQLVRNKRTFFGQIRGLLRPFGIKLAGRQGTRKFDVAARAACRHDELLYACVDALLEALAAIEVQIAALDKRLRARVRSSRPCRYLMSVPCVGPVTAVAFVAAIEEPARFRHSRDVGAYLGLTPRRYQSGERDITGAISKQGDSMARHYLYEAANCLLTTWSGRSALKSWGLRLAKRIGAKKARVAVARKLACLLLRLWKAGTHYEERAARAA

SEQ ID NO: 282414 - protein, 342 aa, unidentified
MNAARVGLDLAKTVFQVHGVDITGQVLVRRRLARSQLLGFFGKLPPCVVGMEACSSAHHWARELTRLGHEVRLIPPQYVKPYVKRNKTDAADAEAICEAVGRPNMRFVPIKTEEQQAILALHRVRSLLVRQRTATINAIRGLLGEFGLVAAKGTARLDELRRRLSMATSEQIPTAARLAIEALFAHVDNLRTQVETIEAEIIAGHQANEASQRLAAIPGVGVLTASALVAAVGDARQFRSARHFAAWLGLTPRMASSGDKQRIGHISKGGDRYLRTLLIHGARAVVGAVKRPNLRPRPWLTPLLARRPIPVAAAALAHKTARIVWAMLARGEVYRLRAAMAA

SEQ ID NO: 282415 - protein, 424 aa, unidentified
MATRRRTNKVNIDALADLYERCAGIDVHKETVTVCVIRPGSDGAVQGEMASYGTTTRELRQLNQWLQECGVTQVVMESTGVYWRPVWQILEAGGFHLWLANAKQVRNMPGRKTDQADAVWLATLLRKGLIKGSFIAPPQIRTLRDLCRSRTSLVRDRTRVVQRIEKVLEEANIKLDTVASDLMGVGPRMMLEELLKGETDAAKIAGLALGRMRPKIPQLVEALEGCFRPHQTFLLKQRLDQFDDLCRRIELFEQQIEEYACPFDKQMARLDAVPGIDRLSAAAILSETGVEMESFPTPQQFCRWATIAPGNNKTAGKQRNGKIGKGNRWLRGSLTQCAWAATHDKKSYFAAQYRRLLHRGKQRALIAVAHSMLAAIWHMLRRDVEYHELGADYFEKQNLEGLKKTYLKKLERLGFKVSLEPITV

SEQ ID NO: 282416 - protein, 425 aa, unidentified
MNYKQNEKINQVKESTLVIGIDIGSTTQYARAFDWRGIELGKVFPFSNSREGFESFKAWMQHLQDKYRKPDVIVGIEPTGHYWFDLGAYLEDEGILLVMVNPYAVKQTKELDDNSQSKNDRKDPKVIAKLVTEGRYSAPYTPDGVYADLRIMVANRKRLIREMTQIKNRFARWFAIYFPEYTDVFGDYEAQSSMLLLKKVCTPEAIVELGAGKINQIWRDAKLRAVGMKRATTLCETAKRSIGLKKGSSAARYEMKLLLEDYEYKKAQLDAVMEEIEKLCRKIPESEQMLAIKGIGVITVAGFLAEVGDVRRFESPRQIQKLAGLSLRENSSGKHKGQTTISKRGRSKLRAVLFNAAIPLIAKNPEFKSLHEYYTTRANNPLKKKQSVIAISCKLIRVFYAILANGVTYDAQKMLSDIHRQPQAA

SEQ ID NO: 282417 - protein, 380 aa, unidentified
MSQCSVRSRESKLVRELKGVQEALVVGIDVHKRSYAVAFVRASSRAVAAGITMPADVKALGRLLGRVREQLHLCVYEAGPTGFGLARALQALGLPVGVVSLGSIPRATGQDNKTDPIDARRLAEYAAGGLLRCIAVPTEKEDEERQLLRHRAKARKDLTKAKNRIKMFLLYNGIKEPKGLGQWNVSAVAELERMTLRGLLREELDMLLSALRFAKSHLASYEALVRRLAKRGDHTEDCRRLREIPGVGLLTAMTVQVELFCPQRFHRPEQVARYAGLCPRLKQSGQTSSTAQLTTNGNRHLRHVLIQSAWRWVRQDATARARYEHLRKRTGCAQKAIVGVARKLVMIMWRMLVDRTRYKPSVAGATPAPAAPARPTPAAT

SEQ ID NO: 282418 - protein, 424 aa, unidentified
MNLTQNDRLKQVTSETLIVGVDVGSQIHFCRAFDWRGLELSRRVFKFSNTGMGFLTFLRWTEELMNKTEMKTVIVGCEPTGCYWLTFQKFLQDHDIQLVTVNPFAVNRSKELDDNSPEKSDLKDPKTIALLVKDGRYSTSYLPSGVYAEIREASVCRDQLMKQHVRLSNQIQGWLQKFFPEYFECYAAWDSTSGLMLLKEAPLPQDILRIGAGGINQIWRDAKVRGAGIKRAQTLIEAAQNSVGLEGGEAARLEIWILINDYILKAEQLRRLDEYLEEKVKEVPNVEKLLAIKGVGMSTVIGFIAEVGDIGRFTDPKQIQKLAGLEIVKKSSGKKKGQPRISKRGRRKLRRTMYESARALMNWNPAFQDVFLYYRNRQKNPLGGMQAKIAVACKAIRVFYVVLQTGCDFDEEKFRKDIVRPEAA

SEQ ID NO: 282419 - protein, 316 aa, unidentified
MICGVDVSSKSLDARIGRDGAAACFTNDPKGIAELAEFCRCHKVHLVAMEATGGYEKKPFALLWAAGIQVAVVNPRAVRNFAHGMGLLEKTDRIDAGVIAWYAQTKGCVAISPASAEQQQLKAMVTRLRQLTELRAAQRNQRLLVTDKVVLKSFRKLLDLVQKQIRDLEVAIAGLIDADAVWHKLDESFRSIKGVADRTVARLMAEMPEIGTLSNKRISKLAGLAPLACDSGQWKGKRSVRGGRRTIREILFVVAAGVSRYNADFGAFRERLAAAGKAKKVIRIALAHKLLVRLNAKARDVLQQLREAPPAAVLLS

SEQ ID NO: 282420 - protein, 429 aa, unidentified
MQNESTPGARGPVFCGVDTHADSHWLCVLDWRGRRVLSRRFPADAAGYEALAGAIAAAGEPACVAMEGTSSYGAGLTRHLASLGMPVREALSPARMQRRRPGQGKCDESDAERAARAAMSGSRLGTPKSQDGWVDGVRCMLAARSGAVKARTSAINTARSLLTTAPEGLRSRFRGIGGPRLMEELPSVRAEGALGAALGALADLWAAARDAALDMERAIEASLEENCPALLAMYGCGPVSAAKLAVAAGDNPGRLRSEASFAAICGACPIPASSGKTVRHRLNRGGDRQANSALHEIARQRVMRDPETAEYAERARGRGKSDREVMRCLKRYVAREAYRALMRPHEIRRPEDASELVAARRAAKVSQVRAASILGTSEKYISMLERGQRELKPIRRAYEAWVEAGLPLDWDRQAFEAERKMDSKKHLAK

SEQ ID NO: 282421 - protein, 437 aa, unidentified
MRRKKNKANKSVNLQGLPLVHPNAAGIDVGAKEHVVAVPCDRDPRPVRTFQAFTPDLHELAAWLKRCGIETVALESTGIYWISLYEVLEQYGFEIRVVNARHVKHVPGRTKTDVLDCQWIQKLHSFGLLNGSFRPDQQIRKLRTYMRLRDNLVVASTQAVHHMQKALFEMNVQLSNVISDIVGETGLRIIDAIIAGERDPNQLASLGSTRIKASRETVAKSLHGNWDEALLFALKAALETYRFNQTKIQECDCCVQQHLAQFESRAQSTNAPRDLKTQLQRVCGVDLTKIPGIKEQSAQIIISEVGLDMTKWKTEKQFCSFLGLCPDNSISGGKVLHRTTRKVYNRAADTLRLCAQSLTYSKSALGAKYRRLKARLGAPKAIVAMAHHLARLVYRMLRYGQNYVEQGIHQYELKFQLQRIKWLKKEAKSLNLQLVPA

SEQ ID NO: 282422 - protein, 334 aa, unidentified
MDTHADVHVAAALDSVGGLLGVEEFPVSPAGYARLLGWLGGFGTVCLVGIEGTGSYGAGLARHVAAAGIRVVEVDRSDRQDRRRQGKSDPLDAVSAARAAQSGRARGAPKGRDGAVEAIRALMVAKRSAVGERTRTINQARALILTGPDDLRARFTRHTPAALVAGIASLRPRPGDVPGYAVRVALRELGRRAVFLDGQLERLDELIVPLVTARAPGLLALYGIGPNTAALLLIAAGDHPGRLRSEAAWAHLCAAAPIPASSGKVTRHRLNPGGDRQASHALWRIVFTRMGSDAATRAYVERRTKEGKSKAEIIRCLKRYVARQVYPHLRPDAG

SEQ ID NO: 282423 - protein, 455 aa, unidentified
MIEPSKRTLQAADFNGLAQINLNAAGLDVGAEEIYACVPTGRDSEQVQCFGTCTADLHALADWLAACGVTTVAMESTGVYWIAVFEVLVEAGFEVYLVNARYIKNVSGRKTDVLDCQWIQQLHTYGLLQASFRPTEDICALRALVRHRDSLIRHRSPHILHMQKALEQMNVKLVNVVSDITGVTGRRIIDSILAGERDPQVLAGLRDPGCKRSEADIARALAGHYRDEHLFVLKQACELYDFYTAQIQVCDEEIAAKYSAFKPQFDLEAKPLPPPRQRERPGTANLPRFDLRRELYRLAGVDLTQIDGVSVLTAQVVLSEIGWDMSKWRTEKHFASWLGLCPNNKITGGKVKKRGRRKVHNRVAQALRVAARSLHSSQSALGNFYRRIKAKYGPAIANVAAAHKMARIIYCMLKNKTEYRDIGPDEYDARYRERQFRNLERQAARLGYRLQPGAA

SEQ ID NO: 282424 - protein, 351 aa, unidentified
MIVLGADTHKRSHTIAAVAAGTGELRGEKTVAVGARGFADLLLWARGLGGERVWALEDCRHVAGSFERFLIGRGERVVRVPTKLMADARRGARDRGKSDRIDAIAVARAALREGLGELPCARLDGPELDLRLLVDHRDRLVGQRVALNNTLQWHLHDLWPELTLPGGALFSVKWSTRIARRLARAEQTMRVRIARDELRRLRELSHAIKVLEGEIAELVGQLAPQLLSEPGFGPLTAAKLVGEIAGAARFASDAKLARAAGLAPIPVSSGKTSRHRLDRGGNRQINAAVHRIAVTRARCHPETRDYIARKRAEGKTTREAIRCLKRHLARHIWHLLQPPNPAPGQPHPPIS

SEQ ID NO: 282425 - protein, 313 aa, unidentified
MYYIGIDVSKKDLSVFNGKKDLKFINQEGLRPFKKYLKGKYKNFSDLVIIFEPTGIYSFNLKEFCAENSIKAYIVNPKRSHSFARSLGIRPKDDKMDARILYQFHRLIDSKDIKVPKADQEAKVLSSYLTSYEFAVKQRVAISNHLESLRDEKLVSLLKEELKRAQKLEDKIFNHTLEYIRQNQNLREDYERLLTISGVGEKMAIALLTLFKTYQGTNRAQITALVGLDSTKRESGSSVRGKAKISKNGKAIYRKVSYLPAICATVHNQKIKIFYQRLLAHHKPKKLAIIASMRKILLIAHAMYRDKTEYVAA

SEQ ID NO: 282426 - protein, 341 aa, unidentified
MRKTLYCGVDLHSNNAMYVIADGQDKQRLAKRLPNQLPVVLASLEPFRQQLRVVAVESTFNGYWLVDGLMDHGYPVVLANPSEMEQYHGIKEADDLTDAAFLARLARLNILPTGYIYPKQDRPVRDLLRRRMLLVQQRTAIVLSLQNLATRQSGQSLQWRDVRRLDQTERTELLGDHDCLSFVADQQIDLIEQFNQKIKRFEKKVLEHAQIKPAYERLQTMPGVGVILALTIMLETGDIGRFETVGDYTSYCRCVRATHRSNGKKKADNNSRNGNGYLAWAFVEAVHHALRVCPKAKSFYDRKRAQRNGTLATKALAAKWSKAAYYIMKRQEAFDLQRVFG

SEQ ID NO: 282427 - protein, 362 aa, unidentified
MRIIGCDLHARQQTLAMLDTATGEVVSMTLKHEGNNVREFYSSLPRPVRVGIEATGSMQWFVNLMEELGIECLIGHPAEIRAAEPRKQKHDRRDADLILKLLAENRFPAIWRPSKELQDLRALVRHRHQWVRIRTRIQNALQSIALANGLRRGPALWTQGGQHAIASLPLAPHTAYRRNELQAMYKKFEAEIEKLNQRVEEQASQRPGARLLMTHPGVGPVTALATEVFLGDPARFADSKALASYVGMIPREYSSGPRQRLGGLSKQGNPLLRFLWGEAGAHAVRRDPELKRFYRRKLNQKGFGKASVAVARKLGIRLWIMLRDQIEYNEFCRRGQKQQQSSDACVGMPETPYGAKSHRTCD

SEQ ID NO: 282428 - protein, 404 aa, unidentified
MVKYHIGIDVSKRRHRACIHNLAQDSYSGIFSIEVNRQGFEKLINTLEKLSTNEEDFLIGIEATGSYGDTLSYYLLSRGYKVVGINPYQANQFRKAQGKIAKTDSIDARSLAAQLALGNHKALAIPDPVLDNLRELTRFRADMVKDRSALVNQLHETLSSIFPELATVFSQLDSPSSIALLIAYPGPEYISRAGEAKIAESLRVASRGKMGETLAKSLVEAAQSSIGVLQRQPALATKVSILGERLVSLSAAIGRVEKEIADLFHKLPYKPEDFPVGDISSLATLLSEIEDIHRFPTLKQFLSHFGWCPQSFQTGSYNREHPRMSHAGNRYVRRIIWMLSIVAIRTVPRYRDYFQRRVNEGKSKMHVIVAVARKLLSVLYAILKNGIPYDPDWEVNRHFAMARH

SEQ ID NO: 282429 - protein, 338 aa, unidentified
MIDSEVGEIRTLRPSPKTEAIVSWVGSLPGPVAVAYEAGPTGFALARALAAAGVRCEVVAPSKMERPPGDRVKTDRRDAERLARLLRIAELPGVRVPGEAEEAARDLVRAREDARTDLMRARHRLPKLLLRQGLVWENCAWAGAHEAWLRALRLDRVGVQVAFDEAFDAVLSVHARRDRLDAAIVEMAATSGFAPVVDRLCCLRGVGILTGFGLAVEVGDWRRFTGSTIGSYLGLVPSESSSGARRSQGGITKAGNSHARRLLVEAAWHHRKPYRPSHELIRRRAGQPAAVRERAERGNRRLHRRWTRLDARGKRSTISAVAIARELAGWSWSLALMD

SEQ ID NO: 282430 - protein, 413 aa, unidentified
MEVLYPCCCGLDVHKKSVTACVLWAEAKGKRRKEKRRFGTFTRDLLALADWLRECGVTHVAMESTGVYWKPVWNLLDGQFEEVLLVNAQHIKAVPGRKTDQKDSEWIADLLQHGLLKGSFVPPRPTRELRDLTRYRVSLTQECNRVANRIRKVLEDANIKLASVATDTLGASGRQMIQAIIGGQRDSNLLAEMSKGLLRNKIPELKLALEGRVTEHHRFLLAEMLDDLRHVEAKMNKVEAEIERRLRPFQDEVVRLCAIPGVDRVTAWGLISEIGLNMEQFPTAAHLASWAGMCPGSFESAGKRLSGRTRKGSAFLRRHLCQAGWAVSTKRDSYLSALFRRLAARRGNKRAIMAVGHAILVIAFHLLKRKEDYVELGANYFDQKNADSLRRSLVKRLERLGHAVTLSPIAQPA

SEQ ID NO: 282431 - protein, 318 aa, unidentified
MKEASRKVCVCAGVDIGKAKLDCAVAGRREALRCDNSEEGRAQLIAFLKGQDVRRVGLEASGGYEIEVVDELRAAGLAVIVFQPNQVRAFGRFKRRRAKNDRIDAILIAECAAAQDTLREAPDPRLASFAERLTRIEQIEEDAARAKIRREPYRDPRLKSQIEDEIKRLTALKREEIRLLLKEVRANADLARKLELLLSIQGVGERTALALVVRMPELGSLSREEAACLLGVAPFVHESGRYKGQRRTGGGRARARTSLFAAAQAAARQWNPALIALYDRLVEAGKPHAVAIVACVRKMIIYANTVLARNQPWQARTC

SEQ ID NO: 282432 - protein, 358 aa, unidentified
MNRKTGMNAGQIIGTIDGMQVVGLDIAKLVFQMHTVNMATGEIVNVQIRRAKVLERFANRVPCLIGIEACGGAHHWARALRALGHEVRLLHAQAVRPFVSGNKTDAADARAIWLAVQQPGTKCVGVKSLAQQATLTLHRQRELLMKMHTMQTNALRGLLYEFGAVFAQGSRALLGAVEAALESLSNKLPQMVADSLHEQVLRIKALGVDIAAIEKRLALQLRKDADMRRIAEIPGVGVLTATAAIATMGDPRAFGSAREFCAWLGLVPKQWGTGGRVRLQGISKRGDAYVRTLLIHGARSVLTHAKEPGPWLEQIQARRPANVVIVAQAAKMARAIWAVTARQQDYQRGYRSVRPQAA

SEQ ID NO: 282433 - protein, 363 aa, unidentified
MSTSSSPPAAPVPPPISRWFGLDIHKEYLTAVAVNAEMTVTFTANKISWAQFQSWARKLFTLSDSIVIEMTTNTWEVYDFLKPLCHSVIVVHPPTISGMMPHNAKTDKHDATQLAQLHAAGLLAKDAVWIPPAHVRELRTLIANRYKVVRMASVAKNRLHNVLHRHHLELPTGKGTSQPFSPKQKEYWLSLPNLSATEKIEVEMNWDTITFATAQKAKIEDLLKQMAAKDEAALLLQQIPGIGIVVAMTILGAIGDIARFKNPTKLVGYAGLGAKVTASGGKSVGGRITKAGRKDLRHVMVEAASHAIRCHPRWKREFARLEPRLGKNKAKVAIARRMLIMVWHLLSKAEATTRLTRHKSRPA

SEQ ID NO: 282434 - protein, 426 aa, unidentified
MHVVVERCAGLDVHRDNVVATVRFPSDTSRRWLHKTKTFRATLGGLAELAQWLASFAITLVGMEATGVYWKPVFRVLEERFECWLLNAQHLRNVPGRKTDVKDSEWICDLVAHGLVRPSFVPPPEIRRLRDFTRLRKAQINERTRAIQRVEKVLQDAGIKLTSVASQTYSKSARAMLEALLSGITAPEELAELAKARLRSKIPQLREVLANRFQVDHHGILIAQLLAHIDTLDQGIVMLDEKVEAMLAPHKQTAELLCTIPGVAVRTAQVLIAECGLDVSRFPTAAHLASWAGICPGHDESAGRRRSGRTRPGPQWLTEALTEAAKAAARAKGTYLAAHHAQLRGRRGEPKAIGATRHDILIAYYYIVRDQVPFRELGPDWLRRRYSPEHRARRLQKQLEALGYKVTIQAAPEQNAQASQEVPATA

SEQ ID NO: 282435 - protein, 377 aa, unidentified
MHSENIAAYIGLDVHKETLAVAIAAPERLGEVRYYGTINNEAQAVRRLFPKLQGLYGNILSCYEAGPCGFGLYHQLTAMNIKFQVIAPSRIPKSPTDRIKNDHRDAISLARLLRAGELTPVWIPDLTHEAMRDLIRARAAAKRDSRVARQRILSMLLRTDKRYAGKHWTGKHRTWLANQSFSQPSQQIAFQHYCQSLEQIEDRILQLDQEISRLLPEWSLCNLVCQLQALKGVGQLIAITLVAELGDFSRFSNPKQLMAFLGLVPGEYSSGNSIRPRGITKVGNSELRRLLYEAAWSYRTPAKVGAWLIYYRPDSVTQYSKDIAWKAQQRLCSRYRTLTAKGKKSQVAITAVARELTGFMWDIALAAQSSFSQQKQN

SEQ ID NO: 282436 - protein, 412 aa, unidentified
MDVVHPRCAGVDVSKRDAKVCVRVAGVGRAKARSTVTTWGSVTNQVLALRDHLLGEGVTLVVMEATSDYWKPFYYLLEDGPFEVMLVNARHVKNLPGRKTDVSDAAWLADLGAHGLVRGSFVPPEPIRQLRDLTRARTMITRDRAREIQRLEKLLEDAGIKLSSVASDISGVSGRLMLAALIDGERDPAVLADLAKRRLRSKIPELIEALTGRFGVHHAFLARVHLGLIDQHSTAIDGITARIEEVIEPFRGARDLIVTIPGISTLVADVIVAETGADMTRFPTAGHLASWAGTCPGSNESAGRIKSTHTRPGNPYLKGALGIAAMSAARANGTYYAAKYRRIAARRGPVKAIVAIEHAMLIAIWNMLATGTFYSDPGADFYTRLNPDKAKNRALDQLRKMGYEVTLNPAAA

SEQ ID NO: 282437 - protein, 344 aa, unidentified
MSYFVGLDVSLRTVALCVVDADGDIVLERTLDCEVEAIDDYLRKFGEPIAKLGFEAGVMSQMLFHGLQALGYDVVCMEARQVSAALSAMRNKTDKNDARGIAQVVRTGWYQPVHMKSRESHYIRAMLSSRKAVLRKCVDLENEIRGLFKTFGIRLPSTLAHHRFDDTVRPLIEADEGLAFALLPMLEARGALYVHYREMDKRVKRVAAQDPVCNLLMTTPGVGAMTALHFKAAVDDPARFNSSRTVAAHFGLTPRRFQSGEMDNPGRISRAGDTEMRAALYTAANSLLTRTKQMSPLKAWGLRLVKRRGRKRGTVAVARKLAVILHRMWVDGTPYRWSDVEVAK

SEQ ID NO: 282438 - protein, 408 aa, unidentified
MNAVGIDVSKRKSTVTIRQPGDKVILPPREFRHTQTSINELIATIKSLDGETKVCMEHSGRYYEPVASWLSSAGIFVSAVNPLLIKEFGNESIRAPKTDRADAKKIARFALDRWAKLPQYSRMDDLRNQLKTMNRQFGFYMDQKTAMKNNLIALLDQTFPGANNFFDSPARSDGSQKWVDFVYTYWHVDCVRSKTLGAFTEHYRSWCKRKGYNFNASKAEDIYLSASDLIAVFPKDEMTKLLIQQAVAMLNTASETVETLRIKMDQTASLLPEYPIVMSMEGVGSTLGPQLMAEIGDVTRFDHRGALTAFAGVDPKPKESGDYSRKSNPTTKKGSPQLRKTLFQIMDGLIQRSPIDDPVYAFMDKKRVEGKPYYVYMTAGANKFLRIYYGRVREYLSPSTDAGDTEKL

SEQ ID NO: 282439 - protein, 428 aa, unidentified
MNDVKDTKREHFCQIIGEISGSNEYLVVGIDVAKDKHHAFMGTANGKTLYRKLIFENSRSGFVGLLEQVELIRSQNSLKKVVFAVEPTGNYHKPLSRYLVDSGSHLVLVTGKAVKSNREVLDGRWDKHDTKDAANIADLASRGRCQYYDRPSEKIIELRDLLSLRRRLKKDEHRIRVRIRNTVLAKYFPELDKYFDTGRGEILSIVKWCPNPAKIADMPFDRFFRMVTKRERGIAQKLRLMKIHKSAGESIGCPMGEAAEFEAKLLVDKLDQVRQDIGEVEKRVKEISEGFAEYRYLLTIPGFGPYVSSVVLSAIANPWRFDNASQVLKLSGYDLCADRSGKSSYKAVPVISKRGSGELRYALYQAAQVASVKNRYFKAYFTGILQGRQRERGIHTKMRVKLAAKMLVIAWAVMKRKEAFDPGRLNIG

SEQ ID NO: 282440 - protein, 310 aa, unidentified
MEQMFVGIDVAKDRLDVHLRPAGEAFAVARDGEGVADLAERLRTAGPQLIVLEATGGFEQVVAAAIGAAGLPLVVVNPRQIRDFARATGRLAKTDRVDAAVIAHFAEAVRPPVRPLPDEQARLLGELVTRRRQVIEMMGAEGNRARQVETKRLKKRIERHRSTLQMELTEIEVELDETIRATPIWREKDDLLKSVPGVGDVVARTLIAELPELGTLTRRQIAALVGVAPFSRDSGTMRGKRTIWGGRAQVRGALYMGALVASRFNPVIKAFYQRLLAAGKSKKLALVACMRKLLVTLNAILRDQTPWQNA

SEQ ID NO: 282441 - protein, 404 aa, unidentified
MAVHLAPVTSSTIVVAVDVGKTSAMLSAADSARQRVVGPVEFAMTRTGLVRVVHRVEAVIPPGAQVKVGIEAAGHYHRPLLDYRWPSGWEVLEFNPAHVAEQRRVAGRRRVKTDAIDLEAITELVLAGRGRLITEREEFIGELAAWASHRSRRVTTRTATKNQLLGQLDRAFPGLTRALPDVLGTKVGRLIAAEFADPARLSALGVNRLIRFAALRDIQLRRPVAERLVTAAQDALPTRDAAVARRVLATDVGLLADLDTQISAAEAELVRLVPLSRFATLTSVPGWGVVRVSNYAAALGDPGRWPGPRQIYRASGLSPMQYESAGKRRDGKISREGSVALRRALIDLGIGLWLSEPAAKAYAGQLKSRGKHGGGIGCALAHRATRIAYALGREHASYDSSRWA

SEQ ID NO: 282442 - protein, 415 aa, unidentified
MDVVITRCAGLDVHQATVVATIRVPTDQGGRRIVTETFGTMAADLLALRDWLQAYGVTHVALESTGVYWKPVYYMLEDTFTLLLINMHALKRVPGRKTDVKDSEWLAQLLECGLLQSSFVPPPPIRELRDLTRYRVQQVRDRSQEVNRLCKVLEDAGLKMTTVITDVMGVSGRAMLAALVAGTTDAVVLADLARGMLRKKLPELQRALQGRFRAHHAFLLQQVLAKIDFLDEALGRLTAEIDRRLVPFEPVLAALDTIPGVNRTSAISIVAETGADMHRFPTAGHLCSWAAMCPGHNESAGKRHSGKTRKGNRYLRAALIQTGLSATRKNGSALQARYHRVKRQRGHKKAVVAVGRQILEIAFHIMRDGVTYEELGADYFDRRHAERATRRHVRYLEALGFRVTIEKATPQCTSG

SEQ ID NO: 282443 - protein, 318 aa, unidentified
MSDDTLNIGIDVAKATLDVAIRPGGQHWQIPNTDDGIHDLVDRLVGLHPSLVVLEATGGLETPLTGALASAGLPVVVVNPRQVRDFAKATGKLAKTDAIDAHVLAHFAEAVRPTPRPLPDAQTQAISALMARRRQMVTMLVMERNRWQTASVPIRSRVRAHIDWMEHELEGLDQDLGETLKQSPLWCEQDQLLQSVPGVGPVVSLTLLAQLPELGTLTRRQIAALVGVAPHNRDSGTLRGKRTVWGGRSTVRSALYMGALVASRWNPELRDFYQRLRAASKPKKVALVACMRKLLTLLNAILMHRTPWQENHATTLDI

SEQ ID NO: 282444 - protein, 339 aa, unidentified
MKDQDVSDVVRTKKRTAMRYIGIDVSKATFVVAYSSDKGGEIRTFNNTTAGIRQFIGTLPKDGSIHCVMEATGNYSALLLYMLNVAGITVSMENPLKVKNFAKAMLSTIKTDKSDARLITLYGEKMNPRPFKVQGEAILRLRQKRTVIRQLTKQITAMSNLRGSLACLPVPDKGATHTVDETIKFLEKRRDRLQSELTDLVEVEFSRQLALLTTIKGIGITLATALILTTGGFTYFQNAKQVSRYLGICPTYEQSGTSVNIRGHINRNGDAYTRGLLYIAAWPASRFNAQCKETYTRLRQNGKPGKLAMIAVANKLVRQAFAVVAHDKEYIDGFVSNRP

SEQ ID NO: 282445 - protein, 423 aa, unidentified
MEVLHECVAGLDVHKDNVVACVRTVSGDKTTREHRTFDATTDGLLALLEWLTSCRCELVAMEATGVYWMPVWRILSDGAFKLIVVNAAHIKAVPGRKTDMKDSTWLADLAAFGLLKASFVPDEEQHELRALMRTRKQLVREQTRHVQRIQKTLTEANIKLDSVISDIMGRNGRRMIEAMITGVRDPRKLAALADQRLKATPKQLYDALHGRLTDHHRFLLQLHLGQWDTLDATIKGVDREVATRVFRMDTEVTAAKAKFSELIDQLVTIPGISRLSALTILSEIGTDMSRFATAGHLVAWAGMCPGQNESAGKRKRTRLRKGAPWLKTMLVQCAWAAKRKKDSYYKAQFFRLQSRRGPQKAICAVAASLLTAIYHMLKDGTIHQDLGSGYFDQRPPEIKVKRLVNQIAKLGFEVTLQPIAKAA

SEQ ID NO: 282446 - protein, 414 aa, unidentified
MQRERTSVGLDVHARSVVACGIDASTGEMFRARLGPQPEAVLGWLRELPGPVAVVYEAGPTGYGLARFLTDHNIRCVVAAPSKLQRPSGDRVKTDAKDAQHLARLLRLDEITPVVVPTVAQEAARDLVRAREDVRGDLMRARHRTSKLLLRQGTVWSGGTAWTVAHHDWLRRQTFSQSALTIAYDSALETVLLSAERRDRLDKAIVKMAADPAWSAIVTRLGCLRGVSTLTAFGLTVEVGDWSRFTGSSIGAFLGLVPTEHSSGGSRSQGSITKTGNTHARRLLVEAAWQHRRRRHCGRVGTRPRPRLGPAGTPATSGCTNAGRSSLTARNGPWSRTSRSPGSSPAGAGPWPRWTTPARPAEAAAPPLTGAGRWQRRQRVERTRDLTMSSPGEIPSHARPLDQRSAPAEQPVLR

SEQ ID NO: 282447 - protein, 342 aa, unidentified
MKGYHYVGLDVHKKTISYCVKEADGTILDEGKIDATRDGLYAFADRLPRPCAVALEATLFTAWIYDFMLPKADVVKVGHSAMLKAISAGKKKNDRLDASKLADALRCNWFHESYMPSPQTRELRAALRYRNLLVREEVRLKNKTAGLLMEAGAQYSKKKLHGAKYFDSLLEDLDYVPEGIRELTRSSHESAMYFKQAQTRLVKELRLNPALEERVERLMSIPGVGEITALTWALEIDDPHRFSSRKRAASYCGLSSAEDESGGKRTNRPLSKQRNKHIQTVLVEAAKLAPRWNPQLARIHQKALDRGAKRNEATIEVARKLAAYLLYVDKTGNRFELKENLN

SEQ ID NO: 282448 - protein, 416 aa, unidentified
MKIVRPICCGMDVHKNIIVATIGITNKKTRITEYIQETFSTLNSDLLNLKQWLINHKCFDACMESTGKYWIPIFNILEDEINIYLTHPKYVKAIKGKKTDKKDSKWICDLFKHDLIKFSFIPPKEIRALREISRYRYKLVGMRSSERNRYQNCMTVSNIGIGSVFSDPFGKSAQAIMKEVLESDIIEDEKILKCIHRSCKNKDKILDSIKHCNIETDQRFKMNESMTHMEELQVHINNCEIEMMKRAAPMFDQFMHITQLPGISTLSAILIISEIGVDMKQFESDKQLTCWAGLAPANNESANKKKSVRISKAGQYLKPLLVQCALGAIKDKDGYFGIKYSRIKKRRGHKKAIIAIARMMLVSIYHMILTGETFNPSDYESFKNPKPPIKQQVLTEESAIEFLKKSGFDVSKLAKP

SEQ ID NO: 282449 - protein, 340 aa, unidentified
MKVRTLGIDLAKNLFHVHGVDGQGRTVVQRQLRRRQLLPFVAQLQPCLVAMEACGGAHYWAREIAKRGHEVRLMSPRFVRPYVKSNKNDARDAEAICEAVGRPSMRFVAVKSQAQQDMLALHRVRSLLVRERTALMNQMRGLLAEYGIVVAQGAVTLRRALALILEERDNGVSEILRELLVEMSERQRLLEHRLKRYDQRITEFARADERAGRLMAVEGVGPLTATALIAAVGNARQFRSGRELSTWLGLVPRQHSTGGRSVLLGISKRGDRYLRTLLIHGARAALRFAARKRDPRSRWIGAVRERRGANIAAVALANKNARVLWALLARNEDYRLPAAA

SEQ ID NO: 282450 - protein, 427 aa, unidentified
MSEQIPLEIRVSVDVGCHSHNVAIGLSSGEVLEEFQIPHRPEGFQHFFSRIEKHQKKRGYPVAVAMEGYNGYARPLDGMVRTRGYRLYNINNLKLARFKEIFPGAAKSDPIDARKGLELFQLRDHLPLAKEVLQEVGAMPAENEVLKRLTRRRRRLVNERGRVINNLQVDLQAVCPGLLEITQEAGNQWFLGFLVSADTLCQLARLRRSTLLKIPAVGVKYAGLIQSWQKRAHFSEDVEWVGEMIQEDAHRVIELDHKIKALEVKIAEVAKGSKIARVLLSIPGFGPTCTSELAGEIGTVERFRKEGSLALYLGMATLDNSSGKHKGSKSPKQVNTRAKAAMMTAIDRHRKYVPESQRYYEKKRLQGKAHNQAIRALGRHLCRIIYKMLKEERDYQIRSIKGDTQAKVESRSSLIGQMRRSKIKAKS

SEQ ID NO: 282451 - protein, 372 aa, unidentified
MRKPSTLFVGLDVHKDSVDIAVAEGSRSAEVRHFGTVGGDLAAVDKALGRIARDGARLKLVYEAGPCGFVLERHLATKGLDCIVVSPSMIPKRSGDRIKTDRRDAITLARLHRAGELDAIYIPDDIDEALRDLVRTREDAVVAQRRAKLQLKALLLRRGHRYVGSASWGLAHRRWLARIKLEHSPQQIGFQHYIEMVDEAGHHVDLLTDQIRVFAREWRMAPLVDALQALRGVSFVTAVTLAAELGDICRFGTPTELMAYVGLVPSQNSSGPHVRHGSITKTGNSHVRRVLTESAWAYQRGPRIGPPLELRLQKTPKPVRDIGWKAQLRLCGRFRRLVGRGKEKQKVVTAVARELCGFVWAIAMEVRPACRQ

SEQ ID NO: 282452 - protein, 406 aa, unidentified
MIFVGIDWSEEFHEVELQAGSGRVLKRLKLRVDLAGLTRLQEVITDAAEEPSQVVVAIEASHGLLVNALVASGYRVYDINPLTAARARQGESPAGSKSDAGDAHLLANLVRTKRQDLRPLAGDSEQAQAVHIRARSHVRAIRHQQRLRNQLRSSLAKFFPGALPLLGDEPEELRDALAVLTLAANPVQARRLSLNKLRASLARHGRQRNLDAKAAQIQEQLRQPQPELSSAKVLSAHSDEVRYLVRSLVQVRSEVALLEEQLAQDFEEHPDAKIILSLPGLGVVLGARVLGESGDDPTCYANAKARKNYAGNAPITRRSGKWEARNRRVARNRWLADATFLWARSALSASPGARRYYDQLRARGKTHNQALRTLANRLVGILHGCLRRRCPYNEAVAWPQPLSEAA

SEQ ID NO: 282453 - protein, 353 aa, unidentified
MSHDIILTVDYHDRVCVIRRRDCATRREQLLEEVPTSKDSLLQVVDEARRDAGRRGRVIWIQESTTGWARVKELLGPRVEFRLANVLQIPKTAKSHKRKTDKLDTGRIQREYINGDLPLAFQPQPELRQLRRVVAYREELVNRRTALRNWINRFLSHEAWYDTTGMWSVKGQRRLRTFLKTLPRTDALIIGQKLDELARLEAQLKLAINELLVAHQSSSEAQRLDVIKGISLVSSVSISARIGPVSRFKTAEQLIGLAGLAPGIAESDQTRRNGHIGGGGTDTRLRHYLIEATLWARDLPRYKSAYQRTARRKGPKIGRLVVARMLLRSIYKILKDGVAFDAGKEARARAAAC

SEQ ID NO: 282454 - protein, 409 aa, unidentified
MQVVHEVCCGLDVHKKSVTACVLWATGRRRQTREFGTFTRELLELADWLRACGVTHVALESTGVYWKPVWNLLEGQFEVLLVNAQHIKAVPGRKTDQKDSEWIADLLQHGLLRASFVPPTPIRELRDLTRYRASLAQEINRIANRIQKVLEDANIKLASVATDALGASGRTMLEAIIHGEQDNERLAEMAQGKLRNKIPELQEALQGRVSTHHRFLLRELLDHLYFVESKMRRIEQEVAERLGPFQSEVARLCTIPGVDRVTAWGLLAEIGLDMSQFPDARHLASWAGLCPGSHESAGKRKSGKIRKGSLWLRRCLCQGAWAVSTKKNNYLSALYRRLAARRGTKRATIAVAHNLLVIAYYILRDGTCYHDLGPDYFDRLNPEGLRRRLTKRLEGLGFKVTVEPLTQVA

SEQ ID NO: 282455 - protein, 320 aa, unidentified
MEKDTLSIADAQSIGVDISKTSLDAHAFPCGVARSFPNTPNGSKAFLKWIAGFDVTRVVFEPTGAYHHGFERALGSAGVPACKINPLQARRYAQARGTRAKTDAVDAAMLARMGQEFALEAKVIQSQALDDMKELSVARMALVKDRTAAMNRQHVRRSPLLVRQTKARITQIDKQIEEIDPAIATIMATQTDLKSREKILLSIPGIGPATVRALLIDMPELGQIGNAQAASLVGLAPVARDSGAMRGKRHIGGGRAHLRQAIYMPALVACRYNPDLKVKYNSLIKAGKPPKVAITAIMRKLVVLANALLAKGKIWTPKLA

SEQ ID NO: 282456 - protein, 352 aa, unidentified
MIIGCDFHPSFQQIAYVEQETGEYEERRLSHRGEAEAFYRSLAGRAVRIGVEATGNDRWFHKLMSELGHELLVGDASAIHASAPREQRTDKRDARHILRLLMENRFPAIWQPSVGNEEQRQLLLHRCRLVRMRTRIKNQLDSIAKSEGLTGSRAWKAKRRQQIEALPLTGWYAERRKDLLALLDEMDKRIEPLDKAVKAAAEQNAEAQLLMTHPGVGPVVSLAYVLILGDWRRFPRGKQVGSYLGLIPAEASSGKHQQRMGHITKQGNTLLRWLLVEAAIKAQSKDPSWHRQYVRLSMNKHHGVAKVAIAHKLAVRLYWMLRSGQNYTKIVERGSHAGQSELAGGCGFGPIN

SEQ ID NO: 282457 - protein, 486 aa, unidentified
MAKRRESTFERLQKGQLLNRRERREVTNRLNSPDPGWEIVHPQAAGIDIGNESHYVAVPVGQDEQPIREFGAWTADLERMADWLQACGIKSVVMQSTGVYWMAVYDVLQKRGFDVHLVDARGTKNLPGRKSDVQECQWLLKLHTYGLLRRCFLPGEEIRRVRTVWRLRDQHVKEAGRAVQHMQKALTEMNVQLHNTISDLSGVTGQAIVRAILDGERDAVRLAALRDGRIKASEAELVQSLRGNWKEDTLFELRQAVQAYDFYHQQMKQCDAQLEPYLAALPSREAVAAPPTAETPDPRRKPPVRRVSRKPRKAPGNQPALDLRTELQRILGVDATSIDGLEVMTVQTVVAEVGADLTAWKTERHWASWLNLAPKRDVSGGRVIRHTRAHRTNRVGNAFRMAAQSLIRSESYLGARFRYLRAKLGGIKAVKAMARTLACLYYRLVTRGQAWVDRGTAEFERRRQEREFAMLQRKARDFGMQLVPAA

SEQ ID NO: 282458 - protein, 536 aa, unidentified
MILASTEELADKKEDITFKKFIEEIYLPWYKTQVKESTYKNRYSTIQKHFAYFYKKKVSEIEAINVQTWQLKLAKQFSPNYVRIVQGMLCLAFDRAIILGLAKKNPARMIGNIKSKKVKIDFWTLEETICNDPQVCRIVDLPVYYELETNNGNRDYRIQIGGHYMNYNTVYVGMDVHKESFTLCSCKYEDEKASHYQRTPASYKNVLRYLAFLRTIYGEDTRFVCGYEAGCLGYSLYHQLENFNVECVILAPTTMLEQRSKRRIKTDKRDAEIIARSLAQHNYSPVHIPTETDNQTKEFIRMRDDHKAELKKIKQQILSFCLRQGYQYDGSGNWTAKHVKWLRSLKPAGLYKEILDEYLLTYTILTDKLNRLDQRIEELASKEEYKESVSKLTCFLGIKTHTALSVIVEVGDFQRFVSARKFAGYLGLVPGQHSSGDDRNGLGITKAGNTHVRRLLVESAQSYTRGKIGYKSRVLRSRQAGNSPQVINYADRANERLRRRYYKMVLKDGKKYNIAKTAIARELACFIWGMMTDNIY

SEQ ID NO: 282459 - protein, 316 aa, unidentified
MSTPNSPFVGIDVGQSQLDSARHDSPSTHSFQNTPEGLVKILTWIQDVSPALVAVEASGGYERALVHFLFSAGIKVAVVSPNQVLDFARAHNQKAKTDKLDAHNIAYFASIMNPRVFSPPSPVQEKLLALVTRRRQIAHMIIPEKNRLMQASQEIKPRIQEHIDWLEEEEKEIEEKMRDLINSDPDMQEKLKILSSAKGVGNVSAFSMLAELPEMGTIGGKQVSALLGVAPFNRDSGKKKGKRRTGGGRYNARSAFYMATLSAIRWNPVIKRFYERLLSQGKEKKVAIVACMRKFIVILNAMLRDRKPFMVQSSFV

SEQ ID NO: 282460 - protein, 425 aa, unidentified
MLVPVDAGYSTGVEPIRMEAGINQTTKCEDKHMNTDKYVGLDVHKVATQVVIADEGRTGEVRHYGKISSDLHAMERLVAKLGGPGGVTLHFAYEAGPTGFVLYRWFQRHGIDCIVVAPTKIPQAKGVRQKTNRRDAEQLARSLRAGELTAIHVPDEIDEAFRDLTRARSHASRDVKRAKQRLKSFLLRQGYHYSGNANWTEAHRRYLRELVMPSPVLKAVLEEYLLAITAAEERLQRMENLVTTEAPKWRLYPAVQALMCLRGFDLIAASLLVAEINDVRRFAHPRGLMAYLGLVPHEFSTGDDRRLGAITKAGNAQARWLLVEAVQHASLPPKVSEHLARRQEGQPEVYRKISWSMQNRLYKRHWHLTHRRLMPAKVKVALARELCGFVWDLLRQVPLPKIKTPVSRSATRRPTRTSKADVVSC

SEQ ID NO: 282461 - protein, 351 aa, unidentified
MKSINKQITGEELFVGIDLHKHRWHVTIRTADVDIFSSSIAGSWQELKKVLNRYNGCRIHTVYEAGYFGFWLFDHLTNFGVDCIVTPPSLIPQEHGNRVKTDRLDSRKLARLLAKGLLKGIWVPSAKERFHRQVIRRRRQLVGDRVRTQNRIKSELCFYGIDLPTPRGPWSQVYFANLQRIKFNNRWMQQSFNQLLEQYEFLCAQIDKQTQLLKQLSQLPLYCDRVKILCSIPGIGLLTAMEILLELQDFSRFRRAEQLAAYVGLTPSQYSSADKIRMGRITAAGKNTVRAALVESCWQLIRKDKVMRKKYEQIKARAGGKRAIVAISRKLILCIRRLILDNRPYVYESIS

SEQ ID NO: 282462 - protein, 356 aa, unidentified
MKIIGCDFHTRQQQIAMLDTVTGELVERQLQHQNGEARRFYEQLAKPVRVGIEATGYTRWFEQLMTELGHELWMGDAARIRASVVRKQKNDERDAAQILELLVQDRFPRIWMPTPEERDLRQLVLHRVKLVQMRTKVMNQLQAMAMGEGLCRRKKLWSKVGRAELEGLSLGPWASRRRKELLELLEQLEKPMAELQQAAREQAEAHPAAARLMTHPGVGPLTSLSFVLTIGPVERFARSRQVSSYLGLDPRLNCSAGRMKIGAIGKQGNSTTRWLLVEAGQTAARKDEDLRRLYKRMKLRRGSQIAKVAVARRLAVRLYWMLRSRANYADLVARLVRMRGSSGSAVMEDGVHREAE

SEQ ID NO: 282463 - protein, 339 aa, unidentified
MEVTTVGLDLGKDVFQVHGITAEGTIVFNRSIRRRQLLKFFETLPSCFVGIEACGSAHHWARELTAIGHDVRLMPAVYVKPYVKRGKTDAVDAEAICEAVTRPTMRFVAVKSKEQQALLTMHRVRQLIVRQKTQMMNVIRGLLREFGHVIGNGPVAAMRFIKTFQTDDCIDIPDVAKSMLKTLCDQVVDLDDRVSFYNKLIEYHSRIDELAKRIRTVPGVGPITASAIVATIGDGKQFKNGREFAAWLGLTPLNRSSGGKERLGRISKKGDRYLRRLLVIGMTSQVQRARGYPERVHPWIMQLLERKPMRLATIAMANKTARIIWAILTKETYYRQSAA

SEQ ID NO: 282464 - protein, 407 aa, unidentified
MDRVNPRCAGLDVHKDSVWAAARVDGRVFIERFGTTVGEILRLGDWLVGHGVTIAAMESTGVYWKPIWNLLEDRLGLMLVNAHHVKQVPGRKTDVKDCDWIGQLLEHGLLTASFVPPRPQRELRDLTRQRTQLLGDRARVVNRIQKVLEDANNKLASVATDITGKSGRAILDALVEAKLSVGQMVELVHKRMEAKKPALREALAVPLRDHHRFMIGQLLGQVDALDATIETFDRRIEEVMSPLEQESVKTLDAVPGFDRRTAQNVLAEIGTDMGRFPTPSNLASWAGICPGNNRSAGKRKGGRIRKANPWLKAALTQAAWGASRPRRSYFAAQHRRLAGRRGAKRATIAVAHSLLVTVHCLLSRGTPYADLGADHFTTVQTPDQQAQKLVRKLQRLGYEVEVKRPAA

SEQ ID NO: 282465 - protein, 400 aa, unidentified
MISVGIDVSKGKSTVCILKPYGEIVSKPFNITHTQKDLSELSSMLFRLNDEVKIVMEATGIYHLPVLTYLQEKGFFVSVINPYLMKSYRNESLRKAKTDKIDSRIIANYGIDHWFKMKEFQISGVIYEELKLLGQQYRHYMKLHLLSLAELTHLLDLTMPGIKNLLASWNETNRKDKRSDFVERFWHYDVITSMSEQEFTEKYILWAKEKKYVPSQEKAKVIYTLAQESIPTLPSETSSVKMLVTEAVRVLKEVDATLGLILSRMQEIAKTLPEYSVVREMGGVGNTLAPKLIAEIGDVRRFRNGKALVAFAGIDPPLYESGQFVGCNRKISKRGSASLRKVGYETMRSLKMRSRPEDPVYRYVVKKESEGKSKKSAKIAGLNKFLRIYYARVTELYKNI

SEQ ID NO: 282466 - protein, 320 aa, unidentified
MMAQNDLVVVGIDVAKDKVDACIRALALRQACPSTSHGHRKLVAWLRKHQVNKAVMEASGGYERAWARVVREAGIEVRIVDPKRVRNFALSAGRLAKNDAIDAEMIAWFAETFSDAPGQKHDAAREELQTLVKARLSLIDFRMRLVSQSEHAAPGLVQKAHAHILKSLISEIARLEAAICAKIKSMPDFAERAEIIESVPGFAETSSANLVAGVPELGQVSDRIAAALIGVAPYDDDSGKRRGERHIKGGRRWVRNAIYMPCVGAATLNNPVLKAYYQRLIAKGKEPKVAIIACMRKLIVILNTMIARRQKWDPGRYALS

SEQ ID NO: 282467 - protein, 449 aa, unidentified
MGSNYAGVDWASEKHDLLVADETGEAVLAATYAHDERGLIALCNALVRLKVQLVAIERPDGVLIERLLDAGLRVMAIHPNQVAAARPRFRTSGGKSDRFDAFVLCELARTDSHRFRVLVPDGDQTKALRALTRAREDLVATRVALANQLRTELERYWPGAAAIFNDIDSPISLAFIKRYPSPNDAHGLGAQRLGWFLARHAYSGGKQPEQLIGKLRSAPDGRAGDQETEARRAVVLALVTAIDPLVAKISELTSEIGHCLRAHPDGHIFLSLFKGKSVVTAAELLAEIGDCRDRYPTADALAADAGMSPVAIESGKRKVAAFRFGCDKRLRDAFGVLADTTRRWHPWAGDHYARAIQRGHDHPRAIRTLGRAWCRVLWRCWQDRTPYDPAKHRGLQQHITVTIPSSSGPRPDLAATQRMLGAAVTEPAARRAEREALDGKPTSANSPGG

SEQ ID NO: 282468 - protein, 330 aa, unidentified
MIDGILGIDVCKNTLDVSISSYTKVRTKSFTNSPDGWRHLLDWLIAQKIQRVHACLESTGRYSLGIACALYGADHVVSIINPAQIRDFVRTKLGRNKTDGVDASHIREYCELFKPSPWAPPSEAHRRLGELQTIRSGIIAGLTEWKNRKNSGIVDAEAQALADATISHFTSQLGAVDKAIALTIDNDCDLQSKRDLLLSISGVGETLAGVVLAELPGPDVLRSSAEVVAYAGLNPRQHQSGTSIDRATRISKIGNAVLRAALYMPALSAMRYNSAIVALVTRLKSRGRLKPKQIVVAAMRKLLVLCFGVLKTGRPFDAAIAMGGRATSRS

SEQ ID NO: 282469 - protein, 381 aa, unidentified
MTVPIFLFESRPTSGRTVPLCSSEPFDLGWNIAAPGSKKVSKHTLVGGDGRKLLDLLARLKTRAEQRIAAPVKVVTIHEVGLDGFWIHRLLEANRVESHVVDPASIAVPRRHRRAKTDAIDGETLLRTLMAWQRGEPRVCAMTVPPSPSEEDRRRVSRERATLLRERIQHTNRIRGLLFGQGITNYNPLHKNRRECLEELRTGDGRSLPAHLKAEVLREIDRLELVLRQISEVEAERDEMLRPAKASSPAALLMRLKGIGAEFAAVLYLEGLFRHFQNRRQLAAYAGLAPSSWKSGSIDHEQGISKAGNPRLRTTMVELAWMWVRYQPDSALSGWFRERVGSERGRTRRISIVALARKLLIALSRYVTHGEIPAGAVMKPV

SEQ ID NO: 282470 - protein, 479 aa, unidentified
MPRGTADCCHEHAEENLPTRVSDQQGFRESEWRCEMRVMYERCAGLDVHKKTVVACRRWREKGGKVKSEVRTFGTTTPELLELMDWLNEREVTTVAMESTGEYWKPVFNLLEGNVEVMLVNAQHVKQVPGRKTDVKDAEWLAELLSYGLLKASFIPPQPQRDLRDLTRYRVNLVQERARVANRLQKVLEHANIKLASVATDVLGVSGRQMLAALVDGAADPATMAELAKGRLRNKMEMLEKALTGVVRPHHRFMLAQHLAHIDFLDEQIAEVSEEIGKRVEAMSQPPQPPAHNEGAPEISDDQEQPASNLSWAACVALLDSVPGIDKRAAEMILAETGIDMGQFPDENHLAAWAGLAPGNNQSGSKRKNAKAREGNRNLRQIMVQVAWAASRAKDSYPQALYRRLVARRGKKRAIVAVARSLLESVYFMLSRGEAYRDLGGNYFSERRKVNTVDKLTKQLENLGYAVRLELLNLQPKPA

SEQ ID NO: 282471 - protein, 465 aa, unidentified
MANAGPPAMKAKKCSAAQPKPSQPLAPLQPDAAGIDLSATDLWVAVPPDRTPEPVCCFGTFTADFHALVTHLKACGIRSVALESTGLYWIPLYQVLVDAGFEVCLVNARHVKNVPGRKSDVRDCPWLQYLHSVGLLRGSYRPAQAVCAARSLWRYRQELVSQSAQHIQHIPGALDQMNLKLHFVLDDLTGLTGQAILAAIVAGERDAQALAKLRHHRVKASEAVVAKALEGDWRPEHLWVLQLAWENWQHLQAQIGRCDEQLWGYTRQLEAATVVRQPPAAAPAKRVRKKTSKNQPAGQWAQELQRLFGVDLTAIPGISVLTALIVLTEVGPDLSAFKSAAAFASWLCLCPDNDTSAGKVLRRQTRRSQQRVRQALRMAASALYADKSALGDKFRRLRARLGAPKATTAMAHQYARIIWHLLTYHQPFELSVFAAQEAAHQRRQLKRVAARARHLGYQLTPMAAT

SEQ ID NO: 282472 - protein, 273 aa, unidentified
MGWYSGIDLHSNNSVVAVMDEAGKPEYRRKLPNDLRQIELALRPFRSELNGVVVESTFNWYWLVDGLMEQGYRVHLANPAAIQQYNGLKHTDDSSDALWLAEMLRLGILPEGYIYPKAERPVRDLLRKRAQMVQQRTRNLLSFQNTVRRSTSVYIDGDAIKKLSITEVDNLVHDADVARALGANLTVIHCLEAQIVDLERIVRERVKLRPTFRLLKTIPGVGDILGLTIMLETGEISRFPSVGNFSSYCRCVDSQKLSNGKKKGTGNVKNGNR

SEQ ID NO: 282473 - protein, 343 aa, unidentified
MQAVTTIGFDIAKSVFQVHGVDSVGQVLIRRQLKRRQVIAFFQKLPACLVGIEACASSHYWSRELQALGHNVRLMPPAYVRPYVKRQKNDMADAEAICEAVTRANMRFVPTKTAEQQSGLMLHRTRHLFMRQQTSVINAIRAHLAEFGIVAPVGRRGVEELLRVVADPSDKRLPEIVRACLAALGSQLLSLKKQILDFDRMIMAWHRSNQTSKRLNCIAGVGPLLSTALVASVADPKTFRSGRNFSAWIGLVPKQRSSGGRDKLGSISKQGDRYLRGLFVAGAFAVIRYAKIHGAKHRPWLTALLARRHTKVAAIALANKLARMAWAMMATGERYNYPASLKV

SEQ ID NO: 282474 - protein, 452 aa, unidentified
MEEKEISMEIINPHAVGIDVGSRSHWVAIGQQEQDVREFGVFNQDLFEMADWLTEKQKKTVAMESTGTYWQNLYAVLISKGFHVILCNGKFTKNIKGKKTDIKDCQWIQKLHSMGLLTSSFLPDGKTEQLRTYCRHRANLLHSSASTTKKMQKYLRLLNLRLDVVVRDICGLTGLTIIRAICEGEINPEKLASLRHGNCRKTEAEIAMALQSNGRKDYLFALQQELDMYDHLQKKISECDIKINQMLNEIIDNDENKKQHHIDPKTYKKINKNTPKDIDLNLKAYQMFEGTDLLSIEGLSYSTVIALMSEIGFEGIKKFPSAKHFASWLRLAPNNKISGGKVLSSKIPKGSNRLKIALRNAANAIGNLKESTPLRDFFQRINFRKGRVSAVSATARKLAVIIWNMIVKGIPYNNPEGYLFLDQKRKLGIVKRIQKQIDKFALTTEDLQFAKT

SEQ ID NO: 282475 - protein, 422 aa, unidentified
MKKRIYRRMPVNDFQPQSISLAELGGRLVFAVDVAKVDMVAAFAAADGRVLHIVCWKAPAENLIVLDILRGFRAQGVAVEVVMEPSGTYGDVLRQQLVHDGFAVFMVSGKRTHDAREMYDGVPSLHDAKAAAIIARLHAEGLSTPLRDEVPERRQLRAALAIMDLHQERYLQLTHRLEGWLARHWPELPTLLELTSSSLMALLARIGGPADVAAAPQRARRLLLGISHRLMPEETVAAVIAAAATSVGVPLVGLERDALMAIAADAYRAHRAFTTAKTKVDQLAARTPAATLAPAVGHTTAAGVYAEVGDARSFSCARAFLKAMGLNLKEKSSGTHQGQLKITKRGPSRVRGYLWLAVFRWIQNDPIANAWYQRKKQRDGGKASRAAVALMRKLAKALYHVGRGATFDSRKLFDTRRLPLPA

SEQ ID NO: 282476 - protein, 350 aa, unidentified
MKKICIGIDVSKETLDVTVIHIESYELVEKLGYSKFDNRPSGFRSMTAWVRKVIKSRGQMDEALFCMETTGSYDLPLCHWLHKNGLNVWRESALQIHCSKGFQRGKSDKEDSEVIAQYAARHQSRYTAFVPDAEAIADLKELICYRDSLVERRKECKVRLANKKETLVNRNSKAWKCIERLSKAEIKRLDKVIGECDEDIRNLMKEDEEMEKNYQHLTSIVGIGLINGAALIAYTGNFKKITTPNKMSCYCGCFTFYEDSGTSVHRKSPYRNACCKMLKGYLRMAAKSAMLANTELRKYSERLREKGKPYAVILNNVANKLLHIMFSLVKHDYDYEYNHEMVRRMEREIA

SEQ ID NO: 282477 - protein, 355 aa, unidentified
MTSSKYIGMDVHKESMSIAVRNAAGKIVMESVIETKANMILEFIDGLRGDVHVTLEEGTWSAWLYDLLKPHVTELVVCDPRRNALLKEGNQNDRVDARKLAELLQNNQLRPVYHGDHGLRTLKELVRSYLTISKDLSRVMTRVKAIYRSWGIPCSGTQVYSARHRAEWLGKIREPGVRRRAEHYYQQLDALRLLRLEVRKDLLAESKKHQVWKRLGQIPYVGPIRAAVLLGIVQTARRFRTNRQVWTYSGLGIEVHSSADHQVVKGQLQRKKKPIEIRGLNKNCNHHLKNLFKGAAASASTHPGPFQEFYAALVAKGMRPEMARLTLARKIATIVLIIWKKGVCFDANHLKPQTA

SEQ ID NO: 282478 - protein, 387 aa, unidentified
MSQTVAALIPAAVDYERTLVLAIEVSNKNWVLAAQVPGLPHTKAKRTVNPEAEALLAAFAGYRARAAAKGRSVERVIAVYEAGWSGFWLARWLMRHGVEVYVIQPSSVPVDRRMRRAKSDGIDAELLLRTLLAWLRGEPRACSMVPIPDEADEDARRCVRERTELISERVGLINRIGAVLATLGVSDYNPLLQNRGRPLAELRTALGEPLPANAHAKIKRLLARLELVLTQIAELERERDAVVETEASDRAGKMIQQLTALRGIGVQSATVLVREAFVRGFANGKALGSYAGLACSPYSSGGIDREQGIGKAGNRRVRTVMVELAWLWTRYQPGAAQVCWFRERVGSTGRRVRKIMVVALARKLLIALWRFVIDGVWPEGAVLKPAA

SEQ ID NO: 282479 - protein, 429 aa, unidentified
MPQLWAGIDAGKTEHHCVVIDGNGTKLLSQRFKNRESAILTLMGDVASLPGGTDVAWATDLNHGGTGLLQTLLSSHAQPLFYISGRVVHHASGAYRGEAKTDAKDAVIIADQARTRRDVTLMRQADEVTAELRLLSARREDLVHDRTRAVNRLRAILVHYFPSLEGAFNYATTRGPLVLLTRYATPSAIRRTGESRLASWLKGQGCWKSAAVAKTAVEAAREQTSVVAGEDAAARLVSRSARDLLRIRDELAELEAEIDAVLQDSSSADLLVSLPGFGRRLAADFLAATGTDLAAFETPDRLASFAGLAPVPRDSGKISGNHHRPRRYDRRLLNACFQAAFIASRNCPVSRSFYERKRGEGKSHKQALIALARRRINVIWAIFRDQTSYHPTGAEPAAFASGTIADGSAARGLGAGGNPWEGIGNRHSW

SEQ ID NO: 282480 - protein, 348 aa, unidentified
MTNYIKHKAIKTMGIDLAKSIFHLHGVDEQGKVVLRKRLSRSKLAAYMAQLPPCMVAMEACGGSHYWARKFKEMGHDTRLISPQFVKPFVKSNKNDAADAEAICEAVQRPSMRFVPIKNIEQQDIQSVHRAREQVVCRRTAQANQIRGLLMEYGLVISQGRKVLCAHIPDILADADNGLSGMFRELLSGLWEEMIHLEQRVSEYDLQIELLSKQSDVCQRLMTVPGIGPMVATALVASVSDGKAFKSGREMAAWLGLVPRQHSTGGKPRLMGISKRGDTYLRKLLIHGARAALRWTDKKHDKRSVWATSLKERRGQNIAAVALANKTVRTAWVLITRHEEYQMSTVSM

SEQ ID NO: 282481 - protein, 331 aa, unidentified
MKHYAGIDLSMETSHVCIVDAEGRKVAAQRVDSTPEAIATLLPVDRVVIETDRMTPWVARGLHELGVAIVCIDARQAHRSLKVMKANKTDPHDAAGLAQLARTGFYKEVHVKSPTSHGVRSVITARTHLVEARVRLDNTIRGLCATFGIRPGTGQGERFLAQVQAAIAIPGLGEAVASLLRARNGLVDEIRRMDRELKAISIASPACQALMTILGIGVQTSAAFAAAIDEAGRFKRSRTAGAYCGLVPRRHQSGELDWTGRITKHGDGTVRTLLYEAANSILTRTRQTFALKTWALKTVKRRGLKKAQVALARRLAVIMHAMLREGTLLEA

SEQ ID NO: 282482 - protein, 317 aa, unidentified
MSNPESFVGIDVAKSWLDVGWLAGPTLRIDYNDEAVAGLVERLRREPPTLVVMEATGGLETEVASALAAAGLPVAVVNPRQVRDYAKACGRLAKTDRIDALILAGFAAAIRPQVRELPDEDTRALGDLLARRRQLIEMRVQEKLRLQRASSVQRVSLREHITWLDERIARLDIELTHALRTSPAWRDKDDLLKAIPGVGSLTRATMLALLPELGALNRRQIAALVGVAPFNRDSGKHQGQRVIWGGRAQVRRTLYMAVVAAMRCNPVIRSFYLHLRAQGKPAKVALTACMRKLLTIMNAMLKHRSEWAPGLDSQHSC

SEQ ID NO: 282483 - protein, 399 aa, unidentified
MISSEASERPAVHWSAEMTCKELPGAGLGPTPDNMNSIINNTELSSHEGTRSEFNLSKLVIKLGIDVHQEFYVVVVQEGGGNPKPAQRFQKQAFLHWAAKLRQSSGAQIHAVYEACGFGFGLQRALTALGIECHVVCPQKLDERNKRVKTDGLDAKALCLKLDRFVEGNHQALALVRVPTEQEEQLRAIHRQREQLVKTRKRLEAQGRSLMVNHGMEPVRCWWKARAFAALAVPEWLKELLANSQPILLALEAKIRALTVQLQGSAAPDQPRGLGAMTSVVIDREIGNWNRFANRREVGSYTGLCPGEYSSGKTRVQGCVTKHGNPRLRAALVELAWRLVRFQPDYKPVVKWRRILCKGALATGAARKKAIVAVARQLAIDLWRIRTGRLNAQTLGLEI

SEQ ID NO: 282484 - protein, 316 aa, unidentified
MTEPRKVVGIDVSKAVLDCCVVSSPIQVLQVSNDAVGIEQLIQQFQELKPDLIVLEASGGYETAAATALASALFRVAVVNPRQVRDFAKATGQLAKTDRIDARILAQFGLAIEPQVRSLPDADARELQGLLARRSQLVAMRTQELNRAAQVTGTLRARIKKHITWLNAAIRTCDVDLTAKLRTSPVWKAKEDLLRSMPGIGVINSRMLMAGLPELGQLNRQKISALVGVAPFNRDSGKFKGQRRIWGGRAHIRQALYMAALTAKRCNPVIRALYERLTMRGKPHKVAMVACMRKMITILNTMARHNAHWDPKPQTP

SEQ ID NO: 282485 - protein, 337 aa, unidentified
MDYFAGLDISMDETHFCVLDREGVVVYESKTASTAEAIAGALAKAPSCRRIVFETGRMAPILFHGLSQLGLPVVCVESRQAYQALKSLATHKTDRNDARGLAHLARTGFFKPVHVKSLAAHAIRSLIVARKKLVGQRVALENQIRGLAVVFGVRLPRALTAAFIDKALKASEGIAGLSAAMRGLIAARTAVMAAVAAIDADMRRMTRASAACRRLMTIPGVGQLTSLAFVAAIDDPSRIRRSRDIGAYLGLVPRRHQSGEVDYVGGISKCGDRRVRTLLYEAANVMLTRYKGQLKLKDWAFNIARRSTMRKARIALARRLAIIMHAMLRDGTEFRPA

SEQ ID NO: 282486 - protein, 338 aa, unidentified
MKQFVGIDLHKYVSQLAVLRESRSASQLRLANDVVTVERVLKKLPKGSKIALEAMGSWWWMVDLAQKTGHEVFLSHPKQTKAIASARLKSDKVDALMLAKLLKADLLPTVWIPPENQRHLRELLTHRARLVRQRTAVINELRAVYAKRNIDPQAKLGRVRPSVAGAEDLSGYGPRIVGEDVELLGFINRQIGGLDKELTKIALEDAQSKRLMTIPGVGPVSAVAVSCWIGEIARFSNAKKLASYFGLAPRVRQSAETERHGHITKEGNRMVRWLVIQAALVHTRRGKAPSRKHYLGVLRRRGKQIARVAVANKILGAIFHMMKEQIDYHEFLRRSGAQ

SEQ ID NO: 282487 - protein, 337 aa, unidentified
MQRRYVGIDLHRRRSVVVTMDEAGEVLSAVRIANDPVAMSIAVAEAGEGAEVAFEATYGWYWLADLLKADGHHLHLAHPLAMRGMTSHRRVKTDWKDATLLAYVLRMGSFPEGWIAPPELRELRELVRYRAKLVALRSGLKAQVHAVMAKNGILPARVEMFGPGGQAQLDSLDVPMNFTIRIESLRDLVEIYDREVAMLEREIHRQLKDDRGYQAIQKIVGVGKVIGAIFVAEIGDISRFSSPERLCSWAGLTPKHRESDLTKFQGDITKQGNKLVRWAAIEAISGYRGGAKLRADYERIAERRGKYRPRAAVAHKLMVLIYYGLRDGEIRCLERAG

SEQ ID NO: 282488 - protein, 361 aa, unidentified
MFTERTSVGLDVHARSVVAAAIDGDTGEVFRKRLTPGNDDVIGWVRSLPGPSAVVYEAGPTGFGLARAFTTAGIRCEVAAPSKIQRPAGDRVKTDARDAMLLARLLRLDDIVSVTVPSVAREAARDLVRAREDVRGDLMRARHRVSKLLLRQGIVYYGGHAWTGTHLVWLRRQHFDAPGLQLAFDAEHEAVLQAEARRNRLDKAIEAMAADSEYTPVVRRLGCLRGIATLTAFGLAVEVGDWDRLTGASIGAYLGLVPTESSSGQSRSQGSITKTGNTHARRLLVEAGWQHLKPYRTPGATMRARWELAPAAARARGHAGNQRLHQRWVHFTDRKKNPVIANVAIARELAGWCWSLAVMDD

SEQ ID NO: 282489 - protein, 343 aa, unidentified
MTVVTVGIDLAKNVFAVHGVNAAGKAVLVKPLVRRAKLLELIATLPACLIGIEACTGAHYWAREFQKMGHTVRIMAPQLVSPYRMSGRHGKNDAADAAAICEAVTRPNVRFVPIKSVEQQGQLFVHRAHQGYVSERTALINRIRGLLSELGIVLPQAFKAFLSGVAQVLEDMPGYCNQVIGDLLNELYHIEEKIKNSEKLIQQLARDKSAAQLLMQFRGIGPMTATAIVVSIGNGHDFKNGRQFSAWLGLTPRQQSSGGKARLGRITKAGDSYLRTLLVLGARSVLLGAAKNDDPVSRWALQLKERRGYGRALVAIAAKNARMCWAMLHLRDEFRFPAWFTDY

SEQ ID NO: 282490 - protein, 402 aa, unidentified
MNCVGIDVSKGKSMIAVMRPFGEVVISPFEVQHTASELSELAKLLKSLDGETRVVMESTGNYHTPVAWLLHDAGLYVSVVNAMLVHDYGNNSLRRAKTDKKDAVKLANYGLDHWLTLPRYVPEEDTRLLLKNCYRQYQQYSKVQTMLKNNLISLLDAVFPEVNRLFNSSPRADGSEKWVDFVSTFWHCQCVSTLSLKSFSARYLKWCRKHGYYFSQEKAFEIHSKAKNCIGVMPRNETTKLLVQQAIAQLKATAAALAALKQEMQSLAAALPEYPVVMEMFGVGSTLGPQLMAEIGDVRRFHSKKALVAFAGIDAPPCQSGQMDIHSRSISKRGSAALRRTLFLVMGIYLQSAPLDEPVYQFMDKKRSEGKPYKVYMMASANKFLRIYYASVTAYLNTLARI

SEQ ID NO: 282491 - protein, 352 aa, unidentified
MKKTLFIGIDFAKANFVASALLSEDPDPVCLPKSFSNDDKGAKALVSWIVKLLPETCPLSDVLVCGEHTGSYSLLLPRRLFDAGVDCWLENAVCIKNGSGRIVREKSDSADATMIAEYARTFYQKRVRLFVPESPVLSELRECNDIRRRLVKEQAGLMCKRHDAEVRLKAKPGSKAIVMNIKILERQLAYIKEQIAKVDRQMYSLIRSEKKLSGIYDIIVSINGVGPVTAIALIVLTSGFTTFSSKRSLACFLGIAPFRSESGTSIQHGSHRSRQADSYYSGLLYMVAVSAMNWNPEIALYKERLLKKGKPRLVIINNIKNKLITIIWAMVKNDTLYDPDHHLKVAQQYQTA

SEQ ID NO: 282492 - protein, 412 aa, unidentified
MEVLHPHCAGLDIHKDTVVACVRHMVDGAVKREVRTFKTTTKDLMALSEWLSAEGCTDVAMEATGIYWKPVWHILADGDFKLILANAAHVKNVPGRKTDVNDATWLADLMAHGLIRGSFVPDEPTQEMRNFLRTRKQFVRERTSHVQRIQKTLEDANIKLDSVITDIMGLSRSPQALALIAGETDPFALAALAHRRIKASQAELEAALRGRVSDHHRFMLRLLLQHIDAIDDAIGQIDQEVDAHVEPFRTAIQILSSIPGISDLSAEVIVSEIGIDMNRFPTEGHLISWAGLCPRNDESAGKRRSTRMRKGAPWLKTTLIQCAWAAARTKGSYLQAQFQRLRARRGAKKAIGAVAASVLTAAYHMLKNGTLYEDLGSDHFDLRAKSKQILRLVSRIQNLGFAVQITPIGAAT

SEQ ID NO: 282493 - protein, 457 aa, unidentified
MPGKTPRPRPRSSRQLSTIHPDAAGLDVGSTFHVVAVPSDRDDQPVRTFRTFTGDLHHLAEWLQQVGITTVAMESTGVYWIPVFEILEACGFEVLLVNARHVKNVPGRKTDVNDAQWLQQLHQYGLLRGSFRPREGVVRLRAYLRHRERLVDDAASHIQRMQKALMQMNVQLHHVVSDITGLTGLRIIRAIVSGNHTPEALAAFRDIRCHASEATIREALIGNYRPEHVFALRHALEFYDVLQTKIGECDVEIEAVLKMLNDARPAPTDPLPSVRHAKARNEPRFEARPALYTLLGADLTQIHGFGPYTVLRLVGECGDDMRKWPTDKHFTSWLSLAPGNKVSGGHLLSSKTRRSANRAAALLRIAAVNVGRTETALGAFYRRLAARIGKAKAVTATARKLAVLFYRALRFGLAYVDPGVSHYEARYRQRVIHNLRRRARDFGFSLVADTAPSVGVS

SEQ ID NO: 282494 - protein, 310 aa, unidentified
MTHVYIGIDLSKDRLDVFDPRIGRASFHANSAAGIKALFAAAKPEDIVVFEATSGCDRLLLEACAKAGRPFVRVNPLHAWHFAQSLNLPKTDRVDARMLARFGSERQLAPHLPQDPARAELAELADRRDQLKRMETQEKNRLRKTASPAIRADIRASLKALAARVARFEQAIAELLRQTPELAHDATLLRTAPGIGPVTAAGLLAYLPELGHLDRRAIASLAGLAPKARESGKFRGQRRIGAGRETVRRLMYMAALSLWRNPATLGRQAHKMHDAGKPAKVALIALARKLLTIANAILRDQTPFQKVTQP

SEQ ID NO: 282495 - protein, 426 aa, unidentified
MSESEVLRQEPEFAALVGIDWADQKHAWCLQAAGTTQRESGEVEHTPEAVEAWIGQLCQRFGNRPIAVAVEQVKGALVFMLSKYEPLHLFPVPPAMSAKLRQALYPSGAKDDPRDADLLVDLLLQHRDKLRRLSPDSEATRRVQNLVEERRHLVEEKTAQSNRLTNHLKIYFPQMLEWFDRLDTELVCALLEQWPTLEELQNVPPARLRAFFRKQRCHYPELVERRLVGIRQAMPAIRDRAVIEAKSAVVKVSVQVIRSLIRGVAELDRKIEEAAAAHPDFFIFESLPGAGAVLAPRLLAALGSQRERYANAAEVQAYSGIAPVTEQSGKKKWVHFRWACPKFLRQSFHEWAGHSIAHSPWARSYYQQQRERGKGHHAAVRGLAFKWIRIVFRCWKDRVAYDENRYLAALAKRNSPLAAVAGATIL

SEQ ID NO: 282496 - protein, 325 aa, unidentified
MGKNQLHAAITIDGINFHDQPVDNTPTSIKEYFRHLKSKFNFNASQLTVCMEHTGIYCYPLLDYLTHQGIAVCVEPAVRIKQSQGMQRGKNDKMDAVRIAKYLFKNHTELKLWKPKREVVQQLRALLVVRERLVRGQMRFEVPVKESREFISKSIRQLAVVNCKATITAIKKDIKRVNVEISKLIKKDAQLHAQVKLATSVTGVGTIIATNMIIDTNEFQDINDHKKYACYSGIAPFPNQSGKSLRGKDKVSHLANKRIKTLLHMGAWSAVQYAPDLKAYYNRKLAEGKPSYSVLNAVCNKLITRVFVCIKNQRMYQKDYRPALA

SEQ ID NO: 282497 - protein, 412 aa, unidentified
MEAMIERCCGIDVHKKTIVVCLAVGKPQEKPRTLVKTFSTMTGDLLACREWLISEGCTHVAMESTGVYWKPVFNILEDKMEVILANARAVKNVPGRKTDVKDCEWLAQLLRYGLIKGSFIPPKPIRELRDLTRYREKLTQKRSSELNRLQKFLEDANIKLSSVVSDINGVSAQEMIHHLIQEDLSKEQMAQLARGALRNKIEDLEKALEGYLSDHHRLILRLSLQMVASYNDAIEKLDVDIDRRMEAFREESEMLQTIPGVKKKSAERIIAEIGVDMSRFPSDAHLSSWAGASPGNNESAGKRRSGKVTPGNKWLKSTLVEAAWAASRTKKTYLSARYRRLASKRGKKRAALAVGHSILVMAYHIVKEQSTYHELGAEYFDRLNEQRLVKRLASRISSLGYEVELKKMTVAA

SEQ ID NO: 282498 - protein, 317 aa, unidentified
MNEEGTNTMIAVGIDISKKKVDIWMNNKLTILSNIEKDFRKFFGVIDRKDTRIVMEATGRHHRLAHEVLDSMGFGVMVINPYQSRHFAQAMNIFCKTDKVDAKILSEYAQRMDFVKTSVPSDNEKSLQNKVRYLEDLKGMLIQCENRLEYANGMELKSIKRLIQSFKNEIEKVSKAIKDVVKSDEKMKNRFDILTSINGVGETTAAALLGLMRELGSVTNKQATALAGLAPMNNDSGNSIGKRHIQKGRHDIRRFLYIPIIGAATQHNTVLKEFYKKLIDAGKPARVALIACMRKLIVYANTLLRKNEKWQENMIKV

SEQ ID NO: 282499 - protein, 403 aa, unidentified
MNSVGIDISKGRSTVAVMRPFGEVVISPFEVRHTDSELSELARRLKSLTGETRVVMEATGNYHAPVAKLLHDAGLYVSVVNAKLVHSYGNNDLRRVKTDRKDAVKLANYGLDRWLTLPRYVPEENTRLLLKNCYRQYRQYSKVQTVLKNNLISLLDTVFPNANRLFSSPIRGDGSEKWVDFVAEFWHCRCVSEKSERTFTNKYQRWCKKHGYNFREAKAHTIYAEASGHIGVMPKSETTKLLVEQAVAQLRATSTALAALKHEMQSLASQLPEYPVVMDLFGVGPTLGPQLIAEIGDVRRFYSKKALVAYAGLDAPPNDSGDVTGRHKSMSKIGASSLRRTLFLVMSVYLQTAPLDEPVYQFMDRKRAEGKPYRVYMMASANKFLRIYYATVKAYLESLEHTA

SEQ ID NO: 282500 - protein, 314 aa, unidentified
MTSANFEISVGIDVSKSHLDLAVHQTGAAWSCPNDQSGCAALVSQLKELKPTRIVMEATGGYETLLAASLSAAELPVIVVNPRQVRDFAKATGELAKTDRLDARVLAHFAAAIAPPLRAAKSEEAQHLEALLARRRQIVEMLVAEKNRLAANRDHAVVKDLKVHIAWLDRRLKQSDDELQRALQASPVWRERDDLLRSAPGVGPVLSLTLLAQVPELGTLNRKQIAKLVGVAPFNWDSGQWRGSRHIWGGRAMVRAPLFMATLCAIRINPTIKSFYRRLITAGKAPKVAIIACMRKLLTILNFMLKTQTSWRTT

SEQ ID NO: 282501 - protein, 345 aa, unidentified
MNTSKVVWQTTKGKGLLVEDFDHFVSLDWSQKVMAVGHMGRRSKEPTVLERPADLKDLKQYLSSLKGRTVLTFEETTTAQWLFVELHECVDRIVVCDPSHNRWLCHGPKTDRIDARKLCVLLRGGLLKEVFHSMDALYELRSLVSSYADVVQAGVRLLNQRHAMERGHSDTRTNAAFILEHLDKSIELYRQTKEQYEVKFTRFCRRYSAAQRLLEVEGIGTIGVVKIIAIVVDARRFSNRGQYLCYCGLVRNEKLSGGRSYGRRKPRYCHTLKTVYKTAAMAAINGGDNPIHEYYEHLLAQGVAEHNARHAVARYIARITYGMLRNGTRYEPYRWRNALETRSVA

SEQ ID NO: 282502 - protein, 487 aa, unidentified
MQQTIAPPQYLVGIDLALRADHVAVLLDEHARPVGKPVSFGRTHDDFQTMFQTITQRVPEGFGLVWGCEATGAAWRPVTACLLRGGQSVSLENPAAIAALRNVHSRFFKDDRVDARTIAEMLSLRVSRDKPLRTPPSAGAQARRTLARRIEGMNQTLGSAKTRFTSLLCDTALPSLKPSDHEWTGPALLRVMGKFADVREIARKSLAAFVKSAKKLGGPRTSEAALAKLHQAAVQSVRCYGEAGLDYATHALVLRDSILEITQLQDRIEAMEQHLKEALDQTRTEAEVQCGLSVPGVGEATLDIAMALCGPAGQWASFRAIKQFAGTVPVVDRSGQSARAPRMSKLGEPILRKVIYQIGNVARRYDAGFAANYHDQMVAKGKGHVAASISTGLKVLNCLRAVLRDRRAYEPRDPRSGLPITKKQSRELAQTLYRVPEGTRAARRKHSKGDPANPDNCRLTQEGTTPAGHTRAKDMPKHSHKRAANLR

SEQ ID NO: 282503 - protein, 342 aa, unidentified
MSEIITVGLDLAKNVFQAHGADVSGRAVLRKKLRRDQVLAFFSQLQPCVVAMEACGGAHFWGREIGKLGHEVRLIPPAYVKPFVKRQKNDAADAEAICEAAQRPTMRFVPVKSEETQGAAMVFRIRELLIRQRTQAINALRGHLGEFGQIVPQGAANAARLIAIVENPDSGLPADAIATLKVLVGALTHLETEIGVLDAEIARRAKENETARRLMTVPGIGPLIATAIAVLAPPSETFRKARDFAAWLGLTPRQHSTGGKQRLGATTKMGERSLRRLLIIGANSVIIKRHVHAAAQPGTWLGEMLKRKPPMLVRVALANKMARIVWALMARGGVYQSPAAAA

SEQ ID NO: 282504 - protein, 408 aa, unidentified
MPELDHRGPFAAVDWAKDAHAVSIVEESGAERLAEQFPNTEAGLRALTGALLEGGVERVAIERPDGLLVDRLLSAGLCVVAVHPNKLASARERHSASGKKSDGFDAFVLADLLRTDGHRFEALRPDGDETRALRALSRTREDLVGARVALANQLRAGLEAFWPGAAVIFAEVDSPIALAFLERYPSPADARRLGVRRLEGFLARHAYCGRRPAVELLARLRGAPEGRSGEAEVEARRQAVLSLVAGLRALVEQIGLLEAEIAGAVRAHVDGAIFSSLFRSKATVTAARLIGEIGDVRERYRSADALAADAGMAPVSRSSGRSRVVTFRWACDKRLRNAVACLADTTRHHHPWAGSVYRRARARGCDHPHAIRILGRAWLRVIWRMWQDRVPYDPALHRGLQQLNPAGG

SEQ ID NO: 282505 - protein, 343 aa, unidentified
MIIGCDFHPSWQMISWLDTESGETGERKLVHASGEAEQFYAGLTGTVRVGLESTGNSHWFVDMLIEMGHEVWVGDAAKIRAMQVRKQKTDRRDAAHILDLMISNGFPRIWTPSKQERDQRQLLIHRYKLVTLRARVKNELQHLALNKGMQKGRSLWSKEGHKLLLEMPLDYWAGARRENLLELLKSMDQKITVLDQAVKKAAEENEKSRLLMTQPGVGPITSLAYVLTMGDVTRFQRGKKVASYLGLIPREYSSAGKQRLGAITKQGNRFMRMLLVEAAQVVVRYDPGFRSEYLHLCHHKPKAVAKVAAARRLAIRLFWMLRTNTPYPEVVRIESSSRVPLDE

SEQ ID NO: 282506 - protein, 430 aa, unidentified
MEVIYSKACGVDVHKRFIIAVICDSSSANPKYIRKRFSTFNNQLIAFKNWLIEHDCQNVCMESTGKYYVPVYNALEGFISNVVVANPKWVRAIKGEKDDNKDAKWIADLFKLGLVRSSYIPSKDIRILREFTRYQYKLINTRSSEKNRFQNALTVGNCKIDMVFSDVFGKSASSIINLILANDTYTSEEILSKVHGRCKASHEDILSAIDGVTLDTHQKARIEIVKNHMEYVDSLLCKIQKHIDEMIVGYENYIQLLCTIPGVDRKSAITIISEIGVDMSQWSSHHKLASWAGLAPGCNESAGKKKSVKISRAGVYLKPCLVQVAHAAVKDKDYDYYANKFNKISKRRGKKRAIIAIARKILVAIYHMLKTGEVFNPSDMTDIETSQKKRIEYIKNNFKNAFNQLMRTELSSEEILAFLPTKSTDSPLKE

SEQ ID NO: 282507 - protein, 351 aa, unidentified
MDIVGAFDVHRKQITFDYVQIDSGEVHRGKIRPADRESFREWLDGFTQRFSGKQIAIAVEATTGWRYVVEEMKRAGIEPHLAEPAETKSLQGPKKRAKTDRLDAGHLRDLMVIDRLPESWIPPDHIQEIRTLMRLRHSLIEERTTHKQRIHALLLDNGYPRQSNLDSIEGRAHLEDMELPAAARKVVDLSLAMIEHINEELEPVEKELQAYALSQAGCKALMMSDYGVGELTTSVALLSELGDTRRFSSSKKAVRYAGMDITVHSSDDKRAAGKLSRQGPPVLRWAAFEVAKRAWRKNSPDHEYYLRNKERIGANRAALSIARKLLRRAHHTLRELGEEAISEPELTGSGG

SEQ ID NO: 282508 - protein, 429 aa, unidentified
MKLPRHLEHINRHAAGIDIGSRSHFVAVPEGTDEKPVREFSTFTGDLEKLAEWLISCNVTTVAMESTGVYWIPVFEILESRGIEVKLVNARHVKNVPGRKSDILDCQWLQQLHTYGLLQGAFRPADEVCTLRAYVRQRGTLVRSAASYIQRMQKALTQMNLQVHNVVTDITGTTGMRIIKAILGGERNPDVLAAMRDSRCKNTAATIARSLKGNYRPEHLFSLQQAVELYEFYRIKIADCDKRILDQLKNFDDSNEPPVNIEDALICMSGVNLTNIDGIDTNTALKVLAEIGTDMSRWKSSKHFASWLGLSPGAKISGGKVLGSATKSVANKAASALRMAAFTLFNSKSALGAYLRRQRARLGAPKAITATAHKLARLVYAMLSNGSAYVDAGQAYYEERYRTRVIQNLKRKAQELGFELVTIQKTATV

SEQ ID NO: 282509 - protein, 361 aa, unidentified
MDANNHNPHSDQPQPQPQPQPHAPAAPAAPAAPAAPAAVYVGIDVSKDTLDLARSAGAGPGSPEVTTFRTFPNDADGIAAVVKLLEAIGPALAVVVVESTGGLERPLLAALLDAALPHPGRVRSFAKALGISAKTDRIDGGVLVRFGRQAAPRLAERRTANQVDLQALVVCRRQLSVTRVQQANRLAATAAKPARKAIEKVIATLDEQVESLDKQIRDLIDADDDFKHLDGLLQSVPGVGPTLSATLAAEVPELGTADGNKVCALVGVAPFNCDSGKTTGKRSIRGGRAAVRCVLYMATIAAMRFNPVIHAFAQRLRAAGKLPKVAIVACMRKLLTLLNAMVRGGLTWDQLDVVKKLAQNP

SEQ ID NO: 282510 - protein, 410 aa, unidentified
MKDSGKRYIGLDVHKHYLIAIGVDDELNIVLPVRRVELSHLESWMKKTLTKQDEVVLEMTTNTWQLYDELCAYTGSVLVVHPPHVALITRSQVMNDKIAASILARLLAKGLLVGIWVPPQEVRELRGLVAQRRKMTGLATQAKNRLHAVLQRHHLALPEGNPFQEAQSAWWQGLPLGKLEQMNIQSDLDTLRFAESQRLRLIAMMEEIANQEEQVTRLLQLPGFGVVTAVTVWAAIGNIQRFADPQHLVGYAGLGARVHDSGMSTRTGRITKAGRRDLRVVLIEAAQIAANTHPQWKAELARLQPRLGRNKAIVAIARKLLITVWYVLAQHKTDRFAEPEAIAQKLLKFAYQLGKENRPAGQSAAQFVRQRLDILRLGNELTSIAWGSKKPILLPPSALPENQVSDVPSR

SEQ ID NO: 282511 - protein, 395 aa, unidentified
MVAPAHWREHDSRILGIQPHAHFYQYNVITMFASCDRKTTLFVGIDVHRDTHTAVGVSPFGEKLFELTVGNYEKDFRLLIQKVDEVSEQALLSPFYGLEDCHSYGERLSTHLVQEGLRVVSVPPILVDEKRKYETHPEKSDPLDALGVARVMIQRIDSLPIFTLTEESRKAKQIKELSMDREFLVCEQTRLKNQLHILLHRLWNTGYRVKFKDPFSKKALVFWSKHVPKESDPFLVRSMKRKVKRLQDIKEEIVELEYELETLLKTSGQTLNTASGVGITIAAEIVGEVGDISRFHSPAALAKYAGCAPRECSSGKTSRHRKTRSGNRRLNRAFHRMALSQISRMGNPVAQKYFKRKVSEGKSKSQALVCLRRQMVNIVWMMMKHKTVYRYPQEH

SEQ ID NO: 282512 - protein, 341 aa, unidentified
MQVYGIDLSKDKFDVNFIDVDGKQKNKVVKNALVSISKFLSTIQPGAVLCAENIGTYGDLLVFLCNQYDISIALVPGYTIKHSLGLLKGKSDPIDAGRLREYGERFQDKLSFKEYQNENILELKQLYTLRSQMVKARKELQTGAHSRALMPMQSIAANTLLKKVVDTLDSQIIEVENEMYNIIKNDVKLEQNYLLATSVKGIGPVIATDLIIKTGNFEVINTARKAASYAGVCPFPNTSGNMVGKSKTSPFADKDLKCLLYMGAKSAIKHNKEYNLYYQRKKMEGKHYYLIMNNIMNKLLRTIYSVVISKTIYSPEHVCIDPREKNNMESSRKSDEKLVFY

SEQ ID NO: 282513 - protein, 344 aa, unidentified
MQMSEELYIGVDVSKKWLDLAYYDGVDVDWKQGHIRVDNNQTGFNQIGKWLKKLGMTVNRVLFCMEYTGLYCQELREWLEREGIVYGMVNPRKMHRFEPDLGSDERALDRIKTDEMDSFRIAMYCEKHSRKIKSQPSHLPAPAYFKLKRLLVERRQYVTCSALYKGQLHDCCAYDSDGSVMRKKETLKSLKEHIRHTEEEMLHVIAEDGAIKRNFDLLRSITGIGIVVATETIILTENFTAITNPRRYACYVGIAPAKRESGDSVRGGNHVSRKGFTQAKADLSVVSLHCINRDPNIKAYWQRKKAEGKHSGVVLNAIKFKIVLRMFAVIKRQKPFVEIDAFRK

SEQ ID NO: 282514 - protein, 342 aa, unidentified
MKQYVGLDVSQRETAVCVVGEMGQVIFEGKVKSDPGVLTNLLRKHAPHAERIGFETGAMTSWLWHELRRVDLPVVCIDARHAHAALSVRMNKSDENDARGLAELVRVGWYREVKVKSAESQKIRALLVARSRLVTIRRDIENQIRSLIKEYGLLFPRAIGSQFRNQVRELLGDDHQLLSVISPLLSVHEQVCQQQSRFDDEVRRLAKLDETTRRLMTVPGVGVVTALTFRHTIDDPSRFRSASTVGAYLGLTPRRNQSGETDTNGKISRWGDRLLRTYLFEAATVLLYRTKKWSSLKAWGMKLAKRIGMRKAKVAIARKIAVILHCIWVDGTSFEWGQAKPA

SEQ ID NO: 282515 - protein, 325 aa, unidentified
MKVSKLRPCGYSRALQTGEVLPFLNDAQGYRHVLDRLQQLGGPANVLIGMEATGHYWYALHDFLTRQGYRVEVLNPIQTAQQAAMGIRKTKTDRLDAHHVAVLLKNGGQRPALVPGELAMTCRQLTRLRYSLVRQGSRIKQILWSRLQPVWPEYETLFANPFSPTGRKLLAAAPTPTDVLALGHQELADLIRRASRGKFADAKAQQVLQAALTTIGMQRGLPGVRIGIQTLLTTLDALRPVRRQLEADILALAVQIPPYVLTLPGANAIRAVSLYGETDPIGNFPSSDQLVAFAGLDMVVFQTGQYQAPRRRISKRGSPFLRRTL

SEQ ID NO: 282516 - protein, 317 aa, unidentified
MAMQAGRLIVGADVAKAELVIHHDNSDEVIKLKNSKADIKRWLKQQPLNTAIAVEATNVYHLDLVELAHGLGFSVYVVDGFQLSNYRKSVGGRVKTDPSDARLLSRFLRNEGEDLRPWSPPPAVYGKLQSLLRRRAALVSARTAMTQSWANETLLKAAFEAFVTSIDRLDLLMQKKMKEVLREAGLHEQVARCQAVEGIGFLTATALVMAFVRGEFKSSDSYIAFLGMDLRVSDSGQKAGRRRLTKRGCSEIRRLLHNAAMAASKSTAWKGIYEQHRNSGKATTQALVILARKLARVAFALMKNQDEYVTKASKPAC

SEQ ID NO: 282517 - protein, 357 aa, unidentified
MQEKLYVGVDLHKTQFTICVINEEGDSFEAGTKFPMDKEGYIAFADKMKKLSRRHDGATVSIAIESTANARFFRDIMEAKGFEVTVVNTLRFKVVNLSTKKTDKNDAKTLAEFLARDILPKSHLCRPESESLRRVLKSRTLMVQDAVALKNQAHAVMLAYGYITQPAQFQSKSSRTKLLARLPAKVKEIIEIIFETLDLVESQTHVLERRLRRITIDNEYVNLLMTIPGIGIVNACTIYAYTDNIDRFESYKNFSAYCGLVPWVQTSNESVYYGKITKRGPQELRTALVQCVVAMVRMPGKTADLGIMKQYHQLKDDKSSGKAIIATARKLSRIIYVMLKTMTPFDSAKLIKDDPKE

SEQ ID NO: 282518 - protein, 475 aa, unidentified
MKKTQARKRAIVGGQRGMNRKQRRELARKIQAEDLSLEVIHRDAGGIDIGNETHYVAVPPTRDSEPVRRYGCTTAELKEMVAWLKQCGIRTVAMQSTGVYWIPVYDLLEEAGLEVYLVNARETKNLPGKKSDVQESQWLMKLHTYGLLRNSFRPPQEIRMMRNYWRQRHDLVGSAGRHIQRMQKVLTQMNVQLANVISDLSGVTGQAIIKAILAGERDPQALAANCDPRIKASTEEVARSLEGNWQEDLLFVLKQEQAGYEFCQKQMAECDERLEEYLKQREDRSGGESLPEEQRKSRRKKKKGNAPRFDLRGGLFQMTGTDLTQIDGIDVVTATTIVSEAGYDMSKWATEDHFVSWLRLCPDNRISGGKVIGKGRLLTNNRLTLAFKMAASTLRQSDTYLGAQFRRLRTRLGAPIAIKAMAAKLARLVYRMLRFGMQFVDKGAEVYETQHRQRQINSLKRKAAQLGFQVLAVAA

SEQ ID NO: 282519 - protein, 347 aa, unidentified
MSNHIENGQVRVLGIDLGKSVFQLHGVDASGKSVLKKRLKRDELLEYMAQLPPCLVGMEASSGAHHWARKFQGYGHAVRLMAPQYVKPYVKRHKNDSVDAEAICEAVQRPNMRFVGIKSVAQQEILALHRVRSLAVKNRTALVNQIRGLLAEYGIVFPKSIKQARRAIVLILSDESSEMSANFRVILEDERDELAHLDERIGKYECEIEALAKADPQCRLLMTIPGVGPITATALLASVGDVRAFKNGRELSAWIGLVPNQHSTGGKAWLTGISKRGNGYLRTLLIHGARAALRVCENKPDRRSQWAVSVSERRGANKAVVALANRMARSAWAMLVKQEAYGASAAV

SEQ ID NO: 282520 - protein, 345 aa, unidentified
MNQAKYIGMDVHQATISVAVMDSSGKLILESILETKDSTILQFIDGLCGSLLVTFEEGTSAAWLYDLLRSRVANVLVCDPRKNALLKDGSKSDRIDARKLAELLRGNHLSPIYHGESGVRTLKELARSYLTITKDLTRVMSRIKAVLTIPHDDAVDTRLAKIVEPGVRLRAERLYQQLDALEPLRQGARRDLLTESRKHPAVKLLRQIPYLGPIRSALLVALLETPHRFRTKRQLWAYSGFGLETHDSGEYRYVRGQLRRNRERVTVLGLNQNHNHDLKNIFKSAAISASTRPGPFQEFYAGLLAKGRRPPMARLTLARKIAAITLTIWKKGVCFDANEIHRQAA

SEQ ID NO: 282521 - protein, 249 aa, unidentified
MNKAQVVVGIDVSKAVLDVAVLPSGEALQFANDANGIEDLGRRLKSEAADLVVMEATGGYETAVATALVGSGLRVAVVNPRQVRDFAKATGRLAKNDRIDAQVIAAFGQAIEPEIVRLPDEDARELEALLVRRRQLVAMRVQEMNRLGLMQGAMRKRIKAHIDWLEKEIGKLDVDLTAGLRNSPAWRAKDELLRSFKGIGPISSSTLLVALPELGELDRRAIAALVGLAPFNRDSGVMRGRRSIYGGRS

SEQ ID NO: 282522 - protein, 480 aa, unidentified
MNESIFQRKNQDIVDLFETAGHPNKIACVALDYAKGTHTALICNGEGKRLKAAFPVENNADGLGYILERVDKICRKHHISHNHVFFGGEACGTYALNFIHAIEQRGFLVISVDPKEAKDQRASFQASTDKIDLLGIAKVLLDQHGSSDSVSSESERRLRNVTRHRSDLVESKTAESNRIHSIVDQLFPNFLDETKSGVPAFSETSLWLMEDRFSPRQIKSRKLSTTVQNARKYGLKQPVGCIKMLQEHACSVLQPVPEWVGTLQTTLHHEVQLYRKLLLCIEQADKEVALYLACVPAAMMTTIKGIGITLAAGVGAEIGSPEKQPAIRRLTSYCGIIPRVKQTGGPDGEPRYGKVSRRCNHVLKNFIVQCGNHAGQHGPAELKEDHRRRGANGQHADFGMARRVLRISMRLMLDTQAYVPSALRERADKDELATYYLKSWERLRRIWQKSGALEVAFDSKNPLGKWRDCIQELYEIKLPL

SEQ ID NO: 282523 - protein, 400 aa, unidentified
MRAVFGIDVSKASSEVAILVNGEKVHGYTMSNDALGFARLLGDLRTVHKPEIIFEATGVYSRRLQAFLDEHGYAYTRLNPLEAKKQLDSLRVRKTDKIDAEKLAQSQFVLNRKTTYVQEEVYQELRDLSRFYQNLTEDIVRAKNRLHKVLQVTFPEIETVLSKPTGEQYWNLVTAFPCKDFVLELSKDELLESIRQSTSKRISDKRVAYLAEKLTALANQSYCAVKKTSPIMEEVRYYAKESLRLSEQRQTVLDQMVELAQPLPEYDILLSIPGIAETTATSIIGELGDIRRFQSANQINAFIGIDLRHYESGNFLAKEHITKRGNPYARKILFKCIHNIASASHTNPCHIADFYEKRKRQSQTTSTKPHTIASIHRLIRTMYYLITHNKLYDYRSTQNQ

SEQ ID NO: 282524 - protein, 374 aa, unidentified
MNVGADKSEPLTAIHTDLGAIFVSLELSRSSWLITSLSPGGGEKMSKHSVPGGDFAGLMERFAQLQEKARLRTGQSFRIIVIQEAGLDGFWIHRALQNEGIESHVVDAASIATSRRRRRAKTDKIDGETLVRALLAYKRGEPRVCAMVKAPTPGEEDRRHLCRERKALTAERVRHVNRIKGLLFSQGISGYQPLRRDRRQRLEELQTGDGRAFPQHLKALVNRELDRLELLLKQIKIVEAARDALLAVGQTAKPAPEAMLLDIRGIGPEFAAILWSEGLFRHFENRRQIAAYAGLAPTPWQSGAVDREQGVSKAGALSSQRLVSRTGQPQRGPPAQDNDRGTGAKATGRALEIRDRRCRYRRRYDEGCLTNTPT

SEQ ID NO: 282525 - protein, 345 aa, unidentified
MGPMYYIGLDVHKRMISYCVKEGSGKIHAEGSIPATRLDLDRWLKTLPQPWSAAMEATLFSGWIYDHLKPHAAALKVAHPLMLRAIAAAKKKNDRIDASKICDCLRCDFLPECYMASTEIRERRRTLRYRNLLVRQMVQTKNKIAVLLMEAGVSYNKQKLHKAGYFRELLATNPDLDEGLCSLLRVCRETVVRLQRTENALVRYLERDPLLRERVERLMTIPAVGPITALTWALEVGDVQRLSSIKKAVSYCGLCGAEQSSGNTVQRTPLSKQRNKHLQTTLIEAAKMAPRISPDLAALYDRERHKGNPNRATLAVARKLVAYLLAIDRRQESFLVVKNEDRTAA

SEQ ID NO: 282526 - protein, 315 aa, unidentified
MEQSFFIGIDVSQKQLDVALSQGDEILEFYFVPHTEDKIAQLIEKFKQTSPKLIVVERSGGLERSLVAHLAEAGLPVVANNPRQIRDFAKATGILAKTDKIDARCLARFAAVIRPPQRPIKDADRQQLADQVARRRQLVRMLAQEKNRLLRAAGAVRADVEHHIHYLQERLDKSNKDIDQIIENSPIYQETIELLTTFPGVGRITSAALVADCPELGSLNRRQIAALVGTAPFNRDSGTRSGARCVWGGRKNVRQQLYMATISAIKWNYKIKSFYTRLIAAGKKPKVAITACMRKLIIILNAMVKHKKVWQTSAG

SEQ ID NO: 282527 - protein, 339 aa, unidentified
MQNVTLIGIDLGKHSFHLHGQDRSGHAIFRKKFTRTGLLAFLATCPPCSVVMEACAGAHCLARQLTSFGHQAKLISPQFVRPFVKSNKNDFIDAEAICEAASRPAMRFVTPKTEHQQTLAAMHRVRESLVRDKVKTTNQMHGFLLEFGVSLPKGEAVIKRLSTVLAKQVLPAPLVQLLMRLQAHYGYLRQQIVELEQALEAHLEQDEAAQNLLTIPGVGPITASLLHCELGDGKHYASGRDFAAAVGLVPRQYSTGGKATLMGISKRGDKNLRRLLVQCARVFMMTLEKRQGRLAEWVRALLTRRHSNVVACALANKLARIAWSLSYRREAYQVTGVNV

SEQ ID NO: 282528 - protein, 316 aa, unidentified
MSQESDLYVGIDVSKTMLEVVIGLEGEAWSVAYEPQGLRELVQRLRAVKPALIVVEATGGYERRLLEVLCLARLPVARVNPRRVRAFARATGLLAKTDRLDARVLARFGEAVKPRPYTLPDERQQYLKELVRRRRQLLEMRTAEANRLDTAPARIQGQIEEHIRWLEKQIEQVDQEIDDLIDQVPEWKKKVDILRSVPGVGKVTAATLAAELPELGQADRKEIAALVGVAPMNNESGQRRRKRRIQGGRPAVRNVLFMATLAAVRSNPVLRQRYQRLLERGKEKKVALAACMRYLLTVLNAMIRRHQPWNPTLCGA

SEQ ID NO: 282529 - protein, 350 aa, unidentified
MCSLPVFVGLDYHDASVRVCVLDTDGRELANADRCNDWKAIAEFADRFGRPVRAAIESCCGAADLAEELVSCAGWSVDLAHPGYVQRMKQNPDKTDYQDAQLVADLERIGYLPRVWLAPQHIRELRQVVRYRLQLTEQRRATKLRVRALLREQRCRAPQGVNAWTKAWDHWLRHTAELSAEGRWVANQHLQELACLVTRIRQVEKRLERLTANDVEVQRLQQQVGIGPVTAWTIRAEIGHFDRFRTGKQLARFCGLSPRHASSGQRQADAGLIRAANPALRAVLIEAAHRLVNYDRYWQQFAQRLRAAGKPGSVVAAAVANRWIRRLYHEMKTPSGELAVAVRSARSEDS

SEQ ID NO: 282530 - protein, 366 aa, unidentified
MKKISTVQVFGNDIFKGQKLTIGLDLGDRWSFYCVLDEAGKIILEQKVPTTPEGMKQAFARIPRSLIALETGTHSPWISRLLTEWGHEVLVAHAQKVELITKSNRKDDRHDARALARLARIDPELLGPVRHRSAKAQIHLTVIRARAELVSARTALVNGARGLAKSYGERLPKCGTYQVSRELAAGLSIELRDVLEPLFREIESLNERIKEYDGRMEKIAKEVYPEVSLLQQVKGVGTQIALTYVLTIEDPHRFLKSREVGCFLGLKPGRRNSGQSEPQKKISKEGDRYLRTMMVQGAHYILGPFGEDSDLRRWGRKLAERGGANAKKRAVVAVARKLAVLLHRLWVSGEVYEPLRNSNKAMQAVA

SEQ ID NO: 282531 - protein, 391 aa, unidentified
MTMYFVGIDISKYKHDCCIISAANQKVVSKFTFKNDKSGFEQLNLILNSLSTPEDIKIGFESTAHYALNLELFLENANHSFMEINPVLIKDFKKSQTLRRTKTDSIDCELIARWLMTVEYKPHSKGFYHAYSLKSLTRLRDKLIRQRSFYLVKITNVLDHTFPEFKPFFNERLSKTALYLLENYGSAEKMARMNSASYEKLRSVSRGKFSPQQFLRLKELAVNTVGVNNSIFDVELNSLLSLYKSLVKEIDTIKKEINQLIEEVHPHYMSVPGIGPLSAAVIYSEYGDISNFTNPGQMLAFAGIEPGINESGTESHGGKMVKRGSSQLRYTLINCCLPLIRFDMTFATYYAKKRGEGKPHRVAITHVAKKLIRVIYALESQDIDFNAQELR

SEQ ID NO: 282532 - protein, 356 aa, unidentified
MSEKLNSKIAVIGIDIGKNSFHIVGQDRRGALVLRQKWSRGQVEARLANLPPCLIGMEACTGAHHLSRKLQALGHDARLMPAKYVRPYCKGDKNDYRDAEAIAEAVQRPTMKFVATKTADQLDLQALHRVRERFVSQRTGIINQIRAFLLERGIAVRQGLRFLRAELPGILAKRTDVLSPRMLRIIEDLSRDWRRLNERIENLSGEIAALACQDKGCERLMTIPGIGPLISSAIVAAIGTGDPFSKGRDFGAWLGLVPKQMSTGDRTILGNISRRGNRYLRTLFVQAAWVVLVKVGPKQWERYGLKSWIEAAKQRLHHNVLAIALANKLARIAWAVLHNGRAFEYVKANATASRSA

SEQ ID NO: 282533 - protein, 457 aa, unidentified
MAQRRKKAKSRKFKISQLPTQLRHINLNAAGIDIGSERHLVAVPEGRDNVSVREFGTFTADLEALADWLKKCGVTSAAMESTGVYWIPVFEVLERRGFEVKLVDARHVKNVSGRKSDVLDCQWLQQLHTYGLLAGAFRPPDEVCVLRSYLRQKEMLTQAASMHIQHMQKALQQMNLLLQNVVSDITGVTGMKIIKAILAGERDPKVLARNRHGLCKNSPSTIAKSLIGNYREEHLFALRQAVELYEMYQAKIADCEQAIIKQLEKQPNVSDDEPPAADKETQARNRIRADVDVQDLLYKKTGIDLFAIPGLAADTLLTLASEVGFDMTPWKTEKHFASWLGLCPGTRRSGGKVLNSKTKRNPNRATQAFRIAASSLSRSKTALGAFFRRVKMRTGGPQAVTATAHKIARIYYAMLTKRTSYIELGQQAYEQRYQQRRINSLKNQAKFLGFQLVPCAT

SEQ ID NO: 282534 - protein, 317 aa, unidentified
MDAIYVGIDVSKDRLDVAVRRNGESLGGESFVVSRDGAGIDELVGRLKALAARLIAVEATGGFETVVAAGLAGAGLPVVVVNPAQVRSFANALNKRAKTDPIDAAVIAHFAEATRPTLRQLPDDTTRLLADLVARRRQIVEMIAAESQRARHITLPRLKKSIARLRKALEKELSELDDDISGQVRGSPAWAEKEDLLVSVPGIGPTIARTLIAELPELGTLDRRQIAALAGLAPWTRQSGQWRGKSFIGGGRASVRCALFMGAMVAARYNPELKLFRDRLVAAGKPKLAAIIAVARKLLTILNAILRDKTPWQPKTA

SEQ ID NO: 282535 - protein, 367 aa, unidentified
MKQRVFAGLDLHSNNVMIGIVDEEGRRLKHQKLPCDLKQVRAFLQPWKRRLGSVAVESTYNWYWLVDGLREDGYPTHLANPAGMEQYSGIKHTDDKNDAFFLADLQRLNILPKGYVYDPALRPTRDLFRRRLNLVRQRTALILSFKSLYARTTGQAMPLGQLKRMEVTESKSLYEDPANCLIAEIQKQHIDALSQSISVIEKEVLSSARKLPRYDNLTSLPGVGDILGMTIIMEVGEISRFKSAEQFASYCRTVDSRRLSNNKKKGENNRKCGNRYLAWAFVEAANFAKRYDPDCRQWFDRKTAKRHTILATKALACKLAKAAWYLMSEDGHYDAKRMFPQVRMKNEKTKFVRVAASQRERLGKEPS

SEQ ID NO: 282536 - protein, 442 aa, unidentified
MSCTDLGHPVPTTTRPEDSTVFAALELSRKSWLVATSSPGEERISKRVVAAGDGPGLLALLAKLRETAERRLGRAVRVVVIQEAGLDGFWVHRLLVDNAMDSHVVDAASLAVDRRQRRRKTDAIDVEGLLRALMAWTRGERRVCSMVRPPSPEDEDRRRLCREREALVTERIRHTNRIKGLLAGQGILDVDPLRPKHRERLEELRTGDGRPLPPCLLAEIRRQLGRLDAVVRDLATVEAERNGLVGLRSADRPVQSTTRGDEPAVEPEAVTVPVAQETGPAVAPEGAAPSAASEAAPAMASAVSVTAPAEPATLLMKLKGIGPEFAAVLWLEALFRSFGNRRQIAAYAGLAPVPWQSGGIERDQGIAKAGNPRLRKTMIQLAWLWIRHQPGSAISQWFTKRVGTARGRVRRIAIVAVARKLLVALWRYVTEGVVPEGAVLKA

SEQ ID NO: 282537 - protein, 554 aa, unidentified
MDVVISDCLVAKTPVLWFRPANGAASNRPLVVLFHRFMASRELDANLGYMLAQAGYSVVCPQAAMHSARDDATLRAASFWPILQHTLETFPALLAACQQEKLGDISRLGVMGTSMGGFAVLGAMAQYPAIQAGAAYMASGYFADLTAFAQYYSRRRRIAPVRACMITPSERTGQFSLMAVRMPCPGLGFCACSVELLHRTAVLSHVINRTGIMDRLSPVTRIRKVGFTMENELHFIGIDVAKAKLDVDILRPDGRHRGRKFDNTPSGHEELVRWLRGHGVNHAHICMESTSTYMEDAAAHLSDAGYTVSIINPALSKGFAQSEGLRSKTDKVDARMLAHFCREKRPSPWEAPHPTERALKALVLRHQALTEMQTQEKNRRETAPEVQLVSIDILLECLGAELARIEKQIKDLTDNDPDMKQRRKLLNSIPGIGEKTAAVLLAYTGLKLKFGTARQFAAYAGLTPVQHESGSSVMRTSRMSKAGPVHLRKALYMPALSALYHTAWGKAFRKRLEGNGKGAKVIIGAMMRKLAQVAYGVLKSGEPFDASQHEMEIA

SEQ ID NO: 282538 - protein, 426 aa, unidentified
MKYTQNEKILQIKEITLIIGIDVSSEKHYARAFNFRGVEYGKLLIFDNNAEGFAKLKEWTGKIVGAKGFTEVILGMEPTGHYWFNLAENTMKSGMRIVLVNPHHVKKSKELDDNNPTKNDRKDLKTIAMLVKDGRYIEPYIPEGIYKELRTAMDSRWRLVKELTAVRNRISRWICIHYPEFTKIFENWERKATLLILNECPTPKKVVEKGIEGIIVIWKKHKIRAVGIKRAERLLELAKTSIGTSEGLISAENELSMLLEDYESKMRQLERTMVLIEEMAKQIPGFEKMLKIKGVGVVVAAGFLAEVGDILRFSHPKQIQKLSGLSLKENSSGKHKGQSTICKRGRKWLRYYLTFGIMPLLSKNEEFRALHQCYTTRKERHLKKMQSLVALSKKLIRIFYAILTKEIAYDPQKMMRDIKRPEVKAA

SEQ ID NO: 282539 - protein, 320 aa, unidentified
MPNTANPLYVGVDIAKATLQAHLPSGQFPLANAPADQLRLVQRLQALPGAHVVCEATGGYERPLVELLHQNGLPVSVVNPALVRAAAQAKGQRAKNDPLDARLLTEYGERYKPAPTPPPSQIQQRLADLSQWLQQLIAAHALAKTQAEHHIDPFVTRRHHRLLAHYQSQIKQVEKQLKQLLAQAPVLQQRVQTLDDISGVGQRTALVVLAHMPELGQINRQQVGALAGLAPWTRDSGTMKGKRCIGGGRPEVRRALYMAALSASRSNPVLREFYLRLRAKGKHGKVALTALMRKLVVYMNHQLKALAAQAETTTQKAPAK

SEQ ID NO: 282540 - protein, 420 aa, unidentified
MTDQNVTAPELVAYIGLDWGDERHAVYLQTAEGGAVERIVLEQKPDVLHAWVAQIRERFHGRPVGIAIEQRKGAVIHALMMYECFVLYPINPKALARYREAFRTSGAKDDPADAALLLDLLRKHRDQLRPWVPDTVEARTLQSLCEQRRKLVNHRVALTNRLTGLLKQYFPQALDWVGDLASRQGCDFLMKWPTLAAVQRVRPPTLRTFYQQHNCRTATVIDERIRQIAIACPLTSDPAIIDPLSLSVQTYATQLRVVIEAVQAFDTRIAEVFARHPDQALFASFPGAGPVCAPRLATAFGTDRSRWQSATELQSHSGIAPVTERSGKALWIHHRLACPKFVKQTFHEFADQSIRFSQWARAYYDQQRGRGNDHHAALRSLAYKWIRILFRCWKDGKPYDEATYLDALRRHGSSLVKNNA

SEQ ID NO: 282541 - protein, 366 aa, unidentified
MVWTPPPQRGEPSNDNGNERRSVVQIVRIGLDLAKYVFEVHGVDADETVVLRKTLRRDAVVSFFADLPPCVVDMEACSSAHYWAKVLSDLGHEVRLMSPQFVTPYVKSNKSDRNDAEAICEAVGRPSMRFVPQKSPDQLALQAVHRVRQRLVSDRTRLVNQIRGLLAEQGIAIARDISRLRHALAKIVDGDRSGLGDLILDLVRDARDELEALDRRISSYNRRLKTLFQSDEMCRRIGEIEGIGPVTATALVAAVGDRTCFKNGREFAAWLGLVPRQRSSGGKTRLLGISKRGDRYIRTLMIHGARAVLGRAGGKQDTRSQWIGRMRERRHPNVVAVALANKNARIVWSILARGEAYRPALVATAA

SEQ ID NO: 282542 - protein, 316 aa, unidentified
MNHKQTVYGVDVSKAKLVVGRYDVEGLTKIDNTAEPIAAWLAGLPVSSIVAMEATGAYHRLLAQMAHAAGMVVFVLDPQAIKHYARAIGSRAKTDPCDARLIARYVEHERAKLRVWQPPLPAADALSRLLVRRQALVNASQKLAQSLSGLPALKASRKTLLASLKRMIGNVELLMRAELARMPEMAALHRRLMSIVGIGFVVAAQLVAALSALRFSRADAFIAYTGLDPRPDDSGTHRGRRRLTKHGPALMRCLLYNAAMAATHSKLFKPLYTQLRARGLQSTEAIVILARKLARIAFALYKSGQTFDAKRHLKTT

SEQ ID NO: 282543 - protein, 387 aa, unidentified
MPADRAEAPTTIRTDLAAVFVSLELSRSIWLVTSASPGSGGKMSKHSVRAGDVAALLARFSELKQKALARTGTSFAIVAIQEAGLDGFWLHRALEREGIESHVVDPASIATSRRRRRAKTDRIDGEALLRTLLAYKRGEPRVCTMVRAPTPEDEDRRRLCRERKTLIAERVEHVNRIKGLLFSQGVSSYEPLRRDRRRRLEDLRTGDGRSLPTHLKTQISRELDRLELLLDQIKLAEAERDALLAEDQAAAPEPPGRMLLEFKGIGAEFAATLWLEGLFRRFDNRRQLASYAGLAPTPWQSGSVDREQGVSKGGNPRLRATLIELAWLWLRHQPQSALALWFKERVKRNGGRMKKTITVALARKLLVALWKYVTAGVVIEGAAMKVA

SEQ ID NO: 282544 - protein, 347 aa, unidentified
MPMVADVVDAVIGGDTHKDTHTLEMATPSGVPMASIVVGNDAAGGAAALAWITDHALGPRIVVGLEGTRSYGIGLARALRAAGLTVVEVERPKRETRRGRGKSDPIDAHLAVLRMHTDRLPTPRADGDREALRILLTARAELTDTYTRQINQLRALLLTGDDTDRAISRGRVTHDWLDRLIRRRGPGTETREQATRRAETRRLAQAIRDAHRDLTHNRDQLAAIITDLAPGLLDRPGVGPVSAAQTIVSWSHPGRCRSEAAFAALAGVNPIPASSGKTIRHRLNRGGDRHLNHALHTIALTRMRSCPRTHAYLTRRRAEGKTDRDIRRILKRYIARELYRTLNTNAA

SEQ ID NO: 282545 - protein, 497 aa, unidentified
MTTKASIYPDCNPQIAKLFEQAGHPAKVMCVALDYAKGQHTALICNGQGDLLKGAFVVDNTPTGATQLLEQVRQCAKNRKIRSQQVFFGGEDCPYFAENFLRRLRQEDYLVVRVNAWDAKQQRGNLTASNDSLDLLGVARCCLKRHGQLVRDLPEAYANLRIVTRDRDKLVRSATAASNRIHTYVDRLFPSFLSADKSGLTPFCEASLDLMSEQFSAAAIRRRSQSSLGQWLARRSVAEPHAVAAQLKNLAKGALVGAPEQTVLLQRSLGHLVGLYRNLQQSIGSLDRELGYWLARTPGALLTSISGIGLTLAGGWMAELGPPAQWRAVRRLSAYAGVVPRSKQTGGPQKAPVTGHVQQRCNKRFKNVVLLAVEKVRQFGPEDLRLQAQKLQAQGSHTNFALAKRLVRLAKYLVHTGTVYRPKALMDPDTPKETLALYYQGAWTKLLLKWKAKTDLKDVFAPQRPLGQWRQMVQELYALELPLPAQRAASQAGASTP

SEQ ID NO: 282546 - protein, 355 aa, unidentified
MSTMPCIDGEVILGVDTHAETHTAALADPIGRTLATTTVPATRRGHRALIKWAGLRGSVRVAGVEGTGSYGASLARFLALQGVEVIEITRPARKGRRHLGKNDTRDAEAAAKAVLSGEATAVPKPRNGIVESIRVLHHARASAVKARTQAALQLRNLIITAPDELREPLADLRTKQAVARCARIRRSGRLDALAATRKALRTLARRWQALDAEVRELDQDLKRLTAQAAPRLLAQSGIGRETAAKLLIVAGDHPDRLRSDAAFAALCGASPVEASSGKTRRHRLNRGGDRQGNCAIWTIATNRMLHHEETRAYVERRTHEGLSGPEIRRCLMRHLVRRIYPLLRADLRAATTVPT

SEQ ID NO: 282547 - protein, 340 aa, unidentified
MSEITTIGLDLAKHVFQVHGIDAQGATVLRKRLRRGQVLAFFSRLPRCVVGLEACATAHYWARELGALGHEVRLMPAQYVKAYIKRNKHDAADAEAICEAVQRPTMRFVPVKTAEQQATALLHRGRERLVRQRTMLVNALRAHLAEFGMVAAQGLRNVGELIAIVRDDGDTRLPDVARQVLQVLANQIEQIEAAVTALERQLLAWHKTNPVSQRLASIPGIGPIIATAIATTVADPNVFRSGREFAAWLGLVPRQNSTGGKPRLGGITKRGNRYLRRLLINGASANLLRSKATKADPWVIGIRRRRPPLVVAVALANKTARIAWAVMLREKEYQPRPVAA

SEQ ID NO: 282548 - protein, 450 aa, unidentified
MKKISYRAVSIETLTSALLAVMLAGATKLVVAIDVAKTKMMAGFGREDGSTTRLVRFESPTWTRAFVDLVIATGKELGVPVEALMEPTGTYGDGLRALLVANGVKAFMLSPKRVHDAKEVFDGVPSLHDAKSCVVMAQLHRQGVSRAYTPMHVDRVRMRALVSRREVFEKPLQMHLGALEGLLGRHWPELLGDMDVWRRQTPLELLAVYPCPADVLAHEAEARAVMRRASRNSMKPEDVQRVFDSASRSIGLPASEEEREVIRAVVLEALHVRASISSIDKVIEKVATEHETTRGLAPVVGRVTAVVLVAYLGPFSEYGSAAALEKACGLNLKIKSSGNVIGRPSITRRGPPEVRMYLYLAALRLVKNDPLIAAWYRSRGGYRANHKLIAVVGVMRKLVRALWHVARGATFDATKLVDARALSAASAQGAAPRPPTSRDVSSLSEATAAL

SEQ ID NO: 282549 - protein, 390 aa, unidentified
MSLDHRCEEPTAIRSNVGAIFVSLELSRSTWLITSLSPASGERMSKHGVPAGDIAAMLARFSGLKQKAFARTGKSFSIVVIQEAGLDGFWIHRVLQSEGIESYVVDPASIATSRRRRRAKTDRIDGEALVRALLAYKRGEPRVCAIVSAPTPEDEDNRRLCRERKALTAERIQHVNRIKGLLFSQGVSDYEPLRCNRRQRLDELKTGDSRPLPMHLKAQIGRELDRLELLLEQIKAVEAERDALLASAKPTEETSALPAMLVGLKGIGPEFAAVLWSEGLYRIFANRKQVAAYAGLAPTPWQSGTVAREQGVSKAGNPRLRTTMIQLAWLWLRHQPHSALAQWFKERVKRNSGRLRKTTIVALARKLLVALWKYVNAGVVIEGAVMKVSS

SEQ ID NO: 282550 - protein, 387 aa, unidentified
MDVRTVNNLPPAAAHDEAVRCLLAIELSKKSWIVAANTPLSEKISRYKLKGCDWKGLLELIEKIRARVARELNRPVEIISCYEAGYDGFWLHRLLEAHGVRNYVIDPASIQVDRRARRAKTDNIDVAQLLRSLMAYLRGDPKVWSVVRVPSIAEEDARRLHRERDRLINERVQHVNRVKGLCAVHGIYDYEPLRSNRMLRLEQLRTGDGRKLPPYLKAEIVRELQRLELVLTMIKTIEAERKAIISDKSPHLNVKKIQDLIKIKSIGPGISTVLVGEVFYRKFNNRQRLGSYVGLTPSHFQSGPMSRDQGISKAGNPKARTVMIELAWIWLRYQPNSPLSVWFHQRVGTAKGRIRRIAIVAVARKLLIALWRYLETGLVPTSAVVRG

SEQ ID NO: 282551 - protein, 480 aa, unidentified
MNVKATRTKKQVNVENQAIKLLSKEELGIKIEVIKKELRSYTWRDLETNGKFAKNDKLSFITDDMLIAGCDIGSETHYIRAIDVRGRELSSRAFEFSNTSEGFANAKAWMLALAAKNDKKQIALGLEPTGHYWFALAAWMVSNGISVVQVNPYAVKQSKEIEDNSQLKDDRKDPKLIANLVKDGNYGMPYLPEKVYADMRRLSMFRDQLTEDRIRNINRLHRELKIYFPEYMDAFGKIDGAFTLEVLKVSAIPSDITALGAEGIKNIWHNEKLRGRGYSRANEIVSYAEKSVGLTDGTDAGREAVKWYAEQILKLDEQLAVIESTLHEKCREIPYAENILEIRGVGENILAGILAEMGDISRFDDVKEIQKLSGMGLVACSSGKHKGQTKISHRGRKRLRYWLFQAAKSAVSHADEFKQLHEYYTTRTNNPLKKMQSLVVIACKILRVSYTILKTGTTYDPQKLLKDIKRPTASQAPMAA

SEQ ID NO: 282552 - protein, 453 aa, unidentified
MTQRNRSISLKPAKSRAALTITHPNAAGIDIGSAAHFVAVPPDRDDESVREFASFTVDLNAIADWLSACRVDTVAMESTGVYWIPLYELLESRGFTVLLVNARHVKNVSGRKSDVLDCQWLQQLMTYGLLRGAFRPAEQVCVLRSLWRQRAMLLRSQGRHVQHMQKALTQMNIQLTNVISDVVGETGQKILRAVVAGERDGQVLGAMKNVRVRASVEDIAKSLQGNWRAEHLFSLKQALDAFDFIGTQLTECDGEIERQLQTLQAHDGEPVKGKKRGRARNAPKFDLRTQLFKMCGVDLTRIDGIDVTTALAVISETGADMSRFPTVAHFASWLGLCPGTKITGGKVMSGKTRRVANRAAQALRLAAAALRTSQSALGAYFRRMCSRMDKPKAVTAAAHKLARLIYTMLTKGEEYTDQGQAYYEERYRERVLRQLSQRASKLGMQLVAVPQPA

SEQ ID NO: 282553 - protein, 345 aa, unidentified
MKLYGGIDLHSNNSVIAIINEQGETLTVKRLNNDMSVILSFLTPYKDNLTGLVVESTFNWYWLVDGLMDAEFKLHLANPAAIQQYSGLKHADDHTDARWLAEMLRLNILPEGYIYPRELRAVRDLMRKRMDIVQQSTKNLLSVQSCYMRHLGYKLSSNKIKQMAAIRKGVDVEQVHSDFSSTNTALSVISNLKLIRCAQQQINAIESAILQQTSLSPEFINLTSIDGIGNTLALTIMLETGTIKRFDSPGNFSSYCRCVKGARYSNGKKKGATNQKNGNRYLAWAFTEAANFAIRYNPTVKKYYQRKLAKTNKVVAIKTVAHKLARACYHVLKDNVPFDEHKAFA

SEQ ID NO: 282554 - protein, 373 aa, unidentified
MPRYSTAFGMDVHLRSTTVCALDAETGEAVTRRFRGNPWGEVAEWMSGFPGPSLAAYESGYLGFAPQRELSGLGVDCVVAAVSRVPRSAADLSSKNDRNDAARMAKAILSHDVTPVWVPSPEIEGLRDLAAAHDAATARLAAAKQRLLAFLARRGYAYGGTTPAGNPRRYWTYDFLRWLDKVRPADDGGIRALAALRSEVEAAAETRDDLLAEYRAAVAAGPLSAEVEALQSIKGCGFALAAAFASEVGDFSRFRSGRQVTAYFGLAPKQRSSADSVRLGGISGAGNALVRRLAVEGSWSYVQASHQPKLMPKGSGVPLGVRMHGRKGSERLLRRREEMLARGMPQAKANAATAAELVRWLWALGAMCREATE

SEQ ID NO: 282555 - protein, 341 aa, unidentified
MTVIIGIDPHKLSHAACAIDNNEHELAQLHVRAGQRQLELLLGWAQPFSERRWAIESAAGLGYLLAQQLVGAGECVMDVPATLSSRVRLLGTGRSNKNDPNDARAVAIAALRAPSLAVVRREDHLTVLRLLAKAHLDAGRARNRACCRLHALARELVAGGIRKEVVVSQAESLLAGVEPVGVAQRQRLELAHELVDEIRALDAKLRRSKARITTAVVASATTVTDLYGVGPIVAATVIGYSGDVRRFPTAGHYAAYNGTAPIELSSAGRTVHRLSRRGNRVLNHAIHMAAVTQIRNLQSEGRAYYDTKVVAGKTKREAMRALKRRLSDRVYRQLLADARTR

SEQ ID NO: 282556 - protein, 434 aa, unidentified
MKRRAYRVTEVKDVSLEEVLRSAPAGAATAGLDIGKYEVHAVVRWKDGNFERPWKAQNPAEIETLVGLLRKVADQRPLLVAMESTGTYGDALRAKFAEAELEVRRVGGKAAHDYAEVFDGVPSQHDGKDAAVIAELAAFGKAALWPYRAKSAPDAELAYWADWLDGQQSIQQLWTGRLESRLARHWPEATRLLALSSVTLLRALAHYGGPAKLAEDPSALARLASWGRRGLETEKIEKLIASAAQTVGIRQGAQDVQRMQQYATMALAAYRETQKARLKLERLAKGNEVIQRQAKAVGAATACVLWVALGDPKDYPCGEAYRKAMGLNLKERSSGKYQGQLKITKRGPSIVRRWMYFAAMRTAQSVFVKPWFEAKKAKDKDRGNGALIAVARKLALALHAVGAHGSPFEPWRLFSQKVLVRKGQQAKRRAARSR

SEQ ID NO: 282557 - protein, 346 aa, unidentified
MEHFAGLDVSVKETSVCIVDETGKIVREVRVASEPDALLEVLKSHAYRFKRIGLEAGPLSQWLFSALAEVGLPVVCVETRHMRAVLKAQINKTDRNDARGIAQMMRAGLYRPVHVKTLRSQKLRMLLTHRKLLQSKAIAIDNDLRGTLRNFGLKVGMVGTVKFEARIGELVENVPDLAALVEPLLVVRRAIREQIAILHRRLLAIVRDDEVCRRLMTIPGVGPVVALTYRSTVDVPARFRNSKAVGAVFGLTPAQYQSGEIDRTGAISRCGDEMMRVMLYEAAHIMLVRSTKWSWLKAWAMQIARRRGMKKAIVALARRLAVIMHRIWVDGTEFRWTREQHAAAGA

SEQ ID NO: 282558 - protein, 369 aa, unidentified
MEKGTTYVALDDSKRKLVAGILRPGVPEPELRDIPNDPRLVRRLFERLKREGPVTACYEAGVSGYDLYRQITHLGVPCQVIAPALTPRRPGARIKTDRRDAGKLVRLFRAGELTAIHVPDEAEEAVRDLVRCRDDVRGDVLRWRHRLLKLLARHGRTYHAGKNWSDAHWRWIRQQQFDLPALRRAFEATLFALEQALTRQAALDKEIEALAATAPYREPVGWLRCFRGIDTLSAMILVTEIVDFQRFRRPRELMAYLGLVPSEYSSGDMQRRGALTKAGNTHARRVLVEAAWHYRHPPRVAGVLARRSQGQPGDVVTHAWRAQQRLHRRYRHLIGHGKRPPVAVAAVARELVGFVWAAMMRRTCVTQAA

SEQ ID NO: 282559 - protein, 384 aa, unidentified
MAKHNIVFIGMDTHKSFIEVAYIEDVRGVKPIHLGKNPTTKQAVKKLVRQFESKYPDATLHFVYEAGPCGYWIYRLITSLGHCCYVIAPSLIPKKPGDRIKTDKRDAMNLAKLLKSEDLTAIYVPEPEDEAVRDLSRARETGMKDLKDGKYQLKALLLRNNVTANVKDNWSKQHLRWLTELILPHPAQQIVLQEYIQTITERMNRLKRLDNELEHHVKNWRYYPVVKAIQAMRGVRLLVATGVVAELGDLTRFDHPRKLMSYLGLVPSEHSSGGSRKIGAITKCGNSRARRLLVEGAHTYRFAANISKELQLRQEDLGKTIVDIAWKAQLRLCRRYQTMLRRGKHYNVIVTAIAREMIAYIWAISREIVLTPVEPKLRLSRVPA

SEQ ID NO: 282560 - protein, 435 aa, unidentified
MSLSLYVGIDIGKFSHVASLLSSQLLFQHHRYEACPTLSFEQSRSGFEKLLSALTEHAPPSACHVLLENTGHYGRAIEQYLQEKGVQVYRISVSTEKRGKQKSDKRDAQALAVLLYNQIERHIIVTDKSQIAHRLVPPSDTARLLHGLVQHRLELVHETTRRKNKLTAICDELFPELTQVYADPNSPSALTLREKYPTPADVVAASLDDLVATRKYRRPSRDKLAELQELARTTIGTKDASRLICLLIEQKQLMKEMTLLNEHIEALNVEIERAVSTSREGRILTSFPMIGPIHAAVLIAAIGTIANFESIAKLRGYCGWSPLQQQTGTSKDSMVLQPAGNRLLKHTIYLITLQAIHMDTPFKALYDRLVPIKCHYDERTQRYRGKMKVIGRVAGQIIKLIYVLLRRDHDLIAGTDGGQVPDPEMYDPIKHKIKR

SEQ ID NO: 282561 - protein, 337 aa, unidentified
MNYSGIDLHSNNSVVTVIDEADRVLAEKCLPNDLTKILAFLAPWQAELTGVVVESTFNWYWLVDGLQAAGFTVHLANTTAIKKYDGLKHSGDETDARYLAHLLRLGILPTGTILPPEARSVRDLARKRMQLVRSRVTHVLAIENISARQHGTRLSNALVRDLTDATIDQMGFPADVALAMQANLAVVKTLSAQIVLLEKRLAEKVEARAEYALLKTVPGIGSILATVILLETGSIDRFASAGNFASYARCMDSRHMSNGKKKGTGNTKNGNKYLSWAFIEAANDAPRFCNEAKRFYERKKARTNQTLARKALAHKLARACFHILKERKPFDMTRCFA

SEQ ID NO: 282562 - protein, 425 aa, unidentified
MKVTRGMQRRTAKLARRAEIVTRETLVVGIDIAKRESVVVFVRSSDRARLGKLTVPTSAAGVLEIARRGKELCERSGLERMVLAMEATGHFWKILARAASRLGVRYVTVQSFVVARAREFDDLTRDKTDQRDAGLIADLACELRFNEVQLETGAWAELRSLAEARDRYLVERRAAVQEQGALLELTWPELLREAPNLKGCHLQCLLGIGLSPVEIAAMPKARFIAKLRRQHSRRFLPWMAGRLWNAARQAVPEDQSPAVTLRLQLAAQRIRAAEIAVERLDCEMRAAFDQTGLSWMRGQIRGLGEVLLHNLLAFSGDPRRLDDSRCMVKLAGSNPTERSSGDQVVSGGIHRRGRPLLRFLAQQAAVCVVRHNADFRARFLALTQRQNRPLEAKQAYVAVGNKLMRTLWVLSVTGQAYRSQTAEAA

SEQ ID NO: 282563 - protein, 340 aa, unidentified
MKTTTKFYIGIDVSKPYFDLSLMTVINHQKQPVVTKRFYNTTTGIKALHKWLQEQGVSFDEHSLLVIENTGIYHRLIWRFCSDNNLPLHIGNAAHIKWSFGIARGKNDHIDSIRLCQYALKHADELKATPVLNPVFIKLKDLMTARTKLLTQMNAIKTWLKELKLMNDKEAQQLMEKSHKAALEGLKKSIVLLQAAIKQIIEEDLSIKTSYDLLITVPGIGQWTAVYLICCTNNFVCKITGKQLACYAGVVPFEHTSGISIKGRNRVHQMANKELKKSLHLCALSAIKYYPEFRTYYDRKKKEGKHSMSIINAIRNKIVLRVAAVINNQLPYIDHTKEAA

SEQ ID NO: 282564 - protein, 385 aa, unidentified
MTIQIQVPRFIPRDYDVFAGLDVDKKSMAVTFADHAGSQRALRMAHQVTPLLNYVRKHFAGQRVAFAYEAGPTGFGLHDELVRRAYTCVVVAPSKVPRAPGERVKTNRLDSRKLAESLRGGQLHSIHVPSGVYRNLRHLVQMRDTHVRQLTSSKLRIKSLLLFEGIAFPDPHEKWTARAMRELQTLPCSETVRFKLDDLLDTLHFHFQAAARATKQIRQYCLDDPELQQSIDLLLSLPGIGWIVGSHLVARLGNPREIKNGRQIAGFLGIVSSEHSTGDKQNRGEITRSGDSRLRNKLIQSAWTAIKRDPELRAFYRRIYQRHPKKVAARKAIVAVARKLTNRIYVVLKEQRPYVIRPDSSIAPLTVEETVGPRERLDAAQNDQS

SEQ ID NO: 282565 - protein, 441 aa, unidentified
MKKLRQNAAGIDIGAKMIFIGLETEPVKSFETFTEDFCQARDYLLSKGIKTVAMEATGVYWIILYEILESAGLDVWLVDGRQTKQVPGRKTDVKDCQWIQELHSYGLLNRCFVPDEQVKLIRAYQRMREDHIRSAAMHINHMQKALTEMNIRLKEVLSQIHGASGLAVIQAIIEGERSPAKLLSLCHSSIKKTKADQILKALKGHYTEAGLFALTQAYQGYMFYQNQIAGCDSRIQETMEKVNDYHKHGDVKKEIDSVKGRKPVRHNKPKVRNLGGHLLKIFEGKDATVLPGITDYTWLQLYAEAGSDLSKWKSEKHYTSWLGLAPGQHQSGKMRKSRNRKCRPKAGQIFRNVAQSLIESKKIALGAFGRRLKSKRGPGIATKATARKLAVLYWRLMVKGLDYTEKGIKAYEEKMQINKERWLQKTAKELGLQLTESVAVT

SEQ ID NO: 282566 - protein, 418 aa, unidentified
MHSQDEKSPLVVGVDWADAKHDLCILQPGRAPITRRINAEPQDVQEIIAELRRIASGRPIHVCLEKGRVRIIHHFVLLEDITLYPVDPKQATRFRESFVSSGAKDDRGDAYYLARLLADRHEDMRPMKPDDPLTRKISLLCQTRRNLVDDKTCVLQKLQAALKMYHPLALMLPVKKLDSGLALEFVRRFPDPRKAKKAHRETLKKWLARHSIKQPERVAQIIELIRSTPLVTSDSALIEPLVIQVQTLVAQLEKLQQGIEKCEEAIRIAMAQHPDAKLFETLPGAGPALAPRLLAALGSDRDRYADADSLSSAVGIAPVTIASGKKRQVRRRRACPKFLLQTFHEFAGCARRFCPWSGAYYRWQRDKGVGHHAAIRKLATRWARILFRVWQTRQAYDPARYLESMRTKNHPLIAFLKN

SEQ ID NO: 282567 - protein, 358 aa, unidentified
MAVNEGTRRIVGGVDTHKDLHVAAVVDEQDRVIETRSFATTRQGYRQMLAWMRAFGDLQRIGVESTGSYGAGLLRFMQQAGIAVLEVTTPDKQDRRRRGKNDDLDAQNAAHAAFAGQRTVTPRSRDGMIESLRVLMTCRKTAVSARRVALQMIHNTIVCAPDGLRDQLRSLTRMQLVRTLASWRPDLTAYRDLDSAYRIGLKSLARRYLELHDEIADLDVMIAAIVDELAPNLVARNSIGHIGAAQLLLTAGDNPERLRSEASFASLCGVSPVPASSGKTVRHRLNRGGDRAANSALHIIAIGRLRTDQRTKDYVTRRIAEGHSKLDAIRALKRYLAREVFTLITQRRREINATRIAA

SEQ ID NO: 282568 - protein, 362 aa, unidentified
MHNHRTLVGLDVHAKATIAAGLELDTGELRFRRINGPPRSAVNYLEELPGPVMATYEAGPVGYGLAREAAARRIEVRVCAPGSIPRKPGERIKTDRRDAERLVRSLLAGELSFVRVPTVEEEQFRDLARCREAARADLMRARHRLSKFLLRREIEFPGPGASWSVAHWQWLRSIELADHPSRSVLNDYLAAVLALEQRRDGLDAQIEIAAPRSPWALTIANLRCLRGINTVTAYGLCCEVGAFDRFEHPATLTAYLGIVPSEHSSGEQVKRGPITKAGSPHARRLLVEAAHHYRHKPAIYKDLARRQRGQDPRACAIGWRCQQRLHRQWQRLRLERGKPGNVVVIALARELANFVWEVGQLK

SEQ ID NO: 282569 - protein, 406 aa, unidentified
MIFVGIDWSEAHHDVCVLDEQGTVLAKGKVSDDVSGVGRLHAMAAEHAEDPSEVVVGIETDRGLLVGSLVQAGYRVYAINPLAASRYRDRHAVSRAKSDPGDAKVLADVVRTDRQNHREVAGDSELAEAVKVLARAHQNLIWSRQRQVNALRNTLREFYPGALRAFTTSQLATIEACSVLAMAPTPTWARDKLTLQRLRRSLSASGRKRNLDRRAKQILHALQAPELSAPALVEQAYGDVVGWLVEVIDGLTHQIAKLEAELAERFEGHPDAEIITSLPGLSSVLGARVLAEFGDDPTRYQDARARRRYAGTAPITRASGTRLVVLARVARNRRLFDACYLWAFSSITTSAGARRYYEGHRARGKTHHQALRALANRWIGILHGCLTRHEPYRESVAWVAPVEAAA

SEQ ID NO: 282570 - protein, 348 aa, unidentified
MEFTAQLPVIGLDLAKSVFQLHIVDMDSGEIQRRQIKRAKLTEFFAKCQTSLVAMEAYSSSHYWARTLMALGHQVKMLPAQHVKAFLLRDKTDAMDAQAIWVAAQQPHILPVPVKTERQQACMALHGMRRQLMKMRIMQTNALRGILGEFGIALPVGHNKLLKSIQGELAKAQQANLLAADLVVSVQEQLKRIDGMQDDIEHIGQRLRTMIREDRQMQAIQQIPGVGDLTASALVAAVGDFSSFKSGRQFASWLGLTPRQVGTGGKTQQLGISKRGDTYLRTLLIAGARAVIAMSEKSNWITRLLERRHFNVAVVALANKIARTAWAVLAKGAAFDQVKWNPVEQVGA

SEQ ID NO: 282571 - protein, 344 aa, unidentified
MNISMIGLDTAKSVFQVHAVDPSGKVAMKRKLQGGELIPFFEKHEACTVVLEACGAAHHWARVLTGLGHDVKLIAPEAVRPFVKKGRKNDAADAAAICEAASRPSVKFVSAKSLEQQSVLTLHSARCLLVKQQTMLANALRGLATEFGLTVPKGIGKLEELAALVNADEAFPETARHVLTGLFDHCRATAASIETVEAEIVVQARQDETARRLATIPGIGPITASLIAATVGDIGMFKSARHFPACLGLVPRQYSTGGRNRLGRITKTGNREIRRLLVLGATSMVYRAPQWKSAAGLWTRAVLERRPVRLVTVALANKMARIAWALMTRKEVYHAKGRAAAAAA

SEQ ID NO: 282572 - protein, 394 aa, unidentified
MKLVGIDVGKNSHHFCVMDKETGEFNVTPSSFPNNKEGFDFLINSLKPYSKKSILLGMEDTGHYHVALLKFLLSNGYTVALINPKTTDLTRKMEGGITKNDKLDTITICDVLDTPERKKQYRITKVDRFDLYEQRQLTRHHHNLKEELNVYCNRLQKSIDLVFPEFNTLFSSKYSIVYMNLLKTFGSAEAIASTDIRTIRKCFEIKGRGNRISLTPEKLKECAKNSIGISSEVETIQIKHLVSQITLIKEQIAEIDKKIEEFSITNNSPILSIPGISHFSGTSILAELGDIGNYSKPSQIIKFAGVAPYHYESSQYNAQHTGITKKGSKYLRKTLYQIILTVINNNPVFKKYYLLKISQGKGHRCAQGHCIRKLLRIIYHLLETGQSFDPALLR

SEQ ID NO: 282573 - protein, 329 aa, unidentified
MTGLMARQGSHTVRVIIGVDTHQDQHVAVAIDEQGVRLSEHRVVANSQGYAELQRWSRSLGEIRAFGIEGTGSYGAGVARFLTCRGYAIVEVNRPDRSTRRRKGKSDPTDAEMAARSVLAGVANATPKSGGGKVEMIRMLKKTKDSAVKARTQTINQMKALVVTAPAEFRETLDSLAAGALAKRCSSFRPGPLGDPTAAAKYALRSLARRYRQLGAEIQDLEAELDRLTRAVAPALVGTFGIGPDTAATLLVTAGSNPERLHSESAFAALCGVNPIPASSGKTNRHRLNRSGDRQANAALYRIVVVRLRYDPRTKEYMRRRTGEGMSKT

SEQ ID NO: 282574 - protein, 377 aa, unidentified
MQAAQRRGYESGSVLYMAMELSNKKWKLGFSNGSKLRRKGIEARDRLRLLEEVSLAKRKLGLPAEAQVVCCFEAGRDGHWIHRWLSSAGFEVLEIDSSSIEQARGRKHVKTDRVDVEKLLDLLLRYCTGFRKAFQVVRVPSAEAEAGQRLHREDEYLIRQRSRISNRLKSLLVTQGITEISLKGDFTARLERARCWDGQGLSPELKAELTRMHAQYRVFEEQLSELARAYAAELESETAVGAARRQLETLKSMGPKTSRVLSAEVFAWRKFANSKEVGGMSGLTPTPSQSGDDQREQGISKAGNRRVRWVMIEFAWLWLRWQPESELSRWYRRRFAQGGRRARRIGIVALARKLLIALWRYVEFGELPAGAVLKAQA

SEQ ID NO: 282575 - protein, 402 aa, unidentified
MNCVGIDVSKGKSMIAVMRPFGEVVVSPFEVRHTASELSELARLLKNLDGETRVVMESTGNYHAPVAWLLHDAGLYVSVVNAMLVHDYGNNSLRRAKTDKKDAVKLANYGLDHWLILPRYVPEEDTRLMLKTCYRQYQQYSKVQTMLKNNLISLLDTAFPDANRLFTSPPRADGSEKWVDFVATFWHCECVCGLSKKAFTAKYQKWCKKHGYNFSKDKALDIYASSCGHFGVMPKTDTAKLLVEQAVSQLRATSAALAALKQEMQSLAASLPEYPVVMEMFGVGPTLGPQLMAEIGDVRRFHSKKALVAFAGIDAPPYQSGQMDVRSRSISKRGSASLRRTLFLVMGVILQHAPMNEPVYQFMNKKRSEGKPYRVYMIASANKFLRIYYASVKAYLDSLEHD

SEQ ID NO: 282576 - protein, 434 aa, unidentified
MTLINFVAANQKYYAFNLLSVFIMVFWSVQYLLQHLLVQTQLSDQLLQSLILILQLPQTPQFRHARPGKFFLPVNGMDYLLPLRLTVRNVLTRRITMNIVFLGIDLAKNVFQLCGLNQAGKPVYTKRTGRKELLQTLANIPACLIGSEASTGAFYWQREFEKLGHKVKDISPQYVKPFVRGQKNDGNDAQAIAVALMQPTMQFVPPKSPEQQDIQALHRARQRIVNHRTATVCQIRGLLLDRGIPIGSAVSRARRAIPLILEDAENDLSSRMRRTIAELYDLFNDLGRRIHFFDKEIETVFRQSEACQRIAKVKGIGPKTATAVVAAIGKGTEFKNGRHFAAWLGLVPRQHSSGDRQVLMNMTKKGDKHLRTLFIHGARAVVRVATNNNDGHMNQWVNQLKERRGFNKTTVAVANKNARIIWSMLRNDTEYQVV

SEQ ID NO: 282577 - protein, 369 aa, unidentified
MFTERTSVGLDVHARSVAAAAIDGVTGELRQTRLTPSHEQIIGWLRDLPGPVAVAYEAGPTGFGLSRALNDAGLRCVVVAPSKLQRPAGDRVKTDAKDAVHLSRLLRLDEVTAVAVLSVAQEAARDLVRAREDARGDLMRARHRLSKLLLRHGIVYSGGKAWTQLHDSWLRRQRLGSRAAQVTLESDFEAVLLVSARRDRLDVEIQAMAADSEFTPIVRRLGCLRGIGTLTGFALAVEIGDWHRFTGSSIGSFVGLVPSEHSSGASRVQGRITKTGNQHLRRLLVEAAWHHRTRYLPSAYMQKRWALAGPAARARGDAGNRRLNQRWNRFTERRKRTVVANTAIARELAGWCWSLAVLDEPPAATVMSG

SEQ ID NO: 282578 - protein, 377 aa, unidentified
MKALRLERGFGYAIPETLNRRQEAQQMEYIAFDSHKRYTLASVEKLSGGQLCELRVAHQPGSIRQFLSRWAAGSPVAVETVGNWYWIVDEIEEAGMVPRLVHARKAKLMLAMVNKTDKLDARGLNRLQRSGTLPTVWIPSRQLRDQRELPRTRMVFSRMRTRLKNRIHATLAKYALSVEQVSDLFGKKGRELLQQLLQQLPPQTRFATECLLEQLDTVDRHIQRFERRIRELFAPSPELALVMSLPAVGFILGIVILLEVGDVNRFASAEHLASYAGAVPRVNASGGKVRYGQVRQDVNRYLKWAFMEAANVICLNHRRFPRRHVHWLYQRVAARKGYQKAIGAVARHLAEATYWILKKGEAYREPRIHKKVSSMKG

SEQ ID NO: 282579 - protein, 317 aa, unidentified
MKSDHALFLGIDLSKAWLDAHLLPTGQTWHVATEPAALEAWIDQLPQGLTLIVMEATGGLETTVAALLAERGLPVAIVNPRQVRDLAKSMGILAKTDKLDARTIALFAERIKPTPRPLRDEQQQELDELLARRRQLVQTLAGEKNRLAQARGKAVLASVQALIDWLERQIKKVDARLDTMIKASPLWRAREDLLKSAPCIGPGTARTLVADLPELGTLKRRQITALVGVVPFTRQSGKWKGKSFCSGGRAAVRAALYMAALTGIRFNPVLKEFYQRLIARGKPHKVAMVACMRKLLTILNTMVRENKKWNEHLLIHA

SEQ ID NO: 282580 - protein, 447 aa, unidentified
MIQSLQLLLVQKGAFSMQVIYPIVCGVDVHKTFIVAVICDSTSIEPKYIRKRFSTFKNSLIDFRDWLLQHDCQNVCMESTGKYYIPVYNALEGNISKDVVANPKWVRAVKGEKDDNKDAKWIADLFKLGMARSSFIPGKDIRILRELTRYLYKVVGIASSEKNRFQNALVVGNLRADMVFSDVFGKSASSVVDLILSNDDVTDKEILSKVHPICKASNEEILEATTHVELTSIQKSRIKLIRDHYDYLQTLKENLSELIQVMIEPYESFVTLLCTIPGVSRKSAITILSEIGPDMSQFSNHYRLSKWAGLAPGQNASAGKKKSTRISRAGVYLKPCLVEVAHAAVKDKKEPYFSIKFNKISKRRGKKRAYIAIARKILVCAYHMLMSGEAFKPSDLADVETPKEQRAKYIANNLRQSIKELNAIGVSLEEIITMMKQTKGLKEQIAS

SEQ ID NO: 282581 - protein, 371 aa, unidentified
MKKFSKYVGLDVHMETIAVSVAEANGGEVRYFGEIANTPEAIEKLVKQLRKGSAELSFCYEAGPCGYGIHRQLSDLGWDCQVVAPSLIPKKAGDRVKTDRRDSLMLARLHRAGELTAVWVPDGAQEALRDLTRAREDMKHLQRQAKQRLLAFLLRHGRRFGGKANWTQAHYRWLELVKFNHQVQQIVFQEYIDTVKAMTKRVEALDKQIESASKESVFWPVIEGLMALRGVSVLTATTIVAEIGDLRRFASAPQLMAYLGVVPSEHSSGATKSRGGITKTGNGHVRRVLVEAAWTYRHPARKTAHLQRRAEQTSEVVQEIAWKGQKRLCSRYRLLEARGKLKVQVCTAIARELAGFIWAIGQAIPQPATKL

SEQ ID NO: 282582 - protein, 363 aa, unidentified
MKIMTGIDLHSNNALCGLMDESGRRLVHKKLPCELPAILQLLEPYKERIATVAVESTFNWYWLVDGLEDHGYHVVLANPARMKPYDGLKHTDDVSDAFFLTELLRLNILPTGHLYERKTRPVRDLLRRRLLLVRQRTSLILSFKSLNERTLGERVPLARVKSLSADEARARFTAPADQLLSGTEIELMGHLHKAITQIEQHVLGVAGKWNTYQRLQTIPGIGKILGLTIALETGDAGRFADAGHFASYCRCVKSLRTSNGKKKGENNRKCGNRYLAWAFVEAAHFACRYDERCGRFYDRKKQQTNPIIATKALACKLAKAAWHVMKEDVPYDAARVFGAGKKSDLGETGREPAKGSGPMSQEN

SEQ ID NO: 282583 - protein, 483 aa, unidentified
MVVKGGGDDVVTRAPEVILDEAHEQIVERVCAIDVAKDSGKVCVRVPAESGSGRRVSKVWDVPARTKAVIELGDHLACQGIQKVTVESTSDYWRIWFYLLEARGLDVQLVNARDVKNVPGRPKTDKLDSIWLAKLTEKGLLRPSFVPPRQIRVLRDYTRLRVDLTAERTRHWQRLEKLLEDALIKITAVASRIDLVSVREMIEALIAGQRNPRILAGMARGRMRLKHADLVEALTGQFDDHHAELARMLLDQIDALTVQIDTLTERIDVVLADIPVPAPQPEPDPDDHGPGTSDDAEVTAVIRPSHGGAPRPRTAAPAVTALDLVDILDEIPGVGRHNAHEIIAEIGLEMTRFPTAGHLVSWAKLCPRTIQSGAKSSAGKTGKGNRYLRAVLGDAAAGAAKTQTFLGDRYRRLIKRRGKLKALVAVARSILVIIWNLLANPGMRYHDLGVDFHTKRMDTERRTRNHIRQLEALGYTVTLTAAA

SEQ ID NO: 282584 - protein, 412 aa, unidentified
MADIAAYIGLDWGDERHSVHLQMADGTLEHVELEQKPDVLHAWVTQLKERFAGGQVAIAIEQRKGAVVNALMLYDFLVLYPINPKALARYREAFRTSRAKDDPADSQLLLDLVVRHRDHLRAWIPDTTEARKLQLLCEQRRKLVNHRVALTNRLTSLLKQYFPQALEWVGDLASLQGCDFLAQWPNLDAVQSARPSAVRKFYQAHNCRMASVIDARLAAIKIAQPLTIDPAIVEPLSLSVQTYATQVHGLIRAIQAFDVRIAHVFADHADHDVFASFPGAGDVCAPRLAAAFGTDRSRWESAAELQSYSGIGPVTERSGKTLWVHHRLACPKFVKQTFHEFADQSIRFSRWARAYYDQQRRRGNDHHAALRALAYKWIRILFRCWKDRTPYNEGRYIDALCRRGSPLVKHFA

SEQ ID NO: 282585 - protein, 391 aa, unidentified
MLICGIDIGKFRHEACLIDETGKQLSKPLKFTNTTDGGERLLEYFDKHNQDNKVIVIGMEATGHYHLSLYCFLFDKGYQVNVINPIQSDAIRNLFLRKTKNDAKDSFLIAETIRIGRFSSTPLADGDILSMRQLCRHRMDLVDYIADQKRKIIGVMDRLFPEYQHIFSDMFGKTSTELLNKAVTPEELLAIPTAELCELLKKHSRGRFGEAKAQELRSAAKSSFGITIATTAFTMQLRQLLEMIELLEGQLVELEVEIGEYLRKMDTYITTCPGIGEVLGAIIVSEIGDISRFSEPKKLVAFVGVDPSVKQSGEFVGTQNKMSKRGSPHLRRAFFLAANVAAFRDPVLSVYYQKKRTEGKHHYTALGAVSRKLICIVYAVLRDNKPYTPHF

SEQ ID NO: 282586 - protein, 351 aa, unidentified
MMIIGVDYHPSFQTIAFFVEETGECGEQELNHSDGQAEKFYRDLKQRGICVRVGMEATGYARWFERLLAELGFELWIGDPAEIKAKRVKKQKFDREDARLLLRLMRENNFPQIWVPGPENRDLRQLLWHRHRLVQMRTRIMNQLWALAMNENKCWKKKLWSERGRAELEKLPLGFWASRRRQDLLELLDRMNPKIEELTATAEQEAKKRPDALRLMTHPGVGPLTALAYVLIIGTPTRFARGKQIGTYVGMIPSEESSGGKQRLGHISKQGNSLLRFLLVEAAQAAARVHPDWRRRYMHLAMRRHKSIAKVAMGRRLAIKLYWMWRNGCEYSQSGKCGSYAGQLGTGHGGK

SEQ ID NO: 282587 - protein, 470 aa, unidentified
MTPRIQKHLRQPRSCERLHVTHVHAAGIDVHANVHWVAVPSEDAPPPPPDHPANLPAQVRSFGACTADLIALANWLGQCGVKTIAMESTGIYWIPLFELLESRGFEVFLVEPRQSRHAPGRPKSDVLDCQWLQRLHSYGLLTASFRPADQVIVLRSYLRQRQMLIRYGSQHVQHMQKALEQMNVKLAEVVSDVSGVTGMAIIRAILRGERNPLELAKLRNDHCQRTQAEIARALYGNWRAEHLFALQQAVTLYECYREQLRVCDQQLQAYLETFADQSEGRPRPRRQVRRQRERRPNDPAFDVANSLYRMSGVDLTVLEGIDSNTALVVLSEVGPDVSRFPTAKHFSSWLGLSPQHQGSAGKIRSRRVQRGSSRAGRALRLAVQGCHHAKHALGAFYRRVQARAGAPKAIVATARKLAERVYRLLKYGAEYVCQKIEEYEAAYRARLVKGLARKAAELGYRLEAATATGS

SEQ ID NO: 282588 - protein, 257 aa, unidentified
MNASGVFVGIDVSKETLDVAVRPSGERWRTTNDERGITELVSRLRPMGATLVVMEATGGYETALALSVVEAKIAMRIVNPRQVRDFAKGKGLLAKTDSLDAAVLAEYGEIYRPEARVLLDEQAREMADLLSRRRQLIEMKTAENNRLEHARGQVRKEILAHLSWLSRRIKKIDEDLDKRIRNSPLYLDKRERLKSVPGVGNQTALSLILNLPELGTLNRKQIAALAGVAPFNKDSGRRRGKRSIWGGRAQVRVCENF

SEQ ID NO: 282589 - protein, 397 aa, unidentified
MYIVGIDIAKRKHEAAVIDGEGAVIIKPFSFTNNCSGYNRLLAMLTKAKLPLDEVSFAMEATGHYWLALFTRLQKEGFRVQVINPVQTNSIRSFYIRQVKTDPRDALLIAEVIRFGHFSESTLHPENIYELRELCRGRHAIVSMQADVKRKVVALLDQVFPEYETAFTNLFGDTSMAILQTCPTPKELSETPLEELCHLIEVSSHKRFRMAKAQELQALARNSFGFAMAGDVFSTMIRLYAKHLDFLKQQVREMDRKIAEIMETLDTPITTITGIGPTLGAYILSEIGDISRFSSAAKLAAYAGIDPTMRQSGEYNGVRNRMSKRGSPYLRHAIWLAASSAVLHDPALKLYFQKKRDEGKPYMASVGHACRKMVSIIYAVMRDNKAYTPYIPNEISA

SEQ ID NO: 282590 - protein, 401 aa, unidentified
MEGPIVSIDVSNGNSHYMCFIKNNKRFGKVNKIDHDIEGFKRLLEDIQKLEAETNEKVCAVFEATGVYTKPLERFLSKNSIKTYMINPLESARKRKEEIHNKKTDKLDPISISKVYYDKEEMMELKKKDETYNWLRKKNRLYEDQLNHLRKYKVTFQNQLSICFPGYLDLFKDGYSDIPMTILKKYPHPDLLKNKKAETVARYLEKNTCHTHKVSLEYALKIIGFAKKTYPGCEKDDVEVEIFKILLDKVIETQRECEKTLNEMITVASTLEEYRYISSIDGIGPNLAARIIAEIGDIEEFKSREALVAYAGLDPHIYQSGDQDGKHLKISKKGNKYLRCLLFLAVGCSIRGAKDNPVNRFYQKKKQQSNPLNSKAAKTACTAKLLKIIYGICKNKTTYER

SEQ ID NO: 282591 - protein, 332 aa, unidentified
MMDLQGTVIDEFTFTNNHDGIASLASRLTMDDRVVMESTGSVWTNLYNHLDDAHIPVVLANPLKTKAIASARIKSDEIDARILAHLLRTDLIPESYVPTKEIREVRALIRHRTSIVKIRTMVKNKVHAIVDRNGVEHDELFSDLFGKAGMQWLRTIRLPSLDRLMLDNHLDHLESLKRQIHAVDQEILAKASRDEDVRLLLSMTGVDIFTALLIRSEIGNISRFPEYKKLISWAGLAPSLHQSGSIEYHGSITKQGSKMLRWVMVEAARVAVNHDEKMRAFYARVKYRRGDQKAIVATASKMLKIIWFMLARREPYLSRNQRRYEEKLNRIE

SEQ ID NO: 282592 - protein, 419 aa, unidentified
MSFKILKFNCCGLDVHKTWIYACIGITDSNNRTEYKQARFSSFTKGLNELCDWLAKYNCKDVCMESTGKYWIPVFNILEERQIWVTLSHPKYTKPIKGNKTDRKDAKWICDLYMCGMVSPSFIPPADIRELRDLVRYRYKLTCMITGEKNRAQNCLTVSNLKLDDVFSDVFGKSSRSITEHILQHPGEIFDVTPFIHGHCKTPIEEIQAAVDGAISKEQAVKLRQCLDHIDELQKHISEVEQEILRLSDKYEVALNLIRTVPGFDKNPMTAIQVLSEIGGDMSVFPTAKHLVSWAGCCPRNDKSDRKIKSTRISRAGSYFKPVLVQVANALIKSKKHPEFTTRYKRIKARRGHKKAIIAICRMILTAIWHILTDLKPYTPEGFLESRPVSKEKILTTSQALNLLRQRGYLIKDDPLPAS

SEQ ID NO: 282593 - protein, 430 aa, unidentified
MISWLGRMSPCYDGGLVWEAFLPVSITQKGGVSLFKLFVGIDVSKEYSTVQGLDKNKKKLFYLRFPMDRGGFSELLNAIKKYSDSMAGVTAAMESTGCYHINLFSFLFSEGVPCVVINPLLVANFRRLSLRKTKTDKKDALTIAEFLLANEKSLTTRAFSQDTQDLKDLARERESLTVLISGMKNEIKRLLQGTFPELEKLCSPYGETMLHFLRLFPSARLVRAANRKDIAKALISPGEKRKRVEVSVDDIIAAARTSVALASAAKELIISEKAATLLYLLEKSGRITDVLIETCESLRIEELDIIRSIDGVNDITGSTFLAEIGDIKNFSSYKHIIAYAGLDPSIHQSGQYEGRSTISKRGNRHLRRVIFLMTLCAVRSQNAFRQYFLRRKKEGLPPKKAVLATAHKLIRAMFSMLSNKTMFRKGVVVE

SEQ ID NO: 282594 - protein, 334 aa, unidentified
MKSDTVHIGVDVSKEKLDVFVPASNEGMRPTTKEVDNSVAGFREIRDLARKAKATVCVEPTGGYELELIAFLHKFEVHVAYTDALRVRQFARAEGCLSKSDSIDAALISRFADKIGVRVLEPQEVEAVELKRKAKFRQTMMDSRTAMINRLETEIDPEMKALLKEQIRLMSKVVDKAEQLCLETVKKDERMDALRERFTKVGGVGDLTAISILAGLPEIGSLPDAKLNRLVGIAPEERQSGTKEWQRRIWGGRKDVRNALYMACIASIKWNSILGTYYHKKCAEGRPHKWAMVPTMRKLLSLLNRIARDPSFVPSPEPESTKRNAKVGRKRKAA

SEQ ID NO: 282595 - protein, 430 aa, unidentified
MAKEETISWFAGVDWGSERHQVCLLDARGTTAGEREFPHSGEGLAELGDWLLSMAGAASTVAVAIEVPHGPVVDALIDRGFVVFAINPKQLDRLRDRFSVAGAKDDRRDAYVQADGLRTDRRLFRRLQVADPRLIELRAWSRLAEELRRERVRLSNRVRHQLWRYYPQMLKVTDDLASPWFLELWAIASTPAKAGRLRKSTVERLLKQHRIRRMDAETVLRILQEPAIKVAEGVAEAASIHMRSLVARLRIVNRDLHEAERKLDELCTAISEIEQTSGQSLQRRDVAILRSMPGIGRINLGTLLSEASGPLSRRDYEGLRTLSGAAPVTKRSGKSLIVVRRYAAHVRLRNTVYHWARVATQRDSKCRARYTALRKRGHSHGRALRGVADRLLAWHVSFCSDRRCLTRTLADLPHETGPLFKAPEYRVATV

SEQ ID NO: 282596 - protein, 345 aa, unidentified
MYYIGLDIHKKTISYCIKDLSGKVFGEGEVAATRADVDRWMRDLPQPWTVAMEATLFTGWVYDQLRPQAAAAKVAHPLMLRAIAAAKKKNDRVDAAKIADCLRCDFLPECYMASSATRERRRTLRYRNLMVRQLTQLKNKMAGLLMEAGVSYNKAKLHQPGYFTELLATNQEIDKSLQPLLRLNREMLVRLEKTERGLLKALTRDGQLAERVKRLMSIPGIGPVTALTWVLEVGDVTRMTSVKDAISYCGLCGAERSSAGVAQRTPLSKQRNPHLQTVLVEAAKLAPRWNADLALVYEKEKQKGNHNRATLAVARKLVAYLLAVDRGKRNFVVKTEAAEKQQSAA

SEQ ID NO: 282597 - protein, 443 aa, unidentified
MNTSHPHDLVIGLDRSDKKADLCLIDTRTGQRRTQIIDTAPEALWEWLLELRQQHPQARVGLCLEQPAVHLIAFLESHDWITLHPINPITLQKYREAFVTSRAKDDTKDADFLADLLLTHHAKLPVWSPEDSATRAVQQLVFHRRAVVDERTGLSNRLIALLKSCFPQALVLCGQDLWRPLATAFLLKWPSLQAVQKAKPATLKQFYYLHGSRSAKLMEQRLALMAKAVPVSDETAVIESFALRVQLVCRQLQLVQRSVSEFDRQVAAAYATHPDRMIFASLPGAGPVLGPRLMASMGSQRERFGTAENLQHYTGIAPVTKRSGGSCYIHRRHLCPKFHRQSFHEYAKESILWSRWAAAYYLQQRSKGSPHHTAVRALAFKWQRIIWRCWQDYKPYDEPKYEAALQKNGSPLLALFDRVELGKSPFKNPVNKLKKSVDGLPQR

SEQ ID NO: 282598 - protein, 350 aa, unidentified
MKIIGCDFHTRYQQIAMMDEATGELIERRLDHESGDAHAFYRDLQGAVRVGIEATGPIRWFERLLAELGHELWIGDSAKIRASEVRKQKTDERDALLILDLLLAKRFPKIWVPTPAERDLRQLLWHRHKLVCMRTMLGNQLHALAMSEGLCRKRKLFTKKGRVELQGLALAPWASRRREALLQMLGQLEPAIAELDRAVMEQANRREDAVLLMTHPGIGPVTSLAFVLAIGPIAGFARSKKIASYLGLNPTEASSGGRRRLGAISKQGNTMVRWLLIEAVYPAVRKDLVLRQDYQRLKFRRGHAVAKVAIARKLAVRMYWMLRSGAEYAQLVRRQGSPGATLVDASSSLG

SEQ ID NO: 282599 - protein, 337 aa, unidentified
MIVIGVDVHKHSLTAVAVDEVGRGLAEWSGPVGREVVAWARAFGEERLWAVEDCRHVTRGLEQALLDRGERLVRVPPRLTAPQRRRGRTRGKSDSIDALAVARAALQEPGLDGPRAGEETLRELKLLVDHRDDLVAERRRCQQRLRWHLHELEPTFAVPLGALDRAVWLDRLGRQLARREQSTQVRIARDLVGRCRTLTRSIGELDRELHARTAALAPRLLQLPGCGPLSAAKLLCEIGPIDRFPTDAQLARHAGVAPLDASSGKHQRHRLDRGGNRQLNCALHRIAITQGRVHPPARAYLERKQNEGKTRREAIRCLKRQLARTVYNTIKTEPLLT

SEQ ID NO: 282600 - protein, 427 aa, unidentified
METDLSRVERFRQFKHEIRGNERYLIIGIDVAKDRHHAFLGTANGRTVLRRLAVENSRNGFEHLGAHVQFQMTKHGFAEVVFGVEPTSVYHKPLAEYLIEHEFLVVYVTNAAIKHNRQLLDGRWDKNDTKDAANVADLVAQGKCHYYDLPNEVLKDVRSLLGVRRRLKRQLHSARMRIRNNLAAQYFPELDKFWNKAEEENLAIVRWCLDPQEIRQLNFTEFFHRVTSRSKGARQHERLRRIWEAASTSIGCRVGKALEVETKILVEEVKQTRERMAEVEQAIRARLTGLPHYEVLLSIPGFGPYICAVVLAAVGNPHRFENRSQLLKLAGLDLSANRSGKRSATAVPVISKSGKADLRYALYQAALVASSFNERVMAYYRKLLRGREREKGIRTKMRVKLAAKLLVIAWTLMKNKEPFNPSCLNID

SEQ ID NO: 282601 - protein, 422 aa, unidentified
MLSVGVDWAEDFHLVALGTPNEGVVDVLRVEHQPEAVARLLTRIAALEPDPAEVRVVIETRHGLLVEAFLDAGFTVLPVNPDLIARRRGPARKKDDAEDARIACLLGLDRFAKLRQLIPHGELASELRAIARDDERATQYQRRLLNRLRMDLVSTFPAALQVAGDDLGARTVLRLLERWPTQEQLAGAAREELVEFARAGHHGWPERFADQVQAALAGSHFLARPALIRAKADSIRLAARQLLLIADQRKLWERRMGELLLGAPRRGRQRQPRSDELGEKVPGGEVYLSFPGLGDRLAARVAGEIGDHLEQFETPNSLQCYAGRAPVTRRSGKSEFVVAHRLACNRHLANAVQQWAFCSLSESGWAREFYDAQRDRGKGHHAALRALGNRWLEVLWHCLRRGVRYDEAVHVANRNRALGRAA

SEQ ID NO: 282602 - protein, 342 aa, unidentified
MQITTIGLDIAKNVFQVHGIDAAEKVVVRKQLRRGQILGFFEALPRCLVGMEACATSHYWARELTKLGHQVRLMPAKDVKAYVKRNKNDAADAEAICEAVRRPTMRFVQIKSVEQQGQLMLHRARDLLMRQRTQLINALRAHMAELGIVAAQGREGIKELLKIIASEQDARLPVDAHASFVVLAAGLQALQTMIGSIERRIIAQHRSDEASKRLRSIPGIGIVGATAIAATVPDPKVFRSGRDFAAWIGIVPREDSTGGKHKLGPISKRGDQYLRRILVVGAHAVLKRARHQPEKYPWVTRLLERKPFRVVAVAVANKMARVAWALLARGGSYRAPAFAAAA

SEQ ID NO: 282603 - protein, 409 aa, unidentified
MLFAGDDWAEDHHDVELMDSAGGVLARARLGEGAAGMARLHAMIGEHLGPDGEAEEVRIGIETDRGLWVVALVAAGYTVYGINPLQVARYRERHSVSGAKSDTADAHTIADMVRTDSHQLRPVAGDSAGAQAVKVVARAHKTLIWERTRHVQRLRHQLRDFFPAALAAFEDLAAADTLELLARAPDPASAARLTNAQISAALKRARRRNITEKAAAIRAALRTPQLAQPPAVTAACAAAVRALAAVITTLNEQVTIMEGQVQAHFSPHPDAEIITSQPGLGVILGARVLAEFGDDPARYASAKARKNYAATSPVTRQSGKRKTVMARYVHNDRLLDALGGQAFAALNASPGARAYYDHQRARGVSHRAALRQLASRLVGILHGCLKTRTLYDEATAWPQLTSQEIKTAA

SEQ ID NO: 282604 - protein, 455 aa, unidentified
MTMKRRKKHKEVKMLHIIKSNAAGIDIGATEIYVAVPDDRDPKPVRRFDTFTGDLHEAAKWLKACGIDSIAMESTGVYWIPVFQILETYGFDVVLVNARHVKNVPGRKTDVQDCQWLQYLHSVGLLRGSYRPPQEICAVRSLLRHRNELVKMSASHIQHMQKALTQMNLQIHHVISDITGVTGLAILDAILSGERNPQKLAALKNKRIKASKSTIVKALEGDYRPEHLFTLKQALQIYRHYREMMAACDQEIENHLNNFESRIDLDKNPPPPPTSSPRRGKGNEPNFDLRTHMYRILGTDLTQIDGISAVTAHAFFSEVGHDVCKFPTTDNFTSWLSLCPGNKISGGKVLSSRTRPGSNRLSQALKMSAMSLGHSKSYLGNYYRRMRARHGAPKAITATAHKLARIIYHLVKTGKQFDESIFNTQEEAHQKRLFHSLKNKAKAMGFQLVPCQQQV

SEQ ID NO: 282605 - protein, 355 aa, unidentified
MDRTKYIGMDVHQASISIAVRDASGKLVIESLIETKAATILEFLQGLKGTLWVTFEEGTSAAWLYDLLKPHVVKVIVCDPRKNALLKTGNKNDRVDAQKLSHLLHAGLLTPVYHGESGVRTLRELARSYLTLTKDLTRVMNRLKALYRSWAIPCVGEKVYSPRHRSAWLEQLSEAGVRRRAEQLYQQLDILLQIRRDARRELLRESRKHPAHELLRQIPQLGPIRVALLIALVQTPHRFRTKRQLWAYCGLALQTRSSGEYRFTAGQLQHSNRLPALRGLNALHNQDLKNVFKSAATHVSTSPDAWGDFYRSLLAKGMKPAMARLTLARKMAAIVLTVWKKGARFDPGELKRQAA

SEQ ID NO: 282606 - protein, 317 aa, unidentified
MSSPLLFVGIDVSKARRDTALRPDGRTFADRNDPDGIAALVARLVALQPALIVLEATGGYEMPLAAALQVAGLPVAVINPRQARDFAKATGRLAKTDKIDAAVLAHFAEAVRPAPRPVADPQVRHLDALLARRQQLIGMRVMESNRLGTATDPAVRDGLGRHIVWLEAELAEADKQLAAAVRASPAWREKDELLQSVPGIGPVSSQTLLAALPELGTLPGGQLAALVGLAPFADDSGTRQRGRHVRGGRAVVRRVLYLAALSAVRHNAVLKAFRERLAARGKRPKVILTAVARRLLVIANAIIRSGRPWEAELAAAR

SEQ ID NO: 282607 - protein, 349 aa, unidentified
MNNNITIGMDLGDKFHMAVVFDSDGNELKIAKVTNTKIGVSKFFKPYKSAQVAIEASTHSPWISRLLNEMGLTVYVGNPRKLRCIWDSIDKSDTKDARMLGMVCRLEPRLLHPIHHRSSQAQADLTTIKSRDMLVKSRTQLINHVRGIVKANGDRLPKCSATSFANRCCTQISKELWSALAPLFEIITRLNQQIKELEREIERLSIERYPETKYLRQVPGVGPITALSYVLHIEDPARFTKSRQIGPFLGLTPRRDQSGEMDKQLSITKAGNKHLRHLLVGCAQYIMGPFGPESNLRLHGLAIAARGGKNAKKRAAVAVARKLAVLLHRLWVTNKEYQPFYNIHNKEAA

SEQ ID NO: 282608 - protein, 341 aa, unidentified
MNKPNTICIDLAKTVFQVALFNKHGKLKSNQKMSQKQMMVFIAKYPGSLICMEACATAHFWGRKFQKSGHTVQLIPAQIVRKYRSGNKNDANDALAIFEAAQRSDVHFVQVKTTEQQDIASVLKLRESYIKQRTATANRIRGFAMEYGVKFPQSINKLRKLLPFELESTDNALTPSARFILNQLFEQLIALDKPIQEVTDCLIAHAKHIPACQLLITLRGVGWIVASALYARLGSASFYKCGRDASASIGLVPAHTGSGGSNKLFGISKTGDKTLRSLLVHGARSVVSNIKDKTDVLSCWIRQLLERNHLNKVVVALANKTVRMACAMLKSNQPYQEKLPA

SEQ ID NO: 282609 - protein, 421 aa, unidentified
MEVLYRRCCGLDVHKETVVACLRIVFGGEIVREVRTFETTTASLIALSEWLAENGCTHVAMEATGVYWKPVWHILADGEFQLVLANASHVKNVPGRKTDVNDATWLADLLAHGLIRASFVPDTQTQELRNLLRTRKQLVREKARHILRVQKTLEDANIKLESVITEVMGMSGRAMIEALIAGESDPAKLASLANYRLKASQEKLREALRGRVTKHHRFLLRLHINQIDALDAAIATIDRQVEAGIAPFRVAVEQVSSVPGIRDIGAQVIVSEIGTDMSRFPSDGHLISWAGLCPRNDETAGKRRSTRLRKGAPWLKTTLVQCAWAAVRKKDSYLRAQFLRLKARRGPKKAIIAVAASILTAIYHMLKDGTLYQDLGSNHFQSRTKSQQTKRLIKRLADLGYDVALTPLPTNAVPAEGAVSF

SEQ ID NO: 282610 - protein, 353 aa, unidentified
MNITTVGIDLAKDVITVYAQDAQGKCVLSRNFRFRELAEWLVQLPAGCLIGMEACSTAHHWARRMQAFGLEPRLMAAEFVQAFRKSKSAKNDRNDAEAIAIAVRQPTMRFVAIKNETQQSRLAWHRAREGWKEERTALINRCRGLLLEFGFPIARSALAFQRGLKTSLQEETLPPNLRRLLAQIDIKLQQLDQQLAECDREIAQSARADEAAKRLQEIAGVGIITADAVCASVGNAHDFKNGRQFAAWIGLTPRQYSSGGKTQLGRITRRGDAYLRSLLVQGARSTLQATLKKAPDKQNRMQQWIIRLYGRVGYHKTLVAIANKHARQLWALLAKGEAYDLNAWQQYAIGDAP

SEQ ID NO: 282611 - protein, 455 aa, unidentified
MAKQKIHKTPAIETVNVGAAAVDIGSREHMAAVNPEVTDAPVRAFGTFTHDLHDLANWFKSHGVTSIAMESTGVYWIPAYEILEQQGFEVILVNARYAKNVPGRKTDVSDASWLRQLHSYGLLRGSFRPTAEIATLRAYLRQRERLVEYAAAHIQHMQKALMEMNLQLHHVVSDITGVTGMKIIRAIVAGERDLDVLASHRDVRCRVSTETIKAALNGNDRAEHIFALTQSLELYDFYQSKMLECDRRLEATLAALGADTAHDPSELPRPRTKTKQVSTPSFDVRAALYGVLGVDLTQIHGMGPSLSLKLVGECGTDLRAWPSAKHFTSWLCLAPGNKISGGKVLSSRTRRSSSRAAALLRLAAVTIGRSDTALGAFYRRLAARAGKAKAVTATARKIAVLFCNALRHGMTYQDPGASHYEERYRDRVLGNLKRRAKSFGYDLRELPPEEQMTVS

SEQ ID NO: 282612 - protein, 427 aa, unidentified
MSLTQNEKIRQVTEQTIIIGVDIASETHWARAFDWRGIELGKAFSFENSEEGFSSFSRRVAELAAQEGKDRAIIGAEPTGHYWFVLAEYLKGQGAKLVLVNPYHVKQTKELDDNHPSKTDRKDPKTIAKLVIEGRYSEPYIPEGIYAELRVAMNCRWRIVRELTAARNQIQRWLKIYFPEHRKVFSSFDCISSMAMLQEAPLPAELVSLGAEGINAVWRKAKIRAVGKKRAIRLYEAARNSIGCTEGAMAACMELQFLLGDYKAKLQQYDAVMAMIEMLCGQLPEVAEMLKIKGVGLVTVAGFLAEVGDIQRFDSPRQIQKLAGLAIRENSSGKHKGQTEISKRGRAKLRAILFRAAIALAAKNPEFRCIHNYFTTRAKNPLKKKQSIIAMSYKLIRVFYALATKGCAYDPVKLLADIHRNAPQLAA

SEQ ID NO: 282613 - protein, 398 aa, unidentified
MTESSDYESVQVFIGVDVGKDTHHAVAINRSGKRLFDKALPNDENKLRSLISDLKQHGQILLVVDQPATIGALPVAVARSEGVLVGHLPGLAMRRIADLHAGEAKTDARDAAIIAEAARTLPHALRTLKLADEQIAELSMLCGFDDDLAAQTTQASNRIRGLLTQIHPALERVLGPRLDHPAVLDLLQRYPSPEKLASLGEKKLAAQLCKLAPRLGKRLAADIAQALAEQTVVVPGTNAAAVVLPRLALQLITLRKQRDEVALAVEQRVLAHPLYPVLTSMPGVGVRTAARLLTEVACRAFASAAHLAAYAGLAPVTRRSGSSIRGEHPSRRGNKALKRALFLSAFAALRDPLSRAYYTRKMSQGKRHNQALIALARRRCDVLFAMMRDGTFYTPQAS

SEQ ID NO: 282614 - protein, 341 aa, unidentified
MKAYVGLDVSQNKTAICVIDEQGERLCQSNVETHPVLIHGFLVAKGYAGAKVGMETGPLSVWLYHSLRSLGLDVDCIHARHVHAALSMQLNKTDSNDAFGIAHLVRSGWYRPNHVKSLDCHQLRLMITAREKLVHIRVTLTNQIRGLLKTFGVVLPPGRNSVFERSVLEREPSLDAIKPTIFLLLDAWNNVSLQIREMNKLLAKHAKSDPVCRVLTSIPGVGTLTAISFKTAIDDPQRFQSVADVGAFLGLTPKKYQSGEVDRNGGISKHGNRQTRSLLYEAASCLLSRYGTNTGLAHWANSLRQRMGYKKAVVALARKLATVMLSMWKSGELYREQLKPA

SEQ ID NO: 282615 - protein, 450 aa, unidentified
MMREPQEIEDEEYEQVLERVAAVDVAKASGMVCTRVPHESRPGKRRTRVWEVNATTNAVLELAGQLAGEGIEKVTLEATSDYWRVWFYLLEAAGLDVQLANARDVKNAPGRPKTDKLDAVWLAKLTERGMLRPSFVPPAQIRQLRDYTRLRLDLTRDRTRHWQRLEKLLEDALIKMSAVASTLTTASARDMIEALIAGERDALVLAELARGRMRAKRPALVEALTGRFDDHHGELARMLLDQIDTLTAQIDKLTIRIGELIAAIPAARGVDADGTTGPGAGQGHDAAVLPAVTRLDDIPGISLQTAQVIIAEIGLDMSRFPTAGHLVSWAKLTPRTIQSGPRSLAGKTGKGNPYLKGALGEAAAAAARTDTFLGERYRRLVKRRGKLRALVAIARTILVITWHLLTDPAARYQELGASYYTSRIDTDKKTRNHIRQLEALGFSVTLAPAA

SEQ ID NO: 282616 - protein, 331 aa, unidentified
MAQNDLVVVGIDVAKDKVDGCIRPLSQRQTFPSTPEGRRALIRWLRKHKVGKAAMEASGGYEREWAKALREAGIEALIVDPKRVRNFARSAGRLAKNDLIDAEMIAWFAETFIEAKGQAYDAAREKLVQIVNARQALLDLQTSLRNRSEHSTPDVVQKMQARLLKTIALEVAKLEAVIAALIKATAHFTELAEIIESVPGLAKATSAGLIAAMPELGQVSNKTAAALLGVAPYDEDSGKRRGDRHIQGGRRKVRNLFYMACMGAATRHNPVLRAFYDRLIAKGKEPKVALTACMRKLIVILNIMIARGEKWDASRYELSDPTRLPPSACAA

SEQ ID NO: 282617 - protein, 433 aa, unidentified
MKKHMYRAVPVQQIDAEALIGRAADGPLTIGCDAAKFDWRAAVVDSKRVVLAVISFSMPNDLEQILKVFSKLRDLGREVCVVAEVTGTYSEPFADAVRAAGFPMHAVNASHVKRYGEIYDGVPSSHDSKSACVIATLHIVRPAPAWRVLSDSQRVMRAYACEVDLLQREIMKWRNQLEAQLALFWPELPRQLPLNRTCLRKLLIEYGCADAVRQDPKGAAQLLKRVGKGGLKADKLERIIEDAKSSQGRVPLPEEVALIQFFARRLDAAEERIKLVEKRFLKQSVEIGIAPTLSKRIGKVTAAMLYALGADFAHFPNARALLKYLGLNLTERSSGTHKGKLKISKRGSGKARRWLYLAALRLKKSDPVACAWVELKASRSGCKMKAIIALMRKLVTALPHLARGHAYDPAKLFDIGRLKRLGKLPQSYKIAAA

SEQ ID NO: 282618 - protein, 354 aa, unidentified
MPSNAETAVVRTIGIDTGKNTLHMIGLDEKGAIVLREKVSRTRIAARFVNLPPCLVGIEAGMASHYVARELVGLGHEVKQVPPAYCKPFRQSHKNDFRDAHAVAEAVERPSTRCVPIKTDGQLDLQALHRLRSRLIGNRTAAINQTRGFLLEHGIPVRQGHHFLRQQLPQILATRTDVLSPRMVRIIGDLMTDWKYLDERIEGVTDEIEALAHADEGCQQLITVPGIGPIISSAMVAAIGNGAAFCKGRDFAAWLGLVPKQRSTGDRTILGRITKRGNRYLRMLFIQGARAVLLRPASWAKHSFGSWLTAATRRLHRNVLAVALANKLARIAWTVLAQGRRYEARVEPRVEAAA

SEQ ID NO: 282619 - protein, 418 aa, unidentified
MSFKILKNNCCGLDVHKTWIYACIGITDSLKRTEYKEARFSSFSKGLQELCDWLSKYNCTDVCMESTGKYWIPVFNVLEKNNIWVTLSHPKYTKPQKGNKTDRKDAKWICDLYMCGMVKPSFIPPADIRELRDLVRYRFKLTCMITSEKNRAHNCLTVSNLKLDDVFSDIFGKSSRSITEQILQHPGETFDVAPFVDGRCKTPIEEIQAAVDGALSTEQAVKLRQCMNHIDELEMHKAEIEREIFRLSDKYESVLNLIRTIPGFDKNPLTAIQVLSEIGGDMSVFPTDKNLVSWAGCCPRNDQSNHKIKSTRISRAGSYFKPVLVQVANALIKSKKHPEFAARYRRIKARRGHKKAIIAICRMILTAIWHILTDLKPYTSEGFLESRPVNEAKVLTTSQALNLLKQRGYIIKDDVSVS

SEQ ID NO: 282620 - protein, 343 aa, unidentified
MAQQTIIGIDLAKHVFQVCMVTPTGTLKTNTTVARGKLLALIARQPPALIFMEACGGAHDWARRFCALGHEVRLLAPQYVTPFRRGQKNDPNDALALTEAGQRPNIPTVPIKTVEQQDLQAFHRVRERLVKHRTAVVNQVRGLLLEYGIVIPQGIARLRKRLPRVLEEADNGLSFLMRDLLQSLQSELCTLDTRITDVTCQLTRLSHELEACQRLQAMEGIGPLSATALVAALGNGHDFHDGRQVAAWLGLVPRQHSSGGTTRLGGITKGGNSYVRRLLIHGARSVISHVRDKPDAKSAWIRQLVTRIGVNKACVAVANKMARVAWALLHTGAQYRKPAVVSI

SEQ ID NO: 282621 - protein, 341 aa, unidentified
MNAFYYIGLDIHKKTIAYCVKKVDGTLVRQGTVNADRKALQHWQSELPGPWCGAMEATIFTGWVYDFLKPYAVDLKVAHPAMLKAITAAKKKNDRADAEMIADLLRVNLLPESHMISEELRDLRRILRYRNMIVRTAVKMKNKMSGLLMEVGAQYSKKRLYGKKYFNTLLERVEDVPNSVKELLKLSRSGFELFDNIQKKLVDALLKNKQIHDRVQRLMSIPGVGEVTALTWVLEIGELDRFSSSRHTISYCGLCSAQHESAGKEQRGPISKQRNKHLQTTLIEAAKLAPRWNEQLAILHEKELVRGNRNRATLAVARKLVEFMLAVDRRETEFELLKKAA

SEQ ID NO: 282622 - protein, 410 aa, unidentified
MLLLVGDDWAEDHHDVEVQAESGRVLGKAKLPEGIAGIARLHALIGGQVGEDDESVQVVVGIETERGPWVQALVAAGYQVYPINPLQVARYRERHGVSGAKSDAGDAHTLADMVRTDRHQLRPIAGDSALAEAVKVLTWAHKTLIWERTRHTLRLRRTLLDFFPAAVVAFDDLTAPDALELLGKASDPAAAARLTIAQITAALRRARRRGDIPARASAIQAALRTQHLGQPPVVTAAYAATVRAQAAVLTVLNTEIATLQGQVEAHFGQHPDAEIYRSQPGLGVVLGARVLAEFGDDPTRYTDARARKNYAGTSPITRQSGKKKIVLARYVHNDRLIDALGWQAFAALRASPGARAYYDQLRARGAGHQAALRQLGNRLVGILHGCLKTGTPYDEDTAWAHHQQDLQIAA

SEQ ID NO: 282623 - protein, 357 aa, unidentified
MKRDSIETPEMTIGIDLGDRSSELCMLGRGAHKPQFVSSKTTRTALVRALRPYRGARVIMETGTHSPWLARLLDELGYEVIVAHARQVHLITHSDRKDDRFDAEQLARLGRVDPALLSPVSVRSEQVSRDLMIVKTRASLVTMRTVMVNQARGFAKSLGHRLPRCAPSALPKRLEKQIGLDLFPGLREQMEMIALLSEKIARLEHEIERLSKDCYPQTMLLRQIAGVGPITALTFVLTIEDPNRFERSRMVGAYLGLRPRKRDSGQRHPQLRISKAGDTMLRYLLVQAAHYILGPFGPDSDLRRYGERIATRGGSAAKKKAVVAVARKLSVLLHRLWITGEVYEPIGYGRLDEDLAA

SEQ ID NO: 282624 - protein, 412 aa, unidentified
MIIKPKRLYVGIDVHSRSHTAAIMHSKYFKTHDNFWRSAKMIRITNTAQDFDRLDKLIRSEIQDVHEVDVIVDCTGVHYSEPLIYFLQQRGYNVCYLESRATKAVRQKILDQENKSDIIDPIVFAFLRYLNDLHNISFRVSTIIPDLTSKATALRSLVTHRQQYNKLRVQATNRLHQYLLAVFPEAESHYFQQLVRITDRYPTPHDILTNPDFVVEKQLSHSLKNTLSELAANTVGVPGGNYSWLIKKLSLERNTYTHAQAEIAQVIHSHLESHSYTKILISFPCVGEITAATIIGIIQDVKKYSSKKKFRKALGFYAILTQSGSGKAYSHAGKGGNREGRKILFLVCIRCISPKSPTNDFKDYYVRQVALGKPKIKALMATAGKLAEILYHCLLNQELYHYTGIYKSPNAD

SEQ ID NO: 282625 - protein, 345 aa, unidentified
MKIVGCDLHTRYQQIAMLDDETGELVERRLEHANGEAKEFYTKLAGPVRVGIEATGHTRWLERLLQELGHELWVGDAARIRASAVRKQKTDARDAALLLELLLSGRFPRLWRPSREDRDLRQLLWHRQQLVWMRTSIGNQLHALAMGEGLCKKKQLFTKKGRAELEGLQLDPWASRRRQELLQMLDQTDASLQQFDVAVNEQAARNADAVGLMTHPGVGPVTSLTFVLIVGPVKRFERSKQLVSYLGLNPSEHSSGGKQKLGSISKQGNPMLRGLLVEAGHTAARLDPELRQDYQRLRLRRGGSVAKVAIARKLAVRMYWMLRRQVNYAQLVRMQGSSRATLVQQ

SEQ ID NO: 282626 - protein, 312 aa, unidentified
MNQIICGVDVSKEWLDAVVDPAGMTGRFRNDAAGIAELADFCRGHGVELVAMEASGGCERLAFALLWEAGQPCGIVNARQVRRFAEALGFMEKTDGIDAAVIAAYARVKRTCPTPPPSAAQKRLQALVARLSQVTDDLTIQKQRRSATAEPEIIASLDEVIILLKRQQRQLEGEVASLIDDDPLWACLDKAFRSLKGVASRTVARLMAELPEIGLLSNKAIAKLAGLAPIANDSGKRNGRRSIRGGRAGPRAILFLVARGVARYDPHLAAFHQRLQQTGKPKMVIRIALARKLLVILNAKARDARIAFANAA

SEQ ID NO: 282627 - protein, 366 aa, unidentified
MKKGSTTLARQSRKSFQQKLTIGLDLGDRNSWYCVMDETGQIQVEQRVRTTAKGLQEVFGAVPRSRIALETGTHSPWISRLLRELGHEVIVANARKVRLIGESRKKDDRLDAQTLARLARIDPELLCPVKHRSAQAQADLMMIRARAGLVRVRTGLVNTARGLAKSYGERLRSCNVRNMNPEKAESLSPELQTALQPLLAAIESVSERITEYNERIEKLAQESYPQVGLLKQVKGVGTLIALTFLLTLEDPRRFSKSRDVGGYLGLQPGRRNSGQSEPQLHISKEGDPYLRTLLVQGAQHILGPFGPDCDLRRWGLKLAERGGRNGKKRAIVATARKLAVLLHHRVSGEVYEPLHHNRRVAVPAAA

SEQ ID NO: 282628 - protein, 351 aa, unidentified
MLYTGLDLHRSFSYITIMNDKGEIVGHKKLPSNGKVVEFLKEFDDTMEVAIEATPSWYWLYDCLEDKGFKVKLSHPLKTKAIAYAKVKTDKVDSATLAHLLRSDLLPLSYVPEKPVRLNRELLRYRARLVRVQTRVKNNIHTILAKNNVSHSYSDLFGKEGMAFLYSLSLPENYKIALEGYLSVLETLRHEIRLASKRVQALAEENPDAVLLMTIPGVGYYSALMIESEIGDVKRFSSAKQLCSYAGLVPSTYASGNTCYHGHITKQGSRWFRWILIEAAIHAVKRPGPLRRFYFKVERKKGGKVAKVATARKLLEWIYHMMRDSKSFKEVERLAELQGKGEPVKKPGLVL

SEQ ID NO: 282629 - protein, 457 aa, unidentified
MNRKGKRTPGIEEAHPFTGMSRANENAAGVDIGAIEIVACVSGDENTQIVKAFGNYTVDLQALARWLKGYNIRSVAMESTGVYWIPLFEELERQGFECLLISSRSLRRVSGRKSDITDAQWIQTLHSYGLLESSFRPQGELVALRTLLRHRSQLVEHRSPHIQHMQKALLQMNIQLSQAVSDMTGVTGQTIIRAILGGERDPQILAAMRESGCKKSEEEIGRALTGTWREEHLFILKQSMDLYDYYTQQILGCDEEIERMYGATRPDWDAGEVKPLSAKKQNSHSKNAPHNPEGIRKHLKRISGVDLSVVDGFGVSLAQTVIMEVGTDMSKFPDEKHFCSWLGLAPKHEISGGKILKNKTLKTKNRAGQAFRMAAQSVKQADCVFGVLYRRLRARLGPAQATVATAHAIARVVYRMLKYQVEYEPINLNEYQKRYEEQQIKYMKRKAAKFGLQLIPA

SEQ ID NO: 282630 - protein, 353 aa, unidentified
MGIVPVYVGLDYHSETIRVCVMDEAGEVLVNRNVANDPAAVVDLVRVNGGLVQAVSIEACCGAADFATALSAMTEWTVRMAHPSGVNRMKQGPDKTDHTDAWHLANLLRVGYLPHVWLADETTRQLRRLVRYRAGLVEQKKDIKLRVLSLLREERIENTSGASTWSKPWMVWIKTAKLGEQSRWVLDQELRRLEQAEKDLAAVDQRMEQATADDPVVAKLQEQPGIGPVTAVTMRAVIGRFDRFLTGKQLSKYCGLSPCNASSGGRQADAGLIASGNDILRPLLMQLAKRLPREAPRWKELHAKLRITKGANVASAALANRWLRWLYHEMNGKSKVQVPEGQPPVTDVKLQAS

SEQ ID NO: 282631 - protein, 298 aa, unidentified
MEHYVGLDVSLKLTAICIVDRTGKIEREGVVASDPETIAAFVKSHAPHVARVGLETGATSTWLWTELNKMGLPVICIDARHAKAALKMQINKSDRNDAVGIARIMQCGWYKEVRVKDLDSHAIKALLVSRALLVKIKRDIENQIRGLLKNLGLVIGRAKMNVFAVRAAELAEARPELAAAVEPLLKAREAIERQIADLDRKVMRLARNDAQVRRFMTAPGVGPITALCFLATIDDPTRFKRSRSVGAYVGLTTRRYASGEIDWTGRISKCGDKMLRSYLYEAANVLLTRVAKWSALKA

SEQ ID NO: 282632 - protein, 340 aa, unidentified
MKNGLKLLGIDIGKNSFHLIGHDAGGHQVLRKCFNRNRLLQFAAQIEPCSIAMESCGGSHWLARKLASLGHRVKLIAPQHVKPYVTGNKNDFIDAEAICEAASRPRTHYVAVKTVEQQVLSVQHRLRESLVCHRTEAINRVHGFLLEFGVALPATKAAIAKVPELIDDSRSDLPLQFKRVMEHLLEDIHRLDTEIKACDAQIKQQLAQDDAGTRLMTIPGIGPITASAFVADLGDASNFRASRDLSAFLGLVPRQFSTGGRPVLLGISKRGDRHLRTLLVQGSRALMIRIERRDDALGQWVRDLLTRKHPNKVVCALANKLARIVWAVLRRGSTYNASMI

SEQ ID NO: 282633 - protein, 339 aa, unidentified
MTEIKRFAIDSSKSVFTLHAVDSRDQPVIRRNIRRAQVVDFFAKQAPTEVVLEACGGSHHWARVLSAQGHRVKLIPPQYVKPFVKRGKNDRNDAEAICEAAGRPAMSFVPIKTQQRQAELMVLRTRALLIGQRTQLVNALRGHAAEFGVIAGKGIEKVGKLLETVAGDASIPLVARDVLAMLGEQIARLDTQLDAIAADLVKQHKANPLSQALAEIPGVGPITALTLVTEIEPGPFQSGRHLAAWIGLTPKERSTGGRQKLGGISRAGNEQLRSLLVVGATAVIRHAKPGARYASAWLLKLLERRPRKVVAVALANKMARIAWAMMSTGEAYRGIPQAA

SEQ ID NO: 282634 - protein, 412 aa, unidentified
MSLGFSWAISLTRGWRDLSNIIRIPKLIMKTQYYIGLDVHKETVAIAHIKSNSRGDAIYHGTCGGSNPAVERALRKLAKQLGVKLQDLSICYEAGPTGFVLGRRLIQLGLECVLCSPSKTERKPGEKIKTDKRDAQKLAKLYKNGDITPVRIPPELDEAVRDVCRARTDAVDDLSRSKQRLNSFLLRLGMSYTGKSKWTPAHMRYLRDLTMPTDVQKIVLEAYITSIDLNESKVRELKESMLTILQDWEWKPVVKALMGCKGFQEVAAMTIISELGDLRRFDNPRKLMAFLGLVPSEHSSGGTRRQGAITKCGNSHARWMLIECAQHFRKSPQVSAALTTRQIGLTTEVKELSWRMQNRLNKRYVKLKMRGKHENKCIVAVARELAAFIWELQNKCNLTMPEPSEAKNMIEN

SEQ ID NO: 282635 - protein, 482 aa, unidentified
MKAKPPEKIQKATNPSTCGHWNEMNRKQRREMMRKIQSEDISLEVVHPDAAGIDIGNESHYVAVAPSRDKQPVRCFGCTTGELKAMTDWLKQCGIRTVAMQSTGVYWIAVYDILEQAGLEVYLVNARETKNLPGRKSDVQESQWLMKLHSYGLLRNSFRPSQEIRTMRTYWRQRNDLVQSAGRHVQRMQKALTQMNIQLANVLSDVSGVTGQAIIKAILGGQRDPHKLAEFRNPRVRASEEEIARSLEGHWEEDLLFVLQQEQDGYEFCQKQMAECDRQLNHYLEQREDRSQGAPLPEEKRKGRRKKKSGNKPQFDLRTGLFRMSGTDLTRIDSIDVMTATTILSEAGWDMSKWETEDHFVSWLRLCPDNRISGNRIIGKGRLPTNNRVTIALKMAASALRLSDTYLGAQFRRFRTRLGAPVAIKAMAAKLARLVYRMLRYGMKYVDKGAATYQEQHRQLQIKQLKRKAATLGYQLIGVPAT

SEQ ID NO: 282636 - protein, 322 aa, unidentified
MSVSVLGIDIAKQKFDAALLVDGKTKHKACKNSVEGFESLMIWLEKQGIQKVHACLEATGNYGEDLAIYLHEAGHIVSIVNPARIKGFGQSELIRTKTDKIDAALIARFCLAMKPGPWIPPPPEIRSLRALVRRVDSLIDMRSQEKNRIGTAHEAVSLLIKEHITYLDQEIEKIRQQIADLIGQDHNLKRKHDLLDSIPGIGKATIPHILAELDDLEKFDHVRQLVAFIGLAPKETLSGSSIKGKPRLCKIGHARLRKALYMPALVSIQCNPVMIAFYNRLKSKGKNGKVIVCAIMRKLVHVIFGVLKSGKKYDPNFQPISA

SEQ ID NO: 282637 - protein, 326 aa, unidentified
MNLSVAALGVDIAKLKFDVCLIKENGKAKHKVFANTTHGFEQLVVWLSSHGVGSLHVCLEATGSYGEALALYLFDAGYRVSVVNPAQVKAFAASRLTRTKTDKVDAELIARFCLLQKPQAWQPPAPEVRELQALVRRLESLIEMRVAEENRLSSGVSIETVRHSLQTHIAYLVEEIKQTERLIREHIGNHPDLKEQSDLLDSIPGIGATTAALLLAEITDFTQYKSARQVAAYAGLVPRERRSGSSVRGRTCLSKIGNARLRKALYFPAMTALRCSSFFQAWASGMRERGKSKMAVIGAAMRKLIHLAYGVLKTGKPFDPNWAKTV

SEQ ID NO: 282638 - protein, 371 aa, unidentified
MSELAAETRPARLRAEASPRPPGARKPETELGAVSTTAVPHPDSRSGPSPHLQGRVMDEQRTVFVGIDVSKDRLDVHLRPSGEAFFVPREGKGMDDLVIRLQGLSVALVVLEATGGFEATVAAALAGVGLPLCVVNPRQIRDFARAMGRLAKTDTLDAEVIALFAERVRPQARPLREPERVHLAELVGRRRPIIEMIGMETNRGRQAIDKPLARRLARHVAYLQKELDAIDHDIGDAIKHSPAWREAEALLKSVPCIGDVTARTLLAELPELGTVSRHQVAALVGVAPINRDSGLMRGRRAIAGGRTSVRAVLYMAALTAIRRRSPFRAFYDQLTARGRPKKVALVAVMRKLLTILNAILRDHTPWRPLNA

SEQ ID NO: 282639 - protein, 411 aa, unidentified
MTDQRQWYAGVDWASESHHVFLTDRDGRKIGERLFKHGGEGLAEMAAWLMATSGAVEPSQILVAIEVPHGPVVETLIERGFKVHALNPKQMDRFRDRFTLSGAKDDSRDAEVMASALRTDPHCFRLLALADPTIIELREWSRITEDLGAERNRLTNRLREQLWRYFPAVLELEDDLGAPWLLDLCEIVPTPDKAVRVRAATIAKLLKRNRIRRFDAAHVLDVLRRPPVVVAAGTTKAASAHVAALIARIRFVNRQLKEAHGRLDTLTARLIPAEQAEPGQKKQHDVEILASSPGVGRIILATLLAEAFDALQRRDYAALRSLTGVAPVTKRSGKSCIVVRRQACNDRLANAAYHWARVAVQIDPKSRAKYAVLRSRGHSHGRAPRSVADRLLNITCAMLKTGTLFNPSMAA

SEQ ID NO: 282640 - protein, 452 aa, unidentified
MANSAKRKQTAKGLRFEVVNPNAAGIDISPKEMQVCVPADRDGDCNRTFGVYTDDLHYIAEWLKACRIDTVAMESTGIYWLPIFRVLKDKGFDVILVNPSDVKNYSGRKTDASDAEWLMMLHSYGLLKGCFQPENIARTMRELIRHRDNLIRSASREVLHLQKAMEQMNLKLDNVFSDILGKSGQAIIKAILSGERDPKKLSALADPRCRTSKEEIEKSLQATWDEALLFEMRQSDALYQFYQQLISECESEINAIAERYTAMVDAPKAELLRSAKYNAKKNRINFDVEKYAFELWGVNVMRMPGMSRALLLRLLGELGQDFTMKFPDVKHFVSWANLVPNNKISGGVLLSSKVPKKKNPVGMVFRQAANSLKAAKCPLGDYFRHIRAKGGHLQAMVATGKKLASVFYIMVQRKVEYDEEIYTIHKRTELQDKVSYLQKRLKRMELELANCS

SEQ ID NO: 282641 - protein, 394 aa, unidentified
MFLVGIDTQKHKHSFCIINKETGESIVKPKFFDNNKVGFEELLSSFKGLPKKDILIGMEDTGHYHFTLLKFLLDKKYQVALINPVTTDLTRKLSGSHTKTDKLDTLTICDILTSNQRTKPYRISKVDRFDLYEQKQLTREHHNLKEQSNVLKNRLQKSIDIVFPEFNSLFKSMYGVVYMNILKEFGSADALAHSDIRTIRKCFDFKGRGKRIELTAKELKNAAINSIGFPSIAEVVQIKHLVNQIELVEEQIEELDKKIEEFSIANNSPILSIPGISHFSGTSILAELGDIHNYSKPSQIIKFAGVAPLTYESSQFMAKHTAITKKGSTYLRKTLYQIILPVINNNKVFKDYYNLKLSQGKGYRCAQGHCVRKLLRVIFQLLSTNTQFDPALLV

SEQ ID NO: 282642 - protein, 352 aa, unidentified
MYYVGLDLHKKYITGCALDSQGAVVTTERRLPPVLETVLGWLAPVGQPAAVALEATLYWAWLHDRLTAAGYQVAVAHPQQVKLICHARCKTDPVDARKLADLLRTDLLPAIWIPDAETRARRTLLRGRAWVVRTRTRVKARIQAYLAAENERVPVSDLFSRGGRAWLATVALPPEVRAQVDRLLALVEQLDVQIAGQDRTVRELARATPEAERLQTIPGIGPFGALLLLAEIGTITRFGSSHELAAYAGLVPSTRSSGGKTAHGTVGPAGSAWLKWLFVEAVQTLKRQPGPVRQHYERLLRAKGKQKATVAAARKLCCYVYWMMKEGWSYDDWLRQRPQREVRPIQAVASVA

SEQ ID NO: 282643 - protein, 370 aa, unidentified
MKNHTIFVGLDVHKDSIDVALADTGREGDVRFYGTIGGDLESLHRVVRKLHKKETSLRFVYEAGPCGYDIYRSLTKQGFDCMVVAPSKIPRKSGDRIKNDRRDALNLARLHRSGELTPVHVPREEDEAMRDLTRGREDAVKALRVARQVLLAFLLRHGYRYSGRSYWTLAHWNWIADIKMPHRAQQIVLQEYVHTARELLERVHRLTRQIQDLIPLWQMAPLVTALQALRGVSLVIAATTVAELGDLTRFDSAKQIMAYLGLVPSEHSSGGSTRRGSITKTGNSHVRRVLTEAAHTYRHPARESRVMVKRLEGLPKEVRDIAWKAQLRLCGRFKRLVAKGKHTNTVVTATARELAAFMWAIACAILPTYR

SEQ ID NO: 282644 - protein, 320 aa, unidentified
MLSFCGIDVSKDRLDVMVLPDEYSSSVPNDPAGWAILVEQLRGFSITAIGIEASGGYERGAVRSLQAADMPVRQVNPFKLRQFAKASGVLAKNDPLDARMIASFVGIMPTRPAQRTTPAAEQLVEMLAVRRQLSAEKTAAENASRLLEDLMLQRLSRRRIARLAADIELLDKRLVEIVATDATLAHRYRLLTSMPGVGPVLACTLIALLPELGGMSRKQVAALVGVAPYAFESGTLKGRRCIWGGRANVRQVLYMAAMSASNWNPVLKLFHDRLKGAGKLPKVVIVAVMRKMITTLNAMVRDDIAWADRLSGRHSVTTAR

SEQ ID NO: 282645 - protein, 413 aa, unidentified
MEQLIERCCGLDVHKATVSACVRVTQRPGGEVKQGVRTFATTSPELLALREWLSEQRVTHVAMEATGVYWKPIYYMLENGFELLLVNPAHFKQVPGRKTDVADCAWLAQLLEHGLLRSSFVPPAPIRELRDLTRYRKSLTEERTRAANRLHKVLQDAGIKLSSVATDMLGVSGRSMLMALVAGTTDPTMLADLARGQLRKKLPQLRQALTGRFGPHHRFMLSRLLADIDYVEEASAELSRRIEELLAPFAAAVERLITIPGVQRRTAEVMVAEIGADMSRFPSAAHLSSWAGMCPGNHESAGKRRSGKTRRGNRWIPTALVEAGGAAGRTKHTALGARYRRLRGHVGHGRAVLAVGRNILEIAYHLLGEQTTYRELGIDYFDRYRAERLKRRSLAQLQRLGYQVTLTPLQTAA

SEQ ID NO: 282646 - protein, 394 aa, unidentified
MEVLHPRCAGLDVHKETVVACVRIVSGGEVSRAVRTFETTTARLIELAEWLEASGCTQTAMEATGVYWKPVWQVLAGGGFGLVLANASHVKNVPGRKTDVNDATWLAELLAHGLIRASFVPGPEIQELRGLLRTRKQLVREKASHVQRLQKTLEEANIKLESVLSDVMGRSGRAMIQALIAGETDPAKLAALAHPKVRAPQARLREALRGRVKPHHRFLLGLHLQQIAALDAGIAAIDREVGVSELSAQVILSEIGTDMSRFATPAHLRSWAGLCPRNDESAGKRRSTRLRTGAPWLKATLVQCGWAAARTKATYLNAQFVRLRTRRGPKKAVCAVAASILTAAYHMLKDGTFYADLGAAHFDRRRPDAQARRLVKRLADLGFSVELKSPIAAS

SEQ ID NO: 282647 - protein, 408 aa, unidentified
MEVLYPRCCGLDVHRRTVVACVRLQEHRRKRTEVRTFGTTTSEILELHRWLAEACCTHVAMESTGVFWQPVFNLLEGSFVVILANAQHIKAVPGRKTDVKDCEWLADLLAHGLIRASFIPPAEIRALRELTRHRKSLIRDRARVINRIHKLLETANIKLGTVVTHLDGVTGRAVLKALAAGETDPGRFAAFARGSLRSKTALLSAALEGRFGVNHRFLLDQLLAQLDSGATLIAQCDARIFELARPLEPHLERLQTIVGIGRRSAEVIVSEIGVDMTRFASAAHLASWARVCPGTHESAGKRRPAAAGFGNQWLRTALVESAWAATRARRTYLSVQYRRISRRRGSKRAALAIAHRLLVIAYHVLRDEVPFANLGADYFDRLNAAKAMRYHLKRLTELGCNVSSVSPA

SEQ ID NO: 282648 - protein, 428 aa, unidentified
MSENSTTHPEPEFVAFVGIDWADQKHAWCSQRAGATQREHGEVEHTPEMVEVWVSQLAQRFGPGPIAVAVEQRKGALVYMLSKYECLHLFPVPSTMSASMRKSLYPSGSKDDPRDAELLLDLLLQHRNKLRRLVPDDEVTRRIQNLVEERRNLVDEKTTQLNRLTGYLKVYFPQMLEWFEKLDTKLVCDLLERWPSLEELQKVPPAELRKFFGQHRGRHQELTERRLEGIGQAMPAIRDRAVLEAKRAMVQVSAQLLRILLEGIANLDSKIEEAASAHPDFFIFESLPGAGSALAPRLLAAFGSQRDRYGSAEEVQTHSGIAPVMEKSGKKKWVHFRWACPKFLRQSFHEWAGHSISQSTWARAYYQQHRGRGKDHHAAVRALAFKWIRILFRCWQDRVAYDENKYLAALARRGSPLSTVLTVTATTL

SEQ ID NO: 282649 - protein, 410 aa, unidentified
MLLLVGDDWAEEHHDIEVQDETGRRLGRARLPEGMAGIARLHAMIGEHVGEGEQEQVRVVVGIETERGPWVQALLAAGYQVYAINPLQVARYRERHAVSGAKSDAGDAHILADMVRTDRHQLRPVAGDSDLAEAIKVVTRAHKTLIWERTRHTLRLRRALLDFFPAALVAFDDLCAVDTLELLGAAPDPVAAAGLSVERITAALRLAHRRAIPDKVAKIQEVLRAGQLGQPSVVADAYALSVRAQVAILVTFNTQITLMQEQVQAYFGRHPHVEVYLSQPGLGGVLGARVLAEFGDDTSRYADARARKNYAGTSPITRQSGKRKIVLARYVHNDRLVDALGLQAFAALRASPGARAYYDRHRARGAGHRAALRQLGNRLVGILHGCLKTGTPYDEHTAWDHHKQDQQSAA

SEQ ID NO: 282650 - protein, 406 aa, unidentified
MRLFVGDDWAEDHHDVEVMDAAGRVLASGRLPEGVAGMARLHELIGQQLGEAGEDAEVVIGIETDRGPWVAALVAAGYTVYAVNPLQASRFRERLGVSGAKSDPGDSHMLAGMVRTDSHQLRVVAADSAEAGGIKVVARTHKTLIWERTRQVQRLRHQLREYFPAALEAFEDLAAPDALELLGKAPDPARAARLTRAQVSAALKRARRRAIADKTTQIIAALRSEQLAQPAALTAAYAVTVRALAAVITTLNEQAKALESQVGAHFGQHPDAEIYLSQPGMGRILGARVLGELGDDPDRYADARARKNYAATSPLTRASGKKKIVTARYIRNDRLIDALMAQAFSALNVSPGARALYDDLRARGIEHNDALRRVANRLAGILHGCLKTRTLYDEATAWSHRKNLAA

SEQ ID NO: 282651 - protein, 343 aa, unidentified
MQIHSVGIDLGKTTFHLVALGAGGKVLVRKKFTQKQLLAFTANMQTSLIGLEACAGAHFLGRALRKQGHDVRLIPAQFVKPFVKSNKNDFVDAEAIAEAVERKNMRFVPIKTDDQLDLQAIHRVRDRLVSRRTAVINQIRAFLLERGMVFAQKPAKLKAAMAEVLENAEADLTPMMRNLIDMLWGEWKTVEQQIEELTDKLEQISANDAGCCRIRKIPGIGPIVATAIVAAIGNGAAFRKGRDFAAWLGLVPRQHSTGGKAKLLGISKRGNVYLRKILIHGARAAVLRIKRDRELIGAWLDALDARAPKNVVVVAMANKLARIAWAVLSSGQDYRPTANAIPV

SEQ ID NO: 282652 - protein, 410 aa, unidentified
MTDTIIAQAEPILVAIDIAKARHEVLIAAPGKKRRRRLTVLNQLVDFNRLIATLADYGRPVRVAFEATGNYHRALAYHLGVAGFDVKLVSSVALARTREALNNSWDKNDPKDAQVILHMMQVGNEQFYHDPMLCGTNDLQELSKTHDIVSRSKTELWHRVLTHYLPLYWPEADRFHRSSRSDWFFAFLERYPSPHFISSMGQDAFIADAWEVVGRKVSKERLLADIYRTAVSFVGLPITPDSDAARMFRLVLGEGRRLIAQRNEIEDRAVELLKTNDDYQLLTSIPGIGPINALTILAEAGDLRRFRHHRQFLKFCGMDLATIQSGTFRGQTKLSKYGNARLRRTLWMAGQVAIMQRTNSFRDKFERYIAKDRQNTHLRRKAYTAIAAKMARTVHGIIKRGEPYRPFFEG

SEQ ID NO: 282653 - protein, 391 aa, unidentified
MIFVGIDVAKDTHYAAVSDDSGAVLVKPFAFQNNAEGFCLLLKKLSEFDRSKLLIGLESTGIYSENLICFLYESGFRLAVINPIQTATLRKTAIRKTKTDKVDTMLIIKSLMVNSYRLYSQRDADSLKLKTLCRFRQNLKKSKARLKIQLAGYVNLVFPEFGKFFKSGIHIAASYALLKKYSSPKEIAALRTSTLCTLLSKASHGRFGKDTAEALKSLALSSVGVKNPYISIQIAQTIAQIELLEQQIKDLNSAIEEAMESLNSVLMTVPGIGAVNAACILGEIGDIKRFSKPCKLLAYAGLDPTVRQSGQFTAKSTRMSKRGSALLRYALINSAWQLTLNDTTFKAYYDLKRSQGLNHYGALGHVAHKLTRVIFKLLTSDTPFNPAKLLA

SEQ ID NO: 282654 - protein, 346 aa, unidentified
MHYVGIDLHKKSITLCVVNQQRTVIAQKTLLCVEPEKILSFCQQYAPFQAVVEATASYEWLWERLQPVADRLVLAHPKKLRVIAESTRKSDRLDAKVLAEFLALDMIPPAYRPTRRERQHRVLVRQRDYLRKRSASARNKIRRILSNYNADREDLFQKAGLKYLAGVNVSPADRLALRQLLGLWRFIGKQRLSLDKALAAFAKQAPSREAEARAVLGTIPGVGVVTIDIVLSELGDITRFRSTKRVASCAGLVPGLRESAGHTKELSITKEGSRLLRWALVEAAWRVVQRSQRWQKIYESLRQRRGKKKAIVAIARRLLGVMVALLRTGQPYHSAHDTRRTEATPG

SEQ ID NO: 282655 - protein, 241 aa, unidentified
MVVVRFDVSKDSIYGARLDCSGTVKERAVLPNNEREIEVLLTRFKSKYRHLLVASEATAEYHRPLNPITTRQFTRSTIRKKKTDVSDAEIVARVAAQGQGTLVTKDTFNCVKPMLRTAVKLAQISQILRLMQHHIAEVIPEEQLLLQELEACRERVNEAADVFRATGRKQVDSQLSKLLQSVPGIGIQTAALLIAELGDITRFKDAKAVVAYMGLDPKVKQSGATLARNTKLTKRGSPYLR

SEQ ID NO: 282656 - protein, 462 aa, unidentified
MKKKKKSKGKEKEKGKRKEKFVSMPVINDHAAGIDIGSRSHFAAVGQDLSDVREFGVYESDLRECASWLKSHGITTVAMESTGSYWQNMYDVLIESGFEVLLVNGRQTKNRDKTDVKDCRWIQFLHKVGLLTSSFLPDLETEELRTLYRHRDFLIKQMSRYICKIQKCLRLMNFRLDVVLNDVTGKSGQAIIKAILSGEHDPQKLASLADWRVRTSKEEIARALSYNGRTDYMYELSDCFDLYQSYVQKMDACDKKIEELMRAHIVKLNRPQTTPPPLEKPKKLNKNSPKIPVQELSWQWNQEVDLMSIKGVSHSTALTFCSEVGTSIHKFRTAKAFTSWLCLSPNNRISGGKILSSHVYKGSNRLSVALRHAADSIGNQKDAPLYPFFQRILHRKGRCAAIIATARKLAVIIWNMVTKKVKYMPYDTTKIESQIREKQIKKINKLMAVFDIKAFEINFASP

SEQ ID NO: 282657 - protein, 347 aa, unidentified
MSKINVIGVDLAKNVIQVSVVTPHGKEVTNKALTRKKFGEFLAKQRPALVSFEACATAHYWSRVARSYGHMTKIIPAKAVAPFRQGHKTDPNDALAVAEAARRPNIKEAPIKSVEQQGLQAVQRSRELLIQNRTGLSNHIRGLLMEFGIVIGRGFAALHRQLPEILEDGDNGLPDFYRPTLYMLYGRLLSLKDDIDRLDRQIAELVKQHVACEQLTHLEGIGPISAVLLYATIGSGEAFTNGRQFSAYLGLTPKQYSSGGKTVLIWISRYVANKRLRAVLIQGARAYVHRLKEPRTPKERWLSALIQRAGYGRAAVALANKNARTAWALLTQRVAYDREHGASLAAA

SEQ ID NO: 282658 - protein, 412 aa, unidentified
MEVVHVRCAGLDISKKDAKVCVRIAGAGRRKTIETVTTWSSMTNRVLALREHLVAEQVTCVVMEATGDYWKPFYYLLEDLPGVEVMLVNARHVKNLPGRKSDVSDATWLAQLGAHGLVWGSFVPPEPIRILRDLTRARTAITRERSREVQRLEKLLEDAGIKLSAVASDITGVSGRLMLAALIEGQRDPTVLADLAKRRLRSKIPALTEALTGRFSEHHAFLARVHLELIDQHTAAIEEITARIEVVIEPFQGFRDLIATIPGIGSLTADVIIAETGADMTRFPTAGHLASWAGTTPGSNESAGRVKSTKTRPGNPYLQGALGAAAMSLAKSPNTYLGARYRRIASRRGPMKANVAIQHKMLTIIWHMGTTGTLYEDPGADYFSRLHPERAKNRALHQLEAMGYQVTLDRTG

SEQ ID NO: 282659 - protein, 339 aa, unidentified
MKVSTLGIDLAKNVFQLHGVGCNGQTVLKKKLTRDKFLPFLMQLEPCLIGMEACASSHHFARVLRRYGHEVKLIPPQYVKPYVKTNKTDAADAEAICEAVARPNMRFVQIKTAEQQAILVLHTERNILIRERTACANSMRAILAEFGIIMPRTLSQLYKKIPEILEEYDNELSPFVRCSVARQLEHLQGVEDQITLIEQELSRWAKTQPACQRVMKVPGVGLMTATYLVASVGNGQQFHSAKQFAAWLGLVPGEFSSGGKQRLGRISKRGDRYFRYLLVHGARAVAAVIERHKDNMPWLYRLLNKKAYNVAVVAQANKTARILWSMLVHHTEYRTLSVV

SEQ ID NO: 282660 - protein, 458 aa, unidentified
MGRNKSKDKDRRTMPVVHPNAAAIDVGATMHMAAVNADRTPEPVRSFGTFTTDLHRLVDWFAECGVDTVVMESTSVYWIPIFELLDARGFAVFLVNARDAKHVPGRKTDVSDAQWLQRLHSFGLLRASFRPKGHIAELRAYLRQRERLLQYGASHIQHMQKALTEMNVQLHHVVTDITGATGLRIIRTILGGERNPAVLARMRDRRCHATVETIEKALAGNYRAEHLFALEQALALYDTYQQKASACDVRIEAVLKELSVRRGRKAGPLPSPRQNRSRQQNSLHFDVRAALFALLGKDLTQINGLGPYLTLRLVAECGDDLSAWPSAKHFTSWLCLAPSNKISGGKVLSSRTRRSGSRAAALLRLAAATVGRTDTALGAFYRRLSARIGKAKAVTATARKIAVLFYNAVQHGMEYVDPGASSYETRYRARVIDNLHRRAKAFGFVLQPIDPTPSIAVS

SEQ ID NO: 282661 - protein, 363 aa, unidentified
MTKIAKKITEREKVNFSGKNIYIGLDVHKKNWYASVYVEQQFVKTFHQESTGTILLKFLQTNYPNGQYKACYEAGFCGFSVYRELTSLGIECVIANPADIPQTNKGQLSKTDASDSRRIGEAFSKQFIKPIYIPDKVTESDRSLIRYRKKTQIALKAKKQNIKSCLNTLGIKIPIQYDKPYWTNNFINWLKGLDINETSSKITIEFIIEDILLLRKRLLSINKKIRDLSKTSIYYDNYLILTSAPGVGLITAMTLLTEVGNIKRFDNFNKFNSFIGLCPLEFSSGEKQKKGPMTTRSNKTIRSLIIEASWIAIRQDPALTLKYQELIKTKTNKRAIVIIARKLLSRIYTIWKTGQMYERAIVK

SEQ ID NO: 282662 - protein, 384 aa, unidentified
MKLDRTDTPTKAEYGTVYVAFELSKAKWKLGIVLPGSEKMSRFTIAGGDLAALAARLAAARSKAERHCEAVRMVSCYEAGFDGHWLHRWLLEHGVVNHEIDSSSIEVSRRARRAKTDRIDLDKLMRAFLAHLRGEPRACSVVHVPSVENEDCRRGTRERERLLKERTAHTNRIKGLLHGQGIRDAMPRKPGFIGSLADLRTGDGRPLPLRLKREIEREHQRLCLVDKQLSDLEAVNSRELRAAALGSNAGKVVQLAGLKGIGVAGGQKLVNEVFYKKFDNRRQVGSYLGAVGTPYDSGETRREQGISKAGNHRARATAIELAWLWLTHQPDSELSRWFRARVGDIKGRIRRITIVALARKLMVALWRYLETGVVPTGAVLHPSI

SEQ ID NO: 282663 - protein, 343 aa, unidentified
MKINRVGVDLAKNVFQAHGVDRNEKPVWQRKLNREEWLKVLLERIEPGCEIGMEACGGAHHWARKLEAHGYTVKLIAPQFVKPYVKSNKNDANDAEAICEAMSRPNMRFVSVKTVEQQDVQAVHRIRAGMIEQRTAKANQIRGLVSEYGLVAPKEISHLRAAIPDWLEDAENGLTSRFRRLLNGLWSDLLSLDQRVKELDQEIAAVAATDPVAQRLQQLRGVGPMIATALLATVGDASQFANGRQMAASLGLTPKQNSSGGKTKLLGISKRGDAYVRCLLVHGARSMIYASKNKDDRLSQCVTRIATTRHPNVAAVAMANKTARIAWAMIRNGSDYQPDFAAA

SEQ ID NO: 282664 - protein, 422 aa, unidentified
MNKHRYQAKGLQQVDWGQLAQAVEGRRVVLGVDVAKEDFYGAIMLSAHEVLATVMWRHPQQTRVLEASLRALGAAGIDVALEPSGTYGDSVREVLRALGCSIYLVSPKRVHDAAEVYDGVPSLHDAKAAYLIGRLHLEGASSAWRQDCAERRDRQALVAELDLYQSEQRRNLNRLEALLSRHWPELGRIAEINRSGVLHLLTTYGSAQAVQAERSAAEALLYRVGRGLANSETIEAILDSAAHTLGVPCTPGEQHLLQVLATEVLRTREALRGVERRIAELVRRDPPLQPLADTLGKTTALVLDTALGSPLDYPNPHAYLKAMGLNLKERSSGQHQGRLRITKRGPGRARHYLFLSALRFVQRDPVVRAWYLRKVQRDGQLPRFNALVAVMRKLALALWHVARGSPFDSRKLFDLKNLGLAA

SEQ ID NO: 282665 - protein, 354 aa, unidentified
MSSFIRSKKGVFIMKKNLFFIGLDIAAVDFAASIFKAPDQSIVTKEAIPNNQEGFDLLLLWLKEHHLDKTNSHICMESTGVYSQAIAYYLLFAGFPVSVEPPLKVKRAFDPVGHKTDPVDSKQIAEYAYRFQDELTSWQPKEEILEKIRQLLSVREQFTKQKVALKNASQAYSKQRVQMVLIKKAHQETLAQIKKQITRIDQELTKLIKQDPEIFQKANNLDSIPGYGMLLAAHLLVITENFTKIQKPKRLAAFIGIVPYQHQSGTSVFKRAKIRHFGPGPSRKLLRLAAQSVATHDVTFRHYYLRKLAQGKAKALVLNNIANKLLKVACAMIQNNTRYIKDYQSIHPMYLKSA

SEQ ID NO: 282666 - protein, 417 aa, unidentified
MTDSYAWFLGIDWGYHAHQVCLLDAAGRIRDTRRVDHDRAALEAYLTWLLADTGATPAQIAVAIESPRGAVVATLLERGFAVYAINPKQLDRFRDRHTAAGAKDDRRDAHVLADSLRTDRAAFRHVPLDNALLVQLRELTRLEADGVRDLSRLTNQLRDQVYRIAPALLRLCPAADEPWFWTLLEGAPTPAALQRLTRTEILTLLKRHRIRRLTVDQVRTALAAPPFTLAPGVVEATRDAFQILIEHLRFVAAQRARCIRQQEVLLAALQARPASEAEPGEHRDVEILASLPGVGRMTTVAVLTEAAQPLATRDYDGLRTYIGSAPITKASGTRRLVQMRRACNTRLREAAYHWGRVSIQHDAPTAAYYKQLRARGQTHGRALRSVVDRWLRILVAMLRHRTLYDPTRFLTPVAIPA

SEQ ID NO: 282667 - protein, 370 aa, unidentified
MENTIVHHEGAASPEVAVNKIKLNRSIIKIGLDVHARVYVAVVQYDGLLPKAARRLRPEEFVPWVEALLRHGHRVHVVYEACGFGFNLYRELIAAGARCYVIAPRKLDEACSRVKTDPRDATVLCQRLSRYLEGNTRELAVIRVPSEQEEQARHVSRQREQLVRHRQKLEAQGRSLLIGHSLPAPAHWWKNQTWSRLGKHLPAWIRQRLEVARPALLSLQQQINTLTSELEAAAPCFIPAGLGKLTTVVLTREICNWHRFNNRRAISSYTGLCPGERTSGSKRVPGSVTKRANPRVRAALVECAWRMVRFQPQYPPVKKRLHLLAPQPRGALATGATRKKAIVAVARRLAVDLWRVHTGRCTAQQLGFTI

SEQ ID NO: 282668 - protein, 340 aa, unidentified
MDITTLGIDVSKNSFHVIGANRAGKPVFRQKFTRQKLTEFIANHPPCLIGMEACPGSQHFARKFEELGHQVRLMPAQFVKPYVKSNKNDFNDAAAIAEAVRRPTMRFVTTKTTEQHDLQAMHRVRERLVRTRTSIICQIRSFLLENGITVRTGRAALARALPAILEDPDQPLSERMRSLICRLRDQWRFIDEDINAVSKELEAIARSRDDCRRLLTIPGVGPLVATALVASVGNGRHFKRGRELAAWLGLVPREHSTGGKQRLLGISKRGSSYLRKLMIHGARSCYLNMNREPHRMGQWIDQLSQRGAHRNIVVVALANKLARICWAVMRDGSVYHCVKA

SEQ ID NO: 282669 - protein, 365 aa, unidentified
MNATAGLPIVGVDLAKIVFQLAVANGAWQVTEQHRLTRTQMERWFANRAVGLVVMEACGSAHHWARWLNALGIEVKLLPAAYVRAYVKRNKTDAADACALLEAARCADIVPVKVKSIEQQALQGLHRTRSLWMGTRTSRINALRGFCREFGVAIAQGSRTGVEQMSRVLADPASAVPILIRGTMKLLIEEIRLLEARISQLERELTALARQSPACTTLLSIPGVGLLTATAMVAATSGQVQHFKDARHFASWFGLTPKEHSSGATRHRGRISKRGDRYLRMLLTHGARSVLRAAGVAALAGKPLDSLRHWALQVQRRTNHNKAACALANKLARICYATLRDAQPYGQPTTRLSKKIGRSAYSLAN

SEQ ID NO: 282670 - protein, 350 aa, unidentified
MRFIIGCDFHPGHQSIAMLDQKTGEVLRKELSHGSLEEVKKFYASLPEPAEVGIEASGQTQWFERMLEELGHQVHLGDAAKIRAAEPRKQKYDRRDAELVLRLQLRGQFPEIWVPSPEERDLRQMLLHRAKLVRLRTQVKNQLQALALNQGLQWKRKLWTTAGRAQLQALPLLPWATRRRAELLRLLDQLEVPIADLDEAVQQQAQGRAEARRLMTHPGVGPVTSLGFVLTIGPVERFPSSKQVSSYLGLIPSEASSGARRQRLGHISKQGNSFMRGVLVEAAQSAVRCEPQLRRAYRRLAQRKNRAVAKVAIARKLAVRLYWMLRGNMDYAQLLQGSHAGAPESSCGRS

SEQ ID NO: 282671 - protein, 358 aa, unidentified
MNRNTGMNAGQIIGTMGGKQVIGLDIAKHVFQLHTVNMGTGEIINVQIKRAKVLEHFVNMPQCLIAIEACGGAHHWARELTAQGHSVRLLHAKIVRPFVSGNKTDATDARAIWLAVQQPGVKLVGVKTAAQQATLTLHRQRELMMKMRTMQTNALRGLLYEFGATFAKGRKALFQDVEQTLEDLSTQLPQMVRDSLREQVARIKAISEDMLAIEKRLGLQLKADPQMQRIAQVPGVGLLTATAAIATMGEPSAFKSGREFCAWLGLVPKQTGTGGKVRLGGISKRGDTYLRTLLIHGARSVLAHAKEPGPWLEQIKTRRPVNVVIVAQAAKMARTIWAVTAKEQSYQRGFKSVRPQTV

SEQ ID NO: 282672 - protein, 384 aa, unidentified
MVYIGIDIAKFKHFASVVSSDGEVIIKPFPFENSRQGFMKLIEEIENFQDCLIGLESTGHYAENLIYFLYQRGYQIGVINPIQTDALRDSNIRKTKTDKIDTKLIVQCLMLKKYSLVNSQDINIIKLRRLSRFRLETIQQQTRIKTQLTACLDIVFPELSSFFKGNLHLKVSYALLEKYSSAKAIAHCRIDGLTNLLYDNSRGHNQDKALQLKELAKQSIGLDNPAIELQIQCLIKQLRLYQKQIKDIDLAIMTLMELLNSPILTIPGVGYILGAMIISEICDIKRFSNPSKLLAFAGLDPVVKQSGDFQASSMKISKRGSTYLRYAIYRVAFLIIYNNETFHNYYISKRAQGKTHRVALGHICNKLVRVIFKILTDETPFNLS

SEQ ID NO: 282673 - protein, 341 aa, unidentified
MQITTIGLDIAKNVFQVHGIDAAEKVVVRKQLRRGQVMKFFEAVPPCLVGMEACATAHYWARELTKLGHQVRLMPAKDVKAYVKRNKNDAADAEAICEAVRRPTMRFVQVKSAEQQGRLMQHRTRDLLMRQRTQAINALRAHLAELGIVAAQGREGLKNLLAIIADDGDERLPVDARASLIVLAAQLQALQTMIGSIEKRIIGQHRASEESRRVATVPGIGTLGASAITATVTDPSAFRSGRDFAAWIGLVPRQDSTGGKPKLGPISKQGDRYLRRLLVVGAHAVLRRAKQEPQKYPWLTQLLARRPFKVVAIALANKMARVAWALLVRGGTYRMPALAAA

SEQ ID NO: 282674 - protein, 353 aa, unidentified
MTSTKYIGLDVHKESISIAVLNSAGKVVMECVIETKASTILQFIHGLRGDLHVTFEEGTWAGWLYDLLKPHVTELVVCNPRKMALLKDGSKSDRIDAHKLADLLYLNKIKPVYHGEHGLRMLKELSRSYLTITKDLGRVMNRLKALYRSWAIPCAGTQVYAPRFRSEWLSKIREAGVRRRAELYYQQLDALVRQQARKELLAEARKQRATKLLRQIPGIGPLRAAHLVAVMQTPHRFRTKRQLWTYSGLGLETHDSAQYRVVEQQLQRSKKSVTLRGLNTNHNHDLKDIFKGAAMRASTAAGPLRDFYEALLAKGRKPTMARLTLARKIAAITLIVWKKEVRFEANYLKQQAA

SEQ ID NO: 282675 - protein, 440 aa, unidentified
MTEFGKINLHAAGMDLGTEQIFVSTDGETVKAFGTFTSDLHDLKIYLIANGVTTVMMEATGVLWVPIFDILESAGINVCLVNAAHAKNVPAQKSDPADCRWLYKLHVYGLVRASFIPDEAIRELRIYIRQREDNKGIAASHIQHIQKAFELMNIKLHNVISDIMGVSGLSIIEAILAGERDAEKLTALCNKQILKEKKEKVLESLKGNFKREYVFMMQQAYDAWCFYQKQIENCDIKIGELLKKMTENLPKPPQEFLGKPKPSRHDDLNVDNLHDQLVCINNGRNAAALPGFSDSAVLKLTAELGTDFSKWATDKHFTSWLGLSPRKYQSGKTNKTRRSLKKNTKAGQIFKELSMSIAGSKHLALKGFYNRIKSRSGSKAAIKAVARKLAKLYYDYMTRGFTYVEQGLIEYEKKFKAAMIKGLEKKAKNIGYQLIPVGVH

SEQ ID NO: 282676 - protein, 408 aa, unidentified
MAIIGMDIHRAFAEVVALEGKSRRRLGRIVMRCDRLAAFAAGLTKDDIVVVEATGNATAVAEVLAPHVGRVVIANPKQVRVIAYAKIKTDKIDAAVLAELYASGFLPEVWIPDKDTLALRRQVTRRNQIVRQRTRLKNIVQSILHAHLIPAYAAGNMFGRKGRAWLAAQKLPEDERMAIERHVREIDRLGEDLKVIQRDLAQYGLADLRVKRLMTVPGLDMIVATALVAAIGDVSRFGSPQKLVSYLGLNPSVRQSGSGPAYHGRISKQGPGRARGLLVEAAWAAARAPGPLRAFFLRIRARRGQHVAAVATARKLAVLVWHLLTKEQDYLWVRPALHATKLRRLELTAGHAPARGQRGSAYNYNIKATRDQERRRVQQAEKIYERFVAGWNRSGPRVRTSAAKEERQ

SEQ ID NO: 282677 - protein, 389 aa, unidentified
MYLIGIDISKYKHDCFIATEAGEIIKDSFSFDNNALGFSQLLDVLQALDSSQTKKIGLEATGHYGYNLKVFLDRHGFDYMEFNPFLVKKLSTALSLRKTKTDKADARFLSMILLSVDYRTYPVKSYHIQELKSLTRYYKSLVKKRSRELVELTNTLDLIFPEFKSFFQNRFSQTAYYILAHYHTPKRISRMTYQNFEKLHSISKGHFSYAKFLHLKDLAKHTVGSSSELLVFEMKSCIRLLNDIKQEIKALESLLIAWTHKIDSPVFSIKGIGFVSALSLIAEYGNFISFDSPAQMLSFAGLEPSIIQSGTSNKQGHMVKHGSGYLRDTLMNITIPFMMHNPVIYDYYLKKKNEGKPHLVALSHVAKKLIRIIFFLVKSNQQFNETKLV

SEQ ID NO: 282678 - protein, 323 aa, unidentified
MTQSIIGIDVSKHTLDIALLQEEGTQYLRIDNKQEGFKLLEKWLRQHGCREVHACMEATGQYGYAAADYLYLCGYRVSVVNPARIKAYAASRLKRNKTDKTDALLIAEFCQREKPGLWCPAEPAFKALKALVHALDALMAIKQQERNRQEFSADVPLVDAILYEHVEFLDEKIRLLRQAIHKLIQLDARLSHQYDLLVSIPGIGELSAARLLAEIRDFREFSGSRQLTAYAGLNPRQFQSGVSIHRKSRLSKTGNAALRHALYMPALVARKHNPIIREFSQRLADRGLCKMAVVGAAMRKLLVLAYGVIKTDMPFDPNFALGA

SEQ ID NO: 282679 - protein, 404 aa, unidentified
MSTPDEVSVWIGLDVGKEDHFADVLDDEGESLFARGVANDEADLVALLEAAREHGTPGLVIDQPGSIAQLAIAVASRHEVPVAYVPGLVMRRAADLYPGESKTDRRDAFVIADTGRTRRRSVHWLDAGNDEVLDQLRVLNGFDVDLAADLTRLTNRLRDSLVSVSPALERTVGARLHQAGVRDLLAKFPTPTALRAAGRARITTAVKKRSPRVAAKVVDAVTAALDAQSVTMPAEAAVGRVIAELAVELDRIHARRDALAAEIEEVFLAHPFGQVLVTLPGIGPRTGARILAEIGDGTRFANGSKLASYAGLAPVTRQSGTSIRGESQSRRGNHRLKNAMFLAAFASLRSPDSKAFYDRKRAEGKKHNAAVICLARRRCDVILAMLRNLEPYRSQQPAPLPTAA

SEQ ID NO: 282680 - protein, 507 aa, unidentified
MAQQDPSKSIPRVGQIRPAKQMPIVHPHAAGIDLGNNAHFVCVPADSVPQGQSPVRQFGVFNPDLDQMVDMLKRCRVETVAMESTGVMWIPVFQKLEAAGLEVLLVNTKGLKHVPGRKSDMLDCQWIQLTHSYGLLSGSFRPADIICRLRTLMRQRENLVQGASSETQHMQKAMQEMGVHLHVVVSDVTGDTGLRIIDAILEGQRDPEELVKLRDWRVRKSTVAEMKAALQGDWREELLFVLGQSRRVYAFFQEQLAILDAKIIALLAEIPEAPPPPTDSSQAPSPGSSGAPEQSAGGERPVSGSAERAPEPVQGKGQRRGRKKVKFKPKGAGNPLPKDVSPQLAKIYGTDLTLIPGLGILGVVIILSEIGADLKGRWRDGDAFAAWMGLCPGSKISGGKVLSSRTPHVVNRAAVLLRLAALAIGRTETCLGLFYRRIKARHGAPKAATATARKLAVLIYHLVTTGQEYQEPDLKQYDERARKNRIIRLRRQAKDLGFDLVPTEQAA

SEQ ID NO: 282681 - protein, 410 aa, unidentified
MVKENFIYVGIDLHKETHTAVMIDCYNQKLGEITFPNRPADFPKLVTKVKKCNTDAKEVVYGLENAYGYGRALAVWLIDKGYFVKDVNTAISHRQAKHRGAMYRKSDSDDAEAIALATLNMLDKLPDACPNDAYWSLGQLVHRRDNIMKQRTRLVNQLHEQLCIAYPSYKSFFNDISRPTALYFWEHYPSKKYLKGKSVEDLRAELVPVSHNKCSTKTCEKILDAVASDKVKNNAYQDARDMVTLSIVSDLQHYDSQLTEVDKMLEQMYKMLGCTLTTIPGVNVITAVKILAEIGDIKRFANANKLAQFAGIAPLHLSSSGKGKDLATKQGNRRLQATIYFLAIQMVQVSSKGTPRNSVVRAYYEKRKAEGKTSQQALICISRRLISIIYGMLKHGTEYRMPVVESAGEK

SEQ ID NO: 282682 - protein, 315 aa, unidentified
MQAQAAAVYVGIDISKTSFDVDSYPVAQPACFTNDEPGRAAAANYLRGLQPSLIVVEATGGLEAPLVGQLATAGLSVAVVNPRQARDFAKAIGVLAKTDRVDAQMLARFGQAVKPAVRPLKPEETLALEAMLTRRRQIIEMITAESNRLSSAAPRIAKQIRQHIAWLEKRLDEADQDLDGMLRQSPVWQHKAQLMTSVPGVGRVTAVTLLAELPELGALPRREISALVGVCPYSRDSGKYRGRRSIWGGRAVVRAALYMAAIVASRHNPVIRAFYQKLVAAGKLKKVALVACMRKLLVILNAMLKHDTPWHHPAA

SEQ ID NO: 282683 - protein, 407 aa, unidentified
MELVALYKRVIGLDVHQAQITACALIEESDGTTRREQRQFGGFKRDRRALAEWVASLHPDCVVMESTGIYWKSPYAALEAADIRAQVVNARHVKNVPGRKTDVGDAQWLATLARAGLLRGSFIPPAKLRELRLIARQRQKLVGQLASEKNRLHKVLADSGVRLGVVVSDLHGQSARAMVKALIAGQPSHEVIKLASARLKASREEIFEALQGDLSESHGFVLEELMHHIEEIEARIARFDARLLAGLASERNILALLQTLPGVDLIGAAMLLVEIGPDMEAFGSADRLASWVGICPGNNESAGKRKSGQVRKGNLYVRRLLCEFAHAASRTTSVFKTKFQSLVIRRGYKRAIIATGHKILRTIFFMLKRGEHYRDSTTDYEALSVQRNAPRWIKALTKYGFIAPVGP

SEQ ID NO: 282684 - protein, 343 aa, unidentified
MEHYVGLDVSLKQTSICVVNQVGSVVREGVVDSEPEAIAAFVRSKAPGAVRIGLETGPTATWLWTELKQLGLPVICIDARHAKAVLKMQINKSDRNDAAGIARIMQTGWFKEVRVKDLDSHSVRALLASRALLVKIKRDLENQVRGLLKNVGLVIGRAKFNVFAVRAEELIEDRPELIAVVGPLLKARKAIEQQTDDLDRKVLKLARYDAQVRRFMTVPGVGPITALCFKATIDDPTRFKRSRSVGAYVGLTTRRHASGEIDWTGRISKCGDAMLRSYLFEAAGVLLTRVPKWSALKAWGMRLAKRNGLRKAKVAVARKLAVILHRMWIDGTEFNWSKKEVAA

SEQ ID NO: 282685 - protein, 439 aa, unidentified
MMRLPTPVVQIVEETMEVMHERVAGLDVHKASIVGCVRLQAGGKLNRECRTFDTTTEGLLALLAWLAKCRCTHVAMEATGVYWLPVWKILSEGDFALILANAAHIKNVPGRKSDLNDAMWIADLAACGLIRASFVPEERMQELRSLLRTRKQLGREQTRHVQRIQKTLAEANIKLDAVISDIMGASGRRIIEAMIAGVRQPRKLADLAGKQVKATPKELYDALHGRLTDHHRFLLQLHLRQWDGLDATIREIDREVEDRIAHMDGEAEPGSTPFRDLIGLLCTIPGVAKLSATTILAEIGRDMNRFPTAGHLLAWAGLCPGQNESAGKRKTTRLRKGAPWLKTMLVQCAWAAKRKKDSYYRAQFFRLQSRRGPQKAICAVAASILTAVYHMLKDGTEHHDLGLDYFDRRRSTDAQAKRLVARLTRLGFQVHLQPAPKAA

SEQ ID NO: 282686 - protein, 343 aa, unidentified
MEIMFTNFVGIDVSKSKFDLALIKGQDKDHVIQGVFDNTQKGIKTMSKFLEKEHHVQLPETIFCMEFTGVYCRPLTSFFVEQDCHVWIEMPVNIIRSLGLQRGKNDRVDAHRIALYAYKNRDDIKLWKPQRDVILQLRDLLALRERLITSQKALTNPIEELLAMGAKSAATSVRKNCQKTLSAIENEIAQIEKNLDDIIKDDTQLKELFQLATSVPGVGKLTALFMICFTNEFSMYTNPKQLACYCGVAPFEHSSGSSVRGRTRVSHMANKVLKRMLHMGAMSVISRDPELRNYYQRKVAQGKNKMLVINAVRNKIIHRLCAVIKRGYAYQSEIIFKERLVLS

SEQ ID NO: 282687 - protein, 345 aa, unidentified
MQITTIGLDLAKNVFQVHGVDSEGRVVVRRKLRRAKVREFFAKLTPCLIGMEACGTTHFWARELIAMGHQVKIMPPSYVKAYVRRGKTDAADAAAICEAVMRPHMRFVPIKTEDQQAALMLHKARELLVRQQTMLINAIRGHMAELGMIAPQGSAKIKDLIAVIQDSEDQSIPALARAALQPLVHQMQTLDGQVEVLDRMIMAWHKTNETSRRLATIPGIGVITASAIAATVPDPSFFSSGREFAAWLGLIPKQNSSGGKERLGRISKKGNTYIRRLLVTGATSMLRYARAKTAAAADWVNGLLQRRPARLVTVAMANKTARIAWAVMTKEENFRVLGMPVIEAA

SEQ ID NO: 282688 - protein, 436 aa, unidentified
MTFLRQPPLAAASRGRCGVEDVVEYCAGLDVHRDTVVATVRYPVGGRRSSTTKTFGTDTAELVALGDWLVSQSVTRVGLESTGVSWKPVFYQLEDRLEQVWLLNAQHLKNVPGRKTDVADSAWIAQLVDHGLVRPSFVPPPQIRQLRDFSRHRRVLCEERTRMVQRLEKVLQDAGIKLTSVASTVLSKSGRAMLEAMLAGQTDPVALAELAKGRMRSKIPQLVDALCGNFRLDHHGVLVAQILAQVDFLDRQLADIDEHISALVADLEPIIERVQTIPGVARKCAIGMIAEIGVDMTVFPTAAHLASWAGICPGNNASGGKARSGHTRRGPVALKTVLTEAAQAAGRTKNTYLGARYHGIRGRRGTFKAVGAIRHDILIAYWHIVSGTSTDGTPVGYRDLGPDWITRRHSTEYQIAKLTKQMEKLGATVTVTLPAA

SEQ ID NO: 282689 - protein, 341 aa, unidentified
MSIITVGIDLAKNVFAVHGVDDNGKPALVKPKVSREHLLPLIAQLPPCLIGMEACSGAHHWARQFRQHGHTVKLMAPKFVIPYRLSGKRGKNDAADAAAICEAVTRPQMRFVPVKEEHQQIILALHRTRTGFVEERTATYNRLRGLIAEVGIVCPQKITALRRALMDHLEDLPGYLNRCVGDLLAHADSLDVRIAEYDRIIRDAAREDARSRRLMDLPGIGPNTASALLASIGGGHDFKNGRQVAAWIGLTPGQYSSGGTTRLGRITKAGDRYLRSLLVMGAKAILSGLGEKQDRFSRWARSLVERRGYWKAVVAIAAKNARLAWAVLRFGEEFRLRQADA

SEQ ID NO: 282690 - protein, 344 aa, unidentified
MGEVSTIGLDIAKAVFQVHGVDGAGAVVIRKRVSRSKMLEFFTDLAPCLIGIEACPSAHHWGRELQALGHTVRLMPPSYVKAYLKRSKNDANDAAAICEAVTRPSMRFVPIKTKEQQAALMLHRTRQLLVRQRTMLSNALRGHLAELGIVSAKGRNGTGELLRIIADGADHRVPSAIRGILDVLARQYGAMGTEILSIDKSILALHRSCEASRRLAEIPGIGPVGATALVAEIGDWKTFSSGRSLAAWIGLVPKQHTTGGKDRLGSITKQGNRYLRWLLVVGAMAVIRYARKHGTQKRPWLGQLMKRRPTKVAAVALANKIARMAWAIMVRGERYKEPKLLLAA

SEQ ID NO: 282691 - protein, 362 aa, unidentified
MSVKATVLVGLDVHARQTHATVLDRSTGQMSACKLLGAPEAVLPFLERIGSDLLAVYEAGPTGFGLAREAGRRGLDVRVIAPGSVPRAPGDRVKTDKRDSLRLLRLLAAGELSFVFVPTVEDERFRDLLRALDDLRGDLMRARHRLSKFLLRAGQRYEQGQAWTVRHMGWLRALSFDDACAQATLADYLSAVEFGLGRRQALLGALERAVAGYSRAAVIARLRCFRGIDTLSAAGLCAELHGFEPFPRPALLSGFVGIVPSERTSDTKRHQGSITKAGSGHARRLLVEAAHHYRHRPAIGETLARRQAGQDPRIIETAWRAQRRLHQRWQRLHIERRKPSSVVAVAVARELAAFLWEAARLD

SEQ ID NO: 282692 - protein, 332 aa, unidentified
MTGFAWLGIDIAKQKFDVALTWSTRRRAKVFRNDGEGWQALLRWLKDLGVGHVHACLEATGRYGDGLAIALHEAGHRVSVVNPAQIKHFGRVKLGRNKTDRADAALICDYCRLFEPAAWTPPSAALRQLRDLVRTREALSASRVEWANRRASGQETAVADAAMAKVIAQLEAEIAALDQAIDDALGQDDDLQAKHDRLVSIPGIGTHTAAVVLCELPGPDVLRTAREAAAYAGLNPSHRQSGSSLDAPARISRIGNATLRAALYLPALAALRWNPLVAALRQRLKDQGRLKPKQIIVAAMRKLLHLCFGVLKTGKPFDPDHATSTDEIAATT

SEQ ID NO: 282693 - protein, 429 aa, unidentified
MQNESTPGARGPVFCGVDTHADSHWLCVLDWRGRKVLSRRFPADAAGYEALAGAIAAAGEPACVAMEGTSSYGAGLTRHLASLGMPVREALSPARMQRRRPGQGKCDEVDAERAARAAMSGSKLGTPKSQDGWVDGVRCMLAARSGAVKARTSAINTARSLLTTAPEGLRSRFRGMGGPRLMEELPSVRAEGALGAALGALADLWEAARDAALDMERAIEASLEENCPALLAMYGCGPVSAAKLAVAAGDNPGRLRSEASFAAICGACPIPASSGKTVRHRLNRGGDRQANSALHEIARQRVMRDPETAEYAERARGRGKSDREVMRCLKRYVAREAYRALMRPHEIRRPEDASELVAARRAARVSQVRAASILGTSEKYISMLERGQRELKPIRRAYEAWVEAGLPLDWDRQAFEAERKMDSKKHLAK

SEQ ID NO: 282694 - protein, 330 aa, unidentified
MYLGIDIHKRYSQVAVVDSDGNLQQESRLPNDRLADLAEQYAGSEAAIEASGNYRPIYETLDEHCDVTLVDPPKNRIIAEATVKTDRVDAKRLALMLRADMLAESYVPSDEIRELRDLVRTRKALVEERTAEKNRVQAVLARTDNTYESELFGPNGREFLAELSLSDVDRKIVEAHLSVIDEYTAQIEIFDTEISQRVVESPAAQRLLSIPGVGETTAATVLAEVGEIERFDRDKELVSYAGLDPEVHQSGDTEIRGSISKEGSVPLRWTLVQSALVAVQYDDYLGNFYTRLKKRKNHQIAIVATARKLLVSMFHMLTRKEPYDPPEVNT

SEQ ID NO: 282695 - protein, 421 aa, unidentified
MEEITEEPVALVERVAALDIGKATLTACVRVPHDAKPGARLQEVRTCTTTTRSLLGLRDWLVCQGVTRVVMEATSAYWKPPFYLLEDDIAECWVVNARDVKNAPGRPKTDKLDAVWLAKLAERGMIRPSFIPPRPQRQLRDLTRYRRTLTHERTREMQRAEKLLEDAQVKLSSVISNIFGKSGRDMLDALIAGQRDPYVLADLARGSMRGKKSILAEALTGHFTEHHAFLLAMMLARIDALTAQINTLTARIEQAVAPFARQVAQLDEIPGIGMIGAQEIIAEIGTDMSRFPTAGHLVSWAKFAPKARQSAGRAKAATTGEGNPWLGGTLGEAAISATHTSTFLASRYRRIVKRRGKKRALVAVGNSILTIAWHLLSDPSARFTDLGPTWHDHLAPLRRKRQLIAELERLSGMKVTLHQAG

SEQ ID NO: 282696 - protein, 354 aa, unidentified
MIIIGVDFHPEFQQIAWVDTDTGEFQERRLQHREEAERFYRELAAQRVQVRVGMEASGHARWLERLLSELQFELWIGDAAEIRAKRVRKQKTDRQDAQLILKLMLKDDFPQIWVPSWENRDLRQLLWHRHRMVQARTRIMNQLQAVALNEGLRCKKRLWRERGRQQLESFRLAPWASRRRRDLLELLDRLNPTIAELTQAIEQEAEKSPEAQRLRTHPGVGALTALAFVLILGEANRFRCGKQIASYLGLVPLEDSSGNRRRLGHITKQGSSMVRFLLVEAAQATVRSMPEWRSKYFHLAMRRGRKTAKVAIARRLAVRLYWMWRKGWDYEQLTKFGSHAGQPGNRHGVQSNTE

SEQ ID NO: 282697 - protein, 347 aa, unidentified
MRFYTHQHKHYCGIDLHARAMYVCILDQHGTKLVHKNLPTTPEAFLRIIAPYREDVVVGVECIFTWYWLADLCQKEDVAFVLGHALYMKAIHGGKAKNDKIDAHKIAVLLRGGMFPQAYVYPSEMRATRDLLRRRCHLVHKRAELLAHIHNTTSQYNLPEIGKKLAYKANREGVEEHFPDPSVRKTIEVDVSLIDHYDQLLGEVELYIIRTAKAHDVQTFSRLQSVPGIGQILALVILYEIQDIARFPRVQDFVSYCRLVKCAKESGGKRLGTSGKKIGNVHLRWAFAEAAVLFLRHNQPGKEYFTKLEHKHGKAKALTVLAHKLGRAVYYMLTREQAFDLTRFVTA

SEQ ID NO: 282698 - protein, 329 aa, unidentified
MKVQHIIGADLSKKSIDLVCHLLHTHIQIENSIAGFKDLLQWMCKQNVNSSETMIVMEHTGLYSFCFESFLHKHQIAFCKVNALAIKRSIGLVRGKTDKLDAARIAAYGYEKKDKLAIDVPVSDVLKRLQMLHSTRERLVRHRASLTCAIKEYKHIGISEKDIIMQTQLQLIKNFDKQIEKLMTEIEAIMEKQETLKQNFRLLQSIKGIGKVVALVTIIKTHNFTRFTNARKFACFCGTAPFPHDSGTSIKKRTRVSHLADKQMKSLLDLSAKSAIQYDKELREYYLKRTEGGKPKMSTINIVRNKIIYRMFAVIKRQTPFLENYLQAA

SEQ ID NO: 282699 - protein, 408 aa, unidentified
MNAVGIDVSKGKSMVAALRPMGEVALLPQEFLHTEVGLEQMAYAILALGEDTRVVMEATGRYHEPVAAALHEYGIYVCVLNPLYIKQSGGGSIRKVKSDKADAMKIAKYGLDNWVDLREYTPMDTIRQQLKLCSRQYNLYIKTVVSLQNNLISLADKTFPGVNELFSSPERADGHQKWVDFATTFWHCDCICRVSEKAFTERYQKWCKRKDYHFRAEKALDIYAGSCGHFTTLPMNDNTKLLITTAAQQLLAGKMTLAALRAEMTRLAKQLPEYDTVLAMYGVGETTSAQLMAEIGDVRRFPRRSSIVGFAGVDPAVDQSGKHEAKSTPTTKRGSPHLRKTRYQIVCTYLRKAPEDEPVYQFLDKKRTDGKPYFVYMTAAQNKFLRIYYARVKECLEAFDAQQDTVQN

SEQ ID NO: 282700 - protein, 338 aa, unidentified
MDHFVGIDLHSNNSYIAIIDTDNTRIFKKKARNNLKEILKFLVPFKNQIKGIVVESTYNWYWLVDGLIDNEYKLHLANPSAIKQYEGLKHSDDITDAFHLANLLRLGILPEGYIYPKHERPVRDLLRKRMHLVRQRTAQILSFQNLVARNLGKKMNANTIKKLNEEDLDNLFEDEHLLLSAKVSISTIHFLKSRTIHLEKVIHKASRLKNEYKLLKTVPGIWNTLALTIMLETGPIERFEKVGNYASYCRCVQSNRLSNSKSKGKGNRRNGNKYLSWAYVEAANHALWNYNYVKKYHQKKTSKTNTVVAIKAIAHKLARACYYIIRDQKEFDPARAFA

SEQ ID NO: 282701 - protein, 345 aa, unidentified
MKILALDLGKYKTVACDYERETGEHRFKTTCTTPAALEQLVKEVKPDRVVIEVCNIAGWVCDRLRGLEVEVQVANTNDDAWRWRKVKKKNDRRDALKAARLSAVNQIKEVHIPTIEVRQWRALIAFRQQLVRRRGRIKNHIRDLLVSEGQLLPRGGSCWTQLGVARLEALARPLSEVSMSELWRGQLAIELRQLREVQQEIAAAEEKLDAIAAADPRIKLLRTIPGVGPRLSEAIVALLDHRFQKASEVSAYIGMVPKELDSGETVRRGPITKHGSRLVRSLLVEVAWAGLRHNPWVRQTYQRISGGKKSRQKIAIVAVGRRLLVRCWAMLRDGSSWRTPLSVAT

SEQ ID NO: 282702 - protein, 338 aa, unidentified
MKLYGGIDLHSNNCVFNLVDNEGHVVLKKRLRNNLEIILGLLDPHRDVLAGLVVESTYNWYWLVDGLMEAGYKVHLANTTAIQQYSGLKHGDDDSDANWLANMLRLGILPEGYIYPKEERMLRDLLRKRLQLVQQKTSNLLSIQGLYDRHLNKRLNSNKVKQLTADQLVADYHDVSVRMAVNGNLVILNCLAEQIRLIERSLKQRLKLRDEFVNLTSIDGIGLILALTIMLETGEIARFQRVGQYASYCRCVSGARYSNGKRKSKTNSKNGNKYLAWAFVEAANFAIRYNETVKRYYQRKLSKTNVIVARKTVAHKLARACFYVLRDQVEFDVNKAFG

SEQ ID NO: 282703 - protein, 305 aa, unidentified
MKGQRKQAKIFANSPDGWKLVLSWIKAMGSKHAHVCMEATGRHSLGVAMALHDAAHVVSIVNPAQIRNFARTKLGRNKTDKVDAALIREYAALFKPEPWTPPSLAMRRLCELHTVRAGIIRNRTEWKNRISSGLSDSIATRLAAATIEHFTSQLEAIDRAIRETIGQNAELRARRELLLSIIGVGETLAASLLAEMPEPGVLRRSGEMVAYAGLNPSHHRSGSSIDRPTRISKIGNATLRSSLYMPALSAMRFNPAVAALVMRLKSAGRLKPKQIVVAAMRKLLVLCFGVLKTGKPFDPALAMPA

SEQ ID NO: 282704 - protein, 426 aa, unidentified
MIPAILERVAGIDVHKRFLTVCVMIGPAHAVPEVRKRRFGTMNAELQELRGWLGELNCQDVVMESTGSYWKPVFNVLEDGGFKIALANPQQVKNLRGHKTDMKDCEWLAHLHRHGMIRASYIPPRPVRELRELTRRRKQLIRNAADERNRMQKLLEEGNVKLGNVLTDVLGQSGQAILIALIKGEATPEQMAQLAKRGARKKIPQIQAALEGHRLSEAHRMLLQQCLEHLAFLDEQIQDMEVRIQQKICACGFQEVNRRLQSIPGIQQDAAAVVLAEVGGDVSAFPSSGKLSSWAGVCPGNNESGGKRSSGRTTKGNPYLRDLLLQSAWASSRKKGSSMQNRYTHLSPRKGHKRAIVAVAHAILRAVYWVLSTGQNWVDTPSTLDTTRTSKLIRHHSRRLRRLRCILQAKTFVQPNMGEGTNIIGT

SEQ ID NO: 282705 - protein, 343 aa, unidentified
MEKDIVIAVDVAKSVLEVAVSDRPGHVCRRERLTRSQFLPFFLAYPEATVVMEACGSAHYWGRELQKRGHTVALLPPHHVRPYVRGNKTDRTDTKGILEAHRNAEVRPVPVKSIAQQSLTALHRFRSGWMKERTARLNALRGLLRELGVFIPMGAREVIPAVWAQIEDADSEIPVALRPVFAEACQEIREIEVRIKKVDHELEVLAEQTPAVVWLLTIPGIGLITATALVAFIGDIRRFPSGRHLASYLGLTPREFSSGLKRRLGRISKRGDGYLRTLLIHGARSVLVHARKQQPDRFRSWAHDLEKTHVHNKAAVAVANKLARIVWAVWTRNVPYDLMPKAA

SEQ ID NO: 282706 - protein, 406 aa, unidentified
MKRLFAGLDWAARNHAVCIIDEAGAVREQFEVTHDAAGLRELLARLRRHATTPAQLPIAIERPSGLLVDALTEAGYPIVPIHPNIVKATRPRYRSHGAKSDASDAYLLADLLRTDGARFAPLQPQSDAIRALRALVRGRDDLIATRVQLANQLRSLLESFWPGAAAVFADIDSPIALAFVQRYPTPARAARCGEKRLAAFLAQHSYCGRRSPAALLERLRAAPAGHAAALEVEAKRTLVQALAVTLTALVEQIHQITARIEHTVADLPDGQLVMSLPRSGRVCAAQILAELGNVRERFPTDARLAAEAGVAPLTYQSGKHRSVTFRWACNHRLRRALTCFADNSRHASQWAATLYANARSRGCDHPHAIRILARAWTRVLWRMWTDRCTYDPARHRAALAFSTPGG

SEQ ID NO: 282707 - protein, 420 aa, unidentified
MEQATPFAALIGIDWSDAKHDICLVETATGTQELSVVKHTPECLNEWARSLRARFGGAKVAVCLEQSRGALIYALLKYDFLVLYPINPQTLSRFREAFTPSRAKDDPSDAEYLVELLIHHRERLKAWTPDDEETRTLQLLVEHRRRLVGDQTRISNRLTALLKGYFPHVWQWFPDIRTEMVCDFLLRWSSLDALTGVRRTTLEKFMREHNSQRTETIERRLTAIKAAVPLTTDKAVINSSVVMVKALAAQMKTTLEAVKEFDARIEELCCAHEDFALFSALPGAGKVYASRLLTAMGSNRERWASANELLCFSGVAPVIERSGKSSWTRWRYFCPKFTRQAFVEYAGESIRHSEWAQAFYASQKAKGKSHQAAVRALAYKWIRIIWKCWRTRTNYDEARYLETLRRKGSKLVGELACAEA

SEQ ID NO: 282708 - protein, 352 aa, unidentified
MNNVKYVGMDVHKAITVIVVLNALGQMESHSKIKTKAENICDFFRGLSGKVEAVFEEGTHSAWLHKLIKPLVASVTVCDPRHNKLIEDGNKSDDDDAETLAHLLRIGAVKAVYKGDDQQQQLKELCRAYENLVQDLTRAKNRLQAIYRGRGLDPGRAIYRVDQRDQHLAQLKDEATRFRAESLLDQLAALQELRKQAKQRFVLRVRQHPDYRILSGLPGFGPVHVGQLIATVGTPHRFRTKRQFWPYCGLAVVTRSSADYKIVEGKIVKSQKKVSTRGLNRNHNPQLKQVFKSAALTSLRYQECQAYYQRLVEGGTRPELARLSVARKLAATALALWRHKEEYDPKKFMSQA

SEQ ID NO: 282709 - protein, 360 aa, unidentified
MAKARTLVGLDVHATKIVAAVLDAESGELQCFRMSGEIESAAAFCAGLPKPVRVAYEAGPTGYGLARELAKRRVQCVVAAPSKIPRASGDRVKTDRRDAEHLVRLLLAGKLHPVRVPGDEEEALRDLVRAREAVRVDLMRCRHRLSKLLLRHGIRFDDGKAWTQRHRDWLATVSLKWPAAQTTLSDIQGAIDALCHRREQLEREILQILPGSPWAVQAGRLRCLRGIDTLTAVGLGAEVGDFERFARAEQLMSYLGLVPWENTTGEQRRLGQITKTGSRHARRLLVEAAWHYRKHPAIGAKLKDRQAGQPPEAIAIAWSAQRRLHRTWTRLEARAKRRTIIAVAAARELAGFCWAICQIE

SEQ ID NO: 282710 - protein, 370 aa, unidentified
MNRLSVGMDVHKEKVVMVGLPERGDTPVMRETFRGDNISGIVKRLKTLSRACAVESCYEAGPSGYGLARVLTEAGISCRVVAPSLMPRRPGNMVKTDIRDAKELAAALRAQTLEFVRIPSCEEEEVRGLVRCREDIARQLRSFKQIVSHWLLSHGYRLPAKVNRWSPTFWRWVRSLPLPPLERMVLDHYLDVLLMLEDRRKQVESQICELADREEYRERVCRLGPLRGFSKLAAMRLIAEVMDFNRFPKASAFMKFTGLVPSEHSSSDRIRRGRITKGGNSHIRHVLVEAVQRAHVSARPGRSLLKRQEGAAGEFRQIALKCLLRLYRKFWAYTKRGVPVGKVRVAMARELAGFVWALMVHPAPVLTAAA

SEQ ID NO: 282711 - protein, 416 aa, unidentified
MSQKLKEQRLKELAFVGVDTHKDEHTACIANCFGQSLGVFTSENRPKELKELLEKVDETAKSHNLKPVFGLEDVMGLGQHLARSLISGGYHLKEVNPIETERKRLKNAHPDKSDPLDALAISRVLITDFDKLPTIQSLNEIYLAIHELSNRRDSLVKEKTRIKNKLHILLHREYPYYQTMFKNTFSKAALAFWERFPIASLLKGIGVERLAQYLRANSNNTVSTKKALSILKLVDKDSVPSCLNLVHSSIIRNLVKHLRFIEEQIAIVEKELEPLVDETGMKLSTLTGVDLVTAAKLIAEIGDVNRFSSSDKLARCAGIAPQQKSSGKKLKFKKSNRGRRQLNTAIYHIALSQISRDRSGKPRNSKARDYFLRKISEGKTKKEALTCLQRRLCDIIYAMMKNKTEYRFQRTTNLVT

SEQ ID NO: 282712 - protein, 342 aa, unidentified
MQITTIGLDVAKNVFQVHGIDASEKVVVRKQLRRSQVLAFFKVLAPCLVGMEACATAHYWARELTKLGHQVRLMPAKDVKAYVKRNKNDAADAEAICEAVRRPTMRFVQVKSVEQQGQLMLHRTRDLLMRQRTQVINALRAHLAELGIVAAQGREGIKELLKIIASEADARLPVDAHSSLVVLAAGLQALQTLIGSIEKRLMVQHRSSEASQRLETIPGIGVTGATAIAATVTDPKVFRSGRDFAAWIGIVPREDSTGGKHKLGPISKRGDRYLRRILVVGAHAVLKQARRRPEKYPWLTQLLARKPFRVVAVALANKMARIAWALLAKGGTYRAPALAAAA

SEQ ID NO: 282713 - protein, 411 aa, unidentified
MDKVYDKCCGIDVHKKLIVACFRQGNKQEIRDFGATTRELLEMADWLKEGGCEMIAMESTASYWKPLYNILETCELDAMVVNASHMKAVPGRKTDVKDAEWIAELLQHGLLTASYIPDKDQRELRELVRYRKSLVGERNRELNRLQKMLEGANIKISGTVRDINGKSARNLLELMLTGKQIDSAEYDILYQQKVIAHNLKATKEQIIDDLNGVMSDLQKKMMRLLLKHLDELNAIIKELDDDIDNFMKPEEKRAAQVIQDIPGIGNTSAQAIISVIGTDMTRFPTDAHISSWAGLCPGNNESASKRKSGRTTKGNNLLRDTLVVCAHSAVKNKDSYFSAQFARISAHRGKKRAYVAVAHSMLVAIYHILKDGVVFKDLGADYYNQFNKERKINAYLKKLKALGWEASVVAA

SEQ ID NO: 282714 - protein, 356 aa, unidentified
MSREVKYIGLDVHKEAIVIAMLNTRGDQVMESIVETKASSILQFIHGLQGELHVTWEEGTWAAWLYDLLKPQVQQILVCNPRRNALLKEGSKNDKVDARKLADLLRTGMLRPVYHGEHGLRTLRELARTYQTLSQDLNRVMNRLKALYRGWGIACSGTQVYAARYREEWLTKIEHVGVRRRAELLYQQLDGLQTLRRTLRPELLAESRKHKAAKLLRQIPCIGPIRAARLLALMQTPHRFRSKRQLWTYSGLGIETHDSAQYRFVDGQLQRAKKPQQIRGLNRNHNHEMKDIFKGAANRASCGVGPLRDFYVALLDKGMKPEMAKLTLARKIAAIALTLWKKEERFDAEHLKTQAA

SEQ ID NO: 282715 - protein, 365 aa, unidentified
MMGWMAPSRHQCAKVGLLNSNLRGPSVKEVTTIGLDVAKQVFQVHGVDASGQVVMRRTLRRKQLVPYFAKLSRCLIGMEACATAHHWARELRKLGHEVRLIAPAYAKAYVRRNKNDAADAAAICEAVSRPSMRFVPIKTAEQQGAAGLHKVRDLLTKQRTMLINALRGHMAEFGIVVAQGPQHVKELLAALADPQEKRIPELIRGPLVHLAEAMGNLERRIAMLDKQIVKWTRDNPTCRHLMTAPGYGPILSSAMAAMVPDPSVFRSGRDFAASLGIVPRQTGTGGKVLLGPISKRGNGYLRRLLVNGAMAVLTSKRARQDPWLAKLLAIKPRKVVAVALANKMARLGWALMVRQEDFRTAPAAA

SEQ ID NO: 282716 - protein, 392 aa, unidentified
MTYFIGLDLSKYKHDCFIMNENGEVIRNSFSFNNNKEGFNTLLNVLEDLDPIQEKRIGFESTGHYGSNLKIFLETNGYSFMEFNPLLVSRFFKSETLRRTKTDKVDAQKIALYLASRDYSPNPNSSYHLQCLKSLTRLRESIVDERSLQLVRMTNVMDKMFPEFKPLFDSQGFKSATALYLLENYLTPSKMANMSRSSYDKMRSKLRRTISYAKFCKIKQLAKDTIGNENEILSFELKICLELFKELDKKADELDSKILSELSLLKSHIPSIKGIGDILAAGILAEYESIDRFDNPGQLAAFAGIEPSENQSGTHDGGGKMVKHGSPHLRRHLIQAANNMLVHNPILYEYYLKKRNEGKTHNVAISHVARRLTRIIFYLEKNNADFDIEKMR

SEQ ID NO: 282717 - protein, 391 aa, unidentified
MIYIGIDVAKDKHDCFITNSDSEVLFKAFTIANNLDGFNDLYQKIESVMDDVTKVKVGLEATGHYSYNLLGYLIDKGLPTYVINPLHTNLYRKSLSLRQTKTDKVDARTIASMLMSDVNLKSYSDTFYHNEELKSLTRYRFDKVKERAKLKTSVSRLVCILFPELEKLVPTLHMASVYALLSEFPSAKHVATAHLTRLTNLLSESSKGRYGKDTAITFRDSARASIGSNMPAKSLELKHTIKLIQELDSEIDEIENEIKIIMDEINSPILSIPGINYRMGAMIIAEIGDFNRFDSPDKILAYAGFSPSTYQSGQLDGAYAHMEKRGSRYLRYALYNATKYVCHWDPTFAAYLAKKRAEGKHYNVAISHAVKKLVRVIYHLEKTKQQYIKAA

SEQ ID NO: 282718 - protein, 375 aa, unidentified
MTKPITWVGIDDDKKNLTVAVVRGSKDRDPETRRIPNEDGAMQWWVRKLVRAADGGEIRMCYEAGPNGFALMRRLEAMGPVVVEVMAPSLTPRRSDQRVKTDPIDARKLALLYRAGELERIAVPNEEAEAARDLVRTYHRVGIEATRKRHHILKFLIRRGRIYREGSHWTQKHRAWLQTQCFDSWKDTVAFDELRTGLLELESRRARLARAMEQLAQEDGYALEMGILRCFRGIDTAMALTLITEIFDIERFVHPRTLMSYVGLTPGLYQSADRETRTGITKTGSRYARWALGQVAMKYRHQPTVGLTLRRRREGQPAWAIEIADRAAQRLHRRYWSLVMRGLPAGKARMAVARELTAFVWEALTEARHRRSRAA

SEQ ID NO: 282719 - protein, 418 aa, unidentified
MAMKIVRFNCCGMDVHKNLVVATIGITDRKTNITEYFQRSFSTLNSDLYRLKDWLKSHHCSDVCMESTGKYWIPIFNILEDEINVHLTHPKYVKAIKGKKTDKKDSKWICDLFKHDLIKFSFIPPREIRELREIARYRYKLVCMRSSERNRYQNCMTVSNIGLASVISDPFGKTASNIMKEVMKSNVIDDDKILKLVHRNCKNKDKILDSLHGYRIESDQRFKMEKSLDHMEYLDQLIDSCEVELIKRAYPLRRSFQHITQIKGISALSAILIISEIGIDMSQFESDKQLVSWAGLSPANNESAGKKKSVRISKAGQYLKPLLVQCALSAIKDKASYFGRKYSNIKKRRGHKKAIIAIARMMLVSIYHMILTGEEFQPCDYESFMDPKPNANPSLTVEKALNFLKQSGIDISSIPINL

SEQ ID NO: 282720 - protein, 410 aa, unidentified
MEGTIFIGIDVSQASNTVHVMDSSGDKLWRRTYENSLSGSRELVGHLLETRQTHHAAFFNIGLEATGCYGDLVSMFLRETDLISSTQKSVRVLNPKQVNRFKKSYSELPKTDDVDAFVIADSLRFGRIGLKGTVMEDKYLALQKLTRSRYQVAKDLGREKNRYLQTLFLKFSSMAQDSAFSNNFGETAMDLVNEFESVDQIAYAPLEELAEFLNRHGKSHFVDPDALAQEIRKAARSSYRLPKAIQDSVNQVLGMQTQTIRFYAKQLKDYDKLISTQMSGIPNTLVSVKGIGPVYAAGILAEIGDVTRFKDQAALANYAGLSWSRHQSGKFEAEQTHMIHSGNRYLRYYLVEATNHVRKHDPELQRFYTRKYNETPKSKGKRALVLTARKFVRVVYALLRDNRIYIPRED

SEQ ID NO: 282721 - protein, 379 aa, unidentified
MGWLPPSPDGIAMCQDVVLKEPRNGEDGDMNDTMIGVDLAKSVFQLHGASMTGQLKYRKKLTRSQFRKFMADQPPSVVVMEACGSAHYWTREMVRLGHDVKLIAPQYVLPFVKRQKNDAADAEAIVIAAQRPEMRFVEPKSQEQQARAVLFRARERLVHQRTELVNALRAVLYEFGHAVPKGIGNIKRFDVILEDPNCDLPALVRDECGDLVKQISEQTIRIDAKTKTAKEMATTADTARRLQTMPGVGPLTALAVEAFAPAMQSFKRGRDFAAWLGLVPRQHSSGGKERLGRVSKAGQTDIRRLLIIGAMSRLNWMGRKTIAEGSWLARMLDRKPRMLVAIALANKMARGIWAMLTKNEDYRDPVPAVAARSTCAAAT

SEQ ID NO: 282722 - protein, 388 aa, unidentified
MEASINKDSIIFIGLDTQKSFIQVTVLQEHRGANPLHLGRIKSNKSALIKLAKQLQSKYPKATLHFVYEAGPCGYWTYRLMTSLGHCCYVVAPSLIPKKPGDRVKTDKRDAAKLAKLLKAEELTPIYVPEAEDEAIRDLSRARETAMKDLKDAKFQLKGFLLRNNIQATVNDNWSKKHLRWLTDLILPHHSQQIVLQEMIITINERMQRLQRLDNELLHQVKNWRYYPVVKAIQAMRGVRLLVALGTIAELGDLRRFDHPRKLMAYLGLVPTENSSGGKTRRGSLTKCGNSRARRLLVEGAHTYKHKANISVELQLRQEGLPKEIVDIAWLAQQRLCRRYQRLLQKGKHRNVVVVAIAREMIAYIWAITREVVISDVDPKTRIARLPA

SEQ ID NO: 282723 - protein, 417 aa, unidentified
MPLNIVGALFFVGIDWASLIHAVCVQDANGRQVAAFTVEHTAAGLAGLMRRLARIGDPADMPVGIERPDGRLVDALLEAGHPVVPVKPNAIKTWRDSEVLSGAKSDAGDAEVIAEYLRLRQHRLQLATPYTAEMNALRTVTRTRGDLVDMRVATTNQLSALLDTHWPGAKAIFADVESPIALEFLTRYPTARHAQHLGAKRLAAFCVKHSYCGRRTGEQLLARLRAAPAGTTDETLCEAVRDAVTALVTVLRAVGVALKDLNRSVVATLAEHPDAAIFTSLPRSGQINAAQILAEWGDCRQAYDNPDAVAALAGVTPVTKQSGKHRAVHFRWACNKRFRVAITTFADNSRHDSAWADQVYTAARTRGLDHPHAVRILARAWIRIIWRCWNDQTPYDPGRHGNAVRLTQPGQNELLAA

SEQ ID NO: 282724 - protein, 309 aa, unidentified
MDNSVGIDVSKDRLDVAFAASGTAFFVENSHAGIDDLVERLKEVHADIVALEATGGFETLAVARLSAAGFAVIVVNPAQVRAYANAIGRRAKTDAVDAAVIAAFVSATKPQIRPLRDQQTQLLSALVDRRRQIVQMIVAEENRLRMALEKSTRKSIQRLLAALRREVDSIDAEMDDHIRKSPVWRVREALLTSVPGVGPATARTLLAEMPELGSLDRRQIASLAGLAPWTRQSGKWKGKSFIGGGRGKVRAVLFMAALVAARHNPVLKAFRDRLVEAGKPKILATVATMRKLLTMLNAIIRDNKPWQNA

SEQ ID NO: 282725 - protein, 416 aa, unidentified
MWSCCLASLFFVVQSCGRAVLSSYVCISVKLDTQQRKVKRVKNKAVVCHLSLRPFAMLVSLPFYLKLEQIIRPLSLHLGLISKQVEYFSYKTFIMCKIIGIDISKQTFDVGFMKESIWYHFVFKNNEKGFSKLLKKVEAEDWIVMEASGPYYFQLALFFHKENKNVCVLNPLIIRRYSQTRLYRAKTDKKDAQTIAEYGAQYDLKKWKPETEDIIEIKQLYTALELINKEIHQSERQLESFVSGGALSKELASALRSIIKFLKVKSNKLERQIECKAEQHYKSTLERLKSIPGIGTKTAIMLTVITNDFDKFENHKQLIAYVGFSPRLYQSGTSVRGKGHICKMGKSQIRKLMYLCSWSAKRCNPDCIKMYNRLKEKGKPERVIKVALANKLLKQAFSIVKNQTYYSENFMEKACF

SEQ ID NO: 282726 - protein, 365 aa, unidentified
MLIIGCDYHPGFQQIAFVDTETGELGERRLMHRAEAEQFYRELKKQNVRVGMEASGHARWFERLLHELQFELWIGDAAEIRTKRVRKQKTDRQDAQLILRLLLEDRFPRIWVPSWENRDLRQLLWHRQRMVQTRTRIMNQLQAVALNEGLRCKKSLWRERGRQQLESFQLAPWASRRRHDLLELLDRLNPSIAELSQAIEQEVESCPLAQRLMTHPGVGPLTALAFVLIIGKAERFQCGKQITSYLGLAPLEESSGNRRRLGHITKQGSSILRFLLVEAAQVTVRSLPEWRSKYSHLMMRRGRKIAKVAMARRLAVRLYWMMRQGWDYQQWVKFGSQGRKPMLSRCKTLIGQGRFHVLSRAGGPE

SEQ ID NO: 282727 - protein, 367 aa, unidentified
MIINKVAQNVETIIAVDTAKNSFQVLVVNQKTGKKRNVKVQRSKFVDHILKQGPCLIFMESCSASQYWARLFESHGFTVKLIAAQHVKAFLRNKRVKNDERDAEAIYTCGIQPDTKFVKIKTEEEQTVALLHTLRKAAVSERVEISNRIRGILAEFGIITAKGRGNFNSDIQELFEKSEQIHNVNLKYAISKLFEDYHRFEDREKELSAQINSLNKDNELVQIAMTCPGVGELTASALVAEVGDASQFKSGREMAAWTGVVPSQHSTGGRSTLGSITKTGNKYLRALLSQCACTVIKTAEHRLEKECDTHLDRFAIRLKAQGKPAKKVMIAVANKILRILWAILTERKPFENKVNKEEPISDAMKLC

SEQ ID NO: 282728 - protein, 346 aa, unidentified
MLIIGCDFHPGFQQVAICDTSTGEMRRGRLEHVEEARQFYRGLRDEVRVGVEACGSTQWFEQMLAELGHELWLGDAARIRAMCVRQQKTNQRDADHILELLQSGRFPRLWVPSPGERDVRQLLADRHHRVGMRTQVKNQLQAIALNHGVQRKRKLWTKQGRAALQSLPLMRFAAQRREQLLAKLDRLDEEIAELDQQVEEQARQRPEAQRLRTHPGVGPNTALAFVLTIGEVSRFRRARQVASYLGLIPREHSSGSKQRLGHISKQGSAFMRFLLGEAGQSAVKGDAELRRFYRRLLVRVGRSKAKVAVARKLAVRLYWMLRKDWDYAQLCQSLVQASPSHPVVRK

SEQ ID NO: 282729 - protein, 393 aa, unidentified
MLKISVSCLAHRGDIMRTDIEERVLAVSLELAAAKWKVALHDGHREQSAVHTVAQPQASARLQAVLDLIEQHKKKWSLPAGVRVVVSYEAGQDGFWICRALQAHGIKCYVIDPASIPVERHKRRAKTDRLDVIKLVINLRAWLRGERDRMHVVHAPSPQDEASRHLMRDRGQLQKEVLQHRDRMRKLLATFGCWDEVDHKHFAGRLARDEVKCHDGAPLPPEMRERLLRECERLALAQQQLAALEKTRQASLPAPARKRRDDLARLKGIGEVGASRLALELFWRDFSNRRQVGACTGLVPQPYDSGESQVDQGISKQGNRRVRALLVEMAWCWLRHQPDSALTRWFNARTQSTGPNRRARRIAIVAVARRLAIALWRYLKDGEIPEGARLKSA

SEQ ID NO: 282730 - protein, 307 aa, unidentified
MSGIGIDVCKQFLDAAVFQGQARQFSNTASGHRKLVDWLNTLPVRQVVLEATGGYELAALDALHHAALPVARVNAQRARNLANGLGLAKTDRLDAAMLACMAEKMELHRYVPLEPWQRHLGEHVRARRQLIDLLKTAKQQLLQVADRPLRKLLQANVNQLVRSVARLDKLIAGQLETLLIEHPHLAALKTLKGGGPVLLAVLACRLPELGTLSGKQISRLVGVAPLSRDSGTMRGKRGIGGGRADIRQVLYMAATSSARHEPRLRDFYRSLRARGKEGKVALVAVMRKMLVILNARVRDERAAMQPA

SEQ ID NO: 282731 - protein, 366 aa, unidentified
MKKVSTIATKARGKIFEQGLTVGLDLGDRSSWYCGVDESGAVVLEQKVSTTAKALGEVFGGMPRSRVALETGMHSPWVSRLLSGLGHEVIVAHARNVRLIGESRKKDDRLDAQTLARLARIDPELLSPVKHRSAKAQADLMSIRARAGLVRARTALVNTARGLAKSYGEQLRGCNVRNMNPEKAGKLSPELQAALEPLLVASAALSEQIAEYNRRIEQLAQQSYPQVALLKQIKGVGTLIALTFLLTLEDPHRFQKSRDVGCYLGLQPGRRNSGQSEPQMHISKEGDPYLRTLLVQGAQHILGPFGVDCDLRRWGLKLAERGGRSGKRRAIIATARKLAVLLHHLWVSGEVYEPLHNSNRTMMAAA

SEQ ID NO: 282732 - protein, 400 aa, unidentified
MKFVGWDWASTSHDVTVLDDQGRVLERWALRHTEQALAETLVRLARHGQPAEVPVIIERSAGLVVDRLLAAGHPVVPVHPTAFHAARPRWGAAGAKSDPGDSYKLADYLRTDGHRLRRLHPLDPGLRELQALVRLREDHVRARTAASNQLGALLDAYWPGPKAMFCKLASDIALAFLSDYPTPQAAARLGQARLAGFCRRHAYRGGKSPAELLARLRTAPVPPTGLAPAVLAQLVTAQVQLLRSLQATIGELEAAIKQRVAQHPRAELLSGLPGVGTINLAQLLAEVGPILDRVSTAEQAAAECGAAPVTKASGKTSGVYFRWAANPRARTALTAFAHNARMQSPWAGRLYADARARGKRNPHATRIVARAWLRVIWACWHTGTPYDPRAHLAEQRLAAA

SEQ ID NO: 282733 - protein, 345 aa, unidentified
MTIVEAGRPITGGVDTHRDVHVAAALDPLGGLLGVESFETTPIGYRSLVSWLSSFGHLTRVGVEGTGAYGAGLARFLRRAGVEVIEVDRPNRQARRQQGKSDPADAVEAARAVLSGRASGVAKTRDGQVEAIRTLLVAKRSARDARIRALNQIRHLSFTGPDELRARLKGLSSAAVAAKAARLRARRGDPVVFATTVSLATLGRRVLALDDEMTRIDELLGELVATSAPNLLEIYGVGVDTAAVLLVTAGDNPERLRSEAAFAHLCGVSPVPASSGKVQRNRLNRGGDRQANQALWRIVMTRMSFDPRTRAYVDRRTKEGRSKREVIRILKRYVVREVYRQLPRA

SEQ ID NO: 282734 - protein, 337 aa, unidentified
MSYLGVDLHTNSFTVCYRTYRGKQRIGTFDIRRINQFRKTLRKADKVAVEATGNTAWFVERIRDRVAKVIVVDPHQFEVIRRSVKKTDKHDARTLAYFLSKDMLPEARMKSKENAQLHSLAGTRDKLVKQRTALVNKIYNVLNRHGLTWRKETLTTEKGLKSIMAFDWEPIVRVELEVLVEQIRSLTRSIKKLDERISQEGKKLDGHKNLTSIKGIGERSATVLLSVIGDVNDFADENKLAAYFGIVPRVSDSNETVRHGRITKNGSKIGRTTLVQCTLVAKRYSPYLCKYYERIKRHRGSGKAIIATARKFLGIIYQTLKNDWIFEDFPSFVIANT

SEQ ID NO: 282735 - protein, 348 aa, unidentified
MFNSNVIAIDLAKSSFHVCLLNKNGKVTIDRSFSRTRLQEWLVKQPEAVVAIEACGSAHYWARFVSSLGHVPMLLPPKLVTPFRKGHKTDKNDALAIAIAAKQPSVKTAAVKTIEQQGLQGIERMRQHYSDAITSTGNLLRGLLYEFGQTIPRGSSALKREIPLILEDAENNVPDAFRFQANEVFQFYLSVEKSLAETEKLLASLINQQQECHSLMALEGVGPVNALGLSLALGIQGSSFKNGREAAACIGVTPQQYSTGGVVSLGGIGRNRGNKRLRSTLIQGALSVAKVVMKREPRNPKESWLKALIARCGIKRAAVALANKNIRTAWAMLKYNKPYIKPEMCTDV

SEQ ID NO: 282736 - protein, 347 aa, unidentified
MIAIGADVHKRMCTLAMQYEDGRLQMLPSMKNTRANWLELVQELPAEAEVALEVSTSGHFVMSVLEEAGWRDRAHWVHTPGVDTLRKQKYDRLDARRLARKLSVAHRDPLPEAWFPPAPIRELRLRARHRCRLTGQRVMIRNRVRSLLQIYGVEAVGNPLSATGRQAVKEKLPAAAQEYLQSLAEIDEVLQQERARSDSSLKAYAANFPEIARLRSLPGIGPLLGALIWSELGDLKRFASADAWVNYTGLVPSLYESGEVTRQGSITRQGPVWLRWALVAAANGAVRGRNPIAQRYRSLRRRKAVLVAKVAIARTLARSVYGVLKHGQDFQAERWGRRIGNELEQQA

SEQ ID NO: 282737 - protein, 350 aa, unidentified
MIVGIDVHKHTHAAALVDERGSQLGTVTVPNSSKGYRQLIDWLVDHEAADAVIGVESPGSYGRCLVAALAGAGFEVLQVPAWRTHRERHRRGPGKTDTGDALSVAKVVLTDRDDLGPAQEPELVRALGMLELQRRRFVRDRTQAIQRLRSDWTQLDPAAEAGVVRCDRQRVLAKLKRIKLGESLAERTAARCIRELARDVEDLNKRIAGLDTEIAELLAEHGNPLEELQGVGTNLAATIIAQAGDVRRFRDAAAFARFCGAAPIPCGSGQTAGRHRLHRGGNRQLNAALYRIAIVQQRHHPQAKTYLARKIAEGKTPREARRALKRHLANVLYRHLTTWANTTPAMNLLT

SEQ ID NO: 282738 - protein, 347 aa, unidentified
MNFYTLPHKHYCGVDLHSRTMYLCIVGRDGAVLLHRNLPCNRDRFLLAIAPYREDLVVAVECVYSWYWLADLCAKEGIPFVLGHALYMRLIHGAKAKSDRVDSEKTAVLLRGGLMPRAYAYPADMRATRDLMRRRLLFVRQRGSLLAHIQITHHQYNVDPPGKRITYRSNREGLGEGFEDSSVRHSIAADLALADHYEVIIGELELAVLRQARIHDPNALALLTSVPGIGKVLALTILYEIHDISRFPSVRDFASYSRLVKCERRSAGKSLGTGGNKIGNAYLMWAFSEAAVLFIAKSEQRRTVLNRLERKYGKPKALSVLAHKLGRAVYYMLARKQAFDPQRFATS

SEQ ID NO: 282739 - protein, 404 aa, unidentified
MLFVGVDWAEDHHDVCVMDAAGEVLGKRRVGHSVRGIGELHELVSVHAEEDETVAVGIEIDRGLVVSALVGAGYDVYAVNPMAASRYRDRHGVSGAKPDPGDAKVLADLVRTDRHNHRVVGGDTEQVDAIRVLARSHQSAIWSRVRQVNALRSALREFYPAALEAFGTDLASGDALAVLAIAPTPELGRTLSRAKITSALRRGGRQRNIEAKAQAIQGALRDEYLSTGPVLSGAYGIITKSSVEVIGALNHEIAVLEQALGEHFETHPAAKIVLSLPGLGTTLGGRVLGEFGDDPNRYSDGKSRKNYAGTSPITKASGKSHIVLARFARNHRLADALDQWAFCSLQQSPGARTYYDQLRDRGKTHRQALRQLANRWVGILHGCLDSYTPYDESVAWRSVKRAAA

SEQ ID NO: 282740 - protein, 393 aa, unidentified
MSLDHHFAEPTAIRTNLGAIFVSLELSRSTWLITSLSPGGGEKMSKHGLSAGNMAALLARLSELKQKAFARTGQSFQVVVIQEAGLDGFWIHRVLQSEGVESHVVDAASIAISRRRRRAKTDRVDGEALVRALLAYKRGEPRVCAMVRTPTPEEEDRRRLCRERKTLTNERVQHVNRIKGLLFCQGISDYEPLRRNRRQRLDELKTGGGRPLPPHLKAQITRELDRLELLLGQIEAVEIERDALLSAMKPDGMNADAVRSPPAMLINLNGIGPEIAAVLWSEGLYRSFANRKQVAAYAGLAPTPWQSGSVAREQGVSKAGNPRLRTTLLQLAWLWLRHQPQSALARWFHERVRRNGGRLRKSTIVALARKLLVALWKYVTAGVVIDGAVVRAA

SEQ ID NO: 282741 - protein, 461 aa, unidentified
MLPHETLYVGVDVGKSRHVAGFLSRTLLQRHERFEGCPTLVFEQSREGFRTLVDRMREYVPLEQATVLLEHTGHYHKNLEQYLLEWDITVYRIHVQERPKGMTKTDKRDALGLANRLYTQLELGAQVEEKMQLVRRTARPTQAALQLRGFMQHRYELSHQRTQLRNKLTAICDELFPEFTQIFHDPNLEVALAFRETFPTPHDIATASLSALRETRVKYFPSEANLLRLQQLAEKTIGINNKDRLRGMKLEQELLIKELRLVQGHLERLDTEITDIVRTSREGQILLSMPPIGPVQAATIIATIGHIDNFEKASELKSYFGWAPTRHQTGVTFDRTKLSHRGVRPVKQMLFLMAARATTLDGEWARIYRRLLPRMATYDERVKEYRGKKKVLGRIAGQMVSMIFALLKTDQETLSRVPSGEEPPPPMLYDPEIHRKHQEGSYRSLKPGTQPRKILQLPSKS

SEQ ID NO: 282742 - protein, 416 aa, unidentified
MFYLGIDWASMSHAVCITDQDGAVVKQCKIDDDYDGYLTLLECLRNLPAETREILFSIEDKNLKLVDFLLSHSFSGFFVPPASMESYRKRYSQNHAKSDASDAFILSDLLRTDRNNLKPIVKDSAFIRELSALLKDRDAFVKDCSRLTLRLISTLKEYYPEFLKLFKDPARDTALDFLLKFPTFQDASKLSFPRLYKFCTKRHFCQTESIKKIFSILKAKPTPVDEVVMKTKSIKAVATAEQIKELLVVILSYEEKISALFNSHPDAKIFSSLPRSGTITAAGLLTIFGDNKDKFASSDEVQMAVGTAPVTIQSGKFRIVKFRHGCNHFHRSVLHYFSMNSTRESIWAKNYLQTKLNQGKSFPCALRCLGYRWNRIIFSMWKNNTVYDENVLLANFAKQSIAADLSKNLKFFPAAA

SEQ ID NO: 282743 - protein, 310 aa, unidentified
MNDTVGIDISKATLDAFRMSDGRREQFSNDAAGLKKLKKWIGKAPTRVIYEPTGPYHRDLEQALSATNHGLVKVNPTRARRFAQATGQTAKTDRVDAELLARMGAVLNLEASPARSDAVMEIKELHVARIGLIKDRTACRNRLGTARCKVIISQLNARYRQIKAQIAQIDAELVRYIKADPELARRYEILLSIPGIGQVAAIALIVEMPELGSMNAKEVASLAGLAPITRQSGMWKGKARISGGRQIIRTMLFMPALIATKFNAPLRQIHEALIGAGKPWKVSNTAVMRKLVILANALVRDDRIWAESRA

SEQ ID NO: 282744 - protein, 377 aa, unidentified
MKDTIFDHYIAIDWSIENMAIARMTKKSNRIILIDVPSDIAEMKIYLKRLKGSKILMVEETTTSQWLYTELRDYVDRMVVCDPYRNKLLSDGPKTDKIDATKLVHLLKAGLIKEVYHSTDKFLYLRRFVSGYEDLVKAGIRLKNQRYSFLRACGKRGFERAGMKLDAEDDQFVLDCMDRQIETQKQEKEAYEKEFGRLSRDYPEIRHQKSLPGIGPIHAVKIVARIVTPYRFADKGNFLSYLGLIKLEKISGGRSYGRKKSRYCRQLKSAYKTSTWAAIGGNNPINDYYEYLIREKRYPEHNARHKACRRLAILSLGVFKSGKKYQPYRRDHVEGKKRSHIRPVSSVFKESHQMWITVLQARGESSMRGRNRSILLG

SEQ ID NO: 282745 - protein, 298 aa, unidentified
MQGKVSSERTAMATVYVGIDVCKEWLDIHLHPLGRSFRVTNDTAGLRRLKRELDALDQIPRSALHIVMEATGKWHRAVQRSLHADGFYVSVVDPLRARLFAKACGFLAKTDRLDARLLAIMGEALKPAQTPPQDQALEALQELVNARSAANGERTALSNRMKTAVTAFLRKELTRRLAALDTHIARLDAEIERSIGAEPEMRRRLDILISIPGIGAVTAASLIAGLCELGACSGKQAAMLAGLAPLACESGERAGHRAIRGGRPAPRNAILHGRPVRLPSQPGPRALRRKTEEGRKTQ

SEQ ID NO: 282746 - protein, 300 aa, unidentified
MDVSKDKLDAYCHEWGAPRVFANTAEGLAQLHSQLPDGTHIVCEASGGYEKPLLEDAWARGCAVSRVNPARVRYYAKAMGLQAKTDPIDAELITLFAEAKAPAPADAPTRVQRELCAAVRRRTRVACEIAAQKTALGREADAWVKRDIRATLTFLRKRSDKLEEHIDRLIASCAELAGKRKLMMGVKGVGKVSSAIVLGECRELGQITDAQAASLAGLAPFNRDSGTKRGARSVMGGRGALRRALYMPAMCASRHNPILREFYTRLIEKGKPHHVAITAVMRKLICLLNRLLADPDFELS

SEQ ID NO: 282747 - protein, 360 aa, unidentified
MRSKESKLDFSGQVFYVGIDVHKKNWQVSILSNGRKHKSMSQPPSAKVLADYLHRMFPCGTYLAVYEAGFSGFTACRELNALGVHCKMVHPMDIPTSHKEKQQKSDRIDSRKLARLLQDDYFTGIDIPGIEVEIWRSLLRQRFRVVRDLARTKSRVKSLLFQFGIEIPDYINSSSSRHWSGSYLNWLRSLNPEENCLQTVIGNYISMGESLREQLLKINRQIRQLSETEAFRQNRDLLLGIPGIGMTTAMVLLCELYDIRRFKTLDTLCSFVGLVPRMYNSGDKERTGRMVKRGRKQLKIMLIEAAWEAVSADPALMLYFNNLSKRMHKNKAIIRIARRLLSRIRYVLIHQQEYVTGITG

SEQ ID NO: 282748 - protein, 352 aa, unidentified
MVADELDYVVGVDTHRDEHTLALVEAATGAVLAQQTVASNGRGYAQALRFAQQQVDAARVWAVEGAGHYGAGLARYLSERGETVLEVGRSPRGERRLSGKDDQLDAVRAARAALRSEPLPRPRSGERREALRLLLVARRSAVDVRREALVQLRSVIVTAPERLRQELRGLPVQRLLDRCSRLRRSTTPTPDQVAARVVLRTLARRIEAATVEADELEREILVHVRALAPELLDEAGVGPIVAAQLIVAWSHRGRLRSEAAFARLAGVAPLPASSGQTSRHRLSRGGDRQLNWALHTIVLHRRQHDPATRDYIARRIAEGKSRRDATGCSSATSPTTSTGYCRTRSCCWLDRS

SEQ ID NO: 282749 - protein, 339 aa, unidentified
MELYVGMDLHSNNTYVGILDKETQRKVYHKRLPNELPKIVYELEPFRKDIRAITVESTFNWYWLVDGLMDSGYEVCLANPAANQQYKGLKHSNDKSDAFWLAHMLSLGVLKKGYIYPKEERPLRDLFRKRTFFVHQRTSNILSLQGLINRSLGRRINSNSIKTLTQEKIDELFKDDHSRLIATSGVNTIKSLDREIKSIEKAVLEKAKLRKEFENLLSVPGIGKVLALTIMYEVGDISRFEKVGNFSSYSRCISGKWTSNDKVKGKGNSKNGNKHLAWAFVEAANIARRYNKKLNAFYQRKESSKNNLVATKALAHKLSRACYYIMKDQVPYKEELLVS

SEQ ID NO: 282750 - protein, 375 aa, unidentified
MIYVGIDIAKLNHFASAISSDGEELIKPFKFTNDNDGFQLLISKLAPLDKDSLIIGLESTAHYGDNLVRYLVAKNCKVCVLNPIKTSTMRKNNIRKTKTDKVDTYIICKTLMMQESLRFVTFYDLDLMDLKARGRFRQKTIKQRTRLKIQLTSYVDEIFPKLQYFFKSGLHQKSVYALLKEAPTPEAIASMHMTHLAHLLKVNSHGRFDKEMAQQLRVLAQKSVGASDSSLSIQVTHTIQQIELLDSQLERVEAEMTGIMKFNDSVIMTIPGIGYINGGMILGEIGDIHRFSSPNKLLAYAGLDPSVYQSGNFQAKKTRMSKRGSKVLRYALVNTAHNIVKNNATFKAYYDAKMAEGRTHYNALGHCAGKLVRII

SEQ ID NO: 282751 - protein, 415 aa, unidentified
MGYKVAGIDIHKKVLMVVVMLIQAGGLVEKIERRRFGTTTPELEKLAAWLQALGVQEAVMESTAQYWKPVWGALEGKIPTLNLAQAFSNRARRGRKDDFRDAERLVRRLVAGELVLSFVPDPEQRNLRTMTRMQVHLTYDRGRLHNQVECLLEEMRIKLSSVLSDLFGVTGRHILGAMAKGETDPRELAAWAGNRLQCTAKELVAALTGHVQPMHQRLLGLYLERLQLIDQQIDELQHMIAEALQSEQDAVQRLAEVPGFGADSAQQMIAEVGPQAATFPSAGEMSSWVGTCPGQNQSAEENHSSRSAKGNRYARRVLTEAANAAVKTKGSHWQVVFRRLLPRLGYQQAAWAVAHRLCRVVWKILHDKVRYVEQGVNRDPKARAHRARTLARALRQLGYNVELTPLTPAPAPTSP

SEQ ID NO: 282752 - protein, 347 aa, unidentified
MQVTTIGLDIAKNVYQVHAIDTAEKVVVRKQLRRSQVVEFFKALPACLVGMEACATAHYWARELTKLGHLVRLMPAKDVKAYVKRNKNDAADAEAICEAVRRPTMRFVQVKSAEQQGRLMLHRTRDLLMRQRTQLINALRAHLAELGIVAAQGNAGLKELLKIIAGERDARLPVDAHASLVVLAAGLHAVQTMIGSIDKRIMIEHRSNEASKRLRSIPGIGIVGASAIVATVADPMAFRSGRDFAAWIGLVPRQDSTGGKQKLGPISKQGDRYVRRILVVGAHAVLRYAKQNPEKYPWLTQLLARRPFKVVAVALANKMARVAWALLAKGGTYYRARALVTVVTAAA

SEQ ID NO: 282753 - protein, 452 aa, unidentified
MNEPKRDLSMINADAAGIDLGAEYHWVSIPEDRSPTCVRRFACFTADLYEMAKWLHECGIKTVAMEATGVYWIPVFQILETEGFEVKLVNARHVKTVPGRKSDVLDCQWLRQLHSYGLLAGSFRPNDQVCVLRSYIRQRDTLIKNASAHIQRMQKALTQMNVQLHRVISDISGTTGLAIIRAIVAGERDLHKLAALKDCRIHASTNEIAAALTGDYRTELVFVLHQELQLYEMFQAQITACDIQIEQCLNQFADQVDVSLSPLPPSKRRGKKQPGNAPNFDLRMHLYRISGIDFTQIDGFGVLTVLTLLSELGLDPSRFPTAKHFASWLGLSPGSRITGGKRKSSQTRRVVNRVANALRMAAQTLSRSHSALGAFYRRMQARMGAPKAITATAHKLARIFYQLWTSGQSYVDPGINAFEQQHHERVVKNLRKKAQAIGFDLVPHSGSPECVS

SEQ ID NO: 282754 - protein, 326 aa, unidentified
MNIIGIDVSKAKLDCARVDVENTGKIKNKVFPNTPKAHLDLVAWATKLCQEPVESIHFVMEATGIYHEALAYALHETGAKVSVVNPAQIRDYAKSLGVRTKTDKKDSVVITRFGLTQAPRLWQPEPSEVRTLKALISRLEAVVQDVIREQNRLEKAEISRVSSDVTYSIETVLSKLTTEKKRLEDLIDEHINNHPQLKQDKELLESIPGIGPVVSRMMLSVIRSRTFESAPQCAAFLGLVPVQHESGSSVRGRAHLSKAGNATIRAKLYMAAIVSIQYNPDILAQYNRLLKRGKTKMSALGAAMRKLVHICFGVLKHQQPYQPQRV

SEQ ID NO: 282755 - protein, 403 aa, unidentified
MNNVAGIDVSKGKSMVSVLRPFGEVVAKPFSVGHTGSELKELADYLKSLDGETRVVMEHTGRYYEPVARFLHEEGVFVSAVNPKLIKDYGNNTLRKVKTDKADSRKIARYGIDNWAELRQHTPMDTIRMQLKTLNRQQSLYTKTKTMMKNNLIALLDQTYPGVNALFDSPVREDGSQKWVDFATTFWHVDCVRNMSLTAFAERYRKWCKRHGYNFRQSKAVEVHTGAQDLIAMLPKDALTKTMVRQAIDALNAVSASLERLKAEMQALAAQLPEYTVVMAMHGVGDSLGPQLMAELGDVTRFTHRNAITAFAGVDPGADQSGTHEAKSTRVSKSGPPELRRALFLVMDCLLKTQPQDDPVYRFMDKKRAEGKPYLVYMTAGANKFLRIYYGRVKEYLASLEGN

SEQ ID NO: 282756 - protein, 347 aa, unidentified
MRFYTRTHRHYCGIDLHARFMYVCILNQEGEVLLHRNLRCDPEDFLRAIAPYREDLVVAVECIFTWYWVADLCSREGIAFVLGHALYMRAIHGAKAKNDRIDSRKMAGLLRGGLMPQSYVYPAEMRATRDLMRRRLHFVRHRGQLLAHIQNTHHQYNRPTPGKRISYRSNREGIGDGFEDVSVRESLAADLALIDHYEVIIQDLEAAVVRRARIHDPHSFQLLRSIPGTGKILALTILYEIHDIRRFKKVGEFASYSRLVKCQKASAGKIQGSSGAKIGNAHLKWAFSEAAVLFLAKCPEGKKLFARIERKHGKGKAMSILAHRLGRAIYFMLARNQAFDLQRFLRS

SEQ ID NO: 282757 - protein, 377 aa, unidentified
MHSENIAAYVGLDVHKETLAVAIAAPERLGEVRYYGTINNEAQAVRRLFQKLQGLYGNILSCYEAGPCDFGLYHQLTAMNIKCQVIAPSRIPKSPTDRIKNDHRDAISLARLLRAGELTPVWIPDLTHEAMRDLIRARAAAKRDSRVARQRILSMLLRTDKHYAGKHWTGKHRTWLANQSFSQPSQQIAFQHYCQSLEQIEDRILQLDQEISRLLPEWSLCNLVCQLQALKGVGQLIAITLVAELGDFSRFSNPKQLMAFLGLVPGEYSSGNSIRPRGITKVGNSELRRLLYEAAWSYRTPAKVGAWLIYYRPDSVTQYSKDIAWKAQQRLCSRYRSLTAKGKKSQVAITAVARELTGFMWDIALAAQSSFSQQKQN

SEQ ID NO: 282758 - protein, 368 aa, unidentified
MIVIGTDTHKRTHTCGAVDAFTAAARGELTAPARPGSFGMLLRWARALDAERVWAIEDCRHVSGAFERFLIARGERIVRVAPKHMAGARRSSRERGKSDSIDAFSVARAALKEGIENLPGAHLDGAALDIRLLVDHREDLIAARTADQQRLRWHLHDLWPELEIPAGALDTSKWLGKISGRLARAQQTTRVRVARELVRQITARTSRIRELQAELAALVESYAPQLLAERGCGPLTAAKLIGEIAGADRFATDAKLARTGGAAPIPASSGNTSRHRLDRGGNRQLNCALHRLAINKGKWDPDTAAYLARKQTDGKSRKEALRCLKRHLARRVWKLLQTPAPAAAPTAAPATTPPTIAASAPTPMPCLT

SEQ ID NO: 282759 - protein, 370 aa, unidentified
MEETITYVVLDVHKKSIAVAVADGGIGGEVRYLGVIDNTTKALDRLIARLERPGRVLRFCYEAGPCGYGVYRHLQGREYTCRVVAPSLIPRRPGERVKTDRRDAAMLARLLRAGELTAVWVPDADHEAMRDLVRTRAAAMRARRRARQQLSGFLLRHGRVRSGKNWTLAHRRWLSTVRFDHPAQQIVLQDLIDAVDDADARCARLVAQIVELVPQWSMAPVVEALQAMRGIALIVAVTLVAEVGDLRRFDNPRQLMAYLGLVPSERSSGPRVRRGAITKAGNGEARRVLIEGAWSYRLHARVGRTMLDRLQGLPKPVREIAWKAQVRLCARYRRLSAAGKPQPVVTTAIAREMLGFAWAIARHVQPRTTT

SEQ ID NO: 282760 - protein, 347 aa, unidentified
MNFYTQQHRFYCGVDLHARSMYLCVLDQNGETLLHRDLPADPPSFLEAIAPYREDVAVAVECIFTWYWLADLCRRENIPFVLGHALYMKAIHGGKAKNDKIDSRKIAGLLRSGMLPQAYVYPAEMRATRDLLRRRTYLVRKRADLLAHIQNTNSQCNLPEFGQRIARKTHRDGVAEQFADPAVRRSIEVDLELIEHFDRLIWNLEAFILRSAKQHDPQAVHLLRTAHGIGKVLSLVILYEIHDIRRFPSVQDFVSYARLVKCAKESAGKRLGSSGRKIGNVHLKWAFSEAAVLFLRANPAGLSYKRRLERKHGKAKALSILAHKLGRAVYYMLLREKAFDMEKFLAA

SEQ ID NO: 282761 - protein, 360 aa, unidentified
MGKYSTEFFVGMDVSDKSVEIFILPKESEEGKSLKVKNDQRSLLAFAESFERPSRVKLALETGTHSSWQAEMLRSKGIETVVANARDLRMIWGSEKKDDREDAKKLARLLRADPKLLHGVEVKGKARRDALAVLKARDCLVRCRTKLINTVRGLLKSEGVESAELKPENFGAKAERLVPQELRAALKPLIGQIARMSCELKAYDKKLEAMMKAFDGCKEVSQIKGVGPVTSLSFVLTVGEAGRFQNGSRLASYVGLTPRRDQSGELDCQCHITKAGSKLLRRNLVQAAHYMMGAFGDKDCDLRKFGERIAARGGKNAKKRAVVAVARKLAVLMLKLWKSKAEYDPQYSRRGRRPSKEEAA

SEQ ID NO: 282762 - protein, 398 aa, unidentified
MIFVGIDVAKDKHDCCIMDQDERILHPVFTFANNKAGMQQMLDAIDNAVPAECTGQSCSDIAVGLEATGHYSYNLLKALADHNLTTYLINPLHTNLYRKGLSLRKTKTDRVDSTAIAMMLIHDRSLKPYKNTADYTDELKSLTRYRFDRVQDRARLKISVARLVTILFPELERLVPDLHISSVYALLSEYPGASYVAEAKLSKLRELLELSSRGHYSKDKATAIRDAARNSIAVTMPAKSLELKCTIRLIRVMDEEISEIERSMKAIMDTLNPPILTIPGVSYRMAVMLLAEIGDFARFENADKLLAFTGLSPSTYQSGQLVSTYCHMEKRGSRYLRYALFNTTRFVCQWDPAFSSYLSKKLSEGKHYNVAISHAAKKLLRVMYKMQLSGEPYHGTPK

SEQ ID NO: 282763 - protein, 340 aa, unidentified
MPLYGAFDLHAKTNHLGIIDGSGKRVLMKKLPNEALVILEALKSMKRRIVGLVVESTYNWYWLVDLLMEAGYKVHLANPSAIQKYSGLKHADDVHDAFWLAEQLRLGVLPVGYIYPKEERPIRDLLRKRGHLVRLRTSLIISLQNIITRNVGLQVDVNDVKRLREDRITPLLGMNEDLALAGRASKETIDFLTRQIKHIEKVVEDRVQLKEPYRYLLTLPGVGKILGLTIMLETGTIGRFPGVGDYASYCRKVTSKWTSDGKAKGKGNKKNGNRYLAWAFSEAAECARRYDEQARAYYNRKARKSNFMVAHSALAHKLARAAFYVMRDQVPFIPEKLFAL

SEQ ID NO: 282764 - protein, 453 aa, unidentified
MAKKRQQKKRKSVKMLHQIQPDAAGIDVGATEIYVAVPDDRTSEPVRCFGTFTRDLHEVAQWLQSCNIKSVVMESTGVYWIPILQILESYDFEVLLVNARHVKNVPGRKTDVQDCQWLQYLHSVGLLRGSYRPTQDVCAIRSLLRHRESMVKISSTHVQHMHKALTQMNLQIHNVISDITGLTGQAIVDAILAGERNPKKLALLKHGRIKASKSVIEKSLEGNYLPEHLFTLRQALQSYRHYRQMIIACDQEIEAYLTDFEARIDPDENPPPTPRVKDTKPKGNEPDFDLRSHLYRVFGTDLTQVDGINVLTAQSLFAEIGPNLSKFPSVHHFCSWLGLCPNNKISGGRILAAKTRPGSNRAAQALRLAAHALWRSQSYLGHYYRRMRARHGAPKAITATAHKLARIVFHLIITGKAYDESVFAMQENLHKQRMEQNLKKQAKRLGFQLVPCQ

SEQ ID NO: 282765 - protein, 376 aa, unidentified
MENKLNLDHFGKHVYVGIDVHRKTYTITALADHFPYPYKVGGIAADPDRFIDWLKKRFLGAEIHTAYEAGFSGFVLHRKLKTAGIDSIVVNPGSIEVAVGNHVKTDKRDSAKIAEHLYQKRIGGIHIPSKALEEARQITRTRYQLTKKKTGIGNQIKAKLIQFGFIEHDDDRKICKSYINKFVATLKLATDLRIAIDCLSAVYLCLDEQIKILDARIKAQAEKDKKIDSIYQSVPGIGPVWARTLCNEIGDMTQFTSEKKLFSFLGFTPTESSSGETRIQGHISRQGRAILRMVLCEAAWVAVARDPALARSYHKIKIRRGGKRAIIAIARKMTARIRHCLIQQEVYLLGYGETDIKPRLKSELRRTTVLEAMKVA

SEQ ID NO: 282766 - protein, 388 aa, unidentified
MNYAGIDISKYKHDCFILSDFGEVIHAGFSFANNVEGFKTLEQELRKCGEGNVRIGLEATGNYGINLKLFLEKIGFDYMEINPMLIKQHIKSTTLRRTKTDKLDAKAIADYIKEREYRPNPEGFYDLFALKQLTRLRSRLVGIRSRYLVRLTNVLDCIFPEFKPFFGNRFSLTALYILANYKTPEAIAKMNSRSYDTLRRKSRGTFSMDKFVTLKDLAKNTVGVSHKCYVVELDSLLDLYCQIDAKIEELETEITQMMETINSPTLSVKGIGPVSVAVIISEFGGISRFAGPNQMLSFAGLEPGYFQSGTSEHKGHMVKRGSSHLRCVLINCCRSMRLHNEVFATYYRKKVAEGKPEGVVLSHMAKKLVRLIYTLETTGVAFDPEKLR

SEQ ID NO: 282767 - protein, 341 aa, unidentified
MNITTIGVDLAKSVFQVHGIDKHGKTVMQKRLRRSRVLEFFIQLPPCLIGMEACGSAHYWARKLRDQGHEVKLMAPQFVKPYVKANKTDAADAEAICEAVTRPTMRFVPIKSVDQHGVLSLHRARSGFVKSRTAQANQIRGLLGEFGIVLPQGIVHVAQCLPDIIEDSENGLPVVFRELLLRLRSHLLELNRQVQELEDQIGAWHKNNEDSQRLANIPGVGVLTASALVASIGDARCFKNGRELAAWLGLVPRQHSSGGKPLLLGISKRGDAYLRTLMVHGARSVVRVAANKQTPTDAWTNELSTRRHMNVVSVARANKNARIAWALLAHKRDYNGEKPAA

SEQ ID NO: 282768 - protein, 367 aa, unidentified
MENSITVVGLDVHKNSTEIVTADTGGAMEVRRFGSIGGTMDALDKAVRKLVSRGAALRFVYEAGPCGYEIYRHLTARGFSCKVVAPSKTPRKSGDRIKNDRRDAEALARLERAGELTAIHVPSEEDEAMRDLTRAREDAVQALKVARQQLGAFLLRYGKRYPGKKLWTPVHMRWLADIALPHPAQQIVLQEYIDTVRVGTERVARLTDEIQELLPEWRWNPMVKCLQALRGVAPLVATTTMAEIGDMRRFENPRRLMAYLGLIPSEHSSGESIHQGPITKTGNGHVRRALVEAAHAYAFPARVSRHLLKRQEGLPESVLAIAWKAQVRLCGRFRRLMARGKLKNKVVTAMARELSGFMWAMAQQVQV

SEQ ID NO: 282769 - protein, 346 aa, unidentified
MEKITRIGMDTSKRIFQLHGVDSAEQPVLRRKLPRDRMIAFFKALPPTVVALEACGASHHWARVLGAMGHTVKLIAPQLAKPYLKRGKNDPADAEALCEAASRPTMRFVPVKTVDQQAGLMLAAARERLVRTRTQLANAIRGHAAEFGLIAAKGASHVAELLAMVAADAGIPRLARAVFAGLAADHAHIETQLDAADAELRAWYKQNAVAQRLTQIPGVGPVIAAMLVMKTPEPKAFASGRDFAAWLGLTPKDHSTAGRTRLGRITRAGDETLRSLLVVGATAVIWQTRRGATRRVMPWLASLLARKPPKLAAVALANKIARVAWKLMASGEAYDINHAAPKPATA

SEQ ID NO: 282770 - protein, 347 aa, unidentified
MEKVIRIGMDTSKSVFQLHGVNAAEEVVLHKQLRRRKVLEFFARLAPTKVGMEACGGAHYWARELRALGHEVFLLPPQYVKAYVKRGKNDRADAEAICEAMSRPTMRFVPVKSAEEQAALMLAGLRDQMVRRRTQLTNAIRGYAGEFGLVAPRGLSKIEPLLVRIAEDESVPELAKDIFAAYGQEYAELERRIAKVETRLMAWFRQSEPSQRLTQVPGIGPIIASMLVMKIPDPGAFHSARHFAAWLGLTPTDHSTAGKHRLGVITRAGDEDLRRLLVGGAMSVIQQADRGRGSPSPWLLGLLKRKELKLVAVALANKMARIAWKLLVSGENYDPRRSKVRALDKAA

SEQ ID NO: 282771 - protein, 369 aa, unidentified
MDDITFVGLDVHKATICIAVAEGTRGGEVRQLGVFENRPEILRKVVLRLSKGGRRLSFCYEAGPCGYGIHRLLTGYGHECVVVAPSLIPMKAGDRVKTDRRDALVLAKLHRAGELTAIWIPDAAHEAMRDLVRARATAVRVLVKARQHLQGFLLRHERIYRGARAWTLAYRRWLSTVRFDHPAQQIVLQDYIHAVQEAETRRDRLTQQIEELLPNWSMAPVVAALQSMRGVALVVAVTVVAEVGDFRRFANPRQLMAYLGLVPSEHSSGSSVRRGGITKAGNALARRVLIEGAWTYRMSARVSRKLHDRLEGLPAAVRDIAWKAQLRLCARYRRLAAIGRPKVVVTTAIAREMVGFIWAIARVAQPALV

SEQ ID NO: 282772 - protein, 345 aa, unidentified
MDEAYDGRQVVGMDLHRRRSVLVRMSMDGRKLETVRIGNSPGALRAVLARCGERPLVVLEATYGWYWAADVLAGAGAEVRLAHPLGVRAFSYRRVKNDERDAADLADLLRAGLLPQAWIAPPEIRALREVVRYRHKLVGQRTSCKDQVHAVLAKLGVPVTHSDIFGRGGGLWLDQLVLPEPYAAKVASLRALTGVLDGEIARLGQRAAGVLGADPGYAALRELPGIGPVLAAVIIAEIGDVTRFRRAGQLCSWAGLTPRHYESDTKVIRGHVSKQGSKMLRWALVEAIQHQPAGTRPRQARDAIIARRGKEARNIAKTAAARVLLTQVFYALRDGHVRSAGRPAA

SEQ ID NO: 282773 - protein, 354 aa, unidentified
MKRTTKYVALDVHQATTAASVRDDSGRVIARSILETHGPSLVEYFRGMRGALHVAFEEGTQSQWLYDLIVPISDRVVVCDGRRVRREGNKGDRVDADRLSELLRLGGLRPVYHGSAHRADLKELTRAYRSLVEDSTRVMARIKALFRARAISTPGSAVYQAAGREAWLAELDGGGVRFRAEALYAELEVLRELRPKAKAAMIAEARRDPAWPVLRSIPFFGPVRVSLLLATIGNPWRFRTKRQLWAYSGLAVVTWSSADHTFASGQAVRRARAPLTRGLNRNHNHVLKDVFKGAATAAESRPGPLQDFRDALVARGLREELARVTLARKLAAIVLRLWKKGERYDPAKLTWQAR

SEQ ID NO: 282774 - protein, 358 aa, unidentified
MKALKQNVGIEVDSQNLKVSLQILKEDLTKKILGSRTFKNNQTGFKALGEWIEKKRVSDCKVNLTMEATGVYFENLVYYFHEHSDYLLHVLLPSVSHSYARSLNQKSKTDEMDAKMLAQLGLERELAPWKPLSKFMRNLKRLHRERIQLIKEKTLVSNQLHAEEAAHDTRKDAMKRYKKRIQFITTQITEIEEELKKLVGQDPKLKQRIDHVCTSPGLGFITVVGIVAETNGFALFKNRSQLMSYAGYDVVKKESGTSVRGPSSISKKGNSFIRYLLYMPALSAVRFCEHHQAQYERILCKTSIKMKGNVAIQRKLLLQIYALFTKNEPYDPNYHAILREKLAAKNKCVHEELEGASI

SEQ ID NO: 282775 - protein, 357 aa, unidentified
MEAPMTITVYCGVDFHARVQTVAYCSSTDGEVHLCELDHRRDDVRAFYARFSGEVVVGLEASGYSPWFERMLDELGHTVWLGHAAEIRRVANRRQKNDRRDAELILDLLVKGEFPRIHRPTTDSLEILRMLRYRHRMVKIRTMIKNNLQALAIGSGLALKARLLTRPGRVRLLAAQMSPAMSRQREEWLALLDNLDARIAAVVRWLEQQAKDDVRVQLLRTHPGLGLLTALGVVHTLEPVSRFSNQRKVVAYVGMEPMERSSAEKKRYIGISKAGSRLVRFLLGEAAQTAARGDQELKRFYLRLVSRRGKPKALIAVGRKLLIRSYIMLRDNIDYAEFLRRGVDARSARKTHKHLNA

SEQ ID NO: 282776 - protein, 345 aa, unidentified
MEQISRIGMDTSKHIFQLHGVNAAEVPVLRKKLRRKEMVTFFEKLAPTMIGIEACSASNHWARLLQSFGHTVKLIAPQLVKPYVKRGKNDAADAEALCEAMSRPTMRFVPVKTAEHQAALMLVGVRDRLIRNRTQLSNAIRGYASEFGYTAAKGKAHLGPLLERIQADQSLPDLARELFAALAKEYAQLQAQIDEVDAKLLAWHRADECSQRLAKIPGVGPIGAVLLTMKTPEPKLFRSARQFAAWIGLTPKDHSTAGKVRLGVITRAGDEGLRSVLVVGATAVIQHVRRGGRASPWLTALLKRKSPKLAAVALANKIARIAWKLMVTGENYAVKSAPAPLTGAA

SEQ ID NO: 282777 - protein, 403 aa, unidentified
MNSVGIDISKGRSTVAVMRPFGEVVISPFEVRHTGSELSELARRLKSLDGETRVVMEATGNYHAPVAKLLHDAGLYVSVVNAKLVHGYGNNDLRRVKTDRKDAVKLANYGLDRWLTLPKYVPEEDTRLLLKNCYRQYRQYSKVQTLLKNNLISLLDTVFPNANRLFSSPIRGDGSEKWVDFVAEFWHCKCVCERSERAFINKYQRWCRKHGYNFSETKAQTIHAVASGHIGVMPKSETTKLLVEQAVAQLRVTSAALAALKHEMQTLASQLPEYPVVMDMFGVGPTLGPQLIAEIGDVRRFYSKKALVAYAGLDAPPNDSGDMTGRHKSMSKVGASSLRRTLFLVMSVYLQNAPLAEPVYQFMDKKRAEGKPYRVYMMASANKFLRIYYATVKAYLESLEHTA

SEQ ID NO: 282778 - protein, 342 aa, unidentified
MHVTTLGIDIGKRWFHVIGLDKAGIVVRREKLNRAQLYELFATHSPCLIGMETCCGAQHLARLAASHGHDVRLLPAQHVRPFVKSQKNDFNDATAIAEVVRLPSMRAVPLRSLEQIDIQALHRARQRLVEQRTGMTNQIRGLLLDRGLPIPQGLNPLRTAVPEILEVATNGLTPLFRSLLARLLSMWQQTDSAIEELTDEIQSVARASDQCRRLQSIPGVGPLVATALVSAVGNAGTFRSSRDLAAWVGLVPRQHTTGGKPKLLGLSKRGNSHLRRLFVQGARALWVWKEKRNDPLHQWMQRLAQRMHPHKAVCALANKLIRICLALLRNDQMTFQNAAAAA

SEQ ID NO: 282779 - protein, 348 aa, unidentified
MDHIIRIGMDTSKHVFQLHGVNAAEEPVLRRKLRRNDMVVFFERLAPTIIAIEAAGASHHWARLLRSFGHEVKLIAPQLVKPYVKRGKNDAADAEALCEAMSRPTMRFVPVKTAERQAALMLLGLRDRLVRNRTQLANAIRGYAAEFGLAAAKGIAHLAPLLARIQSDESLPGLARELFAAHAQEYAQLQAQIDEVEGKLMAWHKTNPGSRRLAQIPGIGPIGAAMLIMKTPAPEMFRSGRQFAAWIGLTPKDHSTAGKVRLGVITRAGDEGLRSALVVGATAVIRHLRNGKGRSMLSAWVEQLLKRKPPKLAAVALANKLARIAWKLMVTGETYAAKPRPVASAGIA

SEQ ID NO: 282780 - protein, 408 aa, unidentified
MEVVYRCCCGIDVHKKVIVACLNNGGEQDLREFGTTTSEIKSLATWLTESGCEMIAMESTGVFWKPLYNLFELMDLDAMVVNAAHMKALPGRKTDVKDAEWIADLLRHGLLKASYIPSREQRELREITRYRKSLTEERCRETNRLQKILEGANIKLDSVVKDINGKSARKLLEKIIEDDVPTSEEEVSKMVHGRMRSKLGQLVTAIEGITTPLQRKLLAQVIDHIDDLNRRIADLDRLVQDYMDEYAAAIAALCDIPGIARRSAEVILAEIGLDMSRFPSAAHLCSWAGVCPGNCQSAGRRKHGKTINGNMLLKTILTQCAKSARSVKGSYFSAQYQRIAARRGKNRATLAVAHSMLIAIYHMLKNSVPFRDLGSDYYDSFNRDRKIHSYLKRLKALGWEPDALPGSA

SEQ ID NO: 282781 - protein, 349 aa, unidentified
MSPKLNSGIAVIGIDIGKNSFHVVGLDRRGAIVLRQKWSRGQVETRFANLSPCLIGMEACVGAHHLSRKLTLLGHNARLMPAKYVRPYSRGQKNDFRDAEAIAEAVQRPTMKFVATKTAEQLDLQALHRVRERLVSQRTGIINQIRAFLLERGVAVRQGLRFLRAELPRILATPCDRLSPRMVRVLEELACDWRRLDERIEGLSSEIEVLARRDAGCERLMSVPGIGPIISSAMVAAIGTGDAFTKGRDFAAWLGLVPKQISTGDRTILGKISKRGNRYLRALFVQAAWVVLIKPKSWDRHGLKPWLEAAKKRLHHNVLAVALANKLARIAWSVLARGRAFEASKIQVA

SEQ ID NO: 282782 - protein, 384 aa, unidentified
MSVPSHAAVSTQLNAIFVSLELSRSTWLVTSLSPGRGERISRHQVKGGDVPALMERFAQLQAKARERTGEQYPLVVIQEAGLDGFWIHRCLVREGIESHVVDAASIAASRRSRRAKTDKLDGEALVRTLLAYKRGEPRVCAMVTVPSIEDEDRRRICRERRSLVVERIRHINRVKGLLFAQGVGDYEPLRTNRRARLEELVTGDGRPLPRHVKREIERELDRLELVMRQIKEVERERDEMLETIADDATEPTSARLLQLRGIGPEFAGVLHAEAFFRSFSNRRQVACYAGLAPSPWQSGSMDREQGVSKAGNKRLRVTMIQVAWLWLRHQPESELTRWYAARVQANGGRVRRVMIVALARKLLIALWQFSSAGVVPRGAMLKAA

SEQ ID NO: 282783 - protein, 381 aa, unidentified
MENILVFIGIDVHKDTHTYCTFYPSTGAYLYEYTSIASTKDTLSYINKVKKGIKKETNKECKVVCGYEAGPTGIKLKRDLMKKGIECRVMAPTTILSPKAGKRVKTDRKDAQDLSEALCKDNYKEIEILDEESEAVRDFLRMRSDFKNALKVKKQQLKSFLLGKGIRYSGTCNTWTIAYIKWIKALEFEHPLAKETCEFYMSEVSRLIQKIEELDKRIEELANREKFKEPVSKLRCFAGIDTMVALSVVSEIGDFSRFSSAKHFASYVGLCPGQHSSGLKLQMTGITKAGNSRVRTLLTESANSMARTYTNVKSKRLKSRQSGISEDVIDYADRGNKRIRYKMNKLKRSGKSHNVAKTAAARELSCFIWGMMTNNIYGEIA

SEQ ID NO: 282784 - protein, 339 aa, unidentified
MVYGAIDLHTRFSEVRIIDATGEPVRHRRVHTTRERLVEVFGGLGPMRILVEASTESEWVAQTLEAVGHEVIVADPNDGPMYGTLRRRVKTDRRDAVALAEANRRGWYRPTHRVSREQRTMRQRLGIRRHLVRMRSGLIVRVRAVLRQEGLRIGSGTSATFSARVSRLTLPADVREVVTPLLEAATAVGRLIAGEDRALTHVANRDPIVHRLQTVPGVGPIVALTYRATLDNVARFPTASHASSAVGLVPREDSSAERRLRGHITKVGSREARSMLIQAAWSCWRSRTIRTTPLRGWADALAARRGVRVAVVGLARRLSRILFAIWRDATTFYGPVPVL

SEQ ID NO: 282785 - protein, 353 aa, unidentified
MNSLTDMREAVDVVIGVDTHVHTHSAAVVDTATGGVLDEITVEATAEGYAELVEFANNHPMLRAWAIEGTGGHGAGLSRHLLESSETVIELDRPKRAARRNGAKSDPLDAIRAAREAMARPQLGTPRSGGERQALSVLLAARRSAINASTEAQLQVFSLVIAAPEPIRARFRGQKLATMLNTAANLRVHSSWDVETTTTVVALRSLARRAHAMLKEAREHQKAMVVIIRGWRPDLLEEFGVGPIVAATVLCAWSHPGRIHSEAAFAMLAGVAPIPANSGQVTTRYRLNRYGDRQLNRALHTVVQIRIQYQPATRDYVARRTAEGKTSREIKRCLTRYVARDLYRLLEGGAAAA

SEQ ID NO: 282786 - protein, 363 aa, unidentified
MSESTTVTVGLDVHARSIRLAAIRADELLEERTLPYDEEAVERALRRWPVVRCCYEAGPTGFGLYRHLVEQGFDCRVVAPGLVPQRPGDRVKTDPRDARKLARLLAGGLLEPIHVPSPEQEAARDLVRAREDARLDRMRDRHRLSKFCLRHGRTLPTSSWTVVRRKWLSEQRFPFAAQQITFDSYVHAVDLVDARIDQLERAIRETAEQGSWRELVARLRCLRGVDTLTGLALVVEIGDFTRFRRAEEFMAFVGLVPSEHSSGDRRGQGSITKVGNSHVRRLLVESAWHARRRPKVGYELARRQRGQDAIVIERAWRCQQRLYQRWQRMAGRGKPQQKIVVACARELAGFTWAIATDQPLRRT

SEQ ID NO: 282787 - protein, 340 aa, unidentified
MNTTTFGLDIAKRTFQLYWVEVETGEVVNRRFTKQQLIEFFSQRAAGRVALEACGSAHWWARKIAALGHKVVLLHARFIRPFVQNNKTDATDARAIWTAAQQPGMRSVAPKTADQQAILALHRMRSLLVKSRTMQVNQLRGLLYEFGVTLKAGRVAGLAEVRERLHEIEQVVPGTLFGALRDQLHHIDLIDGEIRKLERQIVAWQRQEAACQRITSIPGIGPLTATALVATIGDPAAFKSGRELAAYLGLVPRQSGTGGKLRLGGISKRGDSYVRMLLIHGARAVMFKSQSKGAWCEQLSLRRPTNVVAVALANKMARTAWSLLAHESAYQKDYTSQMTA

SEQ ID NO: 282788 - protein, 327 aa, unidentified
MEREYIGIDLHKAFFQAYAMTSSAERRWAQRYPTSDAGIAALVARCGPGSQVAVEASSPTWAFVDRLVGHVGAIRVVDTRKTRIKAGYAAKTDRLDAQRLADALRRDSVVGIYYPPPAIRDLRELGRYRCHLARLQASLKQRIHALLLRQGVAAPRALFTQRGTSWLDTLVLPGWAGDELRGLRQVLADVRRQLAPVMIAIRAVAASDPIARALDQRPGFGPVFSVTVRAEVGTIVRFPDGPHLASYAGLVPRVERSGGRQWSGRITKAGSPWLRWTLIEAALHQFRRQDDFGRWARRLALRAGILKTRVAVARALCTEVFAVWPRE

SEQ ID NO: 282789 - protein, 442 aa, unidentified
MEELREDHDDGTVARVAAIDIAKASGMVCLRVPHDTIEGRRVQKVWTVASTTNTILELGDRLVCQGVERVVMEATGSYWRPFFYLLEARGLDCWLVNARDVKNVPGRPKTDKLDAVWLAKLAERGMVRASFVPPKPVRQLRDYTRTRTVFVQERTRHKHRVDKALQDAQIKLSDVVSDLFGMSGRAMLDALVAGERNPRTLADLAKGNLVKKKPTLIEALTGQFEDHHARLLRVLLGTVDHLTAQLGELDRLIARTLEEITTPPDRSGTGSEPATTVSARALAEKLDAVPGIGPATAQIILAEIGADMSRFPTPEHLVSWAKLCPRTIQSGAKNSTGPAGQGNPWLKGALGEAANAAARTDTFLGARYRRIVKRRGHAKALVAVARSILVIAWHLINDPDASYQELGADWHRRHLDPARKTRDLVPQLQALGHQVDLTPASA

SEQ ID NO: 282790 - protein, 433 aa, unidentified
MISRALAALEGFVLVGGVAVVLFVGDDWAEDHHDVEVQDHTGRRLGKARLPEGVAGIVGFHELIAGFLGEDMAEDTDAEQVLVGIETDRGPWVAALVAAGYQVFAVNPRQVARYRERHGTSGAKSDAGDAHALADMVRTDAHQLRPIAGDSPLVEGIKVVARAHQTMIWERHRHMLRLRSSLREYFPAALEAFDDLTAADTLDLLGAAPDPQRAARLSRSRIAGALKRARRRDVEAKAERIQALLRADHLNQPPELVVAYAATTAATVAVITAFTAQISALQGQVEACFGRHPDAEIYRSQPGLGEILGARVLGEFGDDPDRYQGARARKNYAGSAPITRASGKKTVVLARFVRNQRLAGPLQWQAFCALRASPGARAYYDQIRARGAGHQAALRQLSNRLVGILHGCLKHRTCYDEHTAWGHHQTQDQQAVA

SEQ ID NO: 282791 - protein, 415 aa, unidentified
MKVVFPTCCGVDVHKTFVVATIITTPADSLQPHYQKKRFSTFNSDLNRFADWLLEHNCLDVCMESTGKYWVPVFNILEKRGIRVVIANPKWVKAVKGNKDDTKDSKWIGDLFRIGLVKSSFIPELNIRILREFLRYRYKLVSMKSSEKNRFQNAFTVCNVALDSVVSDMFGKSATAITDYLTSDESFDPDHCVSLLQRSLKKKAEKVLESIEGYSISDEQKARIKIIREHYDFIEKLIAKVDTCVNEMVEKYEGEINLLCTIPGIDRNSAITIISEIGTDMSQFGSSKRLCCWAGLTPGNNESAGKKKSVRISRAGVYLKPALVQVAHAAVKDKANPYYALKYERIAKRRGKKRAIIAIARMILTAIYTMLCTGEVWNPVDLFKIDIPEHLKEQQLAKAIKQATRFLEKQGLTVA

SEQ ID NO: 282792 - protein, 317 aa, unidentified
MALQRIFVGIDVSKDWLDLWLEPVKRFERVSNDAAGWVATIGLLNSLGVEAGLVVAFEATGGYERGLRQALLEAGFEVRRLNPLRVRLYAKSLGRNAKNDRIDARVIARYAAAAETMPETLDPARERLAERVSHRRRLVDERVALGNQTDMLGCRLLQAQNRKRLALIERHIEQTDTLILEAIGQIPGLLAKVELLKTLKGVKDVTAIALLALLPELGRITRRAVAALVGLAPFDHDSGKLKGTRSIAGGRTAVRTALYMAARAAARSKSPLGDFYKRLIAAGKTPKVATVALMRKMLVTLNAMVRDNQTWKHAKPC

SEQ ID NO: 282793 - protein, 454 aa, unidentified
MANAKASAVEVIPDPEQERVWDRVAAIDVAKDSGMVCVRVPDEDHPGRRASRVWSVPARMGQVIELADHLAGERVEQVTLEATSDYWRMFFYLFEAAGLNVVLVNAREVKNVPGRAKTDKKDAVWLAKLTERGMLRASFVPPARVRELRDYTRMRVDLTRDRTRCWQRLEKLLEDALIKISSVASKLTTRSTREMIRALVRGERDPRRLADLARGPMRAKIPQLVEALTGTFDDHHGELAAIWLDQIDYLDEQIEGLTGRIETLIGALPDAWGIDADGTTGPEAGHGAGAVAAPVLDRLAAIPGLSRDTAATIIAETGLDMSRFPTAGHLVSWARLCPRTVQSGARSRSRRGGKGNPYLKGALGQAAAAAARTDTFLGHRFRRLVKRMGKPKAYVAIARSILVVIWHLLNDPTASFYDLGPDYYAARQKTAAAVRNHVRHLRALGFEVSITPAA

SEQ ID NO: 282794 - protein, 310 aa, unidentified
MSNVGIDVSKLHLDIAMRPTGERFRVENNDTGFAELLKRVKKLKPERIVLEPSGGYELELVQSLARAKLPVVVVNARQIRQFAQATGRLAKTDELDADVLAHFAEAIQPEIRALSDETHRELEALVTRRRQLVDMRGAEQKRRQTAPRPVHPNIDHVIAFLSQQIDDIDDSLQKLVRATPVWREADDLLQSVPGVGPVLSATLTAFLPELGQLNRKQIAALVGVAPLNNDSGQMSGKRSIWGGRAPVRAVLYMAAHSAARYNPPLALFYQRLIAKGKTPKVALVAVMRKLLTVLNAIVRRHQPWTPTLTT

SEQ ID NO: 282795 - protein, 310 aa, unidentified
MIHPDVIGCDIAKAHLDFFDSGLERHFRIDNTPAAISAWLDGLDGRGVHIVFEATGRYDRQLRIALETRELPYSRVNPARARDFAKAIGLLAKTDAIDARLLARMGQSLPLSTQAPDDPARHVLARLHTRRDQLVAMRQQERTRLHETEGIERDSAESHMAWLDAEVARIEMACRDVLKAEKTLQEQEARLRSIPGIGPVAALTLIAHMPELGNRSAKAIAALAGLAPFNVDSGTSRGKRHIRGGRKRIRDALYMAALTASRMPRAFKSHADQMKEAGKPFKVAIIALARKLLAIANAIIRDKTTFRRTT

SEQ ID NO: 282796 - protein, 446 aa, unidentified
MNTRKTQPKPNANPVPVQLTDGQPRFVGVDLHKKVATFHVLSQDGTSLKSGLFDVGLDSIRDFAAKHLRPTDQLAVEVTSNTWAFVRLVRPYVANVVVSNPLKTKAIAEANVKTDKVDARVLADLLRCNYLPSVWVPTSDVEDKRAIAARRTALVHERTSIRNRIHSVLARRLVAAPEGDLFSGKGLTWLKQVDLDPLDRALVDADLRLLDALARESVTVDAHIANESYKDQDVQLLMTIPGVDYTIAYALKAALADVERFSDPDKAASYLGLVPSVRQSANKCYTGPITKAGATQVRWLLIQGAQHVGRHPGPLGAFFRKLAKRKNRNIAVVATARKMVTIAVHMLKNKEPYRYALPRPTDEKLAALRVKATGEKRKHGLPKGVKSVSKIGGGKSRTTPALDEVYAREGLPSRRPRTQGEERMIRESGTERFVASLDKATVVAKK

SEQ ID NO: 282797 - protein, 334 aa, unidentified
MKKYIGLDAHSSTSTFCVMNERGVELDNTTIRTNGRLLVNYLKSIKGNTILTFEECELSSWLYEILSKEVTELVVCNPVYNKDCKAKKTDKLDARKLAKLLRGNFLTPVFHDGSDREKFRDLMSAYTDLVEEAVRIKLRYKSLFRKSGNRIDGEKLYTNENFLKDLKRKDYNFIGTSLYHLLQEMENNRRQYKKEIIKVSKKFKEIRKFKTIHGIGDIRAAQISAQVIDPRRFPNKYQYYSYCGLVRHRQISGNREYGSKKIWGNRALKCVYKMAAHDAIKGNNGLSSYYKSLRKKGINDKNARNAVARKIAAISLSLWKNNCNYDDSKVITAV

SEQ ID NO: 282798 - protein, 344 aa, unidentified
MVTFGVDAHKRTHTIVAVNDRGTPVGQTTVGTTSQDHLVLLRWAARFGAERRWAVEDCRHLSRRLERDLLAAGESIMRVPPKLMAHVRDSARTYGKSDPIDALAVARAAQREPNLPLARLDGPDREVRLLVDHRESLISERTRLICRLRWHLHELDPAWEPKARSLDAQRTLDEVRGRLQDHVGVVARLAVELTERCAELTITIKALEKEITELTTQLAPALLELPGCGALTAAKIIGETAGVDRFKSRDAYARFNGTAPLPVWSSNKARHRLSRTGNRQLNAALHRIALTQARWHPPAKEMIERRKSGGNSGREALRVLKRRLSDAVFQALLHDQTAGLTLAA

SEQ ID NO: 282799 - protein, 403 aa, unidentified
MNSVGIDISKGRSTVAVMRPFGEVVISPFEVRHTDSELSELARQLKSLDGETRVVMEATGNYHAPVAKLLHDAGLYVSVVNAKLVHGYGNNDLRRVKTDKKDAVKLANYGLDRWLTLPRYVPEEDTRLLLKNCYRQYRQYSKVQTVLKNNLISLLDTVFPNVNRLFSSPIRGDGSEKWVDFVAEFWHCRCVSEKSQKAFTSKYQRWCRKHGYNFSEEKAHTIHAEASGYIGVMPKSETTKLLVEQAVAQLRATSAALTALKHEMLALAAQLPEYPVVMGMFGVGPTLGPQLIAEIGDVRRFYSKKALVAYAGLDAPPNDSGDVTGKHKSMSKIGASSLRRTLFLVMSVYLQNAPLDEPIFRFMDKKRAEGKPYRVYMMASANKFLRIYYATVKAYLESLEHTA

SEQ ID NO: 282800 - protein, 335 aa, unidentified
MNKSETTFLPCGIEISAAILVVDLSGKAPCEFPNTPVGHQSLIRWLQLAGSEIRVCMEATGLYGLDLALALHAAGIAFMIANPRSVRNFARAMMQRSKTDRLDVIVLREYAARMPFEPWRPPSSQALHLMAIAHRLQALTRMITAEKNRLHAASLSRALPALVRRDLLRSIQSMERALKRLTQAALDLVLSDPQLARRNQLLLSVPGIGVTSALNVLAEILRLGPDCGVRQWVAYAGLDPRHYTSGTSVAKKPVIIISKSGNAHLRRALYMPALVTVQHEPHFRGFYQHLLDRGKTKLQALVAVMRKLLHAIFGMFKHNQLFDGAKVYALETSCA

SEQ ID NO: 282801 - protein, 394 aa, unidentified
MRFAGVDIASEIHVLAMVAADGSVALKATPFTEDDIGYQKAVALLGTPGEVLIAMEATGHYWKNLFAVLAAAGHAVALLNPLRTHRFAGVDLERTKTDAIDAVGIARFAAEKRPATTPVPDALTEELRELVQLRQRLLQDFGDRVRQLHRLVDLGFPEFTRYVRTLDSELASAILRDYPTAAAFRGVSVRRLAALRYDGHHRVGLDLARQLIDAARRSVGQHHSATYRLQIRYACDDLDTLRHRLRDLDRDLDGKLRVHEVGRLLTTINGIGTQSAARVIAAVGDPAHFRSGSALAAYVGTIPALKQSGKRQSVRGALTPIGNAPLRADLWMPTLCAVRSNPWLRAHYQRLLARGKLPKVALLACMHKLVLAIYSVAKHRQPFVPHIASEQATT

SEQ ID NO: 282802 - protein, 413 aa, unidentified
MYYVGIDIAKRTHVAVIMNEDNSLKVKPFSFSNDRTGFKKLLIHLQTLCCDVSDIVIGMEATGLLFENLYRHLQSLEYNVVLLNPYQTAKFREMDTMKRVKNDNIDSIMIAALLKSGRFSEGYVSQEQLQSLRELYRHRASIENQLKALKRQTSTILTVVFPELETVIRDPFNITGLALLDKYPTAKHFHHASVERILKTFRGIKGNNFNRVKAQALLDASRRSIYSGIASEARALNIRMNIAQIRLLQEQLEETLSVMQSLFTNHSEVKQEDCEVMEGLIDNLRTIPGVADKTILALLAECGNLDRFYAPKALIGFLGLYPTLSQSGDSTRHGRLAKRGASLAKKAIYLASIAAIRHNDEMRTIYMNYRSKGRAKKEAIIIVARKLLTIIYTIYTRNIPYDPQRVFVAKPNQ

SEQ ID NO: 282803 - protein, 383 aa, unidentified
MVHVETLRPDWARSRAATRLVHRDPIGACRPQATREVTPVKYVGIDVHKKMCQAAVLDEDGALLDEIRFPNDPNGIEEFAGKLTTFRDEVRAVVESTGNLWIQIHDRLEERGVDVALSNPSKTRLIAEAKVKTDKVDARTLAGLLRADMLPTCYVPGEELRSRRELLRHRLNLVKNRTEVKNRIHGLLDKHGLRMPGTTPFPKENIAWLRELSLGFMDDAILRSDLVVLEAVDGQVTLIEEKIAVLAAEDRHVRLLMTMTGVGYFTAMLVVSEVGDVGRFRGEKEFASWMGLVPSVHQSGEKTRIGGVSGPGNKRLRWALVESAQTAVRHDARLGGMYERVSRRRGSGCTVVAVAHEMARIMYFMLSRNEPYRDADVGLVDKT

SEQ ID NO: 282804 - protein, 351 aa, unidentified
MEQITEKSLYVGIDVHKRQWSVSIFTAVLHHKTFSQPPEPSSLHSYIDKFFKDYRVVCAYEACKFGFWIYRELTSFGYECLVVNPADIPTTNKETSEKTDPVDSRKIARALQGGLLRGIYVPDEFTLGHRQLFRYRKKLWVDLVRVKNRIKDKLLFNGLKIPQEHDNPYWSKAFLKWLVKVEFKSTHTRATLDHLLEHYAMIYRHFLKVSIEVRALHKLPRYKEDAKRLRQIPGIGPLTSVLLLIEIEDISRFKNFKHFNGYLGLKPMVHSSGDKDRKGYMTYRSNHALRSSLVECAWTSVQRDPVMLSCYEDLLTRHTKKRAIVKIARKLASRIYRVLKEKEDYDLGVVQ

SEQ ID NO: 282805 - protein, 428 aa, unidentified
MTDHKNVHPAGSLVAIDVAKEWNLVLTTSGSGDRRTFKVANRRTDHDRLVSFMKTLPGPVRVGLEPTGDFHRPLAYRLLSEGFQVVSISSVALARFREARYGTWDKNDPKDAQVIIAMMAQDMVQTYHDPLFHGTHDLQELANTYFQITLARTRLQHSLLLHHVPLYFPEFGRYWIATRSAWFIRFLLRFPTPASVRALTPEAFSSEAWDLLGRKVEKRKKIAEMYAMAAESIGLPVALDSPAIEMFRLQLHRYQQLNEDRAHLDARAQELLADNTDFQRLLTLPGIGAVMALTILAEAGDLRRFSHHRQFLKYCGLDLSKNQSGQSRGRETLSKRGNKRLRMVFWMAGLRAVHMRENAFRDKYGRYLKDNPFDADRKRKALTAVAAKMARVVYAVIKKEADYERFFEQRLPSGSIPLPSAVEAISTS

SEQ ID NO: 282806 - protein, 387 aa, unidentified
MGVIIGMDPHKSSATIEVVDERAVVLSKGRFGTDRTGYAQLLAAGRKFDDRVWAVEGCNGIGKHLAHRLVHDGETVVDVPAKLSAQVRVFATGNGRKTDPVDAHSVALAALRAPGLAQVIVDDDLLVMGMLADRREELGRARTQTINRLHRLLLDLFPGGAKQFLSSHQARALVATIKPRDLVGRTRRRLVVELIVELEAIDKKMKTLKKELTALVTARGSTLLDLHGIGPSGAARLLADVGDIHRFADRDKFASWNGTAPLDVSSGKQERHRLSRAGNRRINRALHIMAIVQLRNPTQGRAYYDHRKAGGMPSMMAMRALKRRLSNVVFARMLEDQKRREETGPGGQSGTTLHSSATDLTPDIGSSKKPHPGPANHHPKTPALAVS

SEQ ID NO: 282807 - protein, 348 aa, unidentified
MNATPKSVVGVDTAKSVFQLYTVDKETGEVINQQIKRAQFLQWFANRAPCLVGMEACGGSQHWARKLQELGHEVKLMSGKMVKAFVCGNKNDAADARAIYMAAQQPEVKAVAVKSESQQAVLAMHRIRQQLVKVRTAQMNELRGLLGEYGEVFGRGRKAFDAGMKTSLERLTERLPAPLIDTLRDQWNELGRLDERIAHIEASLLAWMRQDRAAKAISAIPGVGLLTATAAVATMGDAKAFRSGREFAAWIGLIPGQTGSGGKVRLLGMSKRGDTYLRTLLIHGARAVIQHARTPSPWLQHISQRRPPNVVIVALANKMARTIWAVLAHERAYDKDHVSVRPLVATAT

SEQ ID NO: 282808 - protein, 378 aa, unidentified
MNEDSVVYVGVDAAKAKHAIALAESGRSGEVRYVGEIETTPAAVERFVRKLAHKHPRLHFCYEAGPTGYGLYRQLVALGHACEVVAPSLIPRRPGEHVKTNRRDAITLARLLRAGELKGIWVPDAVHEAVRDLVRAREAAGADLRKKRQQLQSFLLRHGRTFTGRKAWSPAHSRWLAAQRFEHPAQQIVFQDQVDVIADAGQRLERLDAQLVELVPTWSMAPVVTAYQALRGVSFVVAVTFVSEVGDVRRFDSPRQLMAFLGLVPSERSTGESVKRGGLTLAGNRRARRVLVEGAWSYRHPARVTETIRVRLEGLPKAVREIAWKAQTRLCARYRRMTAAGKKAPVVIAAIAREMAAFLWAIGRQVEPVRCGRRSSCS

SEQ ID NO: 282809 - protein, 310 aa, unidentified
MEQVYVGIDVAKAHLDIHVRPSGEAFTVPRDGESVANLADRLKALSPVVVVLEATGGFETIVAASLSSAGLPMAVINPRQIRSFARAIGQLAKTDALDAAVIAQFAEAVKPEPRPLADEQTRILSELVARRRQLVEMMTAERNRRPRLSRKHLIKALDRHLAMLQKDLSEIERDIDTTIRGMPIWREREELMTSVPGVGPTLARTLLADVPELGTLDRKQIAALIGVAPLNWDSGSYRGRRTTWGGRSKVRAVLYMAALVASQHNPTLKSFYQRLVAAGKAKKLALVAVMRKLLTILNAIVRDQTPWQNA

SEQ ID NO: 282810 - protein, 350 aa, unidentified
MDNTFPPLGIDVSKGTLDVRLLSQHRPGPPRRFATTTDGLTLLAQWLESQGTSRVHACLEATGTYSDAVATFLFEHAHQVSVINPARVTAFRLSEGMRTKTDRHDALVLARFCEQKRPALWRPTPVEIQRLQSLLGRLDDLQLTVHQERTRFENLRLDAQIRQEIGAHVSWLQQQRERTLQCAITHVQQYPHLQQACDRLDSIPGIACLTAMRLYSVYFDQHRFRGAPQLVAYAGLCPAQRLSGTSVHGKPSIAMAGNAQVRQWLYMSALSVLRYDPDFAQWAGELKARGKCGRVIVVAIMRKLLHVVHGVLTSDEDYDPRKAFPTHEHSTAVQAPMPTDQKHVASARKE

SEQ ID NO: 282811 - protein, 371 aa, unidentified
MVDDQLGVRDRWGQGLRRPWVSKGPHIPYPQSPNSCVGVETRMTQDWARLEENLMSRPMYVGIDVSKAQLDVSSSPTPELEGQRLPNTTAGIAHLVASLRPLQPSLIVLEATGGLERPLVRALVTAALPVVVINPRQVRDFAKATGRLAKTDGIDAQVLARFAEAVKPALRQVPDSAVQALAALMARRRQLVEMVTAEKNRLSRAVRSVRRRIQAHLTWLTAELARVEEELDQAIQQSPIWREQEDLLQSAPGIGPVVTRTVLADLPELGTLTRKQIAALVGVAPLNRDSGTWRGKRTVWGGRAQVRAVLYMAAVVAARFNPVIRAFYQRLCAKGKAKKVALTACMRKLLTILNAMQKSGTPWRGIVVQHA

SEQ ID NO: 282812 - protein, 341 aa, unidentified
MDKELYFGVDVSKKTLDLAYYDGETIDWKNAHIQVSNDDAGFKKIGSWVAKVGKDFDTFLFCMEYTGLYNQNFRLWLESKEYIYGMVEPRKMHRFEPDLDDDQRSLDRIKTDELDAFRIAIYCEQNHKKILRNPSKLPSPVYFKLKRLLAERKQNTKQSTLYKQQLHDICAYDTDLSVERKKLLLKSMKENQKAIDREIDSYINEDASISKNYDLLTSIPGIGRIIALETIVLTENFTAISNPRKYACYIGIAPFKKESGTSVRKRTTVSKKGFSEAKADLSIAVLSAIKNNPSIRDYWIRKRKEKCGGIVLNAVKFKLVLRMFAVIKRGTPYVETDAYKN

SEQ ID NO: 282813 - protein, 315 aa, unidentified
MEDSQVFVGIDVSKSCLDLASRPTGEVWQVTNDADGIGALAEQLTAMNPSLVVLEATGGLEWALTAELAAAGLPVAVVNPRHVRDFARAAGILAKTDVLDAQVLAHFGQAMEPEPRPLPDAEAQELQAMVGRRRQLVEMITAEKNRRRTVIARIRPQVEEHIRWLEKSLEDLDQDLDGFIRSSPLWRTKERVMRSVPGVGPVLSATLLANLPELGELSRGQIAALAGVAPFNRDSGTLKGKRTVWGGRRRVRAALYMAALVASRYNPVIKEFYQRLCSMGKPKKVALTACMRKLLVILNSMVKQGREWQPNTETP

SEQ ID NO: 282814 - protein, 346 aa, unidentified
MTIVEDACVITGGVDTHADTHVAAALDPLGGLLGVMEFPATAAGYAGLLGWLSGFGAVGLVGVEGTGSYGAGLARHLAAAGVRVVEVDRADRQDRHRAGKSDPLDAVSAARAAQSGRAAGAPKGRDGEVEAIRALMVARRSARAERTQAINQARSLIVTGPEELRARFARHTPARLVAGLAALRPRPGEVPGYATRIALRELGRRARFLEAQIGQLDELIVPLVTARAPGLLALYGVGADTAARLLIAAGDHPERLRSEAAWAHLCGTAPIPASSGKVTRWRLNRGGDRDANHALWRIVICRMSSHPATRAYVARRSKEGLSKKEIIRCLKRYVAREVYHHLRAGA

SEQ ID NO: 282815 - protein, 372 aa, unidentified
MRHHSEAFIGIDTSKSHNAVAIAEGVRGGEVRFLGEFPAIEAGMRKLIAKLAAKYNRLTFCYEAGPTGYGLYRLIKSLGHECIVVAPSLIPKKPGERVKTNRRDAISLAKLLRAGELTEVWVPDERHEAMRDLSRARLAANKDLQGKRQQISSLMLRLGRCYPGKTTWGPAHMKWLMSQKLEHREQRMALEELLHGIRQEGERVERLEQAIREAVPEWSLAEVVTALQAMRGINLIAAVAILAEIGDLSRFQNPRELMAYLGLVPSESSTGDTVRRGGITKAGNGRARRILVEAAWSYRYPARVGQEKQPKVAAAPRRVREIAWKAQTRLCGRFRSLLRKGKLPTVAVTAIARELSAFIWAINREVVANRQP

SEQ ID NO: 282816 - protein, 398 aa, unidentified
MVVRVWAGIDAGKSHHHCVVIDEDGRQLFSRRVANDESSLLTLIANVHALEVDAVTWATDLNHGGAALMIELLTMHDEELLYIPGKTVHHAASTYRGDGKTDAKDAAVIADQARMRRDLQPLRHGDEISANLRLLTARRADLVIDRTRALNRLRATLLEYFPCLEAAFDYANNKSALVLLTRYQTPDQLRRAGTRRVAAWLVKAGASKGELIAETAVRVAHAQHTVVRSQDIASRIVSELSQEVLRLHENVAHVDHEIEALFRQHEDAEILLSLPGFGPRLAAEFLAAIGGGLSGIESADRLAGIAGLAPVPRDSGRISGNHHRPRRYDRRLLRASFLAAQSAARYCPDSRAYYEKKRSEGKNHTQSVLALARRRVNVIWAMLRDHQPYRRRTQAHAA

SEQ ID NO: 282817 - protein, 398 aa, unidentified
MIKQFIGVDISKDSFDVTLLEGSGEIKLEVKLTMARDGFDTLLEYLSSYSKEELLIAMEATGIYHLPLLSFLLENSFKCVVINPILIKSFIGSTTLRKTKNDKKDAASIALFSLKSHQSLHLASPDIIENIRPLIRERESLSKDIARLKTEIKANVVQLFPELLKNTNIFTKSILNLLLKAPSRKAIKNLKEKKIQQILDDTSGNKVKITARDILTLAKTSIAVSDKYLEKVLTSKIRRLIAIQEELSILDSELENSLEDTDINDNIDILQSIPGIGAVTSKNFMVEVSSVDRFDSVKQLCAFIGIDPSVRQSGSSVNYRGKISKRGNAYLRRTIWQMAIGTIRSCEKFKLYFSKKREEGKKFKQAVIAVANKLLKTIFVMLKNKTKFDVNLALGVSK

SEQ ID NO: 282818 - protein, 367 aa, unidentified
MDHFAGLDVSVKETSVCVVDATGKIVREVRVASEPEALLAVLASPAYRFKRIGLEAGPLSQWLFSALAEENLPVICVETRHMRAVLKAQVNKTDRNDARGIAQMMRVGLYRPVHVKTLRSQKLRMLLTHRKLLQSKAIAVDNDLRGTLRNFGLKVGMVGAARFEARIKELIENFPDLAVLVEPLLVVRRVLREQLGILHGRLLAVVRDDDVCRRLMTVPGVGPVVALTYRATIDVPARFRKSKSVGAVFGLTSAKYQSGEIDRSGAISRCGDELMRTMLYEAAQSMLFRSTRWSWLKAWAMQIARHRGMKKAIVALARRLAVIMHRIYGPAVRCKGIRTEWSFWSALIYPASRGSSCSGPSWLSAHT

SEQ ID NO: 282819 - protein, 339 aa, unidentified
MSSLPVFVGLDYHQDSVQVCVMNQAGQMLTNRSLANDARGIDQVVRVYGTPQAAAVEACCGAANLGAELLERHHWPLQLAHPGYVARIKQSPDKTDFADARLLADLVRVGYLPKVWLAPEEIRRLRRLVRHRQQLVDRRRSVKLRMRALLRENRQRPPASINAWTKAWFAWLERDAELADDDRWIMDGHRSELRQLTLQIRAVEQRLAQRAENDAAMQRLMQFTGVGLITAATLRAEIGRFDRFDSGKQLARFCGVSPRNASSGQRQADAGLIKAGNPNLRMVLIELAHRLIHRMKGRWSKLAYKLLRQGKPRNVVVAAVANRWVRWLYHQMQPAALAA

SEQ ID NO: 282820 - protein, 373 aa, unidentified
MAGSREAFVGSDAAKLRNAVAVADEGRDGEIRYLGEFDAAPESMRRLVARLAAKYDRLHFCYEAGPTGYGLYRLIVSLGHSCTVAAPSLIPRKPSDRVRTNRRDATTLARLLRAGELTAVWVPDPAHEAMRNLVRARTAAVETVRVHKQQVGAFLLRHGRISPLKKSWGARYRRWLQEQAFEHPADQIVLQEHVEAVRLAEERLGRIERAIAEFLPGWSLAPVVEALMALRGVDLVVAVSFAVEIGDVRRFESPRQLMGYLGLVPEERSTGETVRRGSITKMGNARLRQLLVESAWTYRHPPRVGKGKLAKIERVPPKVREIAWKAQSRLTARFRAFAARGKKLTVTCTAVARELAGFMWAVAWEVPPASSVA

SEQ ID NO: 282821 - protein, 351 aa, unidentified
MFMIGVDYHPSVQQIAFTDTETGECGERRLNHSDGEAEKFYRELKQRGVSVRVGIEATGYSRWFERLLAEMGFEVWIGNAAEIKTQRVRKQKTDRADALLLLKLLLENRFPQIWVPSPENRDLRQLLWHRHRLVQMRTRIMNQLQAIAMNEGKRWKKRLWSEQGRAELEKFQLAPWASRRRQDLTELLDRLNPTIEELTTAVEQEAKKRPEVLRLMTHPGVGFLTALAFVLIIGTPERFQCGKQIGSYVGLIPAEDSSADRQRLGHISKQGSALLRFLLVEAAQAAVRSDPDWKRRYIHLAMRRQKSIAKVAMGRKLAVRLYWMWRREWDYQQFREFGSYAGKLGTGHGVN

SEQ ID NO: 282822 - protein, 350 aa, unidentified
MNVNHYIGFDVHKKSISYCVKTADGRIVEESKLRATHDALRQWAGKRPEPWHGAMEATLFSGWIYDTLQPFAAELQMGHPALMKAIGASKKKNDRLDARKIADLVRCNLLPACYVAAVEIRELRRMLRYRNLVVAQSVRMQNKMGGLLMEAGAEYNKRRLHGKQYFAELLETAEEVPESVKDLLRLSRGAMEMFEATQQQLLARLRKDPLLAQRVALLRSIGGVGEVTALTWVLEVGDPQRFPSVAHAVSYCGLTSALVSSADKQQRGPISKQRNAHLQTVLIEASKIAPRWNPQLAAVHARELERGNRNRATLAVARKLVAYLLAVDKSGQPFQPCTPLAAETEVEKVA

SEQ ID NO: 282823 - protein, 340 aa, unidentified
MNTNAPQLGIDVSKLKLDVALLLSTGAHAATFANTPKGFLALARWLARFPVRPRVCLEATGTYALPVAHFLHGQGLIVSIVNPMAIHFFARTRMSRNKTDAHDATLIAHFAQQHQPRAWQPPTPAQAQLQPLVRVREQVLESRVVAQQHLESAPASTAKYFRAQIRLLDRQLRALAGQIEQVLQAHPTLKESAALLTTIPGVGTVTAATVLAIIPEIDQLDNARQLAAFAGVTPSQRQSGTLTGRTRMSKLGHRRLRKALYFPAITALRCNPRVQALAIRLAQKGKAKMVIVGAAMRLLAHLIFGVLKNRTAFDPGYQRRQANITRSRAAASLQLAPGCP

SEQ ID NO: 282824 - protein, 313 aa, unidentified
MSKLVSKITLGIDVSKAELVICDWDTEEISTLENQASVIKVWLKSLYGPVRIAIEPTSHYHLEVVEQAHALGLEVYLINPRQLSHYRLAVNVRNKTDPLDAWLLARYLAHECASLRPFKPQCAKAQRLWALLKRRATVVRARTQLDQSFRECTLSIKALRREIRHLLERIDKHIQALVRALGWWADYQRCLSIPGIGPLNAAALVAVFHRGAFAGSDAFVAFIGFDVRLRESGKYKGKRKLTKCGESEIRRLLFCAAQPARCYALFDNYYQQQLTKGLSKIAAKVILARKLARIAFTLLTNEQSFIKKEIAYS

SEQ ID NO: 282825 - protein, 339 aa, unidentified
MKLTPVGVDIAKNVFQVHWVDPDSGEIISKRVKRAKFLEHFANREPCLIGMEACGGAHHWARQLTKMGHQVKLMPARFVKAFNIGNKSDPADARAIWLAVQQPGKAVAVKTEGQQAVLALHRMRQQLIKFRNMQINCLRGLLTEYGEVMGKGRSALDKAISAVLATVAERLPAALIDTLREQWNGLSKLDQQIATIERRLREWMKQDKACNSIAEVPGIGLLTATAAVATMGDPKSFRSGREFAAWIGLVPRQTGSGGKVVLLGISKRGDTYLRTLLIHGARGVLYNAKDPGAWVERLGKRRPPNVVLVALANKMARTIWAILAHDRPYEKTFVSTKPA

SEQ ID NO: 282826 - protein, 388 aa, unidentified
MSITCGIDWAEGHHDVALLDENGKVVARRRIDTGATGFAEVLALIAEHGGGPDVTPGAIETDKNLLVVALARAGFTVYPINPRAAARYRERFHQYGRKSDADDAAMLGDILRTDRHQHRALPAITEDALAVKALARQHKEAIWALQQTTSRLRSVLLEFYPQALQAFPNLNHKAALAVVGAAPTPTQARALTVKRIVALLHRVGRRNDPGLADRIRDTFHVPSLAQSEPVERALGVAVSTLVGIIGTMLNAVEDLNVAMSKQFDAHPLAAVLTSAPGLGPVLAARVLGEIGDDRNRFATAAGLRSFAGTAPVTRASGRSSYVKARKVRDKRLADACHWWAFASLTKSTGARAHYDRRRAAGDTHNAALRNRANKLIGKLWWCLEHEEP

SEQ ID NO: 282827 - protein, 470 aa, unidentified
MAARKDKADGAGVPGHGGDGAEVAEELTQVVAYAAAIDVAKGSGMVCTRVPGSRPDRRRQKVWQVGATCGQVTALMDHLRAEGIQRLVLESTSDYWRIWHYLAEAAGLEVWLVNARDVKHLPGRGKSDTADCVWHCKLNERGMLRRSFVPPQAVRDLRALTRTRSRLAQDQARHQARVEKILEDALLKISVVISDLFGTSGRRFLDALVAGERSPAALAALGDPRLKATRKELEEALTGRFRDIHATEIALHLRLIDAINAEITALDEQIGQQLAAVPGTAPACSGCGLAGGGHAPDCDDLGILLLGLADRLDEVTGIGAVNGRAIIAELGTDPSQFPTPGHAAGWARLTPRSRQSGETARPGRTGKGNRYIRGALGQAVMTAAKTDTRLGAMYRRIARKRGKQKAIVAVARVICEIAWILICDPSARYQELGPDYYTPRSPARQTQARIREIERLNPGKKVILADDDAA

SEQ ID NO: 282828 - protein, 343 aa, unidentified
MGEVSTIGLDIAKSVFQVHGVDAGGAVVIRRRITRAKLLEFFAALPPCLVGIEACPTAHYWSRRLQALGHNVRLLPPSYVKAYLKRSKNDANDAAAICEAVTRPSMRFVATKSEQQQCGLMLHRSRQLLVCQRTMLSNAIRGHMAELGIISAKGRNGTAELLKIIANEQDDRIPEAARFSLDVLARQYAAVRAEIVAIERRIHAWHRSSEESRRLEEIPGVGPIVATALVAEVGDWKVFSSGRSLAAWIGLVPRQHSTGGKERLGRISKQGNRHLRWLLVAGAMAVIRYARQHGTKRPWLARLMDRRPIKVAAVALANKIARMAWAMMVRGERFKEPRLLPAA

SEQ ID NO: 282829 - protein, 356 aa, unidentified
MSIVTHSHPFVVGVDTHAKNHVYAIITTTTGELLQTRDFPTTSAGINRALAWVARHIGADLATLWVIEGAASYGALLAGAVGAAGYDVAEAPRMDARSHHGVGKSDLLDAHRIAAAVLPLETDQLRRPRLNEGIRAALRVLVTARESMTTERTRAVNALTALARVNDLGLDARKPLTGTQIREVCRWRAREEPLALSIARSEAVRLAKRIGELDAEIKTNNDRITELVEVSEAAPLLQETGFGPVTAAICLTAWSHHGRVRSEAAFASLAGASPIPASSGNTVRHRLNRGGDRTLNRALHMVALSRMTFDTETSNYVTKRQTEGRTKREIRRCVKRYLARRIYRTLNAATPSASQA

SEQ ID NO: 282830 - protein, 338 aa, unidentified
MDNHSLIAIDLAKNIFQVCIVNSNNRVLVNRQLTRTSLSQFIAKQAPTTIAMEACYSSHYWARLFQSCGHQVKLIPAQHVKPFVRGNKNDHNDALAIAEAARRPNIRPVPIKTVAQQDIQALHRLRERIVSQRTGISNQTRGLLSEYGIVFPNGFKALKQVLVSLLDPNDERLSVTIKHQLQFIADEFESTNTRLNELNQLLAKIAQDNPLCRNLMSIPGIGYINATALFSAIGNGNQFNSARELSVWLGVTPKHFASGNKHVTAGISKRGNRYLRKQLVHGARAAMSRCKKRDDQLSRWLNAIVARRGPNKACVAMANKMARFSWSLLQKNEMYKAQ

SEQ ID NO: 282831 - protein, 358 aa, unidentified
MKYIGCDFHPSFQQIAMLDKETGELVERRLLHTEEARSFYQGLQGSVVVGVEASGNMDWFESLLAGLGQEMWIGDAAAIARQEGRKQKHDRRSAALILRLMMENRFPRIWVPTVAERDLRQLLIHRHHLVRMRARIKNQLQHMALNQGWQKKSKLWSKAGLELLRSLKLEPWTGQRRDTLLAMLEDLEEKIKPLDQAVAREAERNQMARLLATHPGVGPVTSLATVLTMGDVNRFADSRSWVSYVGLNPSEESSGQRRRLGAISKQGNPFLRQLLVEAALTAARGDKDLGRMNARLKARKHHGVAKVAVARKLAVRLYWMARTKRSYPDVVRMQGSQSHPVAEVKAETLNRPPASHQS

SEQ ID NO: 282832 - protein, 514 aa, unidentified
MSEGTAVPPFSRLSPRLLRKHSAWHIRHIPLTQNFHPQPLAPARKADWVHAHYARFRSPYAAQDKPFASGFTNPDPNGGDIMLKINYMSTLFVGIDVSSKTNAVYAMDFEENKYISSSFGNNQPGADKLVNMIAECMQKHKNLDTLLIVLESTSVYSVHISNFLSASEVLMPYRPYVFCVNPKATSNYRKSYIGMEKTDPTDAYLIADFGRVGRTKKLEPWRGGQFIALKRLTRHRMHLSECITREKTYMVSNLYLKFSELQLLEGDDRPFGSLYGATSSAVLTEFLSPQEIIDMPEEDLLAFLAEKSRNRISDISKTSELLRKAARDSYRLDKCMYEPLNISLASSFNCIHAYQKEIRLIEQAIEKCINGMNPNALIILRSIPGIGPVWAYGILSEIGDIAAFHSSDALAKYAGLYWPKGDSGDFTSEDNQMSKAGNPYLRYYLGEAANSVRKHIPEYADFYARKYAEVTKHQHKRALALTSRKFVRLVFGLLVKNQLYTGEKLDTEYNTESN

SEQ ID NO: 282833 - protein, 365 aa, unidentified
MKKISTAAAHGIEKNEGQKLTIGLDLGDRWSWYCVLNAAGEVLLEQKLATTPKAMKEVFGGMPRSRIALETGMHSPWVSRLLSDLGHEVIVAHARNVRLIGESRRKDDRFDARPLARLARIDPELLGPVQHRSRKAQADLTVIRARAGLVRARTSLINTARGLTKSYGERLRGCSPRKMNRELAEGLSPELQSALQPLLDEIESLSERIQEYNQRVQQIAQESYPEVARLEQVKGVGTLIALTYVLTLEDPRRFRKSRDVGCYVGLRPGRRNSGQSEPQLHISKEGDPYLRTMMVQSAHHILGPFGADSDLRRWGLKLAERGGKNAKKRAVVAVARKLSILLHRLWVSGEAYEPLRHQRALTLAA

SEQ ID NO: 282834 - protein, 310 aa, unidentified
MEKVIEYPQIVATGCGLDVHKEIIVGTISRGNQSFETREFGADTSSLTSLRDWCKQAGVTHVAMESTGIYWKPVFNILEEDFEILLVNARHVKNVPGHKTDKKDSAWLSKLLLSGLLKASFIPPQDIRELRDLVRYKKKLIGQVSSEKNRIIKVLEDCNIKLSSVLSDVEGVVGSKVIDAIISGERNVDVLMSFYHGRIKASREEFRKALIGRITPHHIRMLQFHKKRIKDTERFIDDIDYEIDKAAEAYKVEIDLLQTIDGIKKEGAITIISEIGVDMSKFPNEHHLASWAGVSPGNNESGGKKKESKP

SEQ ID NO: 282835 - protein, 410 aa, unidentified
MEVIVERPAALDVHKAQVTACVRMPAGRDGRAQEVAEFPTTVRGLLTLRDWLRAQRVTQVAMEATGVYWKPVWAVLEDDVELLLVNARHVKQVPGRKTDVSDAAWLCQLLEAGLLKASFVPPKPIRALRNLTRYRKAQIRERQREANRLHKVLEDTGIKLDCVASDILGVSGRAMLDALVRGTTDPAVLAELARGRLRAKLPALREALAGRFDAQHALLVGAILAHLDFLDEQIERLSDAIGKELAPFAAAVELMRSIPGVERRTAENVLAEIGLDMSRFPSAGHLASWAGQCPGNHESAGRRRSGRTRKGSKWLNEALKEAAMAAVRTNGSYLQALYRRLRPRVGHSRALGAVKHSMICACWHMLSSGELYRDLGGDYFLSRDPERQTRRLVRQLEALGHTVMLQEPAA

SEQ ID NO: 282836 - protein, 341 aa, unidentified
MQITTIGLDIAKNVFQVHGVDTDDRPVVRKKLRRSQVLKFFAALEPCVVGLEACASAHYWARELAALGHDARLVPPSYVKGYVKRGKSDVIDAEAICEAVTRPSMRFVPVKSAAQQATMVSHRLHDMLIRQRTMLINLLRSQMAEFGLVASKGGQGVATLVAILNDAAETRIPAPARAMLKELVATIEALNLRLDSTEKAIVASVRSDPVARRLMTIPGVGPITASAMVAMVGDPSRFRNGRHFAAWLGLVPKQNGTGGKMRLGRISKMGDRYLRKLLVLGATSGLGRARAGRDPMARWTRRLKERRAPRLVSVALANKMARIVWAVMAHDEVYRPEAAAA

SEQ ID NO: 282837 - protein, 370 aa, unidentified
MKKRITFVGLDTHKNSIEVALAGEGANGAVRLYGSIGGDLDSLDKMIRKLRIPGTELRFVYEAGPCGYEIYRHLRAQGLHCDVVAPSMVPRRSGDRIKTDRRDACNLARLYRAGELTAIYVPHEDDEAMRDLVRGRQDAINAQRKARQQLGGFLLRHGVRYPGKCLWSLAHGRWLAGIKMPHPAQQIMMQEYIHTLEECTQRVIRLNEQIQQLLPDWRMHPLVAALQALRGVAPVVAATVVVEIGPMGRFKNPRQLMAYLGLVPSERSSGGSVRRGAITKTGNGHARRALIEAAHSYRHPARISRTILKRQETLSEPVRQIAWKAQLRLCARFRRLIARGKSRNRVVAAVARELSGFMWAIAKQVPVPQG

SEQ ID NO: 282838 - protein, 309 aa, unidentified
MKEEFVYLGVDIAKSYLDAAIGSEKRRFANDAVGHRALIKWIKEIEGLVQVICEPSGGYERALIRALVGTQIRVSLVPANRVRQFARAAGILAKTDRIDAKVLCIFAEAMQPGTISGSQLEQEHLRELESQRRHLTHLLVMEQNRGARVSDVCVRRLNRTLINQIKKQIEQLDLLIKNHIEESAELSVKAAKLTAISGVGERTAALLLAQMPELGRLNRREVAALVGVAPFNRDSGRMRGTRTIYGGRRPVRHGLYMAALVAARHNPILRAFYQRLRTAGKPAKVALTATMRKLLIVLNSALKSDLSYA

SEQ ID NO: 282839 - protein, 384 aa, unidentified
MTPRRRFPPAGCYRGSSLTEIAFAGHWLTAWRTASSNSGELLSFRCRPTLKGLLGQSAKIRKHFPGHTLKLAYEASYIGFTLQRDLAEQGICCDVVAPSSIPRKGGKAVKTDRIDAAQLAQFYANDLLTIVQVPELEVEQDRDLLRSRQSLMHQREQVRRHLQAILRRNGLHYKAETQHKSHWTKVHHSWLERTIADQPGSLKVNLELLYRQLQDINRSLAEYNQRIEELAQTERYQKLVQALTCYKGIKTIFALTMITEIGDIRRFPHPRQLVSWIGMDIREYSSGGKHNRFGITKHGNRYLRTAFIEANQRGYRTTRLSKDVRLRQAGSAPEYVEIATRCLRRLSKKGNRLLLAGKHPNKVKVACAREMVGFVWESLRLAAA

SEQ ID NO: 282840 - protein, 489 aa, unidentified
MIQGKRSVPRAASSKVKAEARPKAASCPGGAPAGALTVLNRNAAGIDVHSDMHMVCVPAERTSPEGEGASGDLPANVRKFGANSCDLAAIAAWLAACGVTTVAMEATGVYWIALFELLEARGFEVYLVEPGQLAHCGARPKTDVLDVQWIQRLHTYGLLRPSFRPANSIVALRGYHRQRQMQIRYAASHVQHMQKALEQMNVKLTEVLADITGLTGRRIIEAILAGERDSRKLAALRNVQCHNDETTIAKALEGTWRPEHLFALRQAYDLYRFHHQQIAECEQMIKTELAQLPNRAGDKPFSPKPRKGGRKQNDLTFEACGPLFKALGVDLTEIEGIDVRTALVILAELGVDVSRFPTEKHFASWLGVCPRQYESNQNKKKRGPRKGKNRIAIALRMAAQGLGKTKSPLAMYYRRIKSRIGGKGAITATAHKLACLVYRMLKYGKEYVTQSMEEYESRIKQQLERSLRRKATALGYELVAKPAPEPAPA

SEQ ID NO: 282841 - protein, 469 aa, unidentified
MICSVGIDLHQGQHRARCLDDRAQPCDGFSFQTTPEGLATLEERVFRDGANPVIVLEPAGLPWLMVAVYLRTRHPDCRLVKARTQKVAALRRYLRGPVKSDRLDALTLAKMPFIDPEQLDETYLPPAEIHALQRLTRQRKRLESDVSGRKIRISAIIDGYLPGVRRAFDDAWSSPFRAFLRSRISPFCVVRDGEEALHAYLSKASPRSRWSRVQTRQVFLACQSVAAVCELSAAAGTVNEEFFLNLQDEIARELRMMEMDEAESESLAHRIDGLYRKLHPSDNLCTIPGVGEHTAPIFLASVGDPARFRNQSAFANWEGVVPGARQSSNVEAKGLRMTKAGPSIMRMALFQAGDIGRRWDPQLASVYYRQMVYHGKNHRQAMGAVMSHLGARVLRVLKEDRPYELRNIKGKPIDKKEARKLILSQYHVSEAIRRERRRRNSRNRRRRLISGDSDLQDTRGSRAPQPIQA

SEQ ID NO: 282842 - protein, 337 aa, unidentified
MLFCGIDLHSNNCLVVVSDENDKVVYSKRLPNDLATICTALSPNQQELFGVVVESTYNWYWLVDGLVAAGYSLHLANTTAIKQYDGLKHRGDESDARHLAHVLRLGLLPEGHIMPKADRAFRDLARRRMQLVGQRTSQIVSIETSMAQHMGATISGNSVKELTVDDIDAMPIGPTEALGMKANLAILQALQVQIDGIETTLSKHCRRDKNYRLLCSVAGIGPILATVILLETGDIGRFADVGNYASYCRCVGSAHISNGKKKGEGNTKNGNRFLAWAYVEAANFAIRYCEAARKFYQRKRSKRNGIVAIKAVAHKLACACFHMLKTGEKFSVERCFT

SEQ ID NO: 282843 - protein, 384 aa, unidentified
MNKHSMIFIGLDTHKEFHEVAYCEEQRGAAPVHYGRIPSSKVSVKKLLRQFESKYPGATLHVVYEAGPCGYWIYRLITSLGHCCYVVAPSLIPKKPGERIKTDRRDALKLVRSLKSEDLTPIYVPKPEDEAVRDLSRAREAAMKDLKEAKYQLKALLLRNNIRYEGTANWSKKHLRWLTELILPHPAQQIVLQEQLQTIEERIRRLERLDNELTHHVHQWRYYPVVKAVQAMRGVRLLVAVGVVAELGDLHRFDHPRKLMAYLGLVPSEQSSGGKRHLGAITKAGNGRARRLLIEGAHSYRYPAKVSTELQLRQEGLPKDIVDIAWKAQLRLCKRYQRMSKKGKHYNLIITAIAREMAAYIWVIAKEVVLTPVNPKLRLSRVPA

SEQ ID NO: 282844 - protein, 324 aa, unidentified
MKNEAESFALFVGVDVSKSQLDVFLPDSKTRLTIDNSTDAIVRELVKVLKHKSRVLVVMEATGGYESTLVRVLGERQIAVAVVNPRQVRDFAKGIGRDAKTDSIDAEVIATFGQVVKPAPMVAKSEAEEKIAALVTRRAQLLDLINQESNRLLQTGDHEVKDYIRQTLESLKKQLKVLDSRLEKCVAADTVNARKVEILNSVQGVGAVTISTILADLPELGKLNREQIAKLVGVAPINRDSGTWKGQRFVMGGRVHVRRVLYMATLVATCRNERIRAHYQHLLARGKAKKLALVACMRKLLTILNTLIKNDVLWSNEKIVPGQP

SEQ ID NO: 282845 - protein, 340 aa, unidentified
MDNIGLDLHQRETQLCILTAEGEVVEQRIRTSRERFSEVLGERGAARILLEASTESEWVAQHLESLGHEVIVADPNFAPMYATRSRRVKTDRRDARTLAEACRLGAYRPVHRVSLQRRHLRAELAVREVLIRTRTRYVQVIRALVRRDGLRVPSCEPEHIVAKVAALPLAPRTSTELAPLVALLEPLSAQIAAADRRLAALAAADPVVTRLQTAPGIGPLTAVAFVATLDVVGRFATAHQVAAYLGLTPRERSSGEQQHRGRISKTGDQRMRWLLVEAGWRLLRSTQPAAAPLRAWAERIAARRGGSIAVVALARRLAGILYAMWRDETEYRAAAIKAVA

SEQ ID NO: 282846 - protein, 365 aa, unidentified
MNATAALPVVGIDVANSVFQLAVADGAWRVTEEHRLTRTQMERWFVNRSVGLVVMEACGSAHHWGRWLNALGIEVRLLPALYVRAYVKRNKTDAADACALLQAARCADIVPVKVKSIEQQALQGLHRTRSLWMGTRTSRINALRGFCREFGIVIAQGARLGVERIARVLADPHSAVPELIRGTMKLLIEEIRLLEARVAQLERELTVVARASGACTRLLTIPGVGLLTATAMVAATSGSVQHFRDARHFASWFGLTPKERSSGEVRHLGRISKRGDRYLRMLLTHGARSVLSAAGRAVQIGKNVDALRHWALTVQARANYNKAVCALANKLARICYATLRDAQPYGEPVRRPNKKIERSSFEIAA

SEQ ID NO: 282847 - protein, 322 aa, unidentified
MSVTVLGIDIAKQKFDAALLVDGKTKHKACKNSAEGFETLMVWLEKQRIQKVHACLEATGNYGEDLAIYLHEAGHIVSIVNPARIKGFGQSELIRTKTDKIDAALIGRFCLAMKPGPWIPPTPAIRSLRALVRRVDSLIDMRSQEKNRISTAHESVIFLIKEHIAYLNQEIEKIRQQIADLIGQDPNLKRKHDLLDSIPGIGKATIPHILAELDDLEKFDHVRQLVAFIGLAPKETLSGSSIKGKPRLCKIGHARLRKALYMPALVSIQCNPVMIAFYNRLKDKGKNGKVIVCAIMRKLVHVIFGVLKSGKKYDPNYKPAFA

SEQ ID NO: 282848 - protein, 417 aa, unidentified
MKGTTQKEQYRRCCGMDVHKETVVVCVLPADGEAGKALKKVYGTFRNDLGRMRGWLKQLKVTEIAMESTGVYWRPLWNVLEGHGFHLVLANPKQVKALHGRKSDKRDSQRIAEFLQDRRIDPSFVPPPEIRRLRDLLRYRVSLLEQRNQTHNKIRDLFETANLKLSSVASDLLGVTGQKIIEALIAGETSPDKLSWKVKGKLRKKEREVRQSLVGCFDEYHRYMLDLLWKQYQFLSRQIEQVEEKIRREMEPHRELIELLDGVPGMDETVAWTLIAEMGTDMGVFPTTGHVASWAGMCPGTNESAGRQMNTKTRKGNRYLRRALLEAAWAATRKKNSYLRAFFYRLMYRKGWGKAIVALGHKLLVIAYEMIKTRTPYYELGADYYDQLNPEKTIQRLVQRLGRLGVEVAIAPKQANA

SEQ ID NO: 282849 - protein, 431 aa, unidentified
MSERKSLEIRVSVDVGSRSHQVAIGLSSGEVLEEFEIAHRVEGFEDLFSRIERHRKGNSYRVAVAMEGFNGWARPLDSMVRGRGYRLYNINNLKLARFKEIFPGAAKSDRIDARKGLELFQLRDHLPLAKEVLQEVVGTPHENEVLKRLSRRRRRLVDERVRVVNNLQADLQAVCPGLLEITKEAGNRWFLNFLISADTLPQLARLRRTTLLKIPSVGVKYARLIQDWQERAHFSEEVEWVSAMIQEDARRILELDETIKALEVKTAEVAETSTIAKLLRSIPGYGAICTSELAGEIGTIERFNKEGSLALYLGMATLDNSSGKYQGTKRPKHINTRAKAAMMTALDRHRKYVPQSQQYYEKKRAQGKSHNQAIRALGRHLCRIIYKMLKEKREYEVRPLKRDTQAKVTSRSSRIGQIGKKKIRRKDKITI

SEQ ID NO: 282850 - protein, 318 aa, unidentified
MKEKLRFLGLDVHAETIAVAIAEADGEVRGLGTIPNRAESLRKLIKKLGPTEKLRVCYEAGPTGYVTYWQLAELGVKCEVIAPTLVPVKAGDRVKTDRRDAEKLARCYRSGDLTAVWVPDEGSEALRDLVRAREAAKQDQLRARHRLNKFLLRSGQRPPSGIRPWTRSYLIWVAQLRLTQRAQEATRIDYLHEVEHMRERVARLEQAIAEAVKLASPGLQQVINDLQALRGIADISAVTIAAELGQVSRFDGARQLMGYCGAVPSEDSSGKRTRRGSITKTGNAHLRRIVVEAAWSYHRPPMYLVRIAQTTGEYFGRG

SEQ ID NO: 282851 - protein, 355 aa, unidentified
MDSKKYIGMDVHQATISVAVRDAAGKLVMESIVETKAATILQFIQGIHGSLWVTFEEGTSAAWLYDLLQPHVAQVVVCDPRRNALLKAGNKNDRVDARKLSDLLRAGLLTPVYHGQSGVRTLRELAKSYLTVTKDATRVMNRLKGLYRSWAIPCGGDKVYSVRHRNAWLEKLSEPGVRRRAEWLYQQLDILLDLRREARRELLTESQKHPAHQLLRQIPRLGPIRVALIIALLQTPHRFRTKRQLWPYCGLALQTHSSGEYRVTEGRLQYTKRPAAVRGLNVNHNHDLKNVFKSAATQASASGDPLGDFYQNLLAGGMRPAMARLTLARKIAAIALKIWKKGERFDPGQLKRKCA

SEQ ID NO: 282852 - protein, 402 aa, unidentified
MRYYLGVDWADQEHAVWVEDEMGAPVAAQTLPHTAAGFADCGRQLDEWRHAGIELWAGIERPEGRVVEFLLDHGVVVVPLNPKVVARTREQFRPSAAKSDPLDARVCAYCVRTRAHEVAPLRPSSEAMQELKLLTRDHQCLQRQHTRLLNQATLALKEYYPVVLEVFGDFGSVAAQNFVRAYPTPNAAAGMRRPTWEKFARRYRLRAELWEQLHAPALAVPAHVVRAKARLVQNLLEQLAVGRRQLSRSQQEIERFFPRVPVARQVAPLPGSRSGVTLPSVWAEIGDAVQRWRSAEHLQAVGGTAPVTQQSGKMRVVHFRFACNKHLRHHGQLFAQTTLLHCEWARRYYRRQRDRGHSHQRALRALAGKWLKIFYVLLSRNVAYDEGLHLKTIGQQTIRQAA

SEQ ID NO: 282853 - protein, 366 aa, unidentified
MAFELSRAKWLIGVCLPGSDKLSRYTIDAGDLGALTAVLAEARRKVAARCPGAVVAIASCYEAGYDGFWLHRWLREQGVHNEVVDPASIQVNRRARRAKTDRLDLEQLMRVLLAYRRGEPRVCSMVHVPSPEQEDAKRPVRERERLITERGAHTNRIKALLYGQGIGEVFPRRADFVDRLVGMRTADGRPLPPKLVTEIRREHERVCLLDRQVAALEADCAADEENALGAQEARIAQLEQLVGIGAISARLLVREVFYRTFDNRRQVGSYFGLTGTPYDSGQSRREQGIGKSGNARARTLAIELAWLWVRHQPQSALARWFVERVGTLKGRIRRISIVAVARKLMVALWRYLESGLVPQGARLRAA

SEQ ID NO: 282854 - protein, 370 aa, unidentified
MKEPTTSYIGLDIHKESIAIAIADSGRAAPRFIGTINPAPAELCKAMRRVCTKETTLIVYEAGPCGYGWVRYLRKQGWACDVIAPSRITRKPAEKRLKTDRRDALLLARESRAGNLTNIVVPDERDEAIRDLVRTREDVRIARHRVRLQMQAMMLRHGRHYQGKRNWTQAHDRHLSTIRFEHPAQELAFNEYRLASKEACERVERITEALRVQCEDWRMNPVVKALMCLKGFDFVAAVTFVAEMGDLTRFAHPRALMAYLGVVPSEFSSGASRRQGGITKSGNKHARRILVEAAWNNRFKAQVSRELEVRQEGHPKIIRDISWKAQLRLSKRWRSLSMGRKLAPNKICVAIAREFAGFIWDVARHVKVSP

SEQ ID NO: 282855 - protein, 428 aa, unidentified
MDASAVVVGFGGLDHFAGFDWASEKHDVCVVNGAGQVVLALEFADTAEGWAQLARQLEPLGRVGVAIETSRGPAVERLLALGVTVFPMNPKAAERFRDRKAPSGVKDDLLDAWSFADALRTDGQAWRPLRPEDPQTQLLRILCRDEMGLIEQRTAFVLQLKQSLQEYFPAALEAFDDWTLPAAWELIVQFPTPQELTKAGKRRWQKFLHTHHLYCPQTAQRRLEVFARADQFASPSGSVTVAKSLLAVTLAKQLRTLEGQIKEYRRQIEQAFAEHPDSDVFGSLPGGGRKLAPRLLGEIGANREVFASAESLQSYAGTAPVTRQSGKSRFVYVRWACNKVFRATVHLWADESRKTCAWAAAYYRRKRDQGKSHAQALRCLGQRWLKILWRMWQDHVPYNEALHMMSLARSGSWVIGLLPATPIEPARQ

SEQ ID NO: 282856 - protein, 429 aa, unidentified
MTNQPIAGFDVSKKFSDMCILSPDNKVFARMRVHHNISDFRKACSLLKEAEKEFAMTPIIIMEATGHYHRLLFHFLKNSGYEVIVVNPIQTDSIKNISVRKVKNDKVDAYRIAILYRLRELKPTNTPVEAILDIRNLCRQYYDISDDCTAYKNKLIAILDELFPGFNDIFGNIASKTALEILSTYPTPEDILNAPKDMLVEIISKASRKGLKWSLNKYDKLIDIANEVKPLFIKHSSSNVLLNTVITLIKTFQDLLKQIENEIHKIITNNPDYVGKAIELLDSIPGIDTITAATILGEIGDFSAFKSPKQLVAFFGIDPSQKDSGQFKSSNNKMSKRGSKILRRVLYTTAMANVRKKCNKELFNPVLFEYYNQKLASKPKKVALVAVMHKLVYIIFAVLRDQSPFMLRTPEEHKKLLVLKALQQRGKTA

SEQ ID NO: 282857 - protein, 341 aa, unidentified
MDVSVLGIDIGKNSCSVVGLDATGKVVVRRRMRRDTVITYAAGLPACVVAMEACCGAHHMGRALARQGHAVRLMSPEYVRPYVKAQKNDDRDAEAIAEAATRPTMRFVELKTEEQLDMQTLHRIRDQLVGDRTSLMNQIRSLLLERGYIVPQGRAKLAVRLGEMLDGDEPVLGSRIHRLVSDMRLRWIALDDRIADLNAEFTEAARSDERTRRLLTIPGIGALNATALVAAVGDARTFGRGRDLAAWLGLVPRQATTGGKPRLLGITKRGSRYLRKNLIQGARAALPTMSKSDTRLGAWLRGLLSRSHHNTVVVALAAKMARIVWALLRHERTYDPAAQAA

SEQ ID NO: 282858 - protein, 470 aa, unidentified
MKQRTSPRRLRQKPLHGSNNPARSSGLARFNAHAAGIDIGAADHWVAVPANRDAQPVRRFGTFTADLYAIAQWLEQCGIQTVVMESTGVYWIPLFEVLETRGFEVKLVDAHHVKQVPGRKTDVQDCQWLQELHSYGLLRGAFRPDDEVCVLRSYLRQREGLIGDASRAIQHMQKALEQMNVKLTEVVSDLTGKTGMTIIQAILAGERDAKRLATHRDPRCKQNQATLAKALQGTWRQEHLFALEQAVARYEFVHEQIRACDQQIEACLKAFQTKAAVEAASKRAHRRQGNAPAFDVWTSLYQMTGVDLTRIDGIDVLSALKVLSEIGLDMTRWPTAKHFASWLGLCPGNKISGGKRYRSRTKPTANRAAAALRMAAQTLSHSHSALGASYRRMRARLGAPGAMTATAHKLARLVYSMLRHGTPYVDAGQQAYEQQYRDRVVRNLKRNALAFGFALVPMPEAHHDQASGTL

SEQ ID NO: 282859 - protein, 445 aa, unidentified
MSETIEVQPGTVPYAARVGIDWADQKHNWSMQVNGKTSLERGELKNTPEAIDVFVNELARRFAGEKIAVALEQSRGAVVFHLAKYEHLVLHPIHPNMLDHYRKSFYPSGAKSDPCDGDLILELLCKHADKLRAFAPDDTTTRTLQFLVEARRDAVNDKTRYVNRLTGQLKMFYPQVLNWFDGVDSPLVCDWLMEWPTLAQVRKEEPAKVRAFLSEHHYSSERSEQLLQSLPQSIPATKDPAVIDASILIVKRLLGQLQALRASIAEHDKRIKELTATHPDRSIFASLPSAGPVMVPRLIAVWGTQRERYDTAAAMQSFAGIAPVVESSGKQDWTHWRWACPKFLRQTFQEWAWLSVRKSEWAKAYYDKQRAKGNSHHAAVRALAFKWIRIIYRCWKDRCPYDEGRYQAQLQQRAQPKQKPTARPGSVEIEWKKTAGFSKPTQIPC

SEQ ID NO: 282860 - protein, 315 aa, unidentified
MNRDSAYIGIDVSKAQLDVAVGQEGEHWQASNDENGIGMCVERLQAIRPVLIVIESTGGLEMPLMTELYAAQLPFALVHPGRVKEFARSIGRLAKTDKLDARLLARFGEAVKPSVTRLPGEAEQYLNALTVRRRQILDMLVDENNRLASTRFSLRPKIEEHIAWLKAELEQINQQIDDQIRQIPHFQEKGKILRSAKGVGPVLCAKLLSGLPELGQMDRKKIAALVGVAPFNDDSGYRKGKRRIKGGRADIRHVLYMATVAAVRSNIILKPYYQHLLREGKLKKVALVACMRKFLTILNAMIRDMRPFNAAHQPA

SEQ ID NO: 282861 - protein, 344 aa, unidentified
MDHFAGLDVSVKETSICIVDDAGKIVREVKVASEPEALLAVLKNLAYHFKRIGLEAGPLSQWLFSALAEAGLPVICVETRHMQAVLKAQINKTDRNDARGIAQMMRAGLYRPVHVKTIRSQKLRMLLTHRKLLQSKAIAIENDLRGTLRNFGLKVGMVGKVKFEARIRELVENLPDLAVLVEPLLIVRRTLREQIVILHRRLLAIVRDDEVCRRLMTTPGVGPVVAFTYRATVDVPARFRKSKAVGAVFGLTCAKYQSGEVDRNGRISRCGDEMMRVMLYEAAQSMLRSKKWSWLKAWAMQIARRRGMKKAIVALARRLAVIMHRIWVDGTEFRWTREQATAAA

SEQ ID NO: 282862 - protein, 368 aa, unidentified
MPGWLVLGNPSEKGKVMDKITRIGVDLAKNLIQVHGVDSMERVVVRKALSRQKFLEWLANLEPCLVAMEACSAAHYWGRKLCALGHEVRLIAPQFAAPYRKGGKHVKNDRLDAEAICEAAGRPHMRFVALKTADQQNVLLLHRMRNGFVEERTALVNRLRGELVEFGVFLPQGINAFRAHFVEALEDGATELNGVARSALARGWEHLQALDQQIAWCDAQVAAHVKHDGNAQRVMAVIGIGPLTASAAVATVGDARVFKNGRQFSAWLGSVPKQASSGGKTRLGHITKQGNTYLRTLLFQGARSAVATAHRRTDRLSRWIVQLQARVGWYRALVAVANKHARILWAILAKGERFDPSCVPTRSAPTGP

SEQ ID NO: 282863 - protein, 407 aa, unidentified
MEVVFLNNPVLSIDVSKSYSCAKPFYAYGQPFSKHFLFEHTHQNASDVLELLVDLENETGIEPKVVMEATGNFSKPLKRFFSKNGYQVVELNPILTHKQKRKSIRKVKTDPIDTNRIAEVYYLNSSLYSQKITDEDIEELKVLCRHLEAVNETFRELQLKFRSVIDLVFPRFDTVFYKLCSLTSLKVIEKFPTPNAVLDANKDELESILRLSRKPRSWSLSKIDELRTAAGESLPYDSAQKSLVRVLRSYVKLLLTHMDTLSDLRAQIIKQAELSPAFTLLRSIPGVGELTAATIIGEVGDISRFNTVKKLVAFSGLDPSVYESGKFKSSNNRISKRGSSHLRKALYQAACAGIRKPNGSPNNQLLYDYYTRKVDEGKAKKVAIVAAAHKLLRIVYAVWKKGEMFRG

SEQ ID NO: 282864 - protein, 461 aa, unidentified
MKKKKPAGQQKGSAQKKTDWKALDIVHPDAAGIDVGGSEHWVAISPDRDPEPVRRFGCFTADLREMARWLVAKGVRSVAMQSTGVYWMPVYEVLEQHGLEIYLVNARHTKNLPGRKSDVQECQWLLKLHTFGLLNNSFQPTDEIRIARTLWRHRGNLVAEAGSAIQRMQKALTEMNIQLSNVLSDLSGVSGMKIIGAILKGERDPRVLAALARPEVKATAEDIGKSLEGNWREELLFVLKQEVELYRFYQEKIIDCDLQLRKHLESFGSTVDIQAQPLGPKPKGKKGSRNAPQFDLRTELYRITGIDWSQINGIDVLTAQTVIAEAGADLSAFPSEKQFASWLGLCPTNEQSGGKILNRRTRKVVNRATVAFRNAAATLLRSQSYLGAQYRRLRTRLGAPKAITAMARKLACLFYRLIQHGQQYVDKGTQYYEARYREQQIRALAKRAQKLGLQLVIPKTA

SEQ ID NO: 282865 - protein, 344 aa, unidentified
MEYFAAIDVSLELSSVCVVDGTGRIVREGKVASEPDALVRYLRESGLVLTRVGLEAGPMSQWLYAGLTAAGFEVVLLETRHVKAALRARAIKTDRNDARGMAQMIRMGWFRPVHAKTVPAQEIRALLVARKQLQARLNDVELGLRGILRGFGLKLGDVARGRFEARVRELVAGHRTLETLSEPMLRARMALRAEYAALHREVLRIVRVDADCRRMMTVPGVGAIVAMTFKAAVDDPGRFKHSRDVGAHFGLTPKRYQSGEVDRSGHISKTGDTQVRAALFEAAHVMLLRVQRFSALRAWALRVARARGLKRAKVALARKLAVVLHRLWMDGTEFRWSREAAASA

SEQ ID NO: 282866 - protein, 344 aa, unidentified
MYFIGVDHHKQVSVMTVLDEDGRELKNGRVPPFRRYVEEFLRPYRPFVAVLEAGWASYVMVDLLRELGGEVKMANPVEVKAIAHARIKTDKRDSRTLAQLLRAGLIPEVFQREAWNRRAQRVMRLRAHWVRKQTELRNKIRALLGQQGEEIRLEVERQERSLFTQKGLEILKTLPLEDEDKMILDDLVRGHREVAAHIKQSDGLVEALYGQIKEASRIDTVPGFATTLSVLVAVEIADIRRFDSPAQLHAYAGVVPSTHASGERQFHGHITKQGSAWLRWAVLEAVYPSIKKDLGLRILYQRLARRKGPNVAKVAVARRLLTIIYRILTEGRDYLPGLGKQSAA

SEQ ID NO: 282867 - protein, 363 aa, unidentified
MNSVYHTELSSHEGTRCQFNGGRCAIKLGIDVHQDFYVVVMQEGGSNPKPPQRFPKEAFLRWAAKLSAGGATVHAVYEACGFGFELQRKLTAMGIHCYVVCPQKLDEQNKRVKTDGLDARALCLKLDRFVQGNRHALARVRVPSEEEERSRAIHRQRQQLVGARKRLEAQGRSLIVNHGLEPVQNWWKPRTFAALAVPQWMRELLLNSQPILLALQEKIAVLTLQLQSAAAPNQPRGLGKMTSVIIEREIGDWRRFSNRRQIASYTGLCPGEHSSGNTRLQSCVTKHGNPRLRAALVELAWRLVRFQPNYKPVVKWRQILAKGALATGAARKKAIVAVARQLAVDLWRVRTGRCKPKALGLEI

SEQ ID NO: 282868 - protein, 319 aa, unidentified
MAQKDIVVAGIDVAKDKVDVCIRSLSLRRTFASTAEGRRELAALLRRKKVGKTVMEASGGYEREWAKALRDAGIEVRIVDPKRVRSFARSAGRLAKNDTIDAEMIAWFAETFDEARGQAYDATREQLHQMVHARQALKDMQSKLTSQGEHAVPAAVQRSHAEISKTIAVELVKIEDEITALIEVTPYFAELAEIIESVPGLGRTTAAALIADMPELGQANNKIVASLLGVAPYDDDSGRRRGERHIKGGRRRTRNIFYMACLGAATQHNPVLKAFYDRLVAKGKLKKVALTACMRKLISILNIMIERRQKWDAKRYSVC

SEQ ID NO: 282869 - protein, 321 aa, unidentified
MKTVLGIDLAKKKFDVALLLNGKYKSKVFENNPAGFSALLAWLAKNDVATVHACMEATGSYGEALARFLHEAGHSVSVTNPARIKAFGQSELLRTKNDKADAKLIARFCEKMEPTLWQPPPVEVEYLRGLGRRRDALICMRTQELNRQETSNETVNSSVQTVLECLDKEIEQISKLIKEHISKHPGLKHKHDLLNSIPGVGPATIEAVLSEINAFEGFETIEQVVAYMGLSPKEHTSGTSVKGKSVVCKIGNARLRKALYMPALSAIIYNPIVRALYIRMKAKSKNGMVIACACMKKLVHLIYGVIKTNKPFDPAYMLKTA

SEQ ID NO: 282870 - protein, 347 aa, unidentified
MDRRVSLDRARTVAWSSEAEFARVGSPRLYRKGCTMTSGRFVGIDVGKRWLDVCVHGEAKSGRKGNDLDGIAALVEQMKEVQPEEIVFEASGGYERQAVKALSEAGYRVAVVNPTRVRRFAQALGILAKTDRIDAQVIAHFASVVRPMANSRQTPLEEQLAACVERRRQLVVELVAEKNRLSTCPACVRAGIQEHIDWIEEHIEDLEDEIQACILQKPEWQARAEIIDSAPGVGPVTATTLVAELPELGQLNRQKIAALVGVAPFNKDSGVKKGKRKICGGRSGIRRTLYMAALSATRHNAVIRAFYESLLKRGKEKMVALTACMRKLLVIINAMVRKGEAWHCASA

SEQ ID NO: 282871 - protein, 341 aa, unidentified
MNITTVGLDLAKSVSHVVCCNQAGKIVRKKMLRRTQILHFFSELAPCLVGVESCASAHYWAREIAKYGHQVKQIAPQHVKAYVRGNKTDFNDALAIAEAVVRPEMRFVRTKTQTQQDIQALHVMRKKCERDRTANSNEIRGLLNEYGIILPVGISHVYKSLPELFDRQVENGLSELFKELLERHYQKLVELDEHLNWYTKKIKQLSQHEACRRLQSIPGVGPIIASALYQHIGNGSEFKNGRAVSSSLGLVPKQHSSGGKHNLQGISKRGDSYLRTLLIHGARAVMRVSKHKETPLSQWIKRIEQTRGRNKAAVALANKLARIAWALLAQGGDYQPELTTA

SEQ ID NO: 282872 - protein, 351 aa, unidentified
MVYAAMDVHRKRSQIAILDDDGKEVLNRSVANRIDELMPVLGRLEPGTGIAFEACYGWSWLADLLDELELQPHLVHPLRCKAIASARLKNDKLDARTMAHLLRTDLLAEAWIAPKEVRDLRTLLRHRVRLTRIGTGLKNRVHAVLADQGIQCPVKDLWTKAGRGWLSGVELRTVQRRVVDNCLAMIDALAGPIRELERDIRKIAKPDPRVAALTKLYGVGLYTAMTLVAEIGDISRFVSPRKLCAWAGLTPNVRNSADSVPRPHHQAGFGMGPVGVDRGGAQGQGKTAVRARLCRHRPPPRQEDRHRRDRPQAIGTCVLDPQRDDVMILEKAFRPGESASRHVPEIRPITD

SEQ ID NO: 282873 - protein, 392 aa, unidentified
MYIVGIDIGKNHHEASIVSPEGKQIGRSLRFATTHKGADSLMSFIFKNIGNSPCVFGMEATGHYWYPIYSFLKAKGYTIYVINPIQSDSLRKMYIRQTKNDSIDSFLIAEVIRFGQFGTTSMADENILAMRQLCRYRDSVISSRTEIKLRIGTIMEQIFPEYEKQFSSLWVSTSMGILEKYLTPENIENAPIDELFEIIKDKNHNRLTRAKAISIKEAAADTFGIKIAQDAFSFQLKQLIDRMNFLDKQIEALDCQILEYYEKFDCYLHTIPGIGIIGAATILAEIGDISRFKNSSSLIAFAGIDPTVRQSGEFNSTHNHMSKRGSPYLRHAIFLAATTCSFHNSPLNAYYKKKRDQGKHHLTATGAVARKLTTVIYAVLRDSKPYEPKKFC

SEQ ID NO: 282874 - protein, 308 aa, unidentified
MIMQNYVGCDISKQWLDFFDEASGQYHRIDNQADAIAAYVAGLHPSRDFVVMEATGVHDRLLRHALAKAGVPFSRHNPAHTHHYAKSTRRRAKTDRLDARMLSDYGRRYHPEAEPAPREEGEHLQSLARLRDQMVEIRATLKKQRSEAFGAIVIAEIEELIATFNVRIKGIEGQIAQAIAQAEDMARDNALMISVPGVSKITSFSLLAHLPELGQRSPKSIAALAGLAPFDNKSGKLNRRSQIQGGRSRVRRALYMAALGAIRACERFRTFYTAIAARSGSKKLAIIAVARKLLVVLNAIIRDKKAFA

SEQ ID NO: 282875 - protein, 342 aa, unidentified
MEQVSVVGLDLAKSVFQVHGVNPRGEAVLRRRLSRGQLLKLFEKLPPCLVGMEACASAHHWARELAALGHEVKLMPPQYVKPYVKRGKNDAADAEAICEAVTRPTMRFVGAKSPDQQATMMLHRVRKILTRQRTQISNALRAHMAEFGITAAIGRGGLDRLIAVIADQDDARLPGEARACLAVLSTQLEMVKEQILDNDRRILADARKTEAGRRLMKIPGIGPLLASAIVACVPDPTTFGGGRSLSAWIGLTPRQNSSGGKERLGSITKAGNPYLRELLVVGAMAVVRRAKQGSTKRPWVTQLLSRKKPKVAAVALANKNARIIWAMLASGEAYRETELAAA

SEQ ID NO: 282876 - protein, 342 aa, unidentified
MYYIGLDVHKKTISYCIKDVGGQVQREGTIPATRTELDSWMKTLPKPWTAAMEASIFTGWVYDHLLPQAAQVKVAHPVMLRAIAAAKKKNDRIDAGKIADCLRCDFLPECHMVSTEIRDRRRTLRYRHLLVRQMVQMKNRVSGLLLETGVSHNKQRLHKVKYFRELLATNKEVDDSIRPLLKLSRESIERLQKTDYALVSSLERDPLLAQRLKNLRTVPGVGPITALTWAVEIGDVSRFQSVKQAISYCGLCGDEKSSADKVLRTPLSKQRNKHIQRVLVEAAKLAPKQSHELALVYEKAKQKGNTNRATIAVARKMVTYLLAVDRGQRSFVPVEDFSTAVA

SEQ ID NO: 282877 - protein, 384 aa, unidentified
MKTNSSAPQTLYLGLDVHKAETVIAILESDRDAEPRHYGSIATTQHALERAMRRIAKKQNLELSDLYVCYEASGCGFWIARRLLQMGIRCDVIAPSLIPVKSGDRIKTDKRDAMKLAKNLRSNDLVAVNIPDSVDEAIRDLCRARTDAVDDLRRAKTRLLALLRRLGYNYDGKTHWTEAHKRYLRHLTLPDAAHNRVLEDNLTTVDFHVERIARLEEAMLQLLADWQRKPLVEALMAFKGFKLVAAMVIVSEIGTFSRFEHPKKLMAFLGLVPTENSSGNKQSRGGISKCGNPHARWILIEQATHYRVPPKVSAQLSARQEGTAAWIKNLSWATQTRLSHRFSNLRKRQVHHNKIKVSVARELCGFIWELGTKIEAKQGTVHQN

SEQ ID NO: 282878 - protein, 381 aa, unidentified
MRIVCGLDVHKDSVFACILNENGEKFECKFGVLTPELEELHQLLLTQDVKEVTMESTSIYWHPIWRVLDDIEDLKQVNPYFIKQLPGRKSDVRDAAWIAECTMKDLIRGSFVPSTLVQRMRQYNRRIFDLNKEIVYKLTKLDSVLQRCNIRISNYVSSVDSKSYKEVVRLVSEGVTDPNRLASVIHGRTINRVGKETITASLTGVISEVDIDLIRQYLEEIELGQRHKQESHEKLTRMCEDEFPKEFENLQTIPGVKERSATSILAEIGADMKMFITASALVSWCGLKPRNEESAGKIKSRRITHGNKYIRKTMIECAWGASKTQNCFFSKYSYTQTVFRKKNAMKVKVAIARKMLTAIWHVLSEGKPYADYKKPDTKGNS

SEQ ID NO: 282879 - protein, 429 aa, unidentified
MNYTQNEKIEQVTDSTMVVGIDIGSQIYYARAFDNRGRELTKRIFSFHNDLEGFNSFNLWAETLKTENEKTAVLIGCEPTGHYWFAFAKYVNDHQKRLVMVNPFSVKKIKELDDNSPKKTDSKDPKTIAKLVVDGRYSIPYMPEGIYAEIRDLVYSRDRIMKQHNISANRIQRWLAIYFPEYLGLYTRFDAISGLAVLEKAPLPKDVIALGVNGIRKIWHDKKMRGRGVTEDRAKTLVEAAHNSVGLDGGIGTKSELYMLLEEHRLWTSQLEAVNKVLEEMILKVPHVEKLLAIKGVGSITIAGFIAEVGDIRRFDSPKQIQKYAGLELVENSSGKHKGRTRISKRGRRKLRKILYQVMVPLLARNKEFRGIYDYYVTRVKNPLKRRQAMVAVSCKLIRVFYAVLTKGVEYDRFKMMSDIHRKSDIIAA

SEQ ID NO: 282880 - protein, 386 aa, unidentified
MQKLNDLSRSLAPLEQDGTLIAVVEMSQSSWLVAGIVPGVERQPLKKLAVDESALLKLLHRWRQEAEKAGRRIERIAVAFEAGRDGFWLARWLRTRSIEAHVIHASSVAVSREHRRAKTDRLDTELLKRAFLGWLRGERDHCKMVAIPTTKDEDAKRPNRERESLVGEQTRIVNRMKAALIRLGIRGFNPKLKKAAGRLEDLRTPEDEPIPPNTLAELRRDMERRRLVSDQIRQIENVRLEHLKQAPSDGPHAMVRLLARVIGVGIETADMLVQEVLSRNMRDRRAIARYAGLTGSPDESGTKRREKGLARSGNARVRRGMIQLAWRFLMFQKNSALAQWFRARTENARGTRKLMIVALARKLLIALWRLVREGVVPDGVVLRPAQ

SEQ ID NO: 282881 - protein, 332 aa, unidentified
MIYTEFIGIDVSKLTIDVWLYHARKHMPFDNTQKGFKAMLAWTRKTTNTTETNQYLFCLENTGLYNLPFCSFADEQQLNYCLESALRIKLSFGITRGKNDKVDAERIARYCYLHREELVLSHLPAKAIQRLKKLLSLRDQLVCHNSGFKACMKEAADFLNQKEMKEYFSVQKSLINTYEKKIMILDKAIQKTIDSDQQLAKINECVQSVPGIGPVITAYMLAYTNGFTAFDNWRQFACYIGIAPFDNKSGTSLKGKTRLSQMANKKIKTVVNSGTRSALQSCKEYQQYYNRRLEEGKNEYSTINIIRNKIISRAFACAKRKTKYVNVFKFAA

SEQ ID NO: 282882 - protein, 342 aa, unidentified
MRVYHNVCCGIDVHKKSVTACLMWGPADREPQYEIRRFGTMTRDLQRLAEWLEQAGCEVATMESTSSYWKPVWNVLEGRRMKLILANAKHVRALPGEKTDRKDGKRLAELTRHGQIRPSFVPPQAILELRDLTRYRSKLLAAGGDERRRIQKVLETANIKLGSVLSDVFGVSGQRMLQALVDQDAVDTQKVAQLAHWSLKPKMDALQQALEGKLTPHHRFLIELSLNHMRAVEAQVLRLDEEIQRRLKAYQEEYALLQTIPGIKEAGAARILSEIGADMSAFADGDHLSSWGGVCPGNNESAGKKFQSKIRKGNQHLLSALTECSWAATHKRIVTSGGNTTD

SEQ ID NO: 282883 - protein, 355 aa, unidentified
MCGLKHQKEKRSMTYFAGLDVSVKETSVCIVDDAGKIVQEARVASEPEALLQVLTNTICRFKRVGLEAGPLSQWLYSVLAEAGLPVICVETRHMRAMLKAQINKTDRNDARGIAQMMRVGLYRPVHVKTLRSQKLRMLLTHRKLLQSKAIAIENDLRATLRNFGLKVGMVGTVKFEARIKELVENLPDLAVLVEPLLIVRQVVREQLGILHRRLLAIVQDDDVCRRLMTIPGVGPVVALTYRVTVDVPARFRNSKAVGAVFGLTPSKYQSGQNERSGGISRCGDEMMRMMLYEAAQSMLVRSAKWSWLKAWAMKIARHRGMKKAIVALARRLAVIMHRMWVDGTEFRWTREVAVA

SEQ ID NO: 282884 - protein, 311 aa, unidentified
MTIICGVDVSSTHLDARIGRDGPEARFSNTPAGIAALAAFCRAHAAALVVMEATGGYERQPFALLWAEGLPCAILNPRAVRRFAEAMGVLEKTDRIDAGLIAWFAAVKRIAPQEPARAAQARLAALVTRLRQLTALRAAQANQRRLVTEPDVLAAIDEMTALAARQIRSLEAKVAALIDADPLWRALDQAFRTIKGIADRTIARLMAEMPEIGTLSGKAAAKLAGLAPIARDSGKLSGKRPVRGGRAGVRGILFVVAEVVRRFEPDLAAFHARLRQAGKPKKVIRIALAHKLLVRLNAKARDARQELAKPA

SEQ ID NO: 282885 - protein, 362 aa, unidentified
MTKSTTIIGFDLHAATTVAAVLLPGQRTPALHALSSDIPTVVRFVERVRRQGRVVCCYEAGPCGFELQRALANREMQCDVIAPALIPRRPGDRIKTDRRDASQLAILYRAGALTIIGIPTEQEEAARDLLRCREDIRADLLRARHRLSKFLLRHGRRFTETKNAWTKRHRAWLQAQHWPLAALEQTHRAYIRAVDEAVARLQSVDTELRDLLTIEPLRARVERLRCFRGIDDLTALTIAAELGDPRRFPTAPRLMAFTGLVPSEHSSGAKQARGTITKTGNAHLRRVLVEAAWHYRHHPFVGRALRLRQRGAPATVIQQAWHAQHRLNRRYRCLAVRGKPRPHIVTAVARELTGFVWAALTQ

SEQ ID NO: 282886 - protein, 341 aa, unidentified
MKKTDRPTYLGIDVSKESLDCCLYNGTEHKTRSFNSNKLSTVQKIITHFKISPDSCRVVLEATGVYHSAAFVEFVSRGFDVAVENPLRIHSFATMKNLLRTKTDPVDARTIAEYGFTNEPVSTKLKEAYQCEVQAKLKLIGFFKKHITQNRNYLEALNNNSFECNAPSLIAHVKNEINHLNVAIKEINRDIEKILTKHCPELYKQYKSIPGIGSAVAGAIICFYGDFSGFSDSNKAAAFAGLCPKVCKSGSSVDKSGSISKKGNSMLRTLFYMAALSASRCNDACQETYLRLRQAGKPAKVALIALRINFFGRQGRWPGKESLSLKIIRKLACVEQKRLDF

SEQ ID NO: 282887 - protein, 447 aa, unidentified
MRIVYQRCCGMDVHKDSITACLLLIDEVGEFRTESRRFGTMTRHLKEMAAWLASEGVQAIAMEATGVYWKPIWNILEAEKKFELLLVNAQQVKQVPGRKTDQKDSEWIAELLQHGLLRASFVPPVEIRHLRDLTRMRARIRQTLASFANRIQKVLEDANIKLGSVASDVLGVSGRHMLKALMAGEQDPQRLANLAQGHLRKKIEPLQLALQGHFTDHHRLQLKLLLEFVEFGGQQLSHLDSEIQLLLNKVHAEPDLPGPAEGTVAEAEASPPQPTSPLQTAVELWDSIPGIDQLAATTLVAEIGANMDQFPSAHDLASWAGLCPGNNESAGKRRSGKTRKGSVWLRRALCQAAWSASRTKNTYLAAQYRHLIVRKGKKRTIVAVAHSMLIIAYYLLKRQCTYQDLGPDYFNLRNEDAITHRLVKKLTGLGYHVTLEPARAEAGSETA

SEQ ID NO: 282888 - protein, 321 aa, unidentified
MNTSPVSSIGIDVSKASLSFATLRVDHSAIVRSCANSESGIDSLLASLKEHNTDTGVPCVIESTGDYHVKCALMVSDAGFTVNVINPLITKQYQRASVRNNKDDTVDAIRLARIGLLEPDLKRFRATKQSLALKKVVASVGKLDHYKQELKAHTKQLKEAGVMLGVKINLSHLEKAVTSIEKQIDQFETYIHDHAPKEAIEIGEGVRGVSQTSVAKILALLEGHDFTDKDKLVAFTGLDVAARRSGSWKGRERISKRGNPHFRKILFQIAWGLKQHNETYREYYTQMRERGKHYFTCLIAVARKFLRFLFAYVWKKSVSFS

SEQ ID NO: 282889 - protein, 370 aa, unidentified
MLDTTTFIGLDVHARSIKAVSLDVMTGEVRAATFGYDAGAVAEWVRSVDPGARCVYESGVTGFDLQKRLTGLGVDCVVGAVSKMIKPSADRRRKNDRNDAEFLARMLSVGNVVEVWVPDDECEAARDLTRALEDARDDLSRSKQRLSKFLLRHGLVFDERTPTGRRKGNWTRAHWSWIESIRFAEGADNDVLAYYVDAVRRAAEEKARLEGLVEAEARKPRWRKRVDSLRCLKGVDTASAADLVFEAGEFSRFRNARSFAAWVGLTPSEHSSGESDRRGAITKAGNKHLRKTLVEAAWHYLTCSGRPKDLAKGQAPDRGARRHAAKGVRRLVERREALLARGVHGNKANVATARELACWVWAVGLMAEEA

SEQ ID NO: 282890 - protein, 402 aa, unidentified
MNAVGIDVSKGKSMVAIMRPFGEIVSAPFEIKHTASDIHSLVELINSVEGESRIVMEHTGRYYEVLAHQLSEANLFVSAINPKLIKDFDNDSLRKVKSDKADSVKIARYALDKWQNLKQYSVMDELRNQLKTMNRQFGFYMKHKTAMKNNLIGILDQTYPGVNTYFDSPARSDGSQKWVDFASTYWHVDCVRKMSLNAFIDHYQNWCKRKKYNFSQLKAEEIYGKAKELVPVLPKDAITKLIIKQAVDQLNSASTTVESLRTLMNETASKLPEYPVVMAMKGVGTSLGSQLMAEIGDVSRFTHKSAITAFAGVDPGVNESGSYEQKSVPTSKRGSSDLRKTLFQVMDVLIKTHPQDDPVYQFIDKKRAQGKPYYVYMTAGANKFLRIYYGRVKEYLSSLPES

SEQ ID NO: 282891 - protein, 361 aa, unidentified
MKKPSQHLIAEVPRRQAKVAITIGIDLGDVWSHYCTLNQDGGVVDRGRFRTTPKAIEKWFTDVAPARVAMEAGTHSIWISAQLQELGHEVIVANVRELRAISHSDRKSDQVDAEKLARYARLDPNILRPIVHRTVQQQEALTLVRARALLVRLRTAAVNAVRGLTKSCGYRMPASATTCFAQRSLAVMPPRLAQALGPVLQQIADMTLKIKQYDRQIQQLGQTEYPETQALLKVHGVGHLTALTFVLTLGSKERFGRSRDVGCYLGLRPRRSQSGDHDPQLGITHAGNAYLRSLLIECSNHILRSHGRDSALRQWGLHLAARGGKQAKSKAVVAVARKLAVLLHHLWSTQEPYMPFYEQAA

SEQ ID NO: 282892 - protein, 394 aa, unidentified
MFFVGIDVAKRKHEAVVIDDKGRIVQKSFSFPNSLSGYNSLISCVKRITSTRKDIVFGMESTSHYWLALYSHLIKDGYTAHVINPIQSDAFRGLFIRQTKTDPIDAVIIAEVIRFGKYSSTHFPQHKILALREMCRNRLYMVDAISDLKRKTIALIDQVFPEYDQLFSDTFLVSSIEVLYRYPTPKKLLHIRRNTLTNLLIKTSGGHFGSAKADEIIHAAKNTFGIDDPYDVYADLIQTFIKQIKFIQKNVAEIDQKIAAIMDEIASPITSIPGIGATLGAVILSEIGDISRFKSADKLAAFAGIDPSLKQSGDYSSIRNHMSKRGSPYLRRALWMACIPATQVDPMFHAYYLKKRSEGKSHMKTMGHVAKKMICVIYAVLRDNKEYQPVLTAA

SEQ ID NO: 282893 - protein, 340 aa, unidentified
MVLVGVDLHTREQSVATLDTTTGEVQQLRLRHSGHAVEQFYATLAAPVTVAIESPGYALWFHSLMQRLGHTLLVGDAAKIRASVVRRTKTDRRDARHILTLLSEDRFPAIWVPDPDVRDLRALVAHRMRLVRVRTMMRNGVHAIALNYRLTLGASLFTRGGVSQLHALPLPPHTAHRRDESLELLAWLDARVAKLDGRIAGAADADPDARRLMTHPGVGPLTALATLLVLGPVSRFPTSKHVVSYVGLAPAIASSAGKHHLGGITKQGNRLLRFVLGQAGHTAFRGDPDLKHLYYRVLQRRGKARAKVAVARALLVRLYIMQRDRIDYAEFRRRGEAKAA

SEQ ID NO: 282894 - protein, 392 aa, unidentified
MTIQAQVSVYSQVFVPRDYDVFGGLDVDHHSIAATFTDHRRLMQSLRLPYSAGQLLNYVRKHFPQQRVAFVYEAGPTGFGLYDELEAAGHACLVVAPPMVPRAPGQRVKTNRLDSRKLSTALRGGELKSIHVPAPKYRELRHLVQLRDTHVQQLTATKCRIKALLLYEGIPFPSDEGKEKQWSARVVNELLELPCSESVRFKLDQLVGTLHFNFNSAAAAQKQIRHYCQKDPELRQSMAWLKSLPGIGEIIATHLVARLGDPSLITNVRQIAGFLGLVSSEHSTGAKQNRGEITRAGDSRLRNKLIQSAWVAIRQDPELREFYQRVYQRHPRKVAARKAIVAVTRKLTTRIYAVLKEQRPFVLREVSATPLTTEETAGHRGRLDGQQNEQSR

SEQ ID NO: 282895 - protein, 402 aa, unidentified
MSNPVGRVVIGVDPHKLSATIEVLDQHETKLGSGRFSTDHAGYTAMRAYASTWPDRVWAVEGANGAGRPLAQRLLEAGENVVDVPAKLAARVRLFDTGHNRKTDALDAHSVAVVGVRTKTLRVLRRDGELEAMRMLADRREALTRRRVQTVCRLHALLAELLPGQAKKDLTSGQAKVMLASVRPRDIAGKTRRRIAAEELADLIAIETKMKKATAELKAMVRARQSHLMDIHGIGPVVAARILADVGDVARFADRNRFASWTGTAPLDASSGEQNRHRLSRAGNRRVNHVIHIAAVTQLRLDTDGRAYYRRKRAAGKKPAEALRCLKRRLSDTIYKQLVEDATASGASPGGHCGASQESSAVDLPPHIDTSDQPLPDPHARRYAAPAPPRKSTATRTREATR

SEQ ID NO: 282896 - protein, 389 aa, unidentified
MLLDHPSDGPTAIRTHIGAIFVSLELSRSNWLITSLSPGKGEKMSKHSVTAGDVAGLMKLFAELRRKAAARTGESYPIVTIQEAGLDGFWLHRVLQQEGIKSYVVDPASIATPRRRRRAKTDRLDGEMLLRALLAYKRGEPRVCAMVVAPSPEEEDRRRICRERRNLIAERITHVNRIKGLLFAQGISGYEPLRRDRRVRLEALRTGDGRELPSHLKAQIGREFDRIELLLEQIKSVEAAQDALLAAARKPASEDEAAGPVTMLLALKGMGANFATVLWSEAFYRQFANRRQVAAYAGLAATPWQSGRIRHEQGVSKAGNPRLRTTMIQIAWLWIRHQPQSALTRWFKERSPQGRKRAIVALARKLLVALWKYVTQGVVIEGAVMKPAA

SEQ ID NO: 282897 - protein, 414 aa, unidentified
MDASGAPPVRPACKTGVVMESAVYLGVDIGKSSHYAVAVDAAGKPIYQTGVANDERALRSLVDWAKEHQAILVVDQPGGAAALLLKVCWQSDVRIGYLHGLAMARARDFYVGESKTDPKDAFVLADVARAHAQRVVWLEPSTEALAQLELLCGYDADLRADANRITNRLRGLLVTHWPALERAFGARLDSRGVLAVVQHYPSGPAIKKAGVARLTRALKAQRVRRAEAFAQQLHEAALAQTVTITGSATAARLITELATQLSAVLARREDLEQEIEQAFFALPEAAILSSLPGIGPRLGARIAVEIGTIARFRTPAQLAAYAGLGPTPWKSGTSINANMASRFGNHRLKNALFLAAFASLRHAPSRTYYDRKRAQGKRHNQAVLCLARRRVDVLHAMLSHGTPYSSPAPLITAA

SEQ ID NO: 282898 - protein, 340 aa, unidentified
MSLENIAVVGLDLAKNVFQVHAVDDTGCVVARRQLRRNQLLQFFEQIPRCLVGMEACSTSHFWARELGKLGFEVKLMPPVYVKPYVKRGKNDAADAEAICEAVTRPTMRFVPIKSCERQALLMQHKTRDLLVRHRTALINALRGHLAEFGIIAPQGAMGVKTALEALHAARDELPAPAVQALEHIRNQLQELSQKIAELDRTIIAWCRSDAAARRLMTIPGVGSLTAAAIAASVGDAAEFRSARQFAAWLGLTPRQNSSGGKERLGRISKQGDRTIRRLLVVGATAVVRRARLDASSFPWIARLLDRRPARLVSVAIANKTARIAWAILRREEVYRPATA

SEQ ID NO: 282899 - protein, 366 aa, unidentified
MKKTSTVRVNGNMVFKGHKLTIGLDLGDRWSFYCVLDEAGKVLLEQKVATTPEAVKQAFERIPRSLIALETGTHSPWVSRLLAELGHEVLVAHAQKVQLITKSNRKDDRHDARTLARLARIDPELLGPVRHRSAQAQIHLTVIRARAELVSARTALVNAARGLVKSYGQRLPKCGTQQVSRELGAGLHAELREVLEPLLKEIESLNERIQEYDERMEKIAKESYPHVELLKQVKGVGTQIALTYVLTLEDPHRFPKSREVGCFLGLRPGRRDSGESQPQMHISKEGDPYLRTMLAQGAHYILGPFGADSDLRRWGLKLAARGGKSAKKRAVVAVARKLAVLLHRLWVSGEVYEPLRNSDKALRAVA

SEQ ID NO: 282900 - protein, 423 aa, unidentified
MTKVKEIAYAVLEAVLECCCGLDVHKKTVTACLLHGPLDQPPRELVATFATTTRGLLELRDWLESHSCTHVAMESTGIYWRPVYHILEGAVTILLVNARHMKQLPGRKTDINDAQWIARLLRWGLLKPSLIPPRPIRELRDLCRYRKKLTQEAGAEKNRVHKVLEDANIKLASVASDIFGASGQAMLEVLIAGDFNPVETAELAQGKLRQKIPQLIEALEGRVGEHHRFLLRMHLEHLAYLQQAVNELHARIDEKLQPYREQVELVKSLPGVDTVTAQHSFVEMGGDINLFPSDGHYASWIGICPGNNESGGKQKSGRTPKGNRWLYSLLVQSGNAVSRSKGTYAGAFYHRVARRRGKMRAAVAAGHHLARAMYHVLKEGRLYEDLGADYFDRRNHDTLKAHLIARLRGLGYQVDLTPEAAIA

SEQ ID NO: 282901 - protein, 315 aa, unidentified
MDKRVQTIVGIDVSKEQLDVHLLPSGEHFTVSRDDAGLKALTKRLAKQSLQVAAMEATGGLEGPVAAALHAAGLPVRVVNPRQVRDLARGLGMLAKTDAIDAAMIARFAEAAKLSGAPVPDAEAQHLAALVARRRQLLGMATAESNRLQQAADKRIRRSIQRLLRSIEAELEDVDRDIGTAIKASPLWCDLAKLLDEQPGIGSITANTCVAELPELGRVSNKKIASLVGLAPHARDSGTMRGKRTIWGGRAKVRSALYMAALSAVRWDPVLKEFHQRLLARGKLPMVALVACMRKLLVHLNAIAAKYYAELEQTA

SEQ ID NO: 282902 - protein, 315 aa, unidentified
MSGPAVCVGIDVSKATLDLALRPTGERWTLANDEAAIQALVHDLRPRAPSLIVLEATGGFEHAVVAALAAAGLPVVVANPRQVRDFARATGQLAKTDAIDAQVLALFAERVRPEPRPLPDEAAQALDALLTRRRQLLDMLVAEKNRLGFARPVVRRGITQHIHWLERRLGDVDHELGEMIERSPVWRAKDDLLRSVPGVGPVLSRTLLGELPELGHLNRKQIAALVGVAPLARDSGTLRGKRMVWGGRAPIRTVLYMSALAAVRCNPVIRAFYLRLRAAGKPAKVALTACMRKLLVILNAMVRSNTPWQQATALV

SEQ ID NO: 282903 - protein, 376 aa, unidentified
MAQTDVQYPTIHLAIELSRSAWLVAARLPGVEKPSLHRIEGGDTAALLALAAALRARAAARLGTPVRVACCFEAGRDGFWLHRLLTAEGIAAYVLEPTSILVNRRARRAKTDRLDALGMLRVLAAYLGGDRQACSMVRVPTPEEEDAKRPHREREELVRERVRLENRIAALLATQGVRERPSLRSWERDLAALRTGDGRPLPPHLRAELDRLRRRLALTLGLIREVEAERDAALAAGPRDAAGRKIAALCRLRGVGANFAAVLTREVFYRAFDNRRQLAGYVGLAPVPHQSGEADRDRRISRAGNARARTTLIQLAWLWLRYQPDSAPARWFRDRVGALRGRTRRIAIVAMARKLLVALWRYVETGLVPEGVEGAA

SEQ ID NO: 282904 - protein, 418 aa, unidentified
MKTTDYAALVALDWGDKTHAFACQTAGSSELQTGQIEASAEALHDWLETMKQTHEGRPVALVIEAGRNALLHALLEHPWLEIYPVHPATSARFRTAFTPSGAKDDGPDAEMLLTLLSRHRDQLTRLQWDQPATRELAALVSARRSAVDHRTQTTNQLRSVLKGYFPQALDLIGEDLASVLALDFLERWPELTAVQKARPATLRAFYTGHNVRSAERIEERIRRVAASRPLTTDRAWIGPALLQVAMLVALVRVQHTHVEQFERVIAKVFAAHPRAAFFSELPGAGATLAPRLLVAFGDLLERYPDAAAFQKYAGVAPVREKSGRQVWTHWRWNAPKFLRQSLVEWAGQTVVHCDWANAYYRGHKRAGKQHHAILRSLAFKWIRVLWRCWHDGVPYHEQRYLDALKRRGSPLASSLALA

SEQ ID NO: 282905 - protein, 394 aa, unidentified
MPQQRKPNDLSRSLIALDMDTTLIAVVELSLSSWLVAGIVPGIERQPLKKLKTDENALLALFNRWRDEAVRSGHKISRIAVAFEAGRDGFWLARWLKARGIEAHVIHASSVAVSREHRRAKTDRLDTELLKRAFVGWLRGERDHCKTAAIQSLREEDAKRPSRERESLVGEQSRLVNRMKATLIRLGIRAFNPKLRYAEQRLETLRTPEGEPIPANTLAELKRDMQRRRFICGQIRSIEQERLERLERTPDTEPHAMVRLLARVTGIGIETADLLVHEVLLRNMRDRRAVARYGGLTGSPDRSGGTNREKGMARSGNARVRRGMIQLAWRFLLFQKDSALVQWYRRRTEHSPKARKTMIVALARKLLIALWRLAREGVVPEGVAMRPGVMNTSY

SEQ ID NO: 282906 - protein, 345 aa, unidentified
MAAFKMNKNDHKSKLSLQAGIDVGSEELILVVRKNSKPFDPQKFTNTPSDRARLVKKLVKLPGIIVCMEATGIYHFDLAIALHDAGVSLMVVNPKASHNFAKVLMKNSKTDAVDANTLAEYAERMDFVAWTRPSNEKIALRCFSRRINSLTNQRAAAKNHLHALTASQETPKAVLNDAKLAITQLQKRIDRLAAEALVLIGKYPELTRMLQLLISIKGIAETSAIALMGELLLLPPDLTHREWVKFAGLDPKAFDSGKSVHKKTRMSKAGNRHIRSALYMPALSAKQHDPYVKAYFQHLVLDNGKKKLQALCAVMRKLLHAIHGMLKHNVPFDNTRFYTIPASAG

SEQ ID NO: 282907 - protein, 420 aa, unidentified
MKVVYQTCCGVDVHKSFLVATIIKTSSGVEPSYHKKRFSTFNNSILQFKEWLIENQCRDVCMESTGKYWVPVFNLLEDEINVTIANPKWVKAVKGNKDDTKDSKWIGDLFRLGLVPGSYIPCKPIRILREFTRYRYKLTSCRSSEKNRFQNALTVCNVALDSVVSDIFGKSATSVIDYLIEQSDNSINHEEIASRLLRSLKKKSVSVIESVEGYQMTDSQKYRMCLVRAHMDYITSTINDIDTMIDSLIAPYENAVQLLCTIPGVDRNSAITVISEIGTDMTPFSNSKRLCCWAGLTPGNNESAGKKKSVRITRAGVYLKPALVQVAHAAVKSDKSPYYKQKYERIMKRRGKKRAIIAIARMILTAIYQMLSSGEVWNPTDLYKVDMPEPLKEKQKEKAIRQAKKLLISEGIISESQLAS

SEQ ID NO: 282908 - protein, 365 aa, unidentified
MLGVDVGKAELYGTWRDPETEAVRWHGAVPNTAVGIRQLLRRAPESPVVVEPTGRYGESLIRTAQAEGRTVYLAPTRQARAFLSSVQSRAKTDRVDSAGLALYGLRGRLRPYILPSDEVDELKQLLAARRGLSQSRTALKQQLDALPRAAATLEPAVAALAQQIDQIDKQLAKLSTPPKPPTSSKSTATSSAAVAAAPASTAATAAPVVPAAPPPSPILVAARTLRAVPGFGPVTAAALAACLVDKQFTHPDQFVAYLGLDIRVHQSGRRIGQFGLSKHGDAELRRLLYIAAVSAAQSRDATFATRYAREQAKGLAKTAALNAVARKLAKVAWSLIAHNSTYDPQRVDRQPAKDDAQPPRIDMQA

SEQ ID NO: 282909 - protein, 329 aa, unidentified
MIKLSKKVIGVDVGSKFLTISFNDLNNCDQVYNIENNQRSILSFLDKISLENYCLVIESTGNYSSRILHLSLEKGFETSLINCMSIKHFCRMKNIITKTDAEDAKAIRLYGELFRPESYVPKSIEIEHLDQEIKLLNDLEEEKRRYAVKLKALRFNPYLNPNTEKHYERRLKQLEKEIKEVELRLPKLQNAEFKEVKDLIQSVSGIGEKTSLQLMTATSGFKNFDSAKSLVKYFGLAPRIYQSGKKSYSPGKCRTSKTHIRSLLYVCSWTAMKHNVHCRELYQRLLAKGKPKKLALIAVCNKLLRICFGVVKNKMAYQPDYQKNFKILT

SEQ ID NO: 282910 - protein, 338 aa, unidentified
MKAYAGIDLHSSNNYLGIINDNDKRLYGRRIPNDLNRVLMALEPFRDQLEGIVVESTYNWYWLVDGLQDHGYNVHLANPSAIKHYEGLKHTDDKWDSYWLAHMYRLNILPQGYIYPKEHRSIRDLLRRRLLFVKHRTSHILSLQSMVTRNLAFKISNNDIKKLKVKDAEGLFDSSNLAFMAKNSIAAIEFLKKIIKDIEKQVKSQVKLRKEFMLLQTIPGVGNILALTIMLEVGDINRFAKVGNYSSYCRCVKSQRLSNGRKKGENNRKNGNKYLAWAYVEAAHFARRYNTRAQSFYQRKKAKTNGIVATKALSNKIARASYYIMRDQVAFDEDMLFR

SEQ ID NO: 282911 - protein, 336 aa, unidentified
MFQLGIDVSKKTLDLCLLREGVKGRVKTRKLQNDINAVSAVIAWLSKQHCKPEDVHIIMEATGVYHESLAYGLHKAGGRISLANPHRAREFARGMGMLTKNDRVDAYMLACYGALKAPEPWLPPPEEVRHLSALLRRRDALVADSTREKNRLEKYLATDTPSVIAESVEAMIGQLNAEIKRLDRLIRSHLNQHPELKKDFDLLTSIKSVGYQLGLNMLVILRSHDFTTAEQVAAFLGVVPVEKYSGTSVRGCPKLSKIGPPEIRAKLYLASLCGLRFNPLMKAMYERLCLRGKAKMCAIGALMRKLVHWCYGVLKTQKPFDVGYLSSYARSACKAA

SEQ ID NO: 282912 - protein, 318 aa, unidentified
MTKTICIGIDVAKASLEIALGAQGTVMTYPNTPEGHDELAATLTNYEIDLVVLEATGGYEVSVACVLQTIGLAVAIVNPRQARDFAKAMGNLAKTDKIDAQVLAQLALVLSQRTDRDKIVRILPSAQQRVLQAMIARRRQLVVLSISEHQRLGNCHPDIRESITLMISFIQEQLKVIESALSKHIKTYHRSKLDLLSTVKGVGPATIATLIADVPELGKLTRREISALIGVAPFNRDSGFFRGKRTIFGGRAMVRRMLYMATLTAIRFNPVLCAFYKRLTEAGKPNKVAIVACMRKLLVILNAMIKTNKPWDESFHSV

SEQ ID NO: 282913 - protein, 322 aa, unidentified
MSQEGTMSFVGVDVSKARLDVAFRGRDVSALSVENDETGIAKLTGELAAQKVELVVMEATGGYEVPVAGALMAVGLHVAIVNPRQVRDFARAIGQLAKTDAIDAEVLARFAEVIRPPHRPLPEGDAVELRELVARRRQLVEMLVAERLRLGRGPTATVRKSVAAHIKYLERELKHTDINLGDAVKKSPAWRAKDDLLQSVPGVGPATSRTLLAVLPELGLLDRKKIAALVGVAPLNCDSGTMKGTRHIWGGRAAVRQVLYMAALCAARFNPVIRTFHDRLVCAGKPPKVALTACMHKLLTILNAMIRTSQPWRDERTAIVAG

SEQ ID NO: 282914 - protein, 318 aa, unidentified
MNTNTLQNINVGVDTGKSQLDIYIRPLDIYFTVPNNEKAISDAIKTIQKHRPQRVVIEATGRLEMPFILACDKADLPYVIANPLHVKRFAGAIGQRAKNDRLDAALIAHYAEAIQPKLTQLKSENIRLISDLVTRHNQLLSMQTMEKNRIQVLPQSLASSIKPILTALKNQITKIEEKITKLIDTCPEYQAKNELLQSMPGVGKIVAASIISNVPELGYITNKQASSLIGVAPITRESGRLKGKRMIQGGRAQVRTVLYMAMMSAIQCNPIFKATYERLLAVGKPKKVAIVACMRKMVVILNSMLRDGVMWDKGSAKN

SEQ ID NO: 282915 - protein, 377 aa, unidentified
MSMRRIIALDLGKFKTVACVMNALDRSHIFETIEMSPASVHDLLARHATDPAGDTLVVLETCDCCGWVHDLCAALGLAASVVAANSEAWQWRRVKRKTDRDDALKLAKLTLLDQLTIVHMPSPLQRQKRRLILHRRSVVARRTQSRNAIRSIFSQQGIALVRGSKQWTKAGVEQLRQHARPLADCDDLLDLWRGRLHAELQLMADADAQLKNFDHALDALSARDDRVQLLQTIKGVGPRVAEAVVMHLDDPHRFTDAQHVAGYAGLVPKQIESGEMSRFGHITRRGPSLLRSMLVESAWVVWRHNPWAQAWVAKISRGSRARRKIAIVALARRLLTILWAMLRDNQPFRTPHVLGVAGGPPLTPEPDNVITARQINT

SEQ ID NO: 282916 - protein, 426 aa, unidentified
MRVMYERVAGIDVHKDMIKVGVRTPGYRAWTRASEVLEYRTFFGVLLAMAADMRQRGVTHVVMEASGVYTEPVYYALTGQGFEQVAVINPAHAKALKGHKTDARDCLRLAELFECGLLRGSYIPPPDLKDLRDLTRYRAKTVQARTSEIQRLAKALESAGIKLDSVVSDLTGKSATLMIEALIDGERRGQILADLAIGRMRTARKLADLSQALTGRFTEHHAALCRLHRDRIMLFNAAVDDLEQRIAARAAPYQREVELLKSVDGFGDAVAQAWLAEIGPAPHEYFASHEKLASWVTLCPGNYISAGKRAHGRTGTAGAYIKPMLVQAAWAAIRHEGRLQARYHKLVRRFGGPKNRGAVKKAILAIAHTLLKIAYQVLKSGQPYQDLGADFYTRRESPEQRRAYLLRQLEKLSPGCTITITNAEAA

SEQ ID NO: 282917 - protein, 339 aa, unidentified
MNSMAVGVDIAKNVFQVHYVAQGSGEIVNKPIKRAKFLEHFANRARCLIGMEACGGAHHWARELTRLGHEVRLMPAEFVKAFNIRNKNDAADARAIWLAVQQPCKPVAMKTEMQQAMLALHRMREQLVKFRTMQSNGLRGLLTEYGEVMSRGRAKLDKAIPAALDRLAERLPAALIDTLREQWSGLARLDGQIAEIERRMREWKKEDGAVAAISEIPGVGLLTATAAVAMMGDPKAFSSGREFAAWAGLVPKQTGSGGKVNLHGISRRGDTYLRTLLIHGARSVLSHAKEPGPWVEQMKKRRPANVVIVALANKMARTIWAVLAHDRPYRKDYVSVKPA

SEQ ID NO: 282918 - protein, 391 aa, unidentified
MPEDAPRPAQAAIRTDLGAIFVSMELSRRAWLITSLSPGGGEKMSKHSVPASDVSGLLRRFAELRRKATVRTGQDFPIIVIQEAGLDGFWIHRVLQSEGIESHVVDAASILTSRRRRRAKTDRIDGETLVRTLMAFKRGEPRVCSMARAPTPQEEDRRRVCRERRTLVGERVRHVNRIKGLLFAQGVFGYQPLRKGRREQLEELRTGDGRPLPVHLMAQIVRELDRLEVVLEQLKTVEAERNALLKPATGAAASPPAMLLELKGIGPETAAVLWSEGLFRQFDNRRQVAAYAGLAPTPWQSGSIDHEQGVSKAGNPRLRTTMVELAWLWLQNQPASALSLWFHERVRRLGGRMRKTTVVALARKLLIALWRYTTAGVVIEGAVMKSAPATI

SEQ ID NO: 282919 - protein, 410 aa, unidentified
MDVFLERCAGLDVHQASVVCCVLIGAPGRKPQKLLRSFGTTTRDLKTLRAWLAEHGVTHVGMESTGVYWKPVYAVLEGHVDLTVGNAHHIKNVPGRKTDVKDAEWIAQLVRHGLVAKSFVPPPAIRDLREMVRHRRTLIETRTAVRNRVLKLLEGANIKLSGVASDVFGVSGMAMLEALAAGTSDASEMAGLARGRMRRKHAALEAALDGRMREHQCFLLGMHLRNLKAIDQDLNALDARIGTQLEPYQAQHQLLTQIPGVDWVTAASIIAEIGTDMDVFASARRLAAWAGVAPGNYESAGKPKGAGTRRGNVFLKSALFAAASAAVRTKGSYYRDKYNRLRARRGPVRAIMAVAHKLLLAAFHMLNTGEAFRDLGEGYLDQVARKRTTTKLVQRLSNLGYDVMLVPKAA

SEQ ID NO: 282920 - protein, 415 aa, unidentified
MGLRVLYARCAGLDVHKAIIVACLLLTAANGKASREVRTFASTTAGLSALADWLASQGVTHVAMESTGIFWRPVFNLLEGRFEVILVNAQHMKAVPGHKTDVKDSEWIADLLRHGLLTASFIPPKAIRDLRDLVRARKTLVQQRAQAITRVQKVLETANIKLSSVATDVLGTSGRAMIEAMLSGVSDAETLADLARGRLRKKLPALREALEGCVEATHRLLLRQLLAQIDFLQGQIDSLSADIDQLLGPYEHLVARLMQITGIGRIAAAAILAEIGTDMRRFPSAKHLASWAGVAPGNKRSAGKRLHAPTTKGNTHLRAVLAEVVWVISHTHDTYLSAQYHRLARRLGKKKAIVAVSHSVLVIIYHMLSDNQDYHDLGPHFFATLDSTRQRDTAVRRLQALGYKVTLEEVKEVSN

SEQ ID NO: 282921 - protein, 343 aa, unidentified
MKDTIFNHYIAIDWSIENMAIARMTKKSNKIILIDVPSDIAEMKVYLKRLKGSKILVVEETTTSQWLYTELNDYVDRMVVCDPYRNKLLSDGPKTDKIDATKLVHLLKAGLIKEVYHSTDKFLYLRRFVSGYEDLVKAGVRLKNQRYSFLRACGKRGFERAGMKLDAEDDQFVLDCMDRQIETQKQEKEAYAKEFGRLSRDYPEIRHQKSLPGIGPIHAVKIVARIVTPYRFGDKGNFLSYLGLIKLEKISGGRSYGRKNSRYCRQLKSVYKTSTWAAIGGNNPINDYYEYLIQEKGYSEHNARHKACRRLAILSLGVFKSGKKYQPYRRDHVEGKKEGTSGL

SEQ ID NO: 282922 - protein, 296 aa, unidentified
MQNVTLIGIDLGKHSFHVHAQDKNGNALLRKKFSRNPLTAFLSTCAASTVVMESCAGAHFMARHISQFGHQVKLISPQFVRPFVKSNKNDFIDAGAICEAASRPSMRFVTPRTEDQQAMSALHRVRDAIVRDRVKTTNQMHAFLLEFGISMPRGIAVIRRLAAVLEEHELPPYLARLLMRLHQHYAYLTEQIEELEQELKTHMADDDTAQRLLTIPGVGLITASLLATKPGDGKSYASSRDFAASTGLVPRQYSTGGKSTLMGISKRGDKNLRRLLVQCARAFMQRPEHNQGRLAD

SEQ ID NO: 282923 - protein, 355 aa, unidentified
MDNKKHIGMDVHQTSISIAVRDATGKLVVESIIETKATTILEFIRGVQGTLWATFEEGTSAAWLYDLLKPYVAKVIVCDPRKNALLNAGNKNDRVDARKLSQLLHAGLLTPVYHGENGVRTLRELSRSYLTVTKDLTRVMNRLKALYRSWAIPCAGQKVYSPRRRNAWLDKLSEAGVRRRAEQLYQQLDALAQIRRETRRELLVESQKHPATQLLRQIPRLGPIRVALLIALIQTPHRFRTKRQLWAYCGLALQTRASGEYRFSGGELQHSKRLPALRGLNVNHNHDLKYVFKSAALDVSTSTDPLGDFYRNLLAKGMKPTMARLTLARKMAAIVLTVWKKGARFDPAELKRQAA

SEQ ID NO: 282924 - protein, 415 aa, unidentified
MAVPKHLAEESVREFGAMTDDLNTMADWLIACGVDTVALESTGVYWIPMYEVLEQRGLKVWLVDARQMKYVPGRKSDVQDCQWQQKLMSLGFLRAAWRPDGEVCVVRAVARQREVLLTEQASWVQRMQKALVQMNIQLTEVLTDVMGGTGQAIIRAIVAGERDAKVLARHRHSRVKASAEEITKALTGNWREEHLFVLRQALAMYDDIAQHLAECDTKLHALLGELGQRKVDLGKAPRAGSKLRVEFDARQTMANWAGVDLTRINGLGAAAVMKILSEIGPDLGRFANVKHFCSWLGLCPGTKISGGKVLSAKTKRSANRVRQALKMAAMSLSHSGSALGAFYRRLCARMDKPRANTATAHKLARMVYFMLTRGEAFVDQGQQRYEEQQRERSIVALKRRAAALGFQITQTPAVA

SEQ ID NO: 282925 - protein, 360 aa, unidentified
MEIHRTSVGFDVHARSVVACGLDRSTGELFERRLTPDHQEILAWIGSLPAPVAAVYEAGPTGFGLARFLEAAGIECSVAAPSKLQRPAGDRVKTDVRDARHLARLLHLGQIVDVAIPSVEQEAARDLVRAREDCRGDLMTAQHRLSKLLLRQGIVYYGGNAWTGKHEQWLRTHRFEVPGLQVAYDAAFDAMLATLDRRGRLDQAITAMAADSVFTPVVGRLGCLRGVSTLTAFGLAAEIGDWERLSGRSIGAYLGLVPTEYSSGSTRSQGGVTKTGNSHARRLLIEAAWHHRAPYRPGRDLRRRWEAASPAARARGQAANRRLHARWARFDERKKRSVVANAAIARELAGWCWSLAVLDD

SEQ ID NO: 282926 - protein, 341 aa, unidentified
MSESALIGIDLGKHTFHLHGQDKSGREVFRKKLSRAQMMQLFGNLPSCVVVMEACAGSHFVARQLATMGHTAKLISPQFVKPFVKGNKNDFVDAEAICEAASRPSMRFVTPKTESQQTLSVLHRMRESLVHDRTKTANQMHGFLLEFGVSLPKGLAIMKRLAVVLAEHEFPVRLIVLLQRLHAHFVYLDEQIKTLDKELAGQLADDDLGSRLLSMPCVGPITASLLAVEMGDGKQYRCSRDFAASVGLVPRQYSTGGKANLLGISKRGDKHLRQLLVQCSRVYMQNLEHQKGALANWVRSLLSRRHSNVVACALANKLARIAWAIAAHHTQYETGPDALNA

SEQ ID NO: 282927 - protein, 319 aa, unidentified
METPQVSFKQVVSRGCGLDVHKKVVVATIDGEGIKKQTRDFGAVTSSLKELRDWLLENGITHVVMESTGVFWKPVYNVLEPAGLTVWIVNAAHVKYVPGHKTDKKDSAWLCKLLLAGLLKPSYIPAKEQRELRDLTRYRTTLIQSNASNKNRIIRILEDANIKLSSVLSSTSGAVGTRLIDKICDGKEITMEDIEEVYHKKLEATKEEIFEACQGLITEHHVYMLQIIRKEISTTLQTIENLNKRIKTVLLSYENALELLKKVPGISSKSVEDLVAEIGLDMSVFPTEKHLSSWAGMAPGNNESAGKKKADEQPRETSK

SEQ ID NO: 282928 - protein, 346 aa, unidentified
MTIVESTRPVTGGVDTHLDVHVAAAVDANGGVLGVESFATTPAGFAELFSWLSMFGTPTRVGVEGTGAYGAGLARHLRGEGLEVIEVDRPNRQERRRNGKSDELDAIEAARAALSGRASGIAKSADGDVEAIRALLVVRRSGRNVRIKYLNQIRHLGFTAPNELRERLRDVHRDHLARTAAALRPTARTDTVVYATKLAIATLGRRVLALEADAARLDHELETLVRRTAPSLLEIYGVGVNTAAILLVAAGDNPHRLKSEAAFAHLCGVAPLRASSGKISRHRLNPGGNRQANHALWRIVFTRMSSDERTRKYVARRVAEGRSTREVMRVLKRYVARELYPHLVRD

SEQ ID NO: 282929 - protein, 337 aa, unidentified
MKYSGIDLHSNNSVVTVTDEQDRIVVEKRLPNDLANILGLLMPWREEIAGVVVESTFNWYWLVDGLQAAGFKVHLANTTAIKKYEGLKHSGDEADARYLAHLLRLGILPTGTILAPEQRAVRDVARKRMQLVRSRTTHILAVENITARQHGARISSNQVKRLTAETVDQMPLPADVALAIKANVAVITTLSAQIELLEKRLQEKVVARAEYGLLTSVPGIGQVLATTILLETGPIERFAAAGNFASYARCVDSVRASNGKKKGEGNTKNGNKYLAWAFVEAANFALRYNSEAKRFYERKKARTNNVVAIKALAHKLARACFHILKERKPFDVTRCFA

SEQ ID NO: 282930 - protein, 322 aa, unidentified
MSLPKPLCVGIDVSKATLDIAASSVIEQFSVGNDADGFDSIIAELRTREVALVLMEATGGLEAAVASTLQVEGFEIAVVNPRQARDFARAMGYLAKTDRIDARALAQMAEVINRHPERNRFIRALPDAERQVLNAMVVRRRQLIAMLVAERNRLYPAHPQSRKSINIIMKTLDDELARIDEGMNNHIRNHFKELSERLSSIKGVGTMTVAALLAEAPELGRLSRREISALVGVAPVNRDSGTMRGRRTIFGGRAGVRTALYMAALVATRFNPVIKAFYMRLVSVGKPKKVALVACMRKLLTILNAMLRKNEEWNESYHHVAP

SEQ ID NO: 282931 - protein, 359 aa, unidentified
MFNQPTLCGSVIQHMELILKHTVVIGLDLAKNVFQVHGADAGGRKTFNKKLRREEVIGFFKTLSPCIVAMEAGSACHFWAREIGALGHQTMILPGQYVKPFVKRDKTDALDAQAIAVAATQADIPTVPVKSVEQQALTVLIKTRALFIRQRTKAFQALRGHLAEFGIITGTGTAKVERLATDLRDGAMPGIPPAVQDAILAIYEEIEALDIKIARFEKELALLSKQEDDTRRLLAIPGIGPITASTIKAYVPDATIFKSSRQFASWLGLTPRAHNSGGKSRPGPISKRGNPVLRALLFVSGMTLVRQAKAKAHTVDTWLARLAERRPYKVAAVAAANKIARVVWALLNKGDTFRTPAQA

SEQ ID NO: 282932 - protein, 324 aa, unidentified
MMAQKDLVVAGVDVAKDKVDACTRALGSKQMFASTEEGRREFVAWLRRHKVAKVVMEASGGYEREWAKVARTAKIDVRIVDPRRVRSFAQSAGRLAKNDSIDADTIAWFAETFNEATGQTYDAAREKLQQMVNARQATKDMLIRLTNQGEHELPAAVQRLHKRIAKAISTELSKLEAEISALIDSTPHFAELAEIIESVPGIGRTTCATLIATMPELGRASDKVVTALLGVAPYDDDSGRRRGERHVKGGRRRTRNTLYMACMGAATRYNPVLKTFYERLLARGKLKKVALTACMRKLICILNVMIERRQKWNPAHHVVSGSSA

SEQ ID NO: 282933 - protein, 410 aa, unidentified
MTAVYSVGIDVALRSHRVAVLGGDGEAVGKSFTIESTAGGFATLVETLHARGAGAAQSVIGLEATGHLWENLEAHLTRVGYRVVVLNPVQTRRYRDVLRRKAKTDDIDAYVIAGLLRSGAAAASYVPAETIQSLRELARLRARLMRDRQNYLRQLGAQLSVVFPEHAEALGDLLTARARGILRACPTAYHLAAATPRTIHHAAHSAGARGFTREDATRVRDLGRASIYSGKAATARGNVVRTLVTQLERLTAAIEDLDTAMAEELPPPAGGGPPSDAELLHTLPGVGTHTVATLLGELGTLSRFTSSKALVAYVGFYPQLAQSGERAAAPHLVRLGSRLVRRTAYLMAVNAIRGSAEFRTLYLRKKAQGKKPKQALIVVAVKLLHTMYAMVRDRHAYTAGRVLVAPPAGA

SEQ ID NO: 282934 - protein, 338 aa, unidentified
MIAVGVDTHKHQHLAVAVDALGQLLAEITITATLAGYRELLAWIGELEGEIRVGIEGAGSYGAGLCECLQGEGITVFEVERPRRRERRTGKSDRIDALLAAKKVLASDGLSTPRGHGKRVALQMLLVAYRSVISERSRLYNQLQALHVSAPATLRERIGPAKNGAKLARRLTGMRTRPNDSLQENTTLQVLRDIANRTRTLDHQAQDYTRQIDALARELAPALLQEPGVGPICAAKLIAFNPARFTSEAAFARANGTAPQPASSGKTIRHRLSRGGDRQINTAIYTIALSRSVHHAPSRAYIQRRVSEGKTKREAMRSLKRYLSRHLYNQLAKTPLTT

SEQ ID NO: 282935 - protein, 407 aa, unidentified
MRIVGMDIHRVAAEVVSLLDGEIVKLGRVQMLRDKLEEFARKELTHDDHVVIEATGNAAAVAEVLSPYVDRVVIANPKQVHMIAHAKVKTDTIDATVLAKLYASGFLPEVWVPDPATLALRRQVTRRTQLVRQRPRMKNLIQSILYAHLIPPCPHGNLVGISGRKWLARQMLPADERAAIERHLSLIDQISEALRGVEADVAVHALQDPTIRRLMTLPGLDVTVAASVAAAIGDIRRFSDPQRLVAYLGLNPSVRQSGEGPAYHGRITKQGRGHARGMLVEAAWAAARSPGPLRAFYQRIAARRGKHIAAVATARKLAMIIWHMLSKDADYIWARPALLARKFRSAELRAGLPTKHARRGMAYDYNIPAKRAEERARVEKGEAAYVDLILRWRTRPKGKEAVEKIAL

SEQ ID NO: 282936 - protein, 334 aa, unidentified
MEKITTVGIDLAKAVFSLHGVDRTGRMVLRRTVRRDQLVKLVAGLSPCLIGMEACSGAHEWGRRFQELGHTVRLMAPKFVVPYRKSGKNDGNDAEAICEAVSRPSMRFVPVKSAEQQALLAMHRVRQGFVVERTATINRLRGLMSEFGVVLPLRSITVRRQAATAAENLPELARRAIGDLLDQLRVLDERIHGYDREIEAQAKLCEPAQRLMKIRGIGPTTALAIVATVGNAREFKNGRQFAAWIGLVPGQYSTGGKTRLGHISKRGDAYLRNLLVQGARSVLHTAAAHRDPVSRWALELQPRRGYYRTLVAIANKNARIVWALLAKNESLRTV

SEQ ID NO: 282937 - protein, 344 aa, unidentified
MKHYAGLDVSVKETSVCIIDEAGKTIREVKVASEPEAILSVLVDEALTIERIGLEAGPLSQWLYSGLAETGLPVICVETRHMKAALSAQLNKSDRNDARGIAHMMRVGLYRPVHVKTLASQKRRMLLTSRQLLQAKALDIENDLRGTLRNFGLKVGVVGTAKFEARIRELVADHPDLAAITEPLLIARRVLREQLDVLHRRLLAVVRQDEVCRRLMTVPGVGPVVALTFRATVDVPARFKNSKAVGAVFGLTPRRHQSGEIDRMGSISKCGDAMVRTMLFGSAQVMLTRTIRWSWLKAWGMKIARHRGMKRAIVAVARRMAVVMHRMWADGTEFHWVKPTAETA

SEQ ID NO: 282938 - protein, 385 aa, unidentified
MAAQIFKYSVGCDISKDAFNVCILEVSQDMESKVKASHKFKNETKGFKEFETWVKKHTKHDVPIGFYMEATGVYYETLAWYLFEQEYNVFVLLPYKTKHYLKSIGIKSKNDKIDAQGLAHMGAEQKHNPWRPHSKSIYILRALTRQHESVTKLKTSLQNQLHANEYSAVRNAIVKKQLKATIKLLEKQLAELADEISNLIDADEKLKEKYYQIESVRGISKLSWATIIAETSGFETFENQRQLVSYAGYDVVENQSGKHVGKTKISKKGNSRIRRILYMPSLVSVRLKEPVLYNLYQRVHERTGIKMKGYVAVQKKLLVLVYHIWKNNKAFQSGYSKTFGEEESKDLFPFGFGETIKESSPDKRATQDEHSYELSSKVLFPLAQI

SEQ ID NO: 282939 - protein, 355 aa, unidentified
MEYFKDIKIFVASKHVFCGIDIHFGHWNLCFVCDGEVVEKTIIPNCYETLNMRLSKYSQARKISIVYEAGFSGFWLYRRLISDDYDCIVTPPSKMPKSDNKVKTDKRDAQKMAFYLSAGLLKVVYVPPADIESDRRVVRRRAQLVKKQTRAKNHIKSFLHLHGLKTPENIKTNWSNLYLTWLEKLHFDHESDNFTLSQLIRSYRHIRENLAEVTRYLRMLSRSEKYRENYKRVTSARGVGLITAMTFLLEIFDFGRFAKEDDFSSYLGMTPSQFSSGDKVRLGHITRQGNSNLRRVLIESAWTVIKHDPHLREKYDRIKARGTNGKKAIVAVARSLAVRLRRCILDETEYVIGVC

SEQ ID NO: 282940 - protein, 433 aa, unidentified
MNTPHSYDLIIGLDRSDKKADLRLITTATGQRHSQTIDTAPEALWEWLLQLRQDHPQARVALCLEQPAVHLIAFLESYEWITLYPINPITLQKYREAFVTSRAKDDAKDADYQADLLLTHYAKLKPWAPEDSATRAVQQLVFHRRAVVNERTGLTNRLIALLKQYFPQALTLCGEDLWRPLATRFLLKWPSLQAVQKAKPASLKQFYHLNGSRSAKLLEQRLALVAKAVPVTDETALIESFVLRVQLLCRQLQLVTQTIADYDQQIAAAYAAHPDHGIFASLPGAGPVLGSRLLASMGAQRERFTEATQLQHYTGIAPVTKRSGGSCYIHRRYLCPKFHKQSFHEYAGQSILWSRWAAAYYLQQRTKGCPHHTAVRALAYKWQRVIFRCWQNHTPYQEAIYEAALRKHGSPLVALFDKVELGKSPFKNPVKKS

SEQ ID NO: 282941 - protein, 419 aa, unidentified
MSKSNITRQLAQVQAGTLHAGVDLALEKNVVVVVNEKAERLDHFSFPQDRGGYDYFLRRLDGLRQKNQTAKVVVAMEPTNYFWKLLARELEEKQHTYRLVNAYTVKKHREGDQLDRSKDDRRDAGQIAELSRNGKTTQTQLQKGAYEDLRQYATLYHQLMQSIRREKTILWGLAGQVFPELIQVFKDLEGETCQALLMTCAAAATIRQMSIETFLVQVRAAYSGKRLFTSKLKYVYQLATRSIGVTDGLQAIQLAIQVHFTHLQVFETQLEQVTGAMTACLLSLPEAPYLLSCTCLKAASAAIFLAEVGDPQRYQAAAQWAKLAGIQPAPNTSGKKQRSRTPMSHQGRPRLRTLLYFTCLRMVQYDTHFAQLYSYLQRRPDNPLTKMQALGVLMNKLLHIWWALIHNQTFYNPSFGQSV

SEQ ID NO: 282942 - protein, 364 aa, unidentified
MTSMSHPPLAQQHDTADEVILGVDTHKDVHVAAAVNIHGALLDSRSFPTTAEGYQAMVNWALALGPIRRAGVEGTHSYGAALTRHLLAAGISVIEVNQPDKAHRRRRGKTDAIDAEAAARAVLSGTATALAKAGDGHVERIRLFKLAKASATKSRAQAINQLKAILVGADPALRDSMTGLSNPKLIRRCADLDPGQPDTPAAAAAYTLRLLARRIIELTREVEDLNQRITEAINAHTPQLLQRYGVGPDTAAALLLAAGDNPQRLTSEASFAALCGVSPIEMSSGKTQRRRLNRGGDRQANSALYMIVIARLRWDLRTRAYIDRRVSEGKTRREAIRCLKRYVARELYELIARTPQQTSVPSTA

SEQ ID NO: 282943 - protein, 332 aa, unidentified
MSAPLIPVGIDVSKAILHVAILFPERSKPLYQTFDNSEAGYAGLQGWLEEQGVTSAHVCLEATSIYGHGVATALHQQGHRVSIVNPVRIHGYAKSQLKRTKADRPDATLIAQFCRDLKPGAWQPVTADIEALQAYTRRLDALTHMLSQEKNRLDISPEALKPNIEAHITFLEDQVKALKKQFRTHIGSHESLQTQAALLDSIVGIGPDTAARLLAEIGDIKAFGSARQLAAYAGLTPQEHTSGTSVQGKTRLCKIGNARLRKALYFPAIAFLRCAPELQPWRERLVAAGKTKMAIIGAAMHKLIRIVYGVLSSGQLYDPEKLKPQKSAKVIP

SEQ ID NO: 282944 - protein, 349 aa, unidentified
MIHIGIDHHKKYSQVVALKDSGEILWEGRLVGDRQVWQTLKASLPQEEPIQSVLEAGRNWGILYDVLEELEFHPKLANPLKTRLIAESFVKTDKIDALTHALLLKAGMTPSVHVPLKEVRDQKNLLRQRVWLVKIQTAVKNRIHNILDRNHLKPPLKTDLFGAHGRAWMNQVSLGDPDDKLLISDLDLLDTVRSHIRQTEKWVNEALKDNPYIDLLKTLPGIGPILAALIALEIDVLERFASAAKLCSYSGLANSTYSLGGKTYHGGLIPTCNHHLRFAFIEAAWTAVRVSPYFADFYRRLRSRVGVQDAIGAVARKLCEITFICLKKRRAYREKPYRFQSGRLGHFLT

SEQ ID NO: 282945 - protein, 403 aa, unidentified
MVLVGIDWSEKWHDVCLMDEAGRVLSRCRVEDSLPGLTQLQSLIAEQASDPGEVLIGIETPHGLLVRALRAAGYTIYAVNPQAASRYRDRHAVSKKKSDRGDAMMLADLVRTDRHRHRPLAEDSQLAEAIKVLARMHKSLIWTRQQLGNQLRSSLREFYPGALEAFGDRLCEADSLALLKQAPTPGQGRRLSLAKITSALRKAGRHHIEQRAVAIRDALRTPQLEQPALVAQAHGVAAAALAGLIQDLIAQIDHLEKELDRSLRAHPDAEIYLSQPGLSTVLSARALGEFGDDPNYYQDGKARKNYAGTSPITKRSGKTKVVLARFVRNERLADVCQWWAFAAISASPGARRYYDAQRMRGKGHQEALRTVANRLVGILHGCLRYRQLYREDVAWPSSEAAAA

SEQ ID NO: 282946 - protein, 341 aa, unidentified
MTVTIGIDPHKATHMAVAIDGHEQPIGRVALIADRSQIQRLLAWAEPFGDQRVWAIESARGLGQLLAQQLVAAGEDVVDVPPTLSARVRLLGSTKASKNDLHDALATAIAGLRHCGLRPVRIEDHTAVIRLLIGRYDDLTALRTQAACRLHVALRELIPGGGPRRLSADRAAKLLRGTRPTGAAATERTRLAGELLADIRRLDREIAATRTRVTDAVAASGTTVLEVHGVGPIVAGFILGHVGDPARFATADRFASYNGTAPIEASSGPRMRHRLNPRGNRKLNHALHMAAVTQVAHDTPGRAYYDRKLAEGKSKKEALRALKRRISDAVWRQLQVDLGRR

SEQ ID NO: 282947 - protein, 410 aa, unidentified
MVFVGIDWAEAHHDICVVDDDGQVLAKRRVPEGIEGVGKLHALIAEHAEDPAGVVVGIETDRGLLVGSLVAAGYKVYAINPLASSRYRDRHATSGAKSDPGDARVLADLVRTDRHKHRVLAGDSNLAGAVQILARAHQGLVWTRQRQVNQLRNALREFYPGALSAFEDLDASDALAILERAPTPIRGRALSQAKIISALREGGRERNLEAKAAQIQAQLRLPQLEAPTLLAEAYGHSVAATVAVIKQLNLQIAALEQELASSFETHPDAEIYLSLPGLGVVLGARAMAEFGDDRTRFLHPKARKSYAGTAPITRASGTRKVVLARVARNRRLADACYQWAFSALTRSEGARHRYDVLRARGQTHHQALRALANRLRALANRLVGILHGCLVKRQPYSEHIAWSALVEVAA

SEQ ID NO: 282948 - protein, 346 aa, unidentified
MYYIMYYIGLDVHKKTISYCVKDASGQVHQEGKVGATRWELDGWIKTLPQPRTMAMEATIFTGWIYDHLLPHAEQVKVAHPLMLRAIAAAKKKNDQIDASKIADCLRCDFLPECHMASTQIRDRRRTLRYRHLLVRQMVQMKNRISGLLMETGVSYNKQRLHKVGYFRELLSTNEDVHESIRPLLKLSRDAVVRLQKTEYALVSSLQRDPLLADRIKRLRTVPGVGPITALTWALEIGDVARFRSIRQAISYCGLCGEEKSSADKVMHTPLSKQRNKHIQRVLVEAAKLAPRQDHDLALVYETEKQKGNANRATLAVARKMVAYLLAVDRGERDFVPAEHYQRAAA

SEQ ID NO: 282949 - protein, 341 aa, unidentified
MDTVSLVGIDLGKHCFHLHAQDASGRMVFRKKLTRSQMFALLGNFPSCTVVMEACAGAHWIARRLQALGHEAKLISPHFVKPFRQGNKNDFADAQAICEAASRPSMRFVSPRNEAQQVVSALHRVREALGRERTGTINQIHAFLLEFGISLPRGMAVIRRLLAVLETQALPPRLVAVLERLQAHFKYLDEQIGQLEHELLTQLHEDERSERLLEIPGIGPITASVLMSELGDAHQYGSARQFAASIGLVPRQYSTGGKPTLLGISKRGDKELRRLLVQCARVIMLRIERRTDSLGTWVRSLLARRHSNVVACALANKLARIAWAILAKGTHYRSAPAALAA

SEQ ID NO: 282950 - protein, 429 aa, unidentified
MTRTKDTTVVTVLHPICCGLDIHKQFVTACLMTTDPLGKERSVLESFGTFTDDLVRLREWLLEHECPVVALESTGVYWRPVHNILEGYLTVVLVNARHIKNLPGRKTDLSDCQWIATLLRVGFLKASFIPPKIVRHWRELTRYRRSLVEALGDVKRQVHKLLESSNIKIDSVVSVLFGQTGRNLMDLLAKDHSELTLQAVQTCLRGRLKSKATELFRAVQGFFEDHHRWMLREMLDRIDQQEANLARVESRLRDLLQPHDELIERITQIPGIGPTSAYAILSETGTTLESFPNAGALCSWAGVCPANNESAGKRRSTRSPVRRNHLRTHLVEAAWGAVKKKATYLRSKYFSLKSRLGPKKAIMAIAHRILKALYYIIKHGDSFRDLGEDYLIELRSQSITSYLERQAKKLGMVLIPESLWNQMIDRSPA

SEQ ID NO: 282951 - protein, 377 aa, unidentified
MDKDSGEIVSQPASFSNDKEGFDFLLQKIKSYPKDSILIGMEDTGHYHFALLKYLLDLQYTVALINPKTTDFNRKMQGGITKNDKLDTINICDVLDTPERKKQYRITKVNSFDLYEQKQLTRHHHNLKEEENVYKNRLQKCIDIVFPEFNKLFNSKYGIVYMNILKMFGSAENIANTDIRTIRKCFEIEGRGNRISLTPERLKERARSSIGISSIAEVIQIKHLSAQIELIEEQLSEIDKKIEEFSIQNNSPILSIPGISHFSGTSILAELGDISNYSKPSQIIKFAGVAPLHYESSQFNAQHTAITKKGSKYLRKTLYQIILPVIRHNPVFNKYYQLKISQGKGHRCAQGHCVRKLLRIIYHLLKTNQQFDPQLLR

SEQ ID NO: 282952 - protein, 401 aa, unidentified
MSATHNANSTASPAPVLYLALDLGASNWKLAFSTGLGQKPRLKTITARSTLSLVFEIRAAKKRFGLPEDTPVVCCYEAGRDGFWLHRFLLDQGVSNQVVDSSSIEVNRRRRRAKSDSLDAVKLVEMLIRWHNGERKVWSTIHVPSVEQEDQRQLHREMLKLKAERTAQGNSIKGLLAGLGLCVIVDETLPAQLQNLRQWDGAKLPPLLHQRLLREFQRWQLIDRQIRELEAERMAKIRDDKTPHVEKVRRLLNLKGIGENGAWLLVYEFFAWRVIKNRRELASLAGLTPTPYASGESRREQGISKAGNRRVRFMITELAWGWLRYQPKSELSQWYMRRFGRGNKRLRKVGIMALARKLLIALWKYVEGGETPAGAEELGWDNKPRFRAVKSRRKKEVLQTG

SEQ ID NO: 282953 - protein, 347 aa, unidentified
MGEISIIGLDLAKQVFQIHGADPAGRCVLRKQLKRREVLQFFAKLRPCTVAMEACGTAHYWAREIGKLGHCPRLIPPAYVKPYVKRGKNDAIDAEPICEAAGRPTMRFVPVKPMENQAIVMLHRSRDLVIKNRTMLVNALRAHLAEFGFVAGKGIWKLPDLVKIVSQAPAEALPELVRTTLSGLLDIIAATSSQLDAIEKRLREWHKKDARSKRLDTVPGIGLIAATACRALVPDPKLFRNGRHFAAWIGIVPKLDGTGGKTRLGRISKAGDRYLRRLFVLGATSLLRSLENKSTRLALWVQALLARRTKRAVTVALANKLARIAWAVMTRDEAYKPLAAAQPAGCA

SEQ ID NO: 282954 - protein, 373 aa, unidentified
MRSDPITYVGLDVHKRTIAVSLVVASTGEVREWQETNDLTVARRLARRLLREAGGPVACCYEAGPTGYVLQRRLRSEGVMCVVAAPSLIPIRPGSRIKTDRRDARKLGELLRAGLLTEVHPPSEEQEALRDLSRCRVDVVEDLQRARRRLEKFLLRRHCLCQETGNHWGTRHMKWLRQLQFEDAASQATFDSYLLSIDQLGERRLQLELQLAEFGAQEPYREPVGWLRCFRGIDTVTAVSLVAELHDFRRFRSARELMSYLGLVPRESSSGERERRGSITKTGNGHARRLLVEAAWHQRNRPSIGQPLRKRRAGQSAWVLAIADRAQERLWRRWTRLTFRGKPTQKVVVAMARELVGYLWAVLQGPPVPDANP

SEQ ID NO: 282955 - protein, 338 aa, unidentified
MHKRSLQDVVWCGIDVSATELAVAVLADAFLQQRTFDNRASGHRALIAWLQRQARTAWVCLEATGMYSLDLALALHAAERIAVSVLNPKIVCRFAETLRRSKTDTADAQVLAEYARRMPFLAWCPPTATALRLRAITRHLAALVKQHTAVSNQLHAAQASVLMPACVRQDLRRSLRSLERSRQRMRREGMELVQHDSELARRFTLLQTVPGIGEASALYLLAELLLLPAGLSVRQWVAHSGLDPKHHQSGSSVQKASRISRNGNHHLRQALYMPALVAVRHDPYLRAFYDALQQRHKRKMQALVAVSRKILHAIYGMFRSDCAYDGSRLFSNALVIAT

SEQ ID NO: 282956 - protein, 412 aa, unidentified
MKDLLEISCGLDVHKEKIVACILTGPLGKPTRSEIREFTTLIPDMIALRDWIVSQNCHHVAMESTGIYWMPIYEILEDAFSGDITLLVVNARHMKNVPGKKTDMRDSEWISTLLRAGLLNGSFIPEKRIREFRDLNRYRKSVIRDITSQKNRIEKFLQSSGFRLSSFISDIFGASGRNIILHLMEHGQIDKTALDSCLKTKTRNRIDEILMSVNGTLSEHQKTFLKILMTHYDSLKKHLAEIETSLEEDMAPFTLQVEQLNSIYGISTTASCAIIAEIGIDMKPFKTAEHICSWAGLCPGNNESAGKRKSTSVTKGNPYIKSMLCEIAWVIAGKRNTYLSAWYWRIKQKKGAKKAIVALARKLLVIIYTMLKQGTLFDESCFETRRKHCEQKQLSRYIRELEKHGYHVEAQS

SEQ ID NO: 282957 - protein, 343 aa, unidentified
MVAIGVDTHKASLAACAIDEAGRVVAERSFANSPAGHRAFGRWLRALPLPRRVGIEGSGSFGAALSSCLLAAGEEVREVPAILTHRERRRTGRPGKCDPADALAIARVVLREQELPLVRGPLGYRDLKLLVDYREQLICEQTRVRNRLHSDLQVLMPGYGTGLGDVRHASGISAVRHLLAPLSGVAVELLELRLVRLEALAAEIAQNKLRVEGVLAGEHAALTAICGVGPLTAARLLGETGDARRFRSAAAFAMACGVAPIPASSGKTQRVRLNRRGNRQLNRALFIVAFTQMREHAPARAYMERKRLEGKTWKEAMRCLKRQLADVVYRAMLEDSRSEALTT

SEQ ID NO: 282958 - protein, 419 aa, unidentified
MEGLQPLHRRVAGIDVHRMLHVVTVLIEQADGSVERTTRQFGGFRRDCRALAAWLVELGIERVVMESTGIYWKSVFSHLERAGLQGWVVNAHFIKHVPGRKTDMADSEWLAVLARFGLVRASFIPPQDLRELRLVSRYRRKLGAMCASEVNRLHKILDDGGIKLGAVVSDINGVSARAMVKGLIEQQSVEQLLTLARGRLQSKREELTASLEGDLSARHLFVLCHIHAHIESLQSELAALDAYLLDAMQPYAWAHRLLQTIPGIDEIAAALILIEIGDDMGRFGCAERLAAWAALCPGNNESAGKRKSGRTRKGNAIIRFILCECANAARMTRSTLAAKYKSLMARKSHKKAIVALAHKGDPVDLRLAHATPALYRPAHRLRRHDRQEECAALDSPACADRQVARRRDAGSRRDLNIRR

SEQ ID NO: 282959 - protein, 354 aa, unidentified
MIIIGADYHPGFQQIALVDTDTGEFEERRLEHREEAEKFYRDLATRLLCVRVGMEASGQARWFERLLGELQFELWIGDAAEIRTKRVRKQKTDRQDAQLILRLMLEDRFPRIWVPSWENRDLRQLLWHRHRMVQARTRIMNQLQAVALNEGLRCKKRLWRDKGREQLESFRLAPWASRRRRDLLELLDRLTPTIEELTQAIEQEVEKCPEAQRLQTHPGVGALTALAFVLIIGRAERFQCGKQIASYLGLVPLEESSGQRRRLGHITKQGNSLLRFLLVEAAQVTVRSDPEWRSKYFHLAMRRGRKIAKVAMARRLAVRMYWMWRKGWDYEQLKKFGSHAGQPGHRQGAQLNTG

SEQ ID NO: 282960 - protein, 319 aa, unidentified
MDKLSHPAIIGVDVSRAWLDIHCLPDGNRARLSNMDEGHEHVVRLALTLRALVCFEATGGQEWRLWSALDAAGIATRQLPPAQIKAFAASRGTRAKTDRIDAELIARFMAFRPDAGRSLPQEKLRLLRALTSKRGQLVETRKRLLAQIKAHGKLGSAEMFGAMDTELKGLLGRQVAEMEARIEQTITSDDDLALTADILRSIPGIGPVASTMLIAEMPELGQITGEQAAALTGLAPIAHDSGAMRGKRAIGGGRRLLRHVMFQAALVASHHNQTLKTFADRLRAAGKPHKVIITAVARKLVTIANALCRSRQKWCPDAA

SEQ ID NO: 282961 - protein, 414 aa, unidentified
MANEATKVIAGIDTHADTHHVAVINEHGKPLADREFLAAGSGYRKILDFITSYGTVTAVGVEGTGSYGAELARTLRAAGLTVLEVNRPNRAARRLKGKSDPLDAYQAAKSVLEGRATSVPKAKDGPVECLRILRAGRASALKARTAAINQIKGLLVSAPDKLRAKYRAMATSALITALQRTRPSGHTADPEYVTLLTLKALATRCQSLAAEIAAADAALQEILDTYAPTLCDLPGVGTDVASQLLVTVGDNPDRLGNEAQFASLVGVAPVPASSGKTTRHRLSRGGDRNANHALYQVVLVRMASCQRTKEYVAKRTAEGKSKREIMRCLKRYAAREIYRQITNPQPAPDNSDLRQVRTALGVTISTAARALGQWPSKISLLERGHLRNDTLATTYRQWLTEQASQERDVVSMSA

SEQ ID NO: 282962 - protein, 355 aa, unidentified
MDSRKYIGMDVHKESIAIAVGNAAGKIVMECVIETKASMILQFIGGLRGDLQVTFEEGTWAAWLYDLLKPHVTKLLVCDPRKNRSMREGNQSDKIDARRLAELLRLDHLNPVYHGEHGLRTLKELVRSYLTITKDLGRVMSRVKALYRSWGIPCTGKQVYTSRHRAEWIGKISEPGVRRRAEFYYQQLDALRILRQEVRRDLLAESKKQKAWKRLCQIPSIGPIRSAELLGILQTPHRFRTKRQLWTYCGLGIETHSSADHRMVEGQLQRAKKQVEIRGLNENCNHDLKNLFKGAAVVAATKPGPFEKFYAELLAKGMRPEMARLTLARKIATIVLIVWKRGVSFDAQHLKPQTA

SEQ ID NO: 282963 - protein, 350 aa, unidentified
MKYVGLDWAYRQAQWCALAPGGEIASEGRVAADRDGLARLVFELGDEVKACVEMMSGALWVRDELVACGWQVEVADARKVKTVAPLAAKTDKVDARLLAELSRRDLVPALWLPSLDERALRERLRRRMHLVRLRTSAKARIAGLQTQWGVRVSLHRLRHADGIELLERAGVPAVWRRSVSECLAVIDFLDARIEPLDQELKPFAHADPRAVLLDTIPGVAELLALTIAVEVGEIGRFAGPEKLVSYGRLAPRVHQSGQARPRSGPLSKSGSRLLGWAAVEAAQQAWRESNPWHDLYTDVARRSHNKNSAKAAVARKILIAAWHMLSRNEPFNPAPRTTSVSASSRFALAA

SEQ ID NO: 282964 - protein, 437 aa, unidentified
MSNIIFNPDEFFLSVGMDVGADFTWMSIALPNQTLLGKPFKILHSRMDSLEAAVSKIKEAEELYSMKSRIFLESTGIYHYPLFYFLCDKGFNCSVINPIITKNSTNINIRKVHNDRNDSKKAAMIGLKPDLKVSLMPSDLVLEFRNLTREYYDLMDHRCAYVNKLTAELRMVFPQYLGIFSKITTKTSLHLLRAYTSPDAFLEAPEKDVIAAIRRVARFGVKYATDKCNAIKKAAQEAKLFGHAVNSNYTRILIYIDFIELYDKQIASVLAELEGLADINGDTRFVKQIRLIESYHGAGFLSAASLMAEIGDFSAFKKPKQLFAYFGLDPAVKQSGKFIGTKVKMSKRGSSIARRVLHIMALNSIGNNRNGVAKNPVLRDYYLDKCKSKPKLVAMGAVMHKVCNIVFAILRDEKEFRIITPEEHQKNYLKAKCDIAA

SEQ ID NO: 282965 - protein, 340 aa, unidentified
MSLHGGIDLHANNSVIVLINEQDEVIYRKRLPNALPTILEQLAPYHMQIKGLVVESTYNWYWLVDGLMEADYRVHLANPAAIQQYSGLKYTDDHSDARWLAHLLRLGVLPEGYIYPKAERAVRDLLRKRAHLVRQHTANVLSVQNILVRNTGARFSVKRLQELTKQELKSLLAEEPQVLAVTSSLAVLDCLRHQIKTLEKTVHKRLHHTPAYEQLLTVDGIGTILAQTITLETGAISRFPTVGNSASYCRCVDSTKISNGKRKGTGNVKNGHPYLAWASMEAAQFAMRFQPEAQRFYQRKLAQSRNNTVLARKAVAHKLARACYYMMRDLVPYEATKAFG

SEQ ID NO: 282966 - protein, 410 aa, unidentified
MTTINITQTKTVLAAIDIAKSRHEVLIAIPGKTRRRRLTVLNRQEDFDRLIQALTGYGLPVRVAFEATGNYHRALAYRLCVAGFDVKLVSSVALARTREALNNSWDKNDPKDAQVILHMMQIGNEQFYHDPLLSGTNDLQELSKTHDIVSRSKTELWHRILTHYLPLYFPEADRFYRSPRSDWFFAFLERYPSPHLITAMDQEQFISDAWDVVGRKVEKSRFLADVYHTAKTSVGLPIAADSDAVRMFRMVLAEGRSLIAQRKIIENRAVELLKDHGDYRLLTSIPGIGPIHALTILAEAGDLRRFGHHRQFLKFCGMDLATIRSGTFRGQTKLSKYGNARLRRTLWLAGQVAIMQKTNSFRDKFERYIAKDRQNLHLRRKAYTAIAAKMARTAHGIIKRGEPYRPFFEG

SEQ ID NO: 282967 - protein, 409 aa, unidentified
MEYFVGIDIAKSFHIACVVDSNDKIIKRSLKFHNSKQGFKELLLLLDSISNKSCFTIGMEATNLFFENLYLYLKEKGFKVLLLNPYQTNKFRELDSMKKVKNDNIDALMIAALIKSGRYSKAYVSQDMYQSIKALYRHKHSLLEELKKHKRQIQTLLSVVFPEMEQVIKDPFNVTGLALLEKYPTAKHYEYANVDRVLKTFRGIKGNNFNREKAIKLLELAKASIYQGNGKDERAYVIKSHIRVIKLLQAELEELENEMLKLLNQVPKLNRDEEQEVIDIIDNLRTIPGVSDKTIFALMSECGELSRFKRASSFIGYLGLYPTLEQSGNKLINGPLAKRGAKLAKKALYQAAIAAIRHNKELNKLYRDKVSQGRAKKEAVIIVARKLAQIILAIYKNNVAYNPQRVFQQ

SEQ ID NO: 282968 - protein, 345 aa, unidentified
METMYYIGLDVHKRTISYCVKDVSGRVYAEGSVPATRFDLDRWMKTLPQPWTAAMEATMFSGWIYDHLKPHAAALKVAHPLMLRAIAAAKKKNDRIDANKICDCLRCDFLPECYMAPTAIRERRRTLRYRNLLVRQMVQMKTKISMLLMEAGVSYNKQRLHKAGYFRELLATNPDIDEGLCSLLRLCRETVVRLQKTESALVRSLERDSLLMDRVERLMTIPAVGPITALTWALEIGEVQRFSSIKKAVSYCGLCGDEQSSANRVQRTPLSKQRNKHLQTTLIEAAKMAPRYSPELAMLYDKEKQKGYANRATLAVARKLVAYLMAVDRGQRNFQVVETSNCVAA

SEQ ID NO: 282969 - protein, 358 aa, unidentified
MQIIGVDLHTRQQRIAMLDTETGELVEKTLQHEGEEVREFYSALTGSVQVGLQASGSMHWFLELLEELGIDYRVGHPSQIRKAETRKQKHDRRDAALLLKLQVEKRFPSIWMPASELRDLRTLRRQCHPWVRIGRRVPNTLQAMALSHGLRRGKTVWSQAGQHGMASLPLPLHTAYRRSELQHWYDQLQGPIDERDKRVSAQAWQRAGARLLLTHPGVGPVTALASDVFLGDAGRFADGKAVASYVRMIPREDSRGGRQRLGGLSKQGNPLLRFLWCEAALHVVRRDPELQRFYRRKLAAKGWGKARVAAARKLAIRLGILLRDQIDYPEFCRRGQLRQKSGATGAGTPDVGHSPAIL

SEQ ID NO: 282970 - protein, 402 aa, unidentified
MRRFAGIDWASADHAVCVIDEHAKVLHRAMVAHTREGLADLVRALRRFGADLHVAIERPSGLLVDTLVEAGFQVVPIHPNAVKASRPRYAAAASKTDLGDAFMLADLLRTDGHRFQPLRPHSDETRALRALVRTRDDLVAERVGLANQLRALLDRFWPGAAAIFADVDSPIALTFLRRYPTPQSAERLGEKRLRAFLARNAYCGRRPPAELLERLRSAPAGLTGEAEAEACGELVLALVAVLEPLVAQIQRLTAAVEHALETHPDGAVVASFPRAGRVNAAQILAELGDDRARFVSEEHLAAEAGVAPVTKASGKSRSVSFRWACNKRLRGAITCFADNSRHSSAWAAGVYQRARGRGCDHPHAVRVLARAWIRVLWRAWQDRRPYDPALHRAAAPVEAEAG

SEQ ID NO: 282971 - protein, 338 aa, unidentified
MKTYAGIDLHSSNNYIGVIDAKDKRLYSKRHDNRIEDVLKVLGKFKASLQGIVIESTYNWYWLVDGLMDQGYTVHLANPNAIRTYNGLKHTDDKWDSFWLAHMLRLGILPEGYIYPKHQRPIRDLLRRRLMFVRQRTSQILSLQSMITRNRGLNFSGAQIKRFRDEFIDKLFSDRHLVFTAKKNIATIRFLDQIVSEIEIEVGSQIKLKKEFISLLTTPGIGNILGLTIMLEVGNIGRFAKAGNYSSYSRCVESKKTSNGKKKGENNKKNGNRYLAWAYVEAANHAIRYCPKAQKFFQRKMAKSERVLATKALANKLTKATYYIMRDQVAFDEDMLFG

SEQ ID NO: 282972 - protein, 365 aa, unidentified
MKKIAYVGIDYHLNSLSLAVVVKGKNEPVDMVRLKNDDKLIRKYMSKLSDRFEIKTCYEASSNGYSFQRKMAAWGYPCEVIAPSLIPRKPGDHRKNDFRDARDLAQNYAHGTLSIVHPPSEEEEAVRSLVRCRFAFKEAAKRVKQQINSFLLAQDQHWNRSKWTSQHRKWLWEMRMPNACLQQVLDEHLAHLDYLETRLAHLDGQIEQVATSPVYAPSVKKLAAMKGIKTLTAMLLIAEITDFRRFPNPRALMAFLGLIPSEDSSGDKRKDGAITRAGNKRCRSALIESVQHYARSPHMSAQMKSDLSQLDAHSAGVAVKCLKRLHKRFWALTLKGKLRPVAITAIARELVGFIWAMMQPQPAIA

SEQ ID NO: 282973 - protein, 375 aa, unidentified
MDELSKIHVGLDVHKDSISVGIAEPGRGSGRLVGKIAHDVGKLTKLLSRLGPPEQLHLVYEAGPTGYGLQRSLSARGILCEVIAPAQVPRRAGDRVKTDGRDCIQLAECSRAGQLRAVWIPDPGDEAIRDLSRAREDAVNSRTQARHQLKGFLLRHGLRFVGKTSWSKAYYAWLGSLSFDTQPAQTAFTEYWLAVQAADARVQRLTQAVRDSVSGWRFEAVVKALQALRGVDVVTAMGLVAEIGDLRRFEHPRKLMGYLGLVPSEASSGDRVHRGSITKTGNAHARRLLTEAAWHYRFKARIGSHAQRRQQDLSQPVREIAWNGQLRLNKRFATLQARGVQVNKACVAVARELAGFVWAIGRQSMIESADWPRAH

SEQ ID NO: 282974 - protein, 338 aa, unidentified
MQFKHFFGIDVSKNTLDLTVLDIQGNQIAYEHLANDLKSIKKCFLGVLKRHQILMEDCLFCLEYTGIYNLPLVQWLTSLEAHIWLESGSQILKSQGIVRGKSDKVDSLRIAKYAFLNRNEVRLWKAPREIIQHLALLMSLRSRFIKNKKQLEVSVKELSGFFNKETIRSINKHNKAPLNAIKLQIDKIEKEILEVIKSDERIHQLYKIITSVDGVGLVTATQVIITTNEFINITEGRKYACYSGVVPFEHRSGTSIRGKTRVSHMANKKIKTLLHLAAISAIRVKGDIQDYYLRKVAEGKHKMSVLNAVRNKIILRIFACVTQERMFEKKINLCLEKP

SEQ ID NO: 282975 - protein, 389 aa, unidentified
MKPDSQMTLDRYFRQCVGIDVSKDKFTACLQMYDRANDVGCHTMSIDFDNTKSGFNQFVKWSRKEAVKGFPLTYLMEPTGVYYEPLAYHLHKIGQTVYVVLPNKARSFCEAEGIKTKTDAMDARCLALMGCTSRKLKPWSPPAPIYRELRQMTRFHADLSQIMTSVMNRMESLNHVEEADKTVHKNCQKLIDEIDTLMENNDKAIMQKVAEDKELEARVKRIAKTKGLGVTTVVCIVAETEGFHLIENRKQLTSYAGLDVRAKQSGKEDPKHAISKRGNAHIRAALYMPALVAVRYNPQIKAAYGRICQKRPKEKKIGVTAAMRRLLLLIYTLWKNGEEYDPMCDKTHTPKKRMKEEDTELEYGPKDCIGPKHEPVDWNATDEHGNPPF

SEQ ID NO: 282976 - protein, 400 aa, unidentified
MLSIGIDVSKGKSTVCGMKPRGEIVYTPFEVQHTREGMSELVSLLRGSGEEVRVVLESTGSYHCPVVAALLENGIFVSVINSLRMKRFCSQSIRRVKTDQIDAMQIALYGLAYWQELQPTRLPENTYRELQLLARQYYQMTSILIKAKVDFNALCDQVLPGMQELMSDHAGRHKLSDFVLRYHHTAHILKMGETRFRKDYCKWAEKKGYRNCERMAVLIFATAQNGIPVLPNAPSTQIVITEAIRVLHTVEASRDAILTQMQALAKTLPEYSLVREMPCIGDTLAPRLIAEIGDVRRFHSKRALIAYAGIDAPPYQSGKFCANNRHISKRGNRYLRKTGYEVMQSYVMHKPANDPIFTFIEKKRGEGKSGKLAMVAGLNKFLRVYYGKVTELYRSLPAIE

SEQ ID NO: 282977 - protein, 377 aa, unidentified
MREKLRFLGLDVHAETIAVAVAEPDGEVRSLGTIANREDSIRKFIKKLGSPEHLRACYEAGPTGFVLYWQLAQLGVECAVIAPTLVPKKPGDRVKTDRRDALKLARSHRSGDLTAVWVPDEDSEALRDLVRQREAAKQDQLRARHRLTKFLLRTGQRPPLGLKAWTERWMRWLAQVRYTQPAQEVTRLDCMNEVEHMTARVKRLEEAILEVVKLAPEPMQELIRGLQALRGVAHISAVTIASELGNISSRFQSARKLMGYCGVFPSEDSSGKRIRRGGITKCGNAHLRRIVVESAWCYRHLPRVGEKLRKRHQGVPAEITEIAWKAQHRLHKRYRTMINAGKDQRKVMTAVARELLGFIWAIGIKAEAAACKQQMAA

SEQ ID NO: 282978 - protein, 347 aa, unidentified
MLIIGCDFHPGFQQVAIFDNVTGEIQEKRLQHRAEAEQFYRGLAGQEVRVGMEACGHYPWFEQLLAELGFELWFGDAAKVRASVVRKQKTDRRDAEHLLDLLRENRFPRIWVPSLEVRDVRQLLVHRHKQVQARTRTKNQLQAMALSQGVQKKYKLWTKAGREEMEQLPLLPYAAQRRKQLLQSLDGLEAEISELDRRVADEARQRPEAVRLMTHPGVGPVTALALVLTLGPSDRFESAKQVGSYFGLIPSEDSSGGKQRLGRISKQGSSFLRFLLVEAGQTAARLDPQLKRFYRRLAARKNRSVAKVAVARKLATRLYLMLREDWTYTQLCQAVMQVSPSHSVAGQ

SEQ ID NO: 282979 - protein, 457 aa, unidentified
MSKRSKRTPGLETAHPFAGLRPVNPHAAGVDIGATEIIACVPGDATTQLVRAFGTYTIDLHAIGQWFRAQGITTVAMESTGVYWLPLFELLEAESFECLLISARALRRVPGKKSDITDAQWIQTLHQYGLLAGSFRPDGELIALRTLLRHRAQLLEHRAPHILHMQKALLQMNVQLSQALSDVTGVTGLAILRAIVAGERDPQTLAAYREPNCKKSAEEIGQALTGTWRAEHLFVLQQSLELYDFYTLQLAACDAEIERTYGVTRPAWPTTPVAPLSARKRQAHSKNAPPHQEDLRQHLKRLCGVDVSVVAGFGVSLAQTVIMEVGTDMRQFPNEKHFCSWLGLAPKHEISGAKVLKNKTLKTKNRAGQAFRMAAHTLQRSEGVYGVMYRRLRARLGPAQATVAVAHALARVVYRMLKDKVEYAPLSVGEYEKQYEAQQLKYLQKKASKLGYQLVPG

SEQ ID NO: 282980 - protein, 343 aa, unidentified
MSEISTIGLDLAKNVFQVHGVDRSGAVVLRRQLRRGAVEKFFAQLSPCTVGVEACGTAHHWARVIGRYGHHVRLMPPAYVKPYLKRNKNDGRDAEAICEAVSRPTMRFVAVKSIEQQATLAVHTTRALLVRQRTMIANSLRAALSELGIVAAPGFEGLRQLMTGLEAPNEEVPEIMRGALLLLAKHWQALDADERVIERQITKAARADGEARRLMQVPCVGPIIASTVLAKVPDARVFRSGRNFAAWIGLTGRDHGTGGKHRPGRISKQGDRMLRALLITGASAYLRQQRMRGVSDPWLRDLLARRPYKVVMVALAAKTARIIWAMLAKGEPYRGRASALAAA

SEQ ID NO: 282981 - protein, 409 aa, unidentified
MQPILKSCCGIDVHKNMIKASIAKGPLDSPPRFCTRTFSTMTRDLLKLKDWLTENDVEAVAMESTGVYWKPIFNILENDFQVILANPQYLKKVPGKKSDVKDCEWIASLLRCGLIPASFIPQRPIRELRELNRTRRKLVGMMSSEKNRIQKVLEDANIKLASVVSKIDGVSSMTMIQALLDKYSLSKEEITDMARGKLKSKVDQLVEALNGKVTDHHRFLLNLHLNNIAFLADQVQEIDKQIQKLMIPFQKEESLIQTIPGISKISAKAIISEIGVDMSQFPSEAHLASWAGICPGNNESAGVKKSGKIRKGNRYLKAILIEVAWAASRTKGSAFSAIYNNIAKRRGKKRALVAVGHQILIAVYRTLKTGEPFVDQGAEAIYRRNLEARQQSAIHLLERSGYSVAKASV

SEQ ID NO: 282982 - protein, 371 aa, unidentified
MGPSLPVPLLPGPEWCESGGLVVTIGLETIMERTVIAIDIAKKQFQLHWVEPDDGSIERLKLKRAKLLEWFATRPAALVVMEACGGAHDWARSLFELGHEVRLISPRKVRPFVQRNKTDAADAQAIWTASQQPGMRFVPVKTEAQQIVLSLHRLRAQLMKSRIMQTNELRGLLYEFGVVLPEGHAALLKALPVAMCEAKLRLHAMLMDSLDEQVRRIQQLQADIDLIEHRLSQQMRELPACKAIAQIPGIGLLTATAVVASMGTPSAFKDGREFAAWVGLVPRQTGTGGRVRQLGISKRGDVYLRTLLMHGARSVVNRSMTGPTWPWLAALLQRRPYSVAVAAVANKLARTIWAVLARGQAWRIEAWQVVH

SEQ ID NO: 282983 - protein, 413 aa, unidentified
MNERYFVGIDVAQAQHRIAVVDADGETVGKSFAIEASRKGFETLVRTLQERGARPGVTVIGLEASGHLWENLEAYLGRAGYRVLVLNPLQTRRYREVLHKRAKTDDVDAYVIAGLLRSGEAEASYVADEQIQSLRELARLRARLMRERQDYLRQLLAQLEVVFPEYRALLSDLLSARARGLLRAFPTAYHLAQASVQAIQQAARAAGARSFTEDDAATLREAAKRSTYSGKAAEARGQVIRTLVEQIERLNASIEDLDAAMQGLLTPPEQNPTPGPSDVELLLSLPGIGPQTAAVLLGELGPLTRFTDAKALVAYVGFYPVILQSGERTAPARLATTGSRIARHALYLAAVNAIRRSVEFRTLYLRKRSQGKTAKQALITVAVKLLHTAYAMLKHRVPFNPSRLLVAGATIRA

SEQ ID NO: 282984 - protein, 308 aa, unidentified
MVLIGIDPHKATHTAVVVDESEREPARIKVKADRSQVSALLEFADGYRPRRWAVESAGGLGFLLAQQLVRAGEDVVDVPATLAARVRLLGSGRGSKNDPNDALSTAIAALRDPHLRTVMVEDHAMVLRLLADRHQDLTSLRTQAVCRLHALIAAMVAGGVQRRISADSAASRLRTIHPDNTVEAGRKEMALELVADVRRLDKSIAEVKKRITAAVAASGSSVTEVYGVGPIVAALLIGHSGDITRFPTKGHYASYNGTAPIEASSGKVVRHRLNQRGNRQLNHALHMAAVTQISRENPGRAYYLGKIE

SEQ ID NO: 282985 - protein, 403 aa, unidentified
MNNVAGIDVSKGKSMVSVLRPFGEVVAKPFSVGHTGSELKELADYLKSLDGETRVVMEHTGRYYEPVARFLHDEGVFVSAVNPKLIKDYGNNTLRKVKTDKADSRKIARYGLDNWAELRQHTPMDTIRMQLKTLNRQQSLYTKTKTMMKNNLIALLDQTYPGVNALFDSPVREDGSQKWVDFATAFWHVDCVRNMSLTAFAERYRKWCKRHGYNFSQSKAVEVHAGAQDLIAMLPKDALTKTMVRQAIDALNAVSASLERLKAEMQALAAQLPEYPVVMAMHGVGDSLGPQLMAELGDVARFTHRNAITAFAGVDPGADQSGTHEAKSTRVSKSGPPELRRALFLVMDCLLKTQPQDDPVYRFMDKKRAEGKPYLVYMTAGANKFLRIYYGRVKEYLAQLENS

SEQ ID NO: 282986 - protein, 483 aa, unidentified
MKSKTQEKSKRATNHPTQHHWNEMNRKQRREMMRKMQSEDLSLEVIHPDAAGIDIGNETHYVAVPPSRDSQPVRRFGYTTAELKAMAAWLKQCRIRTVAMQSTGVYWISVYDILEQAGLEVYLVNARDTKNLPGRKSDVQESQWLMKLHTYGLLRNSFRPVQEIRTMRTYGRQRNDLVQSAGRHIQRIQRVLTQMNLQLANVLSDRSGMTGQTIIKAILKGERDPYKLAGFRDPRVKASAEQIARSLEGNWQEDQLFVLQQEQDSYEFCQKQMAECDRHLDQYLQHSEDRSHGAPLPEEKRKERLKKRKNANKPQFDLREGLFRMTGTDLTRIDGIDVMTATTVISEAGWDMSKWETENHFVSWLRLCPDNRISGEKIIGKGRLRTNNRATLALKMAASTLRLTNTYLGAQFRRLRTKLGSPIAIKAMAAKLARLVYRMLRSGMKYVDRGAEFYDAEHRQRQIKHLKWKAAKLGYQIVHAPTA

SEQ ID NO: 282987 - protein, 337 aa, unidentified
MSREYVGIDLHRRRSVIVRKNADGDLLSKTRIVNDAEEMVRAVAAAGPEPEVVLEATFGWYWAADLLEEMGARVHLAHPLGNNWGNRRVKNDERDANDLVDLLRLGRLAEAWIAPPEVRELRELVRYRAKLVRLRSALKAQVHAVMGKHGVLPTRVDMFGLGGTAQLDALELPAAYAWRLKSLRELIAVYDKEVARLDKTIATQVRNDRGYRAIQAIDGVGPVLGAVMVAEIGDITRFPSPDRLCSWAGLTPKHRESDTKVRRGSISKQGSRLLRWAAVEAASKNHAGGDFKVAYRRIAERRGRNVAKIAAARKLLTLVFYGLRDGEIRCLAGPARG

SEQ ID NO: 282988 - protein, 321 aa, unidentified
MTYVGIDVSKATFVVAYSSAKTGRAKTFKNTVKGVHEFIQTISAAEHHCVLEATGNYSALLVYLLSEAGITVSLENPLKIKNFARAMLTVTKTDEIDARLIALYGERMQPAPYKLRSESILILKQKRTVLRQLKKQLVATRNLKSSMEVLPFFDPKCKKTIEKTIVFLEKQIKGMEEELASLAQGEYKKQMDLLTSIKGIGVTLAAALIVATGGFTYFDNAKQLTRYLGLSPIYQQFGTSVNVKGHINRNGDSSLRSQLYVAAFSSLRCNAECKACFDRLRSNGKPGKLAVIAVANKLVRQAFAVVTHGKPYVDGFISEKP

SEQ ID NO: 282989 - protein, 355 aa, unidentified
MTSTKYIGMDVHKESIWSAVRNAAGKIVMECVIETKASMIVQFFDGLRGDLHVTFEEGTSAAWLYDLLKPHVTKLLVCDPRKNASMREGNQSDKIDARRLAELLRLNHLHPVYHGEHGLRSLKELVRSYLTITKDLGRVMSRVKAIYRSWAIPCTGKQVYAPRHRAEWLAKITEPGVRRRAEFYYQQLDALRTVRQEVRRELLAEGKKHQAWKRLCQIPSIGPIRSAVLLGILQTPHRFRTKRQLWTYSGFGIETQSSADHRSVDGQLQRAKKQSSIRGLNRNCNHDLKNLFKGAAIVASSKPGPFQEFYTALLTKGIRPEMARLTLARKIATIVLIVWKRGACFDAQHLKPQTA

SEQ ID NO: 282990 - protein, 406 aa, unidentified
MLFVGDDWAEDHHDVEVQDEVGRRLGKAKLGEGIAGIARLHELIAEHLDQDAEAQQVVVGIETDRGPWVQALLAAGYRVWAINPLQVARYRERHSVSGAKSDAADAHTLADMVRTDRHQLRPIAGDSDLAEAIKVVARAHKTLIWERTRHTLRLRVALREFFPAALEAFAELSAAEALELLGRAPDPVSAARLTTAQITGALKRARRHHAADKAQAIRAALGAEHLTQPTVVATAFAATVRAQVAILAILNAEITRMQEQVEAHFGRHPEVEIYRSQPGLGQILGARVLAEFGDDPTRYADARSRKNYAATSPITRQSGKKQLVLARYVHNDRLIDALGRQAFAALIASPGARAYYDQLRGRGVGHHAPLRQLANRLVGILHGCLKTGTTYNEATAWSHRQDNPAA

SEQ ID NO: 282991 - protein, 409 aa, unidentified
MNVLHERCAGLDVHKDTVVACRRVMAGAQVAREVRSFPTTSRGLLALADWLREAGCTHVAMEATGVYWKPVWHVLEGEFELVLANAAHIKNVPGRKSDVNDATWIADLLAHGLIRSSFVPPGPIQELRDLTRTRKQLVREVVAHKQRIQKVLEDANIKLGSVVSDVFGASGRRMLRAMIAGEHNPDKLAALAGERLSASRETLVEALHGRVTRHHRFLLKQHLEMVEHLEKTVGEFEAQIEAALEPFRAVVERLMTIPGVSATAASVIVAEIGVDMKRFPTAGHLISWAGLCPGLNQSAGKVKSRTLRDGAPWLKTVLVQSAWAASRNKDGYLHSQFLRIKSRRGPKKAIIAVAASILTAAYYLVRDRLQYRDLGPLYLLRLDHERVATRLTQRLRNLGYEVEIRKAAA

SEQ ID NO: 282992 - protein, 430 aa, unidentified
MSESVSEQPIPTQVAACVGIDWADQKHDVVLRSVGDPAKAEHQIIKSEINALNDWIVQMHERFGAKGKVLVCLEQSRGALIYQLMAYELFELYPINPSQLAHYRKTFFSSGAKSDQPDADLLSELVMCHRDRLKAWKPDDQLTRELATLNEGRRQAIDRRTELANEIKSQLKLYLPVALQILQNDITTALAADLLVQWPTLAELQKVSPAKLRKFFYGHNCRQEKKILERLALIKEAKPLTTEEAIIRPTALRVKLLAQQLKSLLPFIAEYEKRIAELFGSHPDRFLFDNLPGAGPALAPRLLTAFGTDRDRFEVAGDLLNLSGIAPVRIASGKKTGKNASVHCRRACPKFLRQSFHEFGECSIRYCSWAQACYQAQRGRGKGHHAAVRAVTFKWIRILFACWKQRTPYDPQRYFQALQTRGSDYAQTTA

SEQ ID NO: 282993 - protein, 429 aa, unidentified
MKQKSNSLTKGDRVGKTTKARGPVQRDAKEVMAELVVKLSQKLEPQSTRKSEEDPRKAGMPGPNRDRLTVGVDLGDKWSNFCILGLDGEKLTEGELRTTPQDFAEFFQAMAGARVVMEVGTHSAWARDVVARSGHEVLVANPRQMEGPKQRKRKNDRVDAHKLARVGRMDPQSLFAIEHRSVEVRQDLVTLRARHAVVAVRKDLINTVRGLVKSMGTRLPKCSTESFAKKVEGALPPEVRDALLPLVRLVEALSSSIKGYDERIEKLATEKYPHTKLLRQVKGVGPLTSLAYVLTLQDPQRFVKSRDVGPYLGLVPKQEDSGDSQPQLRITKMGDMMVRQLLVGSAHYILGPFGPDTDLRRYGLRLSERGGKNAKKRAVVAVARKLAVLLHCLWVSGEVYEPLRHALPKATRKKAERPTAAEASGRAAA

SEQ ID NO: 282994 - protein, 443 aa, unidentified
MKLYVGIDLALRGPHRAAVVDDRGTVVLPERRLRTDMRNLDALLEQLWQRFPEAEVQVVAEPTGTVWIPIARHCLRRGCRFALVAPQKVHDLRRFYRRHAKTDPLDALTLARMPLVDPEALFTSEVLDVRWLALRRGVKKEAKLARLVAEIKQSICAKVDLAVPGLAALVGDPASRLARALYGRSLDPQQVLAMGPEAFRDLVAGARRRPVSEGWFRRLWACYEAAAAFWGPGDLEAQDLTEDVAEDYAILDTLIAQLRQVRQRNLALYRALDPEGHVQSLPGVGKVLAPALLAGLPDPHRFPDSKAFRAYTGPIPRVDQSGIRRAKGTRSTKAGPAWLRRALYLAAEVARRQDPQLAQIYQRCLLEKGHHHSHAVCVVAVHLADRLYAVRRDGRPYVLRDAHGTPLDRQTARRLAQAYTVPDTVRRARRNREGQLGENVRVG

SEQ ID NO: 282995 - protein, 340 aa, unidentified
MGDITTIGLDLAKSVFQVHAVDEAGTVMMRKRLRRSQVLAFFAGIPSCLVGLEACATAHHWARELISLGHEARLMPPNYVKAYVKRNKHDVADAEAICEAVRRPSMRFVPVKTAEQQSALMMHRARDLLIRQRTMLVNALRGHLAEFGLIEAQGLHKVARLIAIVMDETDGRVPDIARQVLKMIVNQIEDTQTRIAGLETQVLAWHKSNPVSQRLATIPGIGPIIATAIAATVADPNIFRSGREFAAWLGLVPRQNSTGGKARLGGISKRGDSYLRRLLVNSAHTVLLCSKQAKTDPWLKSLLGRKPRLVVAVALANKTARVAWAVMSRQGIYRHAPAAA

SEQ ID NO: 282996 - protein, 421 aa, unidentified
MPITNLSVEGEHMNAIGIDVSKGRSTVAIIRPFGEVVRKPFDVFHSRSGLDELANLILSLEGESRVVLEHTGKYSQPVIKVLSEAGIFVSAVNAKLLHDFGGDTIRRDKSDRLDAKKIAGYCMVKWENLKRHIPEEESRVLLKTYNRQLGEFMKIRTAHKNNLISLTDQVFPGVKQFFTSIARESDGHEKWADFLMRFWHVECVSKHSFAVFAEKYKGWCHKHGYRYCEPKAQSIYHAAKDAVATLPMNAFTKVLVRNTITQLNSLYETTAELKNHMTQLAKNLPEYEIVLAMHGVGKTLAPQLIAEIGDIRRYPRRASLARFAGIEPPENQSGAYNQHSRRISKQGSPHLRRALFQVMRCVLQNSNPNEDTFRFIDRKRSENKPFKVYMIAEANKFLRIYYARVTELFDSLYPQVTALIA

SEQ ID NO: 282997 - protein, 357 aa, unidentified
MTNSILAHRWCVGIDLHKDTMTVCTYCRCCGEIAFRKIACKNRDQVAEFFRALPRPHAVAIEAVAIEAVGFYRWLWELLEPLVEKLVLADATQARALAGRRLKTDREDARNIAELLADGRLPLAYAPPMEVQVLRDWTRQRNRLSRAHARALHGVKSIMNTNNRPGPVRLSAERLTGYIKAYGARLPERHVRMLWQHQRQLSLVEEEMGLCEREIAGLLASPRFAATAALLITAPGVGPVVTATVLAEVGDFHRFPDGKAIGRYAGLTPRLFASGGKERHGHICKTGPRDLRWVLQQAAWTAIRCDERIKHRWLRISRGSGRKAAAVAVGRQLLVTLWHMVHRQTPYRSPAPQEEAA

SEQ ID NO: 282998 - protein, 369 aa, unidentified
MEQHSETFVGLDVAKERHAVAVAEEGRQGEVRYFGEIDADPASVRKLVARLEKRHHKLHFCYEAGPTGYVLYRQLVAMGHQCTVVAPSLIPRKPGDRIKTNRRDALQLARLLRAGELTAVWVPDEAHEAVRELIRSREAAVEDLRRKRQAISSMMLRYGRSYPGKTNWTKQHKQWLQAQKFDHPAQHLVLQDMILAAQHAQERLGQVEDVIAEFLPTWSLAPMVDALQALRGIRLVTAATIMAEIGDLGRFETAGQLMSYLGLVPGERSTGEQVRRLGITKAGNGRVRRALIESAWTYRHLPRTSQLKSCVHERVPPAVRDIALKAQTRLCARYRALSNRGKKLTVAVTAIARELAGFIWAIGRAMQTV

SEQ ID NO: 282999 - protein, 315 aa, unidentified
MVTSYQNFIGIDIGKFKNVVAIHKQKNAVEFDNNDSGWQQLFQEFSDILPNSLVTLENTGKYELGLSHFLTDKNIAVHRANTRKVKSFILSHGTLAKSDRSDARALAQYGFERHRTLSLFVPTSTEQSTLTALCQRRDDITQMRAQEKCRLEAPENDHIKESCQKTIEFFNSQINELNNTIQKIIDESCELQQRQKILKTVPGIGKKLSQDFLCLMPELGYLNRKEVASLAGVAPHPKESGKAVGYRRITGGRSNVRSKLFTAAMAAAKSKSVLGAFYSKLVESGKKKMVAITALMRKIIVIANTRLKEEFNLHI

SEQ ID NO: 283000 - protein, 443 aa, unidentified
MDQAWPLINPNAAGVDLGSREHWVAVPADRAQQNVRCFGTFTSDLEALADWLKACGVTSVAMEATGVYWIPLFQLLERRGLAVLLVNARQIKNVSGRKSDVLDCQWIQRLHTYGLLGGSFRPADPYCVVRSYLRYRDELVTARSTQTQHRQKALQQMNLQLNQVLSDVNGLSGLAIIEAILQGQRNPLQLAALADRRVKSTQSQIAKALIGDYRAEHLFQLQTAFDLYHTYEAKIATCDEELARVLVKLPDRVDVKLKPLPDKTGRKKMDEDLRLGLYLKLGIDLTAIEGIGPLVALTVLTEVGPDLSRFKTEKHFTSWLGLCPDNRISGGKVLSCRTRRVVNRLSDVLRLAATTLERSQTALGAYYRRMKAKLGAAEGITAMAHKLARILYRLLTHGEAYVRQGMADYEEKYQARKLKSLQKIAESIGFELIQKQTVAEVVS

SEQ ID NO: 283001 - protein, 480 aa, unidentified
MNIKAKKAKVQPLSKKLVINVLSQDEIKKKVQVIEQELKASTWRELETKGKFEKNDKLSFISEEMLIVGCDIGSETHYIRAIDTRGRELSKGAFEFSNSSEGFASAKAWVLKLAAKNDKKQIVLGLEPTGHYWFAIAAWMVSNGISVVQVNPYAVKQSKEIEDNSQLKDDRKDPKIIANLVKDGNYGMPYLPEDIYADMRRLSMFRDQLTEDRIRNINRLHREMKIYFPEYMDAFGKIDGAFTLEILKVAPIPSDIVELDEEGLKSLWHEAKLRGRGYSRARVIVDYAKKSVGLTGGTDAGRESIKWFVEQIIQLDERLAEIENVLHQKCMEIPHAENILEIKGVGENILAGIVAEMGDISRFDDVKEIQKLSGMSLVACSSGKHKGQTKISHRGRKRLRYWLFQAARSAVSHAEEFKELHVYYTTRADNPLKKMQSLIVIACKILRVIYTILKTGKDYDPQKMLKDIKRPKAALAAKAA

SEQ ID NO: 283002 - protein, 344 aa, unidentified
MVTFGVDAHKRTHTIVAVDGRGTPLGQITVGTTSKDHLGLLRWAARFGAERRWAVEDCRHLSRRLERDLLSAGERIVRVPPKLMAHARDSARTYGKSDPIDALAVARAAQREPDLPVARLDGPDRELRLLVDHRESLVAERTRLICRLRWHLHELDPAWEPKARSLDAQRTLDEVQARLQEQAGVVARLARELANRCAELTAVINALEKEIAQLVEQLAPALLALPGCGPLTAAKIIGETAGVDRFKSRDAYARYNGTAPLPVWSSNKARHRLSRTGNRQLNAALHRIALTQARWHPPAKALIDRRKNAGNSGREAIRILKRRLSDAVFQALVHDQTDALMPAA

SEQ ID NO: 283003 - protein, 343 aa, unidentified
MYYIGLDVHKKTISYCVKDAAGRVHQEGKIGSTRRELDCWIRTLPQPRTIAMEATIFTGWIYDHLLPHAEKVKVAHPLMLRAIAAAKKKNDRIDASKIADCLRCDFLPECHMASTEIRERRRILRYRRLVLRQAVQMKNRVAGLLMETGVSYNKLRLHRMGYFEQLLSTNEEISDSIRPLLKLCREHIDRSIRLDTALLRSLERDPLLSERLRRLRTIPGVGPITALTWALEVGDTSRFRSIKEAISYCGLCGAEKSSADKAMRTPISKQRNKHIQQVLVEAARLAPRYSEELALLYERERQRGNTNRATLAVARKIVAHMLAVERRNSDFIPAGEFKQTAAA

SEQ ID NO: 283004 - protein, 382 aa, unidentified
MQASTENPLTAGHNGTIFIAIELSQKTWLVTLHSPDRDRISRHKLEGGDHEGLLALIEKVKARVAEKLGSVPRVVSCYEAGYDGFWLHRLLQAAGINNFVFDAASIAVEQRSRRAKTDRIDGELMLRTLMAYLRGEPRVVRIVRVPTVAEEDARRASRERDRLVKEQTAHSNRIKALLRLLGMDVGTPRRKNWLAWLEQQRDWQGQPLPPHLLAEVKREHARLMLVREQIAGLEQAQLVEAATVPAAMNEQRQSLERLKALGPAFSTTLVNELFYKDFRNRREVAAYCGLAPSPWKSGGIDLEQGISKAGNHRARLKAIELAWLWLRHQPDSALSLWFRNRTANAGKRARRIAIVALARKLIVALWRYLSTGLVPDQATMKA

SEQ ID NO: 283005 - protein, 326 aa, unidentified
MVMEQKVSTTAKGLQAALGGMPRSRIALETGTHSPWVSRLLSKLGHEVIVAHARNVRLIGESRKKDDRLDAQTLARLARIDPELLCPVKHRSAKAQADLTVIRARAGLVRARTALVNTARGLAKSYGERLRGCNVRNMNPEKAEGLSPELQAALQPLLAALESLSERIAEYNERIEKLAQESYPQVALLKQVKGVGTLIGLTFLLTLEDPHRFRKSRDVGCYLGLQPGRRNSGQSQPQMHISKEGDPYLRTLLVQGAQHILGPFGVDCDLRRWGLKLAERGGKSGKKRAIIATARKLAVLLHHLWVSGEVYEPLHNNRGTTVAAAA

SEQ ID NO: 283006 - protein, 401 aa, unidentified
MKRLSGGIDVGCESHHIIILDEEDNFLYNQKVAHKLNEFTQSIKLFRKIEKQEGGKISFALEGKNGYSTPLDRILLDQGFTLYNVDNFKLKRFREAFAGEWRDDERDSLMLSKMLKLKDHINSPREKVFIKIEQPSPLTESLKLLSRHQQTLINEKIRLINRLGKKLLEVCPQILELGKLKNKKIITILAKYPDFSKYRRIALCSLLKIKGIGKKGAFFLLKRLNNIEYMSGLTDIYKTIILSYAKRISELQKEIEDIDKSLDEIGEKSKEVNHLKTIPGVATKLASRFTGEIGNIHRFPSEKQLAIYCGVACVDNNSGKITKARAVYKANKVCKQTLINMAGCSIRFSPQCKAYYLKKRTEGKSHNHALRCLARQLIKVIYKMLTEDREYIVRKELKKVA

SEQ ID NO: 283007 - protein, 348 aa, unidentified
MDRYIGLDAHSTSCTLAVVGPSGRRLGSQVIETNGQALIEAIRGIPKPRHLCMEEGTSSAWLHELLSPHVDELVVVGVTVSRGPKSDQRDAFGLAEALRLGAIAMPVFKAPSRFALLRELARTYSMLARDVVRIKNRIKSVYRARGVSTPGKTVYGTQEREAWLARLPAASRAAAELLYAELDALRPLRAEAEKQLVAESHRHPISRVLETCPGLGAIRVAQLVPIVVTPERFRTSRQFWSYCGLGIVMRSSNDWVRQGERWLRSEVQKTRGLNRRHNSTLKAIFKGAATTVVTAPPAEPLRESYERLLSQGTKPNLAKVTVARKIAATALAMWKRQEVYEPTRYLKK

SEQ ID NO: 283008 - protein, 347 aa, unidentified
MNSVGIDLHRNRSHVAVIDGQGELSLSRRIVNDRATFLELLAGLEGESRIAVEATYGWEWLAELLEDAGYEIHLAHPLRTRAIAAARVKTDAVDAKTLAHLLRADLLPEAYVAPRELRDLRELLRHRIALTGMRSALKNRVHAILAKHGITRQHSDLFGKGGRAFLEALQLREAPRRRLDSPLALIDDFDREIEATSKEIEQRAKADDRVDVLTQIRGVGRYTAMLIIAEVGEIERFPDARHLCAWAGLTPTVRSSDGRARLGHISRQGSPALRWALVEAAQKCTTGGGPLRESFERIAKRRGRKIAKVAVARKILTLSYYGLRDGEIRCLARRSRASAKEKLAVAP

SEQ ID NO: 283009 - protein, 455 aa, unidentified
MRVEQASPAGAQDWKVVHPNAAGIDVGAAEHYVAVPAGRDAQPVRRFGACTEDLMALAQWLKQCGVDTVALESTGVYWIPLYELLEARGFQVILANARSVKNVPWRKSDVLDCQWLAQLAAYGLVSSAFRPAGEVCALRELVRQRQMLIGMQAQHIQHMQKALALMNLKLTEAVSDITGKTGLAIIRAIVAGERDAQKLARLRDRRVKASEADVRRALQGHYRAEHLFALKQALHLYDAYAERVQECDQELERVLTTLARSDDEPPPQDPKKANSHLKNAPGFDLRKALFRCFGVDLTRINGIQVTTAMSVLAEIGFDLSQFKSAKHFCAWLGLAPGTKIFGGKRLSGRRPKVANRAAQALRLAAQALRTSQSALGAYFRRLCARMDKPKAITATAHKLARIIYAMLTKGQAFVDQGEALFEERYRQRVLHNLKRRAQQLGMSLVPAQPPQIAHA

SEQ ID NO: 283010 - protein, 388 aa, unidentified
MHPTSPCPEQDPPHDRHHQATLYASLELSRSAWLVTSLAPGGGKMSKHSVAAGDGAALLALLARLRGRVERSAGGPVGVVVVQEAGRDGFWLHRLLEAEGVESHVVDPASIAVPRRQRRAKTDAIDGETLLRTLLAWRRGEPRVCAMVVPPTPGEEDRRRLTRERSTLLEERTRHTNRIKGLLAGQGIYDFEPLRPDRLERLGALVTGDGRPLPDRLRAELRRELERLELLRRQIAEVEAERDAAAAAESEAGPSPVALLAGLKAIGPQTAAVLYHEGLYRSFANRREVAAYAGLAPTPWRSGKVAREQGISKAGNPRLRHAMVELAWLWVRHQPESAPSRWFRARVGQERGRVRRVAIVALARRLLVALWRYLAHGEVPEGAVLKAA

SEQ ID NO: 283011 - protein, 387 aa, unidentified
MPQAHDFSKSLVPFENDTTLVTVIELSQSSWLIAGSVPGLDRQPLKKIPPDEKTLLHVLHRWRDEAIRKGRTIQRIAVAFESGCDGFWLARWLTQHGIDAHVIHSTSVAVSREHRRAKTDRLDTAMLIRVFLGWLRGERGHCGMVAIPTIEEEDAKRPSRERESLVGERTRIINRMKSALVRLGIRGFKPQLRKAPQLVETLRTPEDLPIPPNALDEMRRDLARLAVVREQIKALEQARLERLEQAPQTGPNARIRLLASVLGVGIETADMLVQEVLSRNLRDRRAVARYAGLTGAPDESGSKRREKGLAKTGNPRVRRGLIQLAWRFLLFQKDSDLVQWFRSRTEGAKGARKTKMIVALARKLLIALWRMVTTGEVPRGVVLRQAV

SEQ ID NO: 283012 - protein, 316 aa, unidentified
MKIHTNQNINVGVDTGKFQLDIYIRPLEIYFTVANDEKGIKEAVKTIQKYVPERITIEATGRLEMPFIMACAKANLPFVIANPVHIKRFAGAIGQRAKTDKLDAQLIAHYGEAIKPKLSTLKPDVMQDMSDLVARRNQLLVMQTMEKNRLQILPKSLAMTIKPVLTLFKHQIKNIEDKLVKLIESCPDYQAKNTILQSMKGIGKIAAASIISNLPELGYISSKQASALVGVAPMNRESGRYKGVRKIQGGRHQVRTVLYMAMMSAIQSNPVFKAHYQKLVAAGKPKKVAIIACIRKMVVILNSMLRDGVLWEAPKV

SEQ ID NO: 283013 - protein, 400 aa, unidentified
MKIIGMDIHRSFAQVAVLEDGKVTKQLRVDLTHGPLVAFTKTLSLEDEVVIEVTGNSAAVERLMRPHVKRVVVANPRLVRAIAYARVKTDKIDAITLAKLHAAGFVPEVWVADEDTYRSRRRAAERAGVLAQLVRIKGRMKAILHENLIPPYKGHLFGKTGQRWLDSLPLPEEERGLLQRLMVEMERVSAQLEEIDQTLAKQTLADPRAHKLMTIPGVGPIVASVVLASIGDITRFSSPDKLSSYFGLTPRVRQSGDHPARHGRISKQGNADARKMLVEAAWSAKTAPGPLRAFFNRVQKKRGAATAAVATARKLAVMIWHVLSSGTEYTYARPSFTAMKMRKVELMAGAPRAYGKAGSARDYWIKEIRDLEADYVARAEQAYERMVAAWKPKPEKSAAK

SEQ ID NO: 283014 - protein, 314 aa, unidentified
MQNEEVFVGIDISKDQLDVHMLPKGMRTTVKNDAQGIVSLIEILRAENPMVIVMEATGGYEISVAAELGVASLPVAIVNPAQVRDFAKGIGKRAKTDAIDAYVLAQFAQTVKPTPKPLPTDDETQIKELVTRRRQLVDLRASEKNRFRRVRSNRVRKSIQTIIAALDKEIKDIDKDIDGLVRKSPLWRETEKLLRTFKGVGPVTARVLMAKLPELGHVSRQEISRLVGLAPLNKDSGKKKGKREISGGRAGIRATLYMAAVSAIKSNVVIKPFYERLSAAGKPFKVVITACMRKMIIILNAMLKKKQPFQVVFS

SEQ ID NO: 283015 - protein, 355 aa, unidentified
MRVHRNCCGLDVHKKIIAACVIKEDADGNSLYEKRLFGSMTRDLHELAQWLCTAQVTAVAMEATGVYWMPVWNVLEPYGLQLLLINPEHYKAVRGKKTDLKDGTRIAELLQDGRLEGSYVPAVAIRVLRDLTRYRTKLVQYQSSLANRIQRLLEQCNIKLASVASDVLGVSAMAMLRALAEGETDAVRMAEMAKKQLRKKIPQLQLALEGCVLPHHRWLLREMIEDLDHVGTKISHIEETIEQQMRPFQSAVDRWISVPGVKHRLAWTLVAEVGPTVEAFPTAADIVSWAGVCPGNHQTGGKRKSGTTRAGNPWLRRALCEAAWAASKTKATYLQAQFRRLAALRGPKARPDCRS

SEQ ID NO: 283016 - protein, 356 aa, unidentified
MTTLEKQNCLYVGIDVHKDTHTAVGVSPFGEKLFEVMIGNYKSDFLALENEVKKHSGILSPFFGLEDVRGYGERLAEHLYQSFPVYYVPSILVDRLRQNATHPEKSDSLDALGVAKVMIQSIDTLLPYTISEEGEKAKQLKEISIDREDLVLERTRLKNQVHTLLYRIFNNEYAKVFKDPFSLKALAHWSKSKPKCDPFLLKTMKRKVKRIRDLHYEITDLEKDMDRLLKENYTIQTASGCGVVLASTIIGEIGDIQRFNSPGALSKYAGCSPRERSSGKKTRHVKTRSGNRRLNCAFHRIALSQISRMGNEKARVYFKRKVSEGKSKSQALVCLRRQMVNIVWNMMKYKTVYRNA

SEQ ID NO: 283017 - protein, 338 aa, unidentified
MALYSGIDLHSTNCWITIIDKERKVIRETKVGNDLETILRFLAPDRAEIEGIAVESTFNWYWLVDGLMDAGYQLHLTNTWAIKQYEGLKYTDDRHDARWLAHLLSLGILPEGFIYPKQERVVRDLLRRRTFLVHKRASFLLSMRGAFECRTGMRTTSGDIKKWTPADVEQHIDDPLAALGITCLLEPMAVLSDQIKILEKEALKRAKVRNEFRRLQSVWGIGKILGLTIMYEVGDVGRFAKVGNFASYCRLVKSDRFSNGKRKGSGNSKNGNPYLSWAFSEAAHFAVRYYEPAKKFVQRKRAKTNGIVAIRALAHKLARASYYVMKDQVDFDPDKTFS

SEQ ID NO: 283018 - protein, 372 aa, unidentified
MTQTNILFIGMDVHKESIVISIADDDRSEIRRYGSIGGTMADFKKTLRKLVSTGKELFFCYEAGPCGYELHRFITSQGHQCIVVAPSLIPKKAGDKIKTDKRDADNLTRLLRSGDLTSVFVPNEEDEAMRDLSRAREDVVLALKSAKQRLKSFLLRHNKRFDGSANWSEKHLRWLTEDINMPYPEQKIVFQEYLSSVTEASERVKRFDKEILFYTQQWRLFPVVKALMAMRGVRMVVAVTIMAELGDLTRFENPKQLMCFLGLTPSEYSSGDKQKKGPITKAGNQHARRVLVEAGWSYRFPAKVSKEMQKRHEDVPLNVRDIAWKAQLRLTKRFRVMANKGKANNLIVVAMAREIAAFMWAIANEVPILPRD

SEQ ID NO: 283019 - protein, 344 aa, unidentified
MTIVEITRLVTGGVDTHADVHVAAAVDANGGVLGVEMFATTPSGYAELADWLAGFGELVRVGVEGTGAYGAGLARFLRTRDVTVIEVDRPNRQARRRQGKSDTIDAIEAARAAPSGRASGVAKTADGDVEAIRALLVARRSGRNVRVKYLNQLRHLIFTAPDELRERFRHVHRDQLARTAASLRPSGDVVTSATKLAMITLGRRVLALEADGARLDRDLERLVRTVAPKLLEVYGVGVHTAAILLVAAGDNPHRLKSEAAFAHLCGVAPIPASSGKTTRYRLNPGGNRQANHALWRIVFTRMSNDERTRNYVARRLAEGKTIREIMRVLKRYVARELYPHVVTR

SEQ ID NO: 283020 - protein, 353 aa, unidentified
MRKMQETIVRGKRIYIGLEDSKKTWRVCVRCERMIVHDTGMPAKYEVLRAYLMERYPECKITVMYEAGFQGFWLHDLLVKDGIGCVVTPPNKVSCPKDERVKTDKRDAQRLALNLETGNYTACHVPDQERREDRQISRTLSQIQKDIRAEKNRIRRFLEYHGLNGDMPAGVWKDTDYLRLKEMSLTHSLKVSLDAYLVVLDTLLKTENKLKAELKALCKKERYKEPVRIKMSVPGVGSLSAIRFTLEWGPLDRFPTGKRFASFTGLTCREYSTGESIRRGHITGQSSEYIRAWLIECAWRAIRIDPALLDQFRRVWKNSGSRKKAIVAVARKLAIRMRAIELSGQTYCMSVAK

SEQ ID NO: 283021 - protein, 343 aa, unidentified
MAYYVGLDVSLKRTSICVVNQTGSIEQEGVVDSDPEAIASFVRSKAPGTVRIGIETGPTTTWLWTELHRLGLPVICIDARHAKAVLKMQINKSDRNDAAGIARIMQTGWFKEVRVKDLDSHAVKAVLASRALLVKIKRDLENQIRGLLKNLGLVIGRAKFNVFAVRAEELIEDRPELVAAVRPLLAARKAIEQQVDDLDRKVHKLARHDVQVRRFMTVPGVGPITALCFKATIDDPRRFKRSRSVGAYIGLTTRRHASGEIDWSGRISKCGDAMLRMYLFEAAGVLLTRVPKWSGLKAWGTKLTKRNGLRKAKVAVARKLAVILHRMWIDGTEFNWSTKKAAA

SEQ ID NO: 283022 - protein, 399 aa, unidentified
MKKHVSLELRVSVDVGCRSHNVAIGLSSGEILDEFSIAHEPEGFRHFFSRIEKQERKFGCPVAVAMEGFNGYARPLDTLVRARDYRLFNINNLKLARFKEIFPGAAKTDEIDARKGLELFQLRDHLPVAKDVLQEVYKTPQENDILKRLSRRRRRLVNERVRVLNNLQSDLQAVCPGLLEITGEADNLWFLRFLTSTDDLRKLARMREATIRKIPGIGVKYASVILQWQKRAQFSHDVEWVGEMIQEDAVRVMELHDKIQSLEAKIEDVAQGSDMAQTLVTIPGFGAVCTAELAGEMGTIERFSNEGSLALYLGMANLDNSSGKQKGSKPPRQVNTRAKAAMMIAVDRHRKKVLESQRYYEKKRAEGKKHNQAVRALGRHLCRVIFKMLKMNRRYILSQ

SEQ ID NO: 283023 - protein, 348 aa, unidentified
MTEAYDGREVVGMDLHRRRSVLVRMTGDGLKLETARITNSPAELRRVIARAGMHPRVVLEATYGWYWAADTLAAAGAEVHLAHPLGVKGFAYRRVKNDVRDAADLADLLRMGRLPEAWVAPHEVREMRELTRYRVKLVRLRTSCKDQVHAILAKLGIPVTCTDIFGVWGSTWLDGLELPQPYAGKMASLRKVCAVLAGEIALLEAVIAGLLKDHQGYQAVRVLPGIGPVLGAVIVAEIGDITRFPRPAELCSWAGLTPRHRESDTKVSRGHITKQGSRNLRWALIEAIQHVPAGHPLRQRREDIITRRGAQARNIAKVAMARQLLTWVFYAMRDGQVRSLAAAARQAA

SEQ ID NO: 283024 - protein, 310 aa, unidentified
MNSETFVGVDVSKASLELSTLPDNHSQQFSNDDRGITQLVKFLGKIDPTLIVFESTGGLEMLAASSLVQHRLPVVIINPRQIRDFAKATGKLAKTDVIDAATIARFARDIRPQIRPFKDEQTQALAALNTRRRQIVDMLVAEKNRLHSALKPNRKSIEDHIDWLEKALSDINKDIDHMIKQSPIWCENDKILQSFKGVGRVTSATLLCALPELGSLDRKKIAALVGVAPLNCDSGKYRGRRHIMGGRAEVRHNLYMAAVSALRYNPMIKSFYDRLIDAGKPPKLALTACMRKILVTLNAMMKNRSYWIAS

SEQ ID NO: 283025 - protein, 408 aa, unidentified
MDAATPVQAARVAGLDWATRLHAVCVLDPDGQVRARFEVPHTGKDLRGLTRRLAKLNVTRIAIERPDGPVVEALLGAGLQVVVIASRQVKALRTRYGSAGNKDDRFDAYVLADVLRTDTHRLVPLRPDSPETAALRAVSRARKALVEQRVALANQLRANLLVALPAAVTLFAEVDSPISLAFLRRFPSVERAAWLTPARMAGWLRRAGYCGRTDPAELYQRLRAGPDGLTGPHGEARAAVTASLVTTLDTVRAQISELDGDIVERLATHTDQHTFTSLPRSGQVRAAALLAEIGDCRQRFPDPESLACLAGAAPSTRASGQHRAVTFRFACDKQLRNAVMDFAGDSRHANPWAAHVYHQARARGHRHPHAVRILARAWLRVIWRCWQDHTTYDPTRHGAYQRLTTQQT

SEQ ID NO: 283026 - protein, 374 aa, unidentified
MTITANESPTTVSEVILGIDTHKDVHVAVALNQLGRRLGELNVPTTTKGYEKLLRWAEGFGPVCCAGVEGTGSYGAGLARRLKAAGISVMEVERPKRRHLRRKGKSDPIDAEAAARVVMADDTAGEPKSADGQVEMIRTLRSVRQSAVKARTQAANQLQALLVTAPESLRHRLRELTTRELVDTCGRFRPGAGPNEVHTATKFSLRSVARRYQLLSEEIAELDEQLDRLVAKAAPELTALPGIGTDHTATLLSVAGDNPQRLKSEASFASLCGVSPIEASSGRVVRHRLNRGGDRDANRSLHLICVVRMRHDQRTREYVARRTAEGKSKPEIMRCLKRYIAREIYRLLASRSAASPPTASVSQAAYPRKLAAQP

SEQ ID NO: 283027 - protein, 420 aa, unidentified
MEELTEEPAELVERVAALDIGKASLVCCVRVPHESRLGARRQEVRTYGTVTPALLELRDWLVCQGVTRVVMEATSAYWKPPFYLLEDDVECWVVNARDVKNVPGRPKTDKLDAVWLCKLAERGMLRPSFIPGRPQRQLRDLTRYRRTLTQERTREKQRAEKLLEDAQVKLSSVISDIFGVSGRDMLAALIAGQRDPHALADLARKRMRAKTSVLRQALTGHFTEHHAFLLAMMVDRVDALTAQIATLTTRIEEAIAPFAAQVAQLDEIPGIGVTTAQEILAETGTDMSRFPTPGHLVSWAKFAPKARQSAGRSKAAATGKGNPWLGGTIGEAATGAARTSTFLAARYKRVVKRRGKKRALVAVGNSILTICWHLLSDPGAHFTDLGPDWHDRLAPQRRKHQLIAELERLSGKKVTLNDAA

SEQ ID NO: 283028 - protein, 316 aa, unidentified
MTDSPVFVGIDVSKARLDIAIRPAGPPMSVPYDETGIALVVNQLQPLHPTLVVLEATGGLEVVVSGALAAAGFPVAVVNPRQVRDFARATGRLAKTDALDAHILAQFAAAVRPPVRPLPEPNVQELGALMARRRQLLEMLTAEKNRLGSAPRRIRRDIQAHITWLEQQLARLGDELTHLIRSSPLWREHDDLLQSMPGVGPVLATTLLASLPELGTLDRRQIAALVGVAPLNRDSGTLRGKRMIWGGRAAVRAVLYMGALVGARHNPVLRAFYQRLRQAGKAPKVALTACMRKLLTMLNAMLKHRTPWRPPCAQVA

SEQ ID NO: 283029 - protein, 527 aa, unidentified
MTERVYEFGGWGGKSVSSAIGIDPDSTGFVCALVKDSKAQAITRRFSVSQKGLSEFLCWVKAEGKPIVGIEGSHGQSRPMEKALREAGVIFHSFKPADTDKFRKAVLGQNKNNERDAESVARYALALEAQGKLEQYRRVWSADMELQLLTRRYESLSNQLTGEVNRLWKLLRYACPDLYLLLEGKNRETEQRGKVLKNQGILSLLISKADLGEWKVLSQSDMQEAMGGGNYKGRGELIAQLQGAAASFPSISAGIALVIGNSAQQIQRFKGEQRELVRMLDNLTKENLAVQCLKSRRGIATLTAAKMIAEIIDIRRFAREDSLACYSGLGMREHTTGTTTMMVPTRLFNHRLKDAFMTAARNVVLYDCDSHLAGYYRNLVKAGMQPLEATKRVARALVRVIFRELSALNKSKANDLKQERRKEGEGDMANGVTHGDQGRKSNISPSSQRVDKSKSIKKVKNSKAQVREQTGGEKYEKRGCRHAPVNGACLQEVYKERHDSTPLSRPVREVQDGPPRPRAILYNQDRV

SEQ ID NO: 283030 - protein, 340 aa, unidentified
MRKLYAGCDLHGNSNFWGIRDETGEKVFHKKLPNDLALMLAMLEPFREELVGIVVESTYNWYWMADGLMEKGYQVHLANPSAIQQYAGLKHADDKHDAFWLAEMLRLGILPEGYIYPKQERPVRDLLRKRGHLIRLRTSMVISLENIICRNVGRKVSANDVKRLGEDRVAPYLEGQEDLALAGRVSKETVDFLSEQIQEIEKAVLKRVRLKKSYRLLLTIPGVGKILALVIMLETGPISRFAAVGDYGSYCRKVPSQWTSNEKWKSSGNRKSGNRYLAWAYAEASEFARRYYLEPRVYYQRKMQKTNAAVAHSALAHKLARAAYYIMRDQVPFRMEKLFG

SEQ ID NO: 283031 - protein, 369 aa, unidentified
MDDITFVGLDVHKATICIAVAEGTRGGEVRQLGVFENRPEILRKVVSRLSKGGRRLSFCYEAGPCGYGIHRLLTGYGHECVVIAPSLIPMKAGDRVKTDRRDALMLAKLHRAGELTAIWIPDAAHEAMRDLVRARATAVRVLVKARQHLQGFLLRHERIYRGARAWTLAYRRWLSTVRFDHPAQQIVLQDYIHAVQEAETRRDRLTQQIEELLPNWSMAPVVAALQSMRGVALVVAVTVVAEVGDFRRFANPRQLMAYLGLVPSEHSSGSSVRRGGITKAGNALARRVLIEGAWTYRMSARVSRKLHDRLEGLPAAVRDIAWKAQLRLCARYRRLAAIGRPKVVVTTAIAREMVGFIWAIARVAQPALV

SEQ ID NO: 283032 - protein, 412 aa, unidentified
MEAIIERAAGLDVHQGSVVACVILGATERRPTREVRSFGTMRQDLAALRAWLLERGVTHVGMEGTGVYWQPVHAALEGALTVIVGNAAHMRTVPGRKTDVRDAEWIAELVRHGLVRASFVPPPPVRVLRELVRHRKALVGTMAAERNRTLKLLESAGVKLAGVMSSVFGVSGMLMLRALAEGRAAPAEMADLAKRRLRRKMDRLALALDGPLAEHQRLLLRMHIRRLEEIGRDIAEVEAAIGAAMRPFAAQQALLVTIPGVDALTAAAIIAEIGVDMAAFGTAQRLAAWAGICPANHESAGKQKRRGTRKGNPYLKATLVTAAVCGARTRGSYLRDKFHRLRARMGAKKAAVAVGHKILLAVFHILRRSVAFTDLGADHLDRVDKCRTAKRLVSRLDALGYDVMLRPKMATA

SEQ ID NO: 283033 - protein, 429 aa, unidentified
MNYTQNEKIEQVTDSTMVVGVDIGSQIHYARAFDNRGRELTKRIFSFHNDLEGFNSFNLWAETLKTENKKTAVLIGCEPTGHYWFAFAKYVNDHQKRLVMVNPFSVKKIKELDDNSPKKTDSKDPKTIAKLVVDGRYSIPYMPEGIYAEIRDLVYSRDRIMKQHNISANRVQRWLAIHFPEYLGLYTRFDAISGLAVLEKAPLPKDVIALGVNGIRKIWHDKKMRGRGVTEDRAKTLVEAAHNSVGLDGGIGTKSELYMLLEEHRLWTSQLEAVNKVLEEMILKVPHVEKLLAIKGVGSITIAGFIAEVGDIRRFDSPKQIQKYAGLELVENSSGKHKGRTRISKRGRRKLRKILYQVMVPLLARNKEFRGIYDYYVTRVKNPLKRRQAMVAVSCKLIRVFYAVLTKGVEYDRFKMMSDIHRKSDIIAA

SEQ ID NO: 283034 - protein, 318 aa, unidentified
MSNSATSPPVYLGVDVAKATLDAACSEQQFAAIPNNPEGHLQLLAQASQLFPGSPMHLVCEATGGYEQALVRSATAAGWKVSVVSPSRVRHFAKACGLLAKTDAIDAKLILQFAETVQPLALQEFPSWTKDLQDLVSLKQQIKVHLTALSNQLEIVSCKKARAAITRLGKAHQNEIAATDKLIVALIATHPELAQNVERLSAIEGIGQATAAAILALMPELGKIGDKQAAALAGLAPYNRDSGPCKGQRSISGGRSKLRALLYMPALTAIRCNPILKPFYKGLRDRGKKALVAITAVMRKLITLCNRLLSDPNFSLAH

SEQ ID NO: 283035 - protein, 370 aa, unidentified
MEEFIGCDAHKKYSVFVAVNERGESAEALRVGHEREQYRQFLQRLPAGSQVALEASGHYYWIVDEMEAAGHHPRLVHPLEAKKRMGKTGKKTDKVDAKGLGILLRNGTLPEVWIPPAQLRDQRELLRLRMFLVRQRTRLKNRIQGALARYNIEIEVKDVFGVEGRRCLGVRLEELPEHTRRSVDVELATMDFVEIQVEEVEKHLEAIMQVTPEADLLKTMPYVGRILSMVMALEIGRVERFPSAAHLASYAGLVPRVHSSGGHTRLGQICGDVNQYLKWAFIEAGNLVVIHQRHLAGQHVVRLYQRVKRKRNHQKAVVAVARHLAEAAYWILKKQEVYRNPHPKPKVGQSAGTAASVATNSPETSGGGVR

SEQ ID NO: 283036 - protein, 413 aa, unidentified
MMRHRKEKYFYVGVDLHKRSHTAVIINCWNEKLDTIHFENKPSAFLSFIQKVKKHIQQGITPVFGLEDVGGYGRSLAVYLVEHHFHVKEVNSALSNWKRKSYAMTEKHDSWDAENIAKILLDELDRLPDAHPQDDYWILKQLVMRRYSLRDTLVMLKNQLHTQLSYSYPSYHMFFSEIDGKTALAFWHTYPSPYLLEGVSLEMLTVFLRENSHNVCSTKKATKILERVQADGNTKRNGQEYRDFLIRSYVNQIRDVQREMLDVEEQTSSIMEKLDFKLHTLTGIDNVTASAIVAEIGDINRFSSADKLAKYAGLTPSQMSSGGRGKERNQRQGNRTLNKILWGLAVRQIQTARTSKKPLNPLFYAYYEKKLSEGKKKKQVIICIMRKLVNVIYSMMRNKTEYRLIQIPERTAS

SEQ ID NO: 283037 - protein, 347 aa, unidentified
MLIIGCDFHPGFQQVAIFDNLTGEIQEKRLQHRAEAEQFYRGLAGPEVRVGMEACGHYPWFERLLAELGFELWFGDAAKVRASVVRKQKTDRRDAEHLLDLLRENRFPQIWVPSLEVRDVRQLLVHRHKQVQARTRTKNQLQAMALSQGVQKKYKLWTKAGREELEQLPLLPYAAQRRKQLLQSLDGLEAEISELDRRVADEARQRPEAVRLMTHPGVGPVTALALVLTLGPADRFESAKQVGSYFGLIPSEDSSGGKQRLGRISKQGSSFLRFLLVEAGQTAARLDPQLKRFYRRLAARKNRSVAKVAVARKLATRLYLMLREDWTYTQLCQAVMQVSPSHSVAGQ

SEQ ID NO: 283038 - protein, 412 aa, unidentified
MNNPQDYLFVGVDTHKAQHTAVVINCFHQKIGYAQTPNNPTDFDSFLTRLKSLIHNDEKLVFGLEDTQGLGHLLAQWLIKKDYTVKEVNPVQTKRERKESTSPDKSDKVGAKAIANVLLAEYDKLPTIKNDANFKAIRQLNNQRKSLVKEQTKVKNRSHNLIHQQYPEYKKFFSDTFGKTALAFWKKYPHPGQLKHIGEKRLNNFLKKQVKSISNDKAAHILSLVDKDKDKNISTKTRETLIPMLIKQLKLIKQNLEEINQLLKKAVDDSQYKLTTMPGIDFRLAAIFISNIKNIDRFDFADQLARYAGIAPVEYSSGKSQNTTSKKYGCRDLNHAFYILALQQIGKYKNGRIKNPVAYNYYQKKLKEGKSKKTALTCLQRRLVDIIYAMMRDRSVYELPEIPNYEILNKAV

SEQ ID NO: 283039 - protein, 412 aa, unidentified
MNIVYERCAGIDVHKRNVVVCAITPDQWGQRHKEQCTFSTMMPDLLRMRQWFQNLGVTHVAMESTGSFWKPIFNVLEGYMEVLVVNAQHLKAVPGRKTDLKDAEWIADLLQHGLLRPSFVPPAFQRELRELTRYRTSVIEERSRTINRLQKILEDTNIKLAAVATDLMGQSARQMLAALLAGETNPTVVAELARGKMRAKRDLLVQALQGQFKPHHRVLISEQLAHIDTLDEEIERLSAEIAQRLRPYEAQIKRLETIPGIKRRLAEVILAEVGPDMQRFPSARHLASWAGMCPGNRESAGKRLSGKTRKGSPWLRTALVEAAHAATHCKDSYLAAQYHRLVLRRGGKKATIALGHTFLVIVYHVLAEEKDYQELGGNYFDDHDRQAVQKRLVHRLEKLGYEVTLAPSPPAA

SEQ ID NO: 283040 - protein, 356 aa, unidentified
MTSTIKYVGMDVHKQSISVAVRNAAGKIVMESVIETKANTVLQFFDGLRGEVRVTFEEGTWAAWLHDLLKPHVGKLVVCDPRRNALLLDGNQNDRVDARKLSDLLYMNKLKPVYHGDHGLRTLKELVRSYLTITRDLGRVMTRVKAIYRSWAIPCSGKQVYGSRHRAEWLGKINEPGVRLRAEFYYQQLDTLRSLRQTVRRELLAESKKHKAWKLLCRIPSIGPIRAAVLLGILQTPHRFRTKRQLWTYSGLGIEIHSSADHEVAQGQLRWKKKPVEIRGLNENCNHDLKNLFKGAAVVASTKPGAFEKFYAAVVAKGMRPEMARLTLARKIATIVLIVWKKGVSFDANHLKPQTA

SEQ ID NO: 283041 - protein, 451 aa, unidentified
MKANKVSALRSKRGLRPAGRDAEPQVVGLAPQTTNDRKADTMKTYILRDTKPVEPQKSHRSPRPEPTVASVGRGAMPTNNAVLFIGLDVHNDSIAVSLAPSDTTEVRRYGIIGGEHDDVLKLAKKLATAHPGMVLKFCYEAGPRGFALCRCLRMHGLDCILVCPSKVPRKPGERVKTDRRDADDLARLYRAGELTGIYVPEPEDEAMRDLIRARFQVGKAQHRARQQLKMYLLRHNLRYGGQSSWSPAHLRYLAKIKMPFPVQQIVFQEMLEVITQATAQLERYDQEIERAVPGWRWEPAVRALMSLRGMALLHAATLVAELGDFNRFEHPGQLMGYLGLVPSEHTTGNDRQQGGITKMGNAPARRALVEAAWQYRAPARLSPHLKKRQEGLPKTITDISWEAQRRLHHRYTHLTRVGRKKSQVAVTAVARELAGFVWAIARQVKPRPAKP

SEQ ID NO: 283042 - protein, 348 aa, unidentified
MKKIVKQVVGIDMAQKELVVCLGKMYDDWSPELYAHKTFTNTVKGFVTLLLWLKKMTDETIPVRFVMKATGVYHESLAYFLDEKGYELSIILPNKISNYFRTLDVKTITDKTASEAIALFGLERKLDCWQKPKAVFKELRQLTRERDQIVEERTRVKNQLHAEQTEAEPNKKSIRRIKERIKMLNRQEKEIKEEIGALIKQDEQLTGHIKTICSLTGVGLLTAAIVLGETNGFELIRNKRQLASYAGFDIREKQSGTSVKGKPRISKKGNRYLRKAMHLPALCAIRYDERFKAIFARLVSKHGIKMKAVVAIQRKMLEMMFTLYKTGNNYDKNYLNRQEIKKLAAQVI

SEQ ID NO: 283043 - protein, 379 aa, unidentified
MEIITRNEKILYIGIDVHKDTYSLCCFDFFRNEISDEMTIKATTKAVIKYLEAIKKKHKEEILFACGYEAGPTGYGLCRGLQKAGYGCVVMAPTTMSNPNGKKRVKTDRIDARAIARILAYKSYSQVHLPSEEMEALKEYTRARDAKKRMFKKAKQELLSFLLRNGKSYPESGNYWTEKFFKWVKTVQFSEKWMQEAFNEYLAEVYSLKAKIELMDMKIREIAELEIIKDKVDKLVCFSGIDITTAVETAVEIHDFTRFATAAQFVSYLGLCPGEDSSGKTKNMLPLTKAGNCRVRVLFCESAKAIKRTNPYGQKSKRILERQKNASPEIVAYADKATKRIRTKMKHLEERGKNYNVSSAAGARELACFVWGMMNRKTA

SEQ ID NO: 283044 - protein, 289 aa, unidentified
MAEVSTIGLDIAKTVFHAHGADARGQMVFSRRLTRVKLLEFFAAQPRCVVALEACGGAHHWAREIASLGHEVKLIPPAYVKPFVKRNKNDAVDAEAICEAAQRPSMRYAAIKTEAQQAAGMVFRTRDLLVRQRTQLINAIRGHLTEFGWVAPKGPSHISVLASLLEEGEEIGASLPDAARAMFLVMTGQLEHLNEQIKLLDKEIARRAREDEAARRLMTIPGIGPIAATALLALAPPVEGFARGRDFAAWLGLTPRQHSKGGKERLGSISKMGERTLRRLLIVGSSTRC

SEQ ID NO: 283045 - protein, 373 aa, unidentified
MQTKLYVGLDLHSNNTYVGALDEEERRVLKGKFPNQLEVILSILEPYKDRVVGVVVESTYNWYWLVDGLIDQGYKVHLANPVAFQPYNGLKYTDDKHDAFFLARMLKLGILPEGYIMPNEDRQLRDLLRKRLKLVHQRTSHILSFQSLVSRNLGLSIPGDEIKKLEEEEISDLFENEHLGLSARVNIAVINQLKWLIYEIRTSLLKAAKLKPQFEKLLTVPGIGDILALTIALETGDISRFAGVGEYASYCRCVPACRISNAKTKGRGNRKNGNKYLAWAFIEAAHSAQRYCPPAKTFFVRKSLKTNKIVAAKALAHKLARACFYIMRDQVDFDSNRIFGKPIKVDKGCVSKPERGLDPKPSAPIGLTDAAAR

SEQ ID NO: 283046 - protein, 415 aa, unidentified
MEIVYPRVAGIDVGKKIVAVAVRTPGDRPGQRHQQLRKFKTFYPVLREMVGWLVAQGVTQVAMEATGVYWKPVFHALCEAEQLEVLLVNARHVKNVPGRKTDAKDAEWLAELCEVGLLRGSFIPPAEIAAVRELTRYRKKLTEARTSELQRLCKVLEDGGVKLDSVASSITTVSARAMVEALIAGERDARVLADLARGVMRKKIPDLAMALQGRFGAHHALLARMHLEHVDQLSGMIQRLDGEIDQVVAPFAEQVGLLRTIPGIGERTAQVLIGEIGVDMSRFPTADHLASWAGLCPGNNESAGKHHRARTRKGNREVREALVEAAWAAGRTGTYLGARFRRLHRRFGKQGGSKAAVAIAHNLLVIVWFVLHDRAGYRDLGADYFTRHDNPDAKKRRLIRELQTLGYTVDLTPAA

SEQ ID NO: 283047 - protein, 338 aa, unidentified
MTQFNHFVGIDISKKTFDAALIPGGNTAGMKHQAFTQNAAGFADFLDWLNYYKIAHEEVLICMEHTGLYTYVLIDFLIATGLNLWVEMPLRIKKSMGLQRGGDDKAAAIQIALYAYRYKDQVLLWKPEQAIVLELRQLSAQRDRLKLSLNQLVVPLQEIAECSHDAGIIKMQVKLQAPVIKAIEKSIASIETKIDNLIAADPATQATINRVSSIKGVGKQTAIHVFIYTKGFTTFSSGKQLASYCGVVPFTKSSGTSVRYKTQVSPFANKHLKKLLHLCAMAAIQHNDELNQYYSRKIAEGKNKMSVINAVRNKLVQRIFAVVRDGRNYVENYAYQRA

SEQ ID NO: 283048 - protein, 455 aa, unidentified
MRRKKASTKRHVDSGFPMVHPNAAGLDIGSREHYAAVSGDRATPSVRSFGCTTSELKEMAAWLKSCGVDTVAMEATGVYWVPVYEVLEDCGIEAFLYDSRQTRNVSGRKSDVSDCQWSQKLHSYGLLTRAFRPAKEIASMRSYWRQRASIVEDCSRQIHLMHKALEQMNVQLHKVISDVTGVTGMRILRAIVGGERDRHVLARHRDRRVKATEEEVARALEGTYREEHMFALKQALESYDFFQEQLVACDHKLEGYLAQLPSAPNPPAVPEANPYRRKNQPHFDLRKELARIAGVDVCQIEGINALTAQTLISECGIDMSPFPSVKNFTSWLGLCPNNRKTGGRIRSRRTRRVANRAADAFRIAAQSLHRSDSALGSFYRQMKARIGAGKATTATAHKLARLFYRLMKHGEAYFTQTQAQYEAHRRERDLRALQRRARRLGLQLLNTTTGELVGA

SEQ ID NO: 283049 - protein, 319 aa, unidentified
MDAREHAVLSRRVKRSRLVAAVASLPSCVIGMEACASAHRWGRAFEPLGHTVKLMSPQYVKPYVKTNKNDCRDAEAICEAVSRPTMRFVAIKTVDQADLQAVHRSRTLLINTRTAFINQIRGLLAEYGLVIAQSPEKVRPALVRFLDDAESGLTAFARETFSELYAQLVELEQRITKVIQRLDRLFNTHPVCRKLAAVPGIGPLTATALLATVGRPQAFHNGRHLAAWLGLVPRQYSSGGKERLGGISKRGSRYVRTLLIHGARAVVQRAARRTDTQGQWLCTLMRRKGTNVAAVALANKNVRVIWAMLAHEEEYRQPA

SEQ ID NO: 283050 - protein, 342 aa, unidentified
MDYYAGIDVSLEASSICVVDASGKIVKETKVSSEPEALMAWFKGLPFGLARIGLEAGPLSQWLYAGLKQAGFAVELLETRHVRDAFKAMPVKTDRNDARGIAQLMRLGWFRPVHCKSAPAQETRALLTARKLVQGKLLDVEMSLRGVLRGFGLKVGRTTKAGFAGRIRELTEHHPALKAIAKALLAVHEVLLKELNGFEKQVRKLARGDARARLLMTAPGVGPIVGLTYVAAIDDPGRFSSSKTVGAHFGMTPKKYQSGEIDITGRISKIGDKGVRAALYEAAHVILTTPVKGGALKSWAARLARRAGMQKAKVALARKLAVILHRMLANGAPFDAAKAATA

SEQ ID NO: 283051 - protein, 460 aa, unidentified
MSQRQRKNHRRKKAAAAQSPLNITHHPDAAGIDVGAEELVVAVPHGRGDAPSVRTFSAFTAGLHALRDWLLLCQIKTVALESTGNYWLCACAILEDAGLEVCLVNARHVKGVPGKKTGVCDAAWLQQLHAAGLLRGSFRPQKEILPLRCLLRHRGDLVAQAGQQVQLMQKVLTEMNLHIHHVFSDVDGVSAQAMMTAILAGERNAAKLAALRDRRCRASLEKIKAALLGDYRAEYLFVLQQCQARWQQLNESITQCDAEIARRTAALTGVTEAPLPHAPAAQRRVQKNMTTAMPVYEEAHRLLGVDLSGVPGLSGGVLCVLMSELGTATHIREKFRSAEAFASWLGLCPDNHISGGRILKTGTRKVTNRIANILRIAANALSRAQGRMGDYVRRFKGRLGKAEGMVAGAHKLARIIWAMIVSGQPYDEHKAFLSTPASLARRLKNLQNQAQALNMTLIPA

SEQ ID NO: 283052 - protein, 355 aa, unidentified
MNSNKYVGMDVHTATISVAVREAAGKLIMESVIEAKASTILQFIQGLRGNLYVTFEEGTWAAWLYDLIKPYVTNVVVCDPRRNALLKEGSRCDRIDARKLAELLRVNLLRPVYHGEKGLRTLKELARAYLTISKDLTRVMNRVKAIYRSWGIPCAGKSVYNPRHREVWLSKITQASVRRRAELYYEQLDALIRLRKQARQELLAESKKHQAWKLLRSIPALGPIRAAVLMAIVQTPHRFRNKRLLWKYSGFGVVTHTSADHRYVKGQLERSKKPVSVRGLDRDHNHHLKDLFKSAAIQASTRKGPFQEFYEALVAKGMRPEMARLTLARKIAVIALTVWKKGGAFDAKYLKPQTV

SEQ ID NO: 283053 - protein, 457 aa, unidentified
MPFWGSRPRLLKWFALLPADRWVGLGARIAKCIQCLQGAFPASPKHGGEQKMSMSEQFCGVDVHRDLLVATILSSSTKETKRFVNDANDINKLKDWLKTHECKRAVMESTSIYWVPLYLALEEAGFDAVLANAHQVKAIPGRKTDQSSSEWLAHLLQGDQIKPSYVPHKQIRELRELTRLRVKLVENRTAFKNRCQKVLNRVNIRLSSRLSDVFGKAGKEILEGLMDGKTIEAILERTQNRWLKNRCDEVKVVAKGALSESDIFVLKELTEMVEHLNEKISRVEARIETLVDEQGVAVVSSVPGVGRRSAAAILAEIGDAKRFVDGKQIASWAGLAPSVYQSAGTFVTGSITKQGSKWLRRVMVEAAHSAVKKRDSRLRAFYLRVKAKKGEKTAIVAVARKMLTIIWHLLVKGERYVEEGFEKTVKSMRAGYAGHVPLEDMAEILRSAGYVVSSPDG

SEQ ID NO: 283054 - protein, 359 aa, unidentified
MAVIEGRERRIVGGVDTHKDLHVAAVVDEQDRVIGTQSFATTRQGYRQMLAFMRSFGHLQRIGVESTGSYGAGLLRFMQQAGIAVLEVTTPDKQDRRRRGKNDDLDAQNAAHAAFAGQRTVTPRSRDGMIESLRVLMACRKTAVSARRVALQMIHNTIVCAPDGLRDQLRSMTRMQLIRTLAAWRPDLTAYRDVEAAYRIAFKSLARRYLELHDEIADLDAMIVAIVDELAPNLVARNSIGHTGAAQLLLTAGDNPERLRSEASFASLCGVSPVPASSGKTVRHRLNRGGDRAANSALHIIAIGRLRTDQRTKDYVARRIAEGHSKLDAIRALKRYLAREVFTLVTQRRREINATRIAA

SEQ ID NO: 283055 - protein, 356 aa, unidentified
MSVYLGVDFHARTQTVCWCDTADGVIQQRTLDHQRDDVRAFYTQFPVPAVVGLEATGYARWFHRLLESLGHRLLVGDAYVIRKCALRRQKNDRRDAELLLDLLLHGDFPAVHVPPIASQAVLRLLRYRQRLVEIQTKLRNGLQAMALNHQLRLGPKLWSARGLQRLQALELDDTDALQKQNSLDLLGQIRTRIRAIEKELTLRADPDARVRLLRTHPGVGLLTSLALVHTLEPVTRFDRARRVAAYCGLDPCESSSGDTIRMGHISKQGNRLLRHLLVEAAHRAVHSKADADLRSFYFRLIERKKSAAVAAVAVARKLVLRLYRMLCEGIDYTEFRRRGRDARRARKTASPTMGGC

SEQ ID NO: 283056 - protein, 420 aa, unidentified
MAGLKIVYPICCGIDVHRDFVIACIASTNPQGVTDYHKKRFSTYSGGLRDLQDWLASYNCQDVCMESTGKYWVPVHNILESSCRVVVSHPKFVKSIKGKKTDKKDAQWIADLFKHDLVPGSFIPPEDIRQLRDLCRYWVKLTSYITGEKNRAQNCLTVSNFKLDSVFSNVFGKSASAIVSHMLDHPGERFDVTPFVDGRCKTPIDQIQAAVDGSFNPFQAEKLKIIRLHMDHLANLKDLLQTQIFTLAIPYAHQVDLLLTVPGISDPMTAIRIIAEIGADMSVFESAKHCCSWAGLTPQNNESAGKKKTTRIGKAGQYIKPLLIQCALAASNPRSQKHPEIRDKFLHLKKRRGPKKARVAIARRLLTAIFHMLLKDESYSPFVAPLAESAPDKRVLTPEMAAALLRSQGFILVDVLPNSA

SEQ ID NO: 283057 - protein, 371 aa, unidentified
MQKNTIFVGLDVHKDSIDVALADAGRDGEVRFYGTIGGDLESLHKVVRKLQSIGTTLRFVYEAGPCGYDIYRSLTGQGFDCIVVAPSKIPRKSGDRIKTDRRDAVNLARLHRSGELTAVYVPTAKDEAMRDLTRGREDAVKALRVARQVLLAFLLRHGYRYSGRSYWSTAHKNWIADIKMPHRAQQVALQEYVHAVQEQDERVQRLTRQIQELLPLWPLAPLVTALQALRGVSLIIAATTVAELGDLTRFDSPKQLMAYLGLVPSEHSSGGTTRRGGITKTGNGHVRRVLTEAAHAYCHPARESRILLARLEGLPQEIRQIAWKAQLRLCGRFRKLMARGKNRNTIVTATARELAAFMWAIACALLPVAPA

SEQ ID NO: 283058 - protein, 343 aa, unidentified
MQTVTTIGLDIAKSIFQVHGIDAEGNVIIRRKLKRRYVLSLFEKLQPCLVGIEACASSHHWSRELKALGHTVRLMPPAYVKPYVKRQKNDAADAEAICEAVRRPTMRFVETKTPEQQSCLMLHRTRHLFIRQQTAVINAIRAHLAEFGIVAPVGRNGVEELLRVVADPGDKRLPEVARTCVAALGSQLRILKTQILQFDRMIMAWHRSNETSKRLDQLPGVGPALATALVASVADPKAFRSGRDFSAWVGLVPKQNSSGGREKLGSISKRGDRYLRSLFTAGALAVIRYAKIHGTGHRPWLAALLARRPTKVAAIALANKIARMAWAMMARGERYKQPVALAT

SEQ ID NO: 283059 - protein, 349 aa, unidentified
MYYVGVDYHKRYSVATVLDEAGTMQARRRLDNRFDDFRDFLKPYDKAEVEAVVESTRSWGIPVDILEQLADRVVLANPGEVKLIAKARIKTDKVDSLTLARLLRMDWVPEAYLRPKVNREQQLILRIRCFLVQLRTRVKNRIHDLIDRQDESVREMTTGYSDLFGKKGMTWLRSLQLGQPSGTLLGQLLAVYDALDKEVRQSDRLVADLFAADEDCQRLAKTPGIGTFFAVLIKTEVGNIERFANSPRFCSYAGVVPSTESSGGKIWHGRIIKQSNCWLRWALVEAAIPATVADAGLRAHYEYYRRMKGSRVAKVITARRLGCIVYRVLKERTPYYERPVPSRGCCQAG

SEQ ID NO: 283060 - protein, 429 aa, unidentified
MPYRIAGIDVHKKMLAVVVSNVEVESEFQFERRMFGGNPEQLRSLAAWLLEQEVEEVVMESTAQYWKPVWETLERYWKPVREKREDARRRSGTLHLAQALSNRGRRGRKKDFLDAERLVKRLVARELTLSFVPDAEQRLWRTVTRRKYQLTRDRARLQNQVESLLEEAHIKLSSLVSDLLGASARRMLKALADGETNPAALAALADKQLRATPEQLCDALGACTELNPVYRRLLKMALEQLQFLEQQIGDLDQETASLLRQHQDAVERLAEVPGLGVDSATQIIAEVGPTAATFPSGKHLSSWVGACPGDEESAGVNYSHRSPQGNRHMRRLLNQAANAAVKVKGSIFEIVYRRSVPRLGHNQVIGAIAHRQCRLIWLILHQGVRYEEHGPAVTKQSRQARTARMIRQLRKLGYQVELPNSQPANSAGR

SEQ ID NO: 283061 - protein, 459 aa, unidentified
MRPKGKRTQGIEQAHPFAGMSKVNPHAAGVDIGAEEIVVCVAGNETTQIVKGFGNYTVDLKAIGSWLKSYHVKTVAMESTGVYWIPLFEELENQGFECLLISSRCLRRVAGRKSDVTDAQWIQTLHNYGLLENSFRPQADLVALRTLLRHRVQLVEHRSPHILHMQKALLQMNIQLSQAVTDVTGVTGQAIIRAILSGVRDPKMLAALREPGCKKSEEELGRALTGTWREEHLFVLKQSVALYDFYTEQVTACDEEIERMYGATRPEWEEGEIKPLSSRKRNSHSKNAYRETEKIRKHLKRISGVDLSLVDGFGVSLAQMVILECGTDMSKFPTEKHFCSWLGLAPKHEISGGKVLKNKTLKTKNRAGQAFRMAAQSVKQAECAFGVLYRRLRARLGPAQATVATAHAIARVVYRMLKYKVEYDPLSVNEYQKHYEEQQIKYMQKRAAKLGYQLLPVPA

SEQ ID NO: 283062 - protein, 345 aa, unidentified
MKHYAGLDVSVKETSVCVIDEAGKICREVKVPSHPEDLAAALNDPAWRLERIGLEAGPLSQWLFSGLVEAGLPAVCIETRHTKAFLKAQVNKSDRNDARGIAQMMRVNLFRPVHVKTLTSQKRRALLTARKILQDKAVAIENDIRGLLRNFGLKVGAVGVGKFDERIRELVEGMPELVEIMEPLLTARQKLREMFTTLHRKLLSIVRDDGVCRRLMTIPGVGPVVSLAFSATIDVPARFKNSKAVGPSLGLTPVLNQSGESLRVGRVSLCGDAMMRMFLYEAAQVMITRVQKWSWLKAWAVNVAKRRGLKKAIVALARRLAVIMHRIWVDGTVFRWTKEAAPATA

SEQ ID NO: 283063 - protein, 499 aa, unidentified
MEILYSRCCGLDVHKKTITACSITPKGKELRTFGTMTPDLLNLAEWIKAEGCTHVAMESTGVFWKPVYNILECYNVEILVVNAQHIKAVPGRKTDVKDAEWIANLLRHGLLKSSFIQNREQRELKELVGYRKSLVDERAREVNRIQKVLEGAGIKLASVATDITGVSGRSILDAIVSGVEDPKFLASLSRGKLKNKHEQMEQALQGLVGKHQRMLISTQLKHIDFLDQEIARLDQEIEEQMRPFEQEIAFLDAVPGIGVRSAQVILACIGTDMSRFPTTSHIASWSGLCPGNNESAGKRKKVKSKKGNPLLRTTLIQAAKSASHTKNTYLSAQYHRIAARRGKNKAAVAVAHSILVIVYCMLKHHRPYQEMGADYFAKTNAKAIKNRAIKQLEMLGFRSGSRPLNFSLFVFSLKATLLNPFGRGLVRCCLSGTVIFRTEERHRSREFINFLKSMDARYADREKIKVVLDNHSSHTSKETRAYLATVPNRFELVFTPKPV

SEQ ID NO: 283064 - protein, 353 aa, unidentified
MGTRRRVIVGVDTHAAMHCAVVLDGTGRMLATREFDASARGYCSLLTWARRFGCLEAAGVEGTGAYGAGLARQLIAEGVKVFEVPRPDRRLRRTRGKSDPIDAEAAARAVLAGTATVAPKIADGPIEAIRSLHVAKLGAIKARTAATNTLRSIILTAPESLRAQLPSSGLPNKVINACVRLRADPTRLSEPVQATKAALRSVALRAKSLREEIQLLEHQLAELVAITAPTTLATFAMGVDTTSALLVTVGDNPERLRSEAAFARLCGVAPLPASSGKTNRHRLHRGGDRSANRALHVAVIVRMRYCSRTRAYVARRTSQGLSKPEIIRCLKRYLAREIFQALRADYAALNHPA

SEQ ID NO: 283065 - protein, 405 aa, unidentified
MLNAVGIDVSKGKSTIAVLRPAGEIVRKPFDVRHTPKELSILSSYIQHLEGDTRIVMECTGHYHEPILKVLSDSGFFVSAVNPHLIKEYDGDNSLRKVKSDSADAKKIAGYTLDKWHLLRQYSAMDNTPTQLKTLNTQFQSLMRQKTALKNNLISLLDLTYPGVNAFFDSPVRKNGSQKWLDYAYSFWHADCVRTIGLKTFTERYKKFCKRHGYIFQPDKPKSIFESSKELIAVAPKDHIYKDMVLSAIVQVNLISAQIESMRLKMDELASTLPEYEVVMNMFGVGHTFGPQLMAEIGDISRFNHRSALTAFVGVNPGVNQSGKMKIDSNRASKRGAPRLRKTLFQIMQTLMQNAPADNRVYLFMMKKKAEGKPYHVYMTAGANKFLRIYYGTVKAHLASQSQTE

SEQ ID NO: 283066 - protein, 422 aa, unidentified
MKKRTYRGVEVKKVNRERLAGAVAGKDLVVGVDVGKEVCFGSLKGAGQEVEMTVKWKSPWENREVIEFLQGLGCRSITVVMEPSGSYGDPLRSLLWEAGIPVYRVSAKRSHDAAEVYDGVPSRHDAKSAAIIAKLHKDGASELWPFRSEQERDLRAVVKTMDRVDQQFHENVNRLEGQMARHWPEVGAWLNFSRVTFLELIVRFGGPEQIAARAEEARATMRSVGGSFLSQEKIDAVIASSRKTIGVPMTGQEVEELRKLGDHTLDLYRRLKQAKRHVERMSQDRGSIQAMSRAVGKGTAAILVAEGGNPEQYGSSAEWLKTFGLNLKERSSGKYMGKRKITKRGSGRARRWLYFAALRLIQKDLIVKTWYKRKVVRDGGVKKKAIIAVMRKLVKALWYVGRGEALDTSKMFDVKRLGLACA

SEQ ID NO: 283067 - protein, 395 aa, unidentified
MKRVCGLDVHKDTIFACVRKGNYQTEVRTFSTFSCGLEELKHWLKGEHVNRVAMESTGVYWMPVWRALEDDFDLLLVNPYFIKQAPGRKTDVKDAQWIAQLLDKGMLKGSLVPEKTIRVLRLYLRRYVQLQGQMTRCLQQIERHFSQCNIKIASLTSTINSKTVIDILACIVEGKHTVDDLVALVHPRIKNSKGEKVKQSLEGIIEAHDVFLLRQIYEDYQHINRQCYELLAQAEKLADEQYKEQIELLQTIPGIKKLSAVFIWAELGGNIELFENANRLTGWCGLRPNNDESAGKIKSRKIGKGNKYLRRILVQTGWAASRTKNCYLKSKYEQLAIRKGNKKALIAIARKQLVITYNVLSKKEKYQEPKVALSEKQIERKRKYYEEKLTKLKQQ

SEQ ID NO: 283068 - protein, 349 aa, unidentified
MQQGHVYIGLDVSLASTAICAVSAQGKIVKETTAASEPETLVAMLKAMPGEVIAVGLEAGPLSQWLYRFLNDAGFATVLMETRQVKGALKAMPIKTDRRDAEGIARLLQMGWFRSVHCKSMSAQEMRALLSARKAVQQAVINLELSIRGVLRNFGLKMGRVAKGRFEARVQELAEGNPMLEAAANPILASRQALRQELVGLEKTLRDHAKEDPVCRTLMTMPGVGAVVALTVKAAIDDPARFRSSKDIGPWVGLTPRREQSGERDIVGQISRAGDVGLRTALYQAATVMLQRESKNWLTAWALNIAKRRGKKRATVALARRIGVVLHRMWRDGTDFRFTRENALEVATA

SEQ ID NO: 283069 - protein, 436 aa, unidentified
MVVKSHKRVLRQVPDRAILRLARIVSGGVVLAALVAVLSGMGRADQRATAGKLIRGSSLIWLMGSRWGGCQPSPTASQCAKFVVLNATKWKEASVGKVTIIGIDLAKNVFQLHGAAADGTVLFRKKLSRLQFCRFMEGQPACVVAMEACAGSHYWAREMVQLGHQPKLIAPRYVKAFIKRQKNDAADAEAIVEAAQRPTMRFVEMKTEEQQSRSIMFRTREQLVNHRTELANALRAHLYEFGHIAPQGIRYLSRLERFVEDENANLPDLVREICRDLLDQIYQLTGRIDALKKKIDALSREAEASRRLQTMPGVGPIAALAIETFAPPMETFKCGRDFAAWLGLVPLQKSTGGKQRLGKTSKMGQRDIRRLLIIGAMAVVRWASRKGAPESSWLARMMAKKPRMLVAIALANKMARGIWAMLTKEEDYRNPATVPA

SEQ ID NO: 283070 - protein, 349 aa, unidentified
MVANEVDYVVGVDTHRDEHVLAVVVAPAGAVVARRTVSASGRGYGQALRFAQRYAAGARVWAVEGAGHYGVGLARYLNGRGEAVLEVGRSSRNERRLRGKDDELDAVRAALTAFASEPLALPRSGERREALRLLLVARRSAVDVRREALVQLRSVIVTAPDRLREELRGLPVQRLLERCCRLRLSAAAAPDEQAARLVLRTLARRIEAASAEADELEQEILAHVQALAPQLLDEPGVGPIVAAQLIVSWSHRGRVRSEAAFARLAGVAPVPASSGQTRRHRLSRGGDRQLNRALHTVVLHRRQHDPVTKDYIARRIAEGKSRREATRLLKRYLARHLYRLLESREPLMA

SEQ ID NO: 283071 - protein, 417 aa, unidentified
MTVNSLMQKRSAIKPDTLIVGVDVAKYNHVARTMVPGGAIGRPFSFPNNREGFLALSAEIEARKPTPASAVIVGLESTGVYWINLARWLAEHGCQVVQVSGLYVHRTKELPDNSRGTSDGKDALLIADLVAQGKYLGFVRPAGVLADLRQLVGLRQRLVHERAARYNLLHQSVDLLFPEFATVFRDVTGPSARRVLRRFPTPAAALAHPPEAMRQLLSEDGRVWVSVAKLARLQAVARQSIGACEGTTGLEYALNDTLLELDSLDARVRQVEAEIDRLLPQVDETPILVSLVGRMTAAVILSETGGLKQYSCAAAVLKLAGLNLYQISSGQYRGDRHISQMGRSLLRQTLYLAVLQHTHPGMPLYPYYAELLRRGKPKPVALVALCCRLVRLLYALVRDGRCYSAQPPERNQQNSAA

SEQ ID NO: 283072 - protein, 406 aa, unidentified
MNKLFVGIDVSSQNNVSYLMESDGAKYSSFSVQNNLGGAKLLKEKIVSAMETLKLSDVVIGMESTSIYGNHLVHSLREDGTLGRYQRKIHVLNPKQVNRFKESYPDLPKNDWVDAFVIADCLRFGRIRSEVYMDDYRYEALKTLTRARFYAVQNLAREKQRFANLLFLKCSGLAQSADIKNTSSTVLSLMEEYETVDDLANADLEDLTAFVTAAGRGRFADPENTAKTLQAAARGSYRLPKTINDSVNQAMSVSIATMRSMKEQIKVLEKAIEQQFEIIPNTLTSIPGIGKVYSAGIIAEIGDINRFQSHASVAKYAGLVWTQHQSGNFEAENTRMIKSGNRFLRYYLLEAANSVRGCDPEFQRYYDLKYHEVNKGQHKRALALTARKLVRLVFRLLKDNRLYNRW

SEQ ID NO: 283073 - protein, 329 aa, unidentified
MHFLGIDVSKAKIDCCIFPEGLSGKKKSKVFANAESGFSSLLAWLLKQDIDFKQTIAALEATSVYHETLTYRLYDAGLKVCIANPARVRRFAEGLSILNKTDKVDSEVLARFAALAEPEAWQPPSPKIRLIKALMARRESLVADLQRELNRQEKAISTLTPPQVLASIESSIAFIEAEIAKLDQEIKNHVDHDPDLKTDMDLLTSIPAIGERTGLLMLGLLRSHEFSQASQVAAYVGLVPVQRQSGSSVKGRSSISKAGSAKVRAGLYMAAVVAIRHNPHIKAMYERLLINGKSKMSAVCAAMRKLVHLCFGVLKHQMPYQANYQTKLA

SEQ ID NO: 283074 - protein, 325 aa, unidentified
MQTHTNYIGIDISKLTFDVAIRQEQAYKHYKFDNNLDGFLALIKVLPAESVVVMEASGPYYLRLASFLAGKGVEVSVINPLVIRRFCQMRMSRAKTDKKDAMMIAEYGQSEKPGLWQVPQEQVISLQQMESLLTKLEQEQRSLKNQLESFSNSGRLDKKVEKLIKKELIHKQRIIDKLTKEIEELAAQHYASLLEELQSIPGLGKKAAIALAVISNGFTKFDNYRQLSSYVGLSPRIYESGTSVKGKARICKLGMSQMRSILYMCSWSASRYNKACREVYERLLAKGKAKKVALIAVANKLLKQAFAIATKHTLYDENYLTKPCF

SEQ ID NO: 283075 - protein, 366 aa, unidentified
MQKISTIGMMGDGILKSDKLTIGLDLGDRSSSYCVLNEAGDIVLEHKLATTAEAMKEVFGRMPRSRMALETGTHSPWVSRVLTALGHEVIVAHAQRVHLITKSRRKNDRLDARTLARLARIDPQLLNPVRHRTAQAQIHLMEIRARAELVSARTALVNAARGLVKSYGERLRKCGTQQVGRELAIGLSPELQAALEPLLREVESLNERIKEYDQRIEKMAKERYQEVELLKQVKGVGDVIALTYVLTIEDPYRFKKSREVGCFVGLQPGRRDSGESEPQMHISKEGDEYLRTLLVQGAHYILGPFGEDSDLRRWGNKLAERGGKNAKKRAVVAVARKLAVLLHRLWVSGEVYEPLRNSQKAMSTAA

SEQ ID NO: 283076 - protein, 326 aa, unidentified
MRQEVRVERGGFVGIDVSGDRLDVAFRPGGERLQVSNDARGITRLTRMLERSQPELIVLEASGGYEVALLERLFAKKLPVALLNPRHVREFARASGRLAKTDAIDAEVLAHFAQVMKPEPRQMADPETRKLRALVTRRRQLIQMVTAELNRRRHSLEVVREGFVATIRCCKRQIAAIDKPLATLIQQTPKFRQKAKLLRSAPGIGGIASATLLARLPELGTLARKKIAALVGVAPYNRDSGKIKGKRAIWGGRGDVRAVLYMSTLVAVRLNPSLREFHQRLRRAGKSPKMALTACMRKLIVILNALLKNELPFDGNLTSIVGAVSS

SEQ ID NO: 283077 - protein, 422 aa, unidentified
MKAFDVSNFAALIGIDWADRKHDICEVNPQTNEQHFSVISSQPKAINAWANEIKRKYNGQLVAVACELKKGPLIYALSKFSHIVLFTINPSSVAKYRKAFTQSGAKDDPTDAAIQVEILQLHMHKLNVITPDSESVRSLAQLVEYRRKLVQDRVNLTNRITTTLKNYYPHVLDWFKEKDTMIFCDFLLRWPSLEQAKRARKQTLVDFFNQHNSRYPAVNEKRINEIKLAEALTNDKAIIAPNLLLTECLIEQLKHLMLAIERFDVEIKALYKPHKDRFIFDSLPGAGPQIAPRLLAAIGSNRDRYHSCEEIQKYAGIAPVTERSGKKEWIHWRYSCTKFLRQTFVEWAGQSVRYSFWAKAYYRQQEAKGKPHNTIIRALAFKWIRILFKCWKTKTAYDESTYLEALKRKGSPLLKYAVESKF

SEQ ID NO: 283078 - protein, 376 aa, unidentified
MKNLNFENVLVVGVDTHKRSHTAVLVTPFCQVIETYELDNSTEKINAFLDDVLEKAAGKTVYFALEDVNCYGYHLSRAILSRGLKVFNVPAIYTERDRRHTSHIDKSDALDARGVARVLLTKSDSIPPEFMISEKTELSFQLKKMINDRKQLIRQNTMFKNQLHAILHEVFGDNYKRQVSYKDIFCPMAIMEWISILEQKKDYSSRRALVKFKNLEFVYQEIDLLDKQLEEKSNDDVKLLESIPGCSNQIASAIISEIVDITRFKSSAALAKYCGLAPREHSSGERIRHFVDRRGNRKLNNAIHRLAFAQLGSRCKAPGRWYFVKKVKEGKSKLSALRCLKRKMIDIIYQILTKKEKYKFNFSKCKDLDLDLKIPA

SEQ ID NO: 283079 - protein, 359 aa, unidentified
MPGSLNPNEARSPASTLVELEQLHEPELLPLSSHHKSETTMATENNQPQLPITYVGIDISKDTLDVSAGGNHRTFKNSPAGFRDLLNWLRKSQVEQFHIVCEASGGYERHLVHALLEASVPVSVVSAARARSLARSLGLHAKTDKIDAGLLVRFGEITKPKSRTRLDGTSRALTELVDFRRQLLDQISILKNQQEHLPPGALTRSSNRLLRSYEAELKVIEKSIDELMKANPVLWENYQRLTQVQGVGRYTALGVLAYFPEIGKLSRKQAAALAGVAPYSKDSGNRQGRRSIYGGRTKLRASLYMAALTASRSNPVLAPFYARLKANGKASKAALTAVMRKLIVLLNHLIKHPDFSLAS

SEQ ID NO: 283080 - protein, 442 aa, unidentified
MREPEEVIVEEREEVVERVAAIDVAKASGKVCTRVPHPSVAGRRVTKVWDVGAMTGSIMELGDELARQGIERVVLESTSDYWRPFFYLLEARGLEVWLVNARDVKNVPGRPKTDKLDAIWLAKLAERQMLRPSFVPPAEIRQLRDYTRLRVDLVEDRTRYKQRVEKLLEDSLIKLSSVASDIFGKSGRAMIAALIAGQRDPDVLADLALGQMRKKTAALREALTGRFDEHHAELMSILLEQVDALDRKIDILTARATELIAEIPAAAAPAGFGITAAAAPLCAVERLDEVTGIGVVAAQAIIAEVGLNMGQFRTAGNLVSWAKLSPRTIQSGTKSRSGRTGKGNPYLKRVLAEAAAVVSRTDTFLGERYRRIAKRRGKLKAIVAVSRSILVIVWHLLADPTARFHDLGPDFYSRTATSQRRVRNLVHQLEVLGHNVTLSPVA

SEQ ID NO: 283081 - protein, 354 aa, unidentified
MIIIGADYHPGFRQIAFVDTDTGELQERRLEHREEAEAFYRELEAQGLKVRVGMEASGHARWFERLLGELRFELWIGDAAEIRTKRVRKQKTDRQDAQLILRLLLEDRFPKVWVPNWENRDLRQLLWHRHRMVQARTRIMNQLQAVALNEGVHCKKRLWRDAGREQLQSFKLAPWASRRRRDLLELLDRLTPTIAELTQAIEQEADKWPEAQRLQTHPGVGALTALAFVLIIGRAERFQCGKQIASYLGLVPSEESSGQRRRLGHISKQGNSLLRFLLVEAAQVTVRGDQEWRNRYFHLVLRRGRKIAKVAMARRLAVRLYWMWRKGWDYEQLKNFGSHAGEPGHPDGVQSSTE

SEQ ID NO: 283082 - protein, 348 aa, unidentified
MAHFVGLDVSVKETSVCVVDDTGKAILEQKVPTEPADIIALLSSLGVTYGRIGIEAGPLSQWLVNALTAADLPVICVETRHMKALLTAQQINKTDRNDARGIAQMMRVGLFKPVHVKTLVAQEQRMLLTSRKLLQRKLLDVESDLRGTLRNFGLKVGVVSGGRYEARVRELVADFPRLAAIAEPLLNVRRVMRQQFAVLHKMLLDTVRDDPVCRRLMTAPGVGAVVALTYRATVDQPQRFVHSRAVGAHVGLTPKRYQSGEVDYDGRVSKCGDALLRTMLYEAAHSLLIQSRKWSWLKAWGMRVAQRRGIRRAIVAVARRLAVVLHRMWVDGSEFRWSKDSAAVPAVA

SEQ ID NO: 283083 - protein, 402 aa, unidentified
MPMLSIGIDVSKGKSTVCGMKPGGEIVYTPFEVQHTREGMSELVSLLRGSGEEVRAVLESTGSYHCPVVAALLENGIFVSVVNSLRMKRFCSQSIRRVKTDQIDAMQIALYGLAYWQELQPTRLPENTYRELQLLARQYYQMTSLLIKAKVDFNALCDQVLPGMQELMNDHAGRHKLSDFVLRYHHTTHILEMGETRFRKDYCKWAEKKGYRNRERMAALIFATAQNGIPVLPNAPSTQIVITEAIRVLHTVEASRDAILTQMQALAKTLPEYSLVREMPCIGDTLAPRLIAEIGDVRRFHSKRALIAYAGIDAPPYQSGKFCANNRHISKRGNRYLRKTGYEVMQNYVMHKPANDPIFTFIEKKRGEGKSGKLAMVAGLNKFLRVYYGKVTELYRSLPTIE

SEQ ID NO: 283084 - protein, 446 aa, unidentified
MKKSFQMSIIHPHAAGVDIGAEFHVVAVPPDADAAPVRTFQSFTGDLHRMSDWLKTCHITTIAMESTGVYWLPAFEILEAAGFNVILVNARDAKNVPGRKTDVNDAQWLQKLHSFGLLRASFRPEHDISVLRSYLRQRERLTEYRAAHIQHMQKALMQMNVQLHHAVSDITGVTGLSIVRAIVSGERDPSVLIQYRDVRCKKAPEVLQQALTGNWQPEHLFALEQSVAFFDFYQEKIRECDDQIETSLLQLSTGIKEPEGALPSARHRTKQPNQLAFDVRPLLWKITGVDLTQIHGFGPYLALKFVAECGTDMNRWPDASHFTSWLCLSPGNKISGGKVLSSKTRRSSSRIAAALRLAATTIGRSDTALGAFYRRLSSRIGKAKAVTATARKLAILFYNALKYGQKYVDPGADYYEERYRNRVLDGLKRRAKSLGYSLQQDPELCV

SEQ ID NO: 283085 - protein, 321 aa, unidentified
MNKYSKIYGVDISKDVFDVACSDDAHHQFDNTPKGFSSFLKAIAQGSLVVMEATGYYHYRLAQYLFKHGVVVSVVNPLSVKRFIQMKLAKVKTDKSDARAICEYGRVNDVPCYTALTDVQAECLQLFRLLDSYLKKRTATKNKLHGEETLGIPSKFVHQSLKRDLKHLDKEVKALEERLLLLVKQDQQHQLTLLKGIPGLGTKTALFLIVITDGFDKFETAGQLCSYVGITPTIRQSGSSVRGKSRISKVGNQKLRNLLFLCAFSASKHNKACREIYERIVAKGKSKKLALIAVANKLLKQAFAIAKSGLPYDEKFVSKLN

SEQ ID NO: 283086 - protein, 327 aa, unidentified
MSKTVLGIDVSKDVLDMMLLQNNKRHYAQFANDPSGLTKFSNWLKRYNPEDLHACLEATGQYSLPATKLLYQKGYAVSLVNPARIKSYRDSGLYRNKTDRLDAFVIADFCRTQEPEEWTPPSPAAEELKALVRHLDDLQGELRQERNRFGSGISSSYVLANLKEHIQYLDDKIMDVKKRIQKHIDQSPELKVQKKLLVSIPGIAELTAAKLLAEIQDIHNFKNAAQLAAYAGVTPRQYRSGTSVHKKTRMAKTGNAQLRKAVYMPAVVAKNHNPIVKEFCNRLEAKGKLKMVVVGAAMRKLLHIVYGVLKNGKPFDPNYLKKVQETS

SEQ ID NO: 283087 - protein, 338 aa, unidentified
MNIVFLGIDLAKNVFQLCGLNQAGKPVYTKRTGRKELLQTLANIPACLIGIEASTGAFYWQREFEKLGHKVKVISPQYVKPFVRGQKNDGNDAQAIAVALMQPTMQFVPPKSPEQQDIQALHRARQRIVNHRTATVCQIRGLLLDRGIPIGSAVSRARRAIPLILEDAENGLSSRMRRTIAELYDLFNDLGRRIHFFDKEIETVFRQSEACQRIAKVKGIGPETATAVVAAIGKGTEFKNGRHFAAWLGLVPRQHSSGDRQVLMNMTKKGDKHLRTLFIHGARAVVRVATNNNDGHMNQWVNQLKERRGFNKTTVAVANKNARIIWSMLRNDTGYQVV

SEQ ID NO: 283088 - protein, 347 aa, unidentified
MRFYTQQHKHYCGIDLHARMMYLCIVDAAGVVLLSRNIDCTPQAFLSAVKAFRDDLVVAVECMFTWYWLADLCARENIAFVLGHALYMRAIHGGKAKNDRIDAHKIAALLKGGMIPQAYVYPPEMRATRDLMRRRNHLMRKRSELIAHIQNTISQYNLPPFEGRIRKRHERDGLLAHFPDVQVRNSVGLDLALIDHYDELLPKLERHIRACAKGHDARSLVLLRSIHGADLIIPLIILYEIHDISRFARVQDFLSYCRLVKPTRESAGKIQGHSGRKIGNAHLKWAFGELATTFLRANPPAQSLHERLKKKHGKGKALSILAAKLARAVYFMLSRGRVFDAHRFYQN

SEQ ID NO: 283089 - protein, 312 aa, unidentified
MPRKSTVHAVTAIGMDMGKNTLHMVGLDTRGTIVLREKVSRGRITSRLANLPPCLIGIEAGMATHYVARELAVLGHDVKQVPPAYSKPFRQGQKNDFRDAFAVAEAVQRPTTRFVPAKTNEQLDLQALHRVRSRLVSERTAVINQIRGFLLERGIIVRQGLRFLRQALPDILAKRTDVLSPRMVRIIADLASDWRQLDERIEPVTDEIETLAKSDSSCRRVMTVPGIGPIISSAMVAAIGSGAAFARGRDFSAWIGLVPKQMSTGDRTILGRISKRGNGYLRTLFVQAARVILLRPASWPKHGFGVWRAPSG

SEQ ID NO: 283090 - protein, 465 aa, unidentified
MKPNRRPDRKKPAAGPSLLERMNPNAAGIDCGSDTHHVAVPADRDPTPVRAFQTFTADLHRLADWLTACGVTTVAMESTGVYWIPLYEILEGQGFDVVLVNARHVKNVPGRKTDVVDCQWIQELHSVGLLRGSFRPTAAIAALRAYLRHRETLVQSAATHVQRMQKALVQMNLQLPIVISDITGVTGLRILRDIIGGQTDPQVLAQHRDHRCQASAAEITAALTGHYRPEHIFVLQQNLELFDAYQHQLAACDTAIEAHVLTLAAQAPTPASPVPAARTRKKARNNEPRFEIRTPLHQLTGVDLTQIDAIGPYSALRLLSEIGTDMSRWPTEKHFTSWLTLAPRNKISGGRLLSSKTQPSANRAAVILRMAAMNLGRTDTALGAFYRRLAYRVGKAKAITATARKLAILVYRTLRDGLVYQDPGAAAYDAQHRVRVLHRLRQRAAHFGFSLLNRDTGELLEGAVS

SEQ ID NO: 283091 - protein, 368 aa, unidentified
MKKNRTAQRSSSSTTQVRKKLTIGLDLGDRNSRYCVLDEQGEVIREGSVPTTRKGLDRVLGAMHRGRIALEVGTHSPWVSRHLTRLGYEVIVANARRVRLITESSRKDDKLDAKTLARLARIDPDLLSPIRHRGEQAQADLMMVRARAVLVETRTALINAARGLTKSFGERLPSCGTNQMGRDQAESLSPALQVALEPLLAEVETVTERIQEYDQELEKVSKERYPEVELLRQVHGVGILIALTYVLTVEDPHRFLRSRAVGCYVGLRPKRRQSGQSQPELGISKEGDAYLRTLLVQGAHHVLGPFGKDSDLRRWGLQLAARGGKNAKKRAVVAVARKLAVLLHKLWVSGEKYEPLREANRKAEIAAA

SEQ ID NO: 283092 - protein, 367 aa, unidentified
MNSMTQVDRPIHLGLDVAKNAIVVGVLLPDRDGANVDRIAHDEASIRRLVDRFPDRDALRVCYEAGPTGFGLYRLLRSMGVCCDVVAPSLIPRSPGNRVKTDKRDARRLATLHRSGQLVAIAVPTPEQEAVRDLCRARSALVYDRRRARQRLDKFLLRHDRVYTAGRAWTARHEQWLAGQRFDDAALRATYGHYRGVVSARDAELAAIEAALARWVDGGPFAAATHRLGCYRGIAYLGGLCLASEVFDWRRFGCAAQFMGFTGLVPSKYSSGETVRRGHITKAGNGYVRTQLIESAWSYQHHAAVGADLKRRQQHADPATLARSWAAQQRLCGRFRRLAARKTDKKIVVTAIARELAGFVWAEMVAA

SEQ ID NO: 283093 - protein, 391 aa, unidentified
MFVGIDIAKMDHVACAVDERGEKLTRPLPFRNDEGGFAKLESWIEGLAEDAAEVFVGMEATGHYWMACFSFLTAAGYACCVVNPMQVRAVRELRSMPRVKNDRVDSWLIAETLRVGDYEQTRLADDDVQSLRMLTRYQQSLKQELATVKTQCICVMDACFPEYAALFSDMFGAASLAVLASKPTPAELSRAHARTLAETLSEASHGRLGAEKAAELKAAAKSSVGVRLGEDAASFQVKSMAAQVEFLNATIAKVDAEVRALLDRVEPLIVTIPGVSYTTGAQIVAEIGDVRRFKNAAAIVKYAGLNSGVSQSGKFEAQGEPITKKGSPYLRRALWLAANRARQHDPRMRAYYDKLREAGKCHRVAVTACARKLCHVVFAVMRDRVPYDPER

SEQ ID NO: 283094 - protein, 482 aa, unidentified
MKKKNIYVNQSQELLTLFEEAGNGAKVMCVPIDYAKKDHVVMFCNGYGHILRKPFSIKNSPEGIEYLTEQVTRSCSHRRIDPKHVFFGGEDVGSYAENFVSTLRSGGWIVAGVNAHDAKEQRANIQASTDRLDLMGIASMLLNRRGNCSPAQSGIYRNLRTVVRHRRKLVVMSTEVKNRMHTVVDRLFPGFLDEKKSGICSFSESSLYLMENRFSPHQIRRRKKQKLIEILHRYGTSNPESTAAKLQEYAARVLNTPDEYISTLQLSLTQHVKHFRCLQDSINQLEHEIAVWLAQTQGAFLTTVRGIGIVLAAGVSAEIGNPHEQEPLNNLVSYTGIIPRVKQTGGPEGKTYTGKVAKRCNRILKDYIVQSGNHMGLHGPEDLMADYKRREAAGQHADFGIGRRYLRMGMCLMRTSQIYMPQRLRNTEVKPEERAGYYLMTWPSLRGKWNKTGALEAAFEKDRPLGRWRNMVQELYEIKLKL

SEQ ID NO: 283095 - protein, 418 aa, unidentified
MKIVYPVCCGVDVHKNVIVATIAITDKSNITQYVMKSFSTINTDLYRFRTWLLDYQCFNVCMESTGKYWIPVFNILEEANVKVLLTHPKYVRAIKGKKTDKKDSKWIADLFKFDMVRSSFIPPKDIRALRELARYRYKLVCMRSSERNRYQNCMTVSNIGLASVLSDPFGKSASDIMRYVLSSSVFDEEHCKKLIQKSAKKKTELILESIRGSRIEPDQRFKMNEAAAHMEYLEQAILRTEAELYTRIQPHYHFVEHISNQLPGISQLSAALIISEIGADMSVFESAKHLNSWAGLAPANNESAGKKKSVRISKAGQFLKPLLVQCALAATKSNKQPYFATKYQKLKKRRGHKKAIIAIARMILTCIYHMMQTGETFNPSDYDSFDMPVVRKVVLTDENAIAFLAAQGYDVSSITKIA

SEQ ID NO: 283096 - protein, 360 aa, unidentified
MRYSTIVGIDTHSKKNAVCAIVPATGEMREAVLSEDPGQLLSWISGQGFPEPVGCVYESGPAGFGLARALEAGGVACTVAATSKLSYRVDRQKNDRADAKWLARQMLAGGVRAVRVPTPEEESLCHLSRLRGEVAADLRKAKQRVSSFLLLTGTEYTLTKKKWSKTFRKWAESHEFDQPADTFTFRCKMSAVLRLEERLAEVEAEILRTIASSPKLSERMSRFTCIHGIGKVSAFSLVCEVHDFDRFNNGASFASHLGLVPSESPSGKKVSRGAIAKQGNSHLRRILVEAASCYSKQFKAVRSEDAAVPEAVRAKAEKCAARLRKRRAALKMRGVSANKAKVAVARELAEWIYHIAVMPA

SEQ ID NO: 283097 - protein, 386 aa, unidentified
MQKLNDLSRSLTPLKPDRTLIAVIEMSLSSWLVAGIVPGIERQPLKKLEVDESTLLKLLIRWREEAKKSGHSIERIAVAFEAGRDGFWLARWLRARDIEAHIIHASSVAVSREHRRAKTDRLDTELLKRAFLGWLRGERDHCRMVAIPTIKDEDAKRPNRERESLVGEQSRIVNRMKAALVRLGIRGFNPKLKKAVERLDGLRTPEGEPIPPNTLAELRRDMARRRLVSDQIRQIEDTRLERLEQAPSDGPHAMVRLLARVIGVGIETADMLVQEVLSRNMRDRRAIARYAGLTGSPDESGRKRREKGLARSGNARVRRGMIQLAWRFLMFQKDSTLAQWFRARTENARSTRKTMIVAVARKLLIGLWRLVREGVVPDGVVLRPVS

SEQ ID NO: 283098 - protein, 432 aa, unidentified
MTTNRLQVGIDFSHKGAHFGLFRPDGQPLEPHRAFANSVSGYAAARQLLLQTLETDAFDGLDISGEATSYYWLPFFLQLAADPALAEHDLKLFLLNPRWVHWFKKCFAQDDKTDARDPFYIAERTRTRRPATAWSPQLATLPLRFYTRLRFHLVEDLVREKGYCSAFLFLKASAYRQAQPFADVFGVTSRLVLSQEPTLRELSALPLAELAERLEALSGHHLADPLANAGKLQHVAAESFPLPAALTTPVQRLLDLTFDHLDHLQQQIQQVEKWIAAEAQAQPGVAALTTIPGVGPVFASGLAAEIGNVQRFLDGTKWDKQRQRYRPKNLRDAEDAVAKLAGLWWPRANSGDFEAEDRHLAKTGNRYLRYYVIEAANQMRQHIPEYTDFYTRKYQEVTKHQHKRALVLTARKCVGLIVGLLHRHEAYRPTEV

SEQ ID NO: 283099 - protein, 336 aa, unidentified
MYCGIDLHSNNNYVAIQDEAQRDVACRRLPNHLGKVLEYLEPYREELEVMAVESTFNWYWLVDGLNEAGYDVRLVNTTKASDYSGMKYTDDRHDARWIAHLLALGILPEGYIMPPEERGLRDLLRRRSFLVHKRTSLYLSIKTIFARSRSEKISVQKIQSLDSESVRMMFDDPHVAESIIVMLPVLRVITAQIKGIEKSVLETGKLRDEFQLLQTAPGIGKVLALTIMCETGDIGRFAKVGNYGSYCRCVSSVKISNNKKKGKGNRKNGNKYLSWAFSEAAHHAIRCEPRAKRYYDRKKSGKHPMVAARAMANKMARGCYFVLRDQVPFDVSRAFC

SEQ ID NO: 283100 - protein, 363 aa, unidentified
MFTERTSVGLDVHARSVAAAAIDGVTGELFQTKLTPAYEHIRSWANNLPGPVAVAYEAGPTGFGLYRHLTDAGIRCEVVAPSKLQKPAGDRVKTDAKDAVHLAKLLRLDEITAVSIPTVDQEAARDLVRAREDCRKDLMRARHRLSKLLLRHGIVYYEGNAWTGKHDQWLRCQAQPQLTSRGTRLAFDSDYDTVLVTKARRDRLDAAIEEMAAGSEFTPAVRRLGCLRGIGTLTGFALAVELGDWHRFTGNTIGSFVGLVPSEHSSGQSRSQGSVTKTGNEHARRLLVEAAWHHRPRYTIGKTMRERWDLAPAAARARGDEGNRRLHHRWVGFIDRHKRGTVANVAIARELAGWCWSLAVMED

SEQ ID NO: 283101 - protein, 341 aa, unidentified
MGQASTIGLDIAKWVFQAHGADATGRVVFRKRLVRAKVLEFFAGQPPCLVALEACGGAHYWARELGKLGHTVRLIPPAYVKPFVKRQKNDVADAEAICEAAQRPGMRFVPVKDEAQQANTVVFRARDLLVRQRTQCINALRGHLAEYSHVVPQGPAHVDSLVALVEDPKSSVPESARGILQVLIRTLNALEEQLTELDGEIARRAKADPVARRLMTIPGIGPIAATAITALVPAPEGFRAGRDFAAWLGLTPLQRSTGGKHKLGAISKMGERTIRRLLILGASAVVRWASRRGAAAGSWLARMLARKPRMLVTTALANKMARIVWALLVKGGTYRAPAVAA

SEQ ID NO: 283102 - protein, 317 aa, unidentified
MAQTHVGIDVAKHHLDLAVWGAEDVDRLPHDQEGIEALCYRLTALAPDRIVVEATGGREMPLATALQAAGLPVAVVNPRQARAFGRASGQLAKTDRIDARLLARMAAVLQPPVRPLPDADLRALRALVVRRRQVVAMCAQEKTRLDTTAAAMRPHIQAHLEWLQTELARLNRELQDRLQSHTRWSGQTALLCSVPGVGPVVAAVLVAELPELGQLSHRQLAALVGVAPLNRDSGQLRGQRRIWGGRASVRRILYMATMTAICHNPPIRAFYRRLCAQGKPRKVALVAAMRKLLTVLNAVMRDQVPWTTAPLSTTIHT

SEQ ID NO: 283103 - protein, 319 aa, unidentified
MNNIILGIDISKKTFDVALLNNHKVNTKKFSNDSKGFSTLKQWLVSKSIHDAHACMEATGGYEVSLAEYLYGNHFKVSVVNPACVKGFSMSRLSRVKTDKADCELIAYFCQAIQPDLWQPVPSHVQELQQWVRRLDSLITNKHQETRRLEGACNIISANIRIHIDFLDKQIEEIEELIFSHIKKHQDLNDRNTLLASIPGIGEKTIGVILAFLNVENFNSAKQLAAFVGLNPKPRQSGSSLRGVGRISKTGDANLRKAFYMPALTAMRFNPIIKNFSERLSNTGKSKMVIVIAAMRKLLHIIYGVLKNKTPFNRDIKTI

SEQ ID NO: 283104 - protein, 337 aa, unidentified
MTIKVLGVDLGKHCFHVYGVDHKGYLVEKKRLTREKFLLYLNQLPPCLIGFEACGGAHYWAAKAKTFGHEAKLMPAQFVKPYLKSNKNDFLDAEAICEAVQRPNMRFVTIRNPEQQAIGAMVKTRNQLVQQRTAVLNQAHGFLLEYGIALKKGRGTRQALMDLTSQEDTPLPSLMRCLLLRLIEEYDYLHDVILQIEKDLSKVLKNSGQGKRLLCMPGIGVITAASLIAWVGDARHFRSGRELSAWIGLVPRQYSTGGKSTLLGIGKRGHKLLRCYLIHGARSVLQWHHKNPTRWLSWSEKLLQEKPKSKVVIALANKMVRTLWVILSKNERYQPSV

SEQ ID NO: 283105 - protein, 380 aa, unidentified
MKEISQTCNRSVTVRAAEGGTLNGSLVIAAERVCSRTTREKTEMKRYLGVDLHRTQFTVCTRLENGRTYLRQWPMRELKLFAGQLRKEDEIAVEATGNTRLFHDAVVEKVARVVVVNPGQFKVISQSVKKTDRNDAETLALYLSKDLLPEVRMKERSQREIAHLAQTRDLLVKQRSALKAKINNLLSAEGINLKRESLSSNKALDRVLALPLPPILAAEARVLVAQVRSLTGSIAELEELLEEEGPRLAGHENLMSIKGIGPVSAAVLLSAIGNIEDFHEPGKLAAYLGLVPRIQNSNETERSGHITKQGNKLARTALVQCALVAKKYSPYLQQFYQRIQRRRGGGKANIALARKFLGVIYHTLKNNWVFEDFPNFVLAS

SEQ ID NO: 283106 - protein, 380 aa, unidentified
MTLDLGGRGPSEEITFPLKEVLSMLSSNVKYIGLDVHKEAIAVAVLNGAGKLVMESIVETKSSTLLDFLHGLRGELHVTLEEGTWAAWLYDVLKPHVREIVICNPRRNALLKEGSKSDKIDARKLAELLRSGMLRAVYHGENELRTLRELARSYLTVSKDLKRVKNRLKALYRSWGISCAGKQVYTPRHREQWLSKIAQVGVRRRAELLYQQLDGLQILRHTVRGELLAESRKHKAVKILRQVPLVGPLRAALLLALMQTPHRFRSKRQLWTYSGLAVVTYDSAQHRYVDGQLQRSKKPQQIRGLNQNHNHAMKDIFKSTALSASCCAGPLQDFYAGLLAKGMKPDMARLTLARKIAAITLTLWKKGGSFDAEHLKSQAA

SEQ ID NO: 283107 - protein, 413 aa, unidentified
MADETIHWFAGVDWGSAKHQVCLLDGAGNVVGEREFAHGGAGLTALCEWVVSMAGDPGTVAVAIEVPHGPVVDAVLDRGFAVYAINPKQLDRLRDRISVAGAKDDRRDARVAAAGLRTDRPLFRRVLAGDPSVVELREWSRLAEELQQERVRLGHRVRQQLWRYYPQLLALSDDVTAEWVLALWTRAPTPAQAARLREATLARLLRQHRIRKLDAPAVRGILRQPAITVAPGVTEAAVLHLRSLVARLRLANQEFHQAARKLEALCTALSQTQPGAQDSGPRDAAILSSLPGVGPVTLAALLTEAAGPISRRDYTALRTLSGVAPVTKRSGKSCIVIMRYAAQLRLRNAVFHWARVAVLNDPKCRSRYAALRARGHSYGRALRSVADRLLGIACVLLQRQVLFNPNHGAPTQP

SEQ ID NO: 283108 - protein, 434 aa, unidentified
MSQQNISTPSTPPVYAAFVGLDWGDEKHALSLCAAGATVIERTTLPQTPEALADWANVLRSRFPSGKIALCLEQARGALLAGLMQYEHIVPYPVNPKTLARFREALYPSRSKDDPIDADLLLDLLLKHREHLRAWQPDTVQTRQLALLNEQRRHFVDHRTALTNELLSHLKAIFPQALELVGQSLASRLATDFLKKWPTLQAVQKVKPAVLRQFYYGHNSRSEELITGRLQRVKNAVALTSDPALLAVHSLAIQTLAGQLQALRPFLDQHEQQIAELFAAHPDAALFDSLPGAGSALAPRLLAALGSDRSRFPDALSIQCYSGIAPVTERSGKTQYWVHLRWSCPKFMRQSWHEFANCSLKFSTWARACYQDLNKRMDHHEAIRKLAYKWQRIVWRMWQERQPYDETRYLRSLQKRGLKIYADLVPQPIAPAGE

SEQ ID NO: 283109 - protein, 349 aa, unidentified
MKKIFIGIDFSKEKFDATVIKAEDLSEMLSVGHQEFINKATGYRKMLRWVDSLCGADTCEDWLFCGENTGGYSQMMSDYLYSKGYDLWIENALSIKRAFAMKRGKSDRSDSLMIAEYAMRYQDKACLYEPLSPALSQLREVFLYRHMLVRHKCSFEVRRIEKRFTQQKSSAKTMISQSSRHILTELKHEIQKCDQRIQELVRSDEELSRIFGIITSMPGVGTLNAVCLMVFTNNFTKFDYNARKIACYYGVAPFSRDSGTSVHSAPKVGYLANKMIKSLLSQAALAAVNFCPAMSVYYHRLVDKGKKPMVALNNVKNKMLTIITAMVKNECKYQPEYISINARSEMLNK

SEQ ID NO: 283110 - protein, 369 aa, unidentified
MSTHYFTIKPLQYDVFVGMDVDKTSISITVVSHEGELLQRKLPYDAANLLALIAKRFPTKKIAFCYEAGPTGYGLYDQIASAGFNCIVVPPATVPKAPSERVKTNRLDSRKLAESLRGGNLHGIHVPTAPYRSLRHLVQLRETLLHQVVSYKNRIKGFLLMEGIPFPPATRRCQWTQKVLEQLKTMPLPITSRFKLDSLLYQLQSSKIQLNQITTGIQKYCSEEPELSESIQLLMSLPGIAWIVAMHLLARIGDWRYLQNPHQIAGLLGLIPVEDSTGLVINRGSITRMGDSAARNKLIETAWTAIRYDQQLREFFLRVCLRHPRQFAKRKAIVAVARKLTIRIYVVLKFRRPYLPYSQFLALQEQTRR

SEQ ID NO: 283111 - protein, 367 aa, unidentified
MKKVSTAATKQGRNISRQTLTIGLDLGDRNSWYCVLDEVGQIQLEQRVRTTAKALQEVFGAMPRCRIALEIGTHSPWISRLLSELGHEVIVANARKVRLIGESRQKDDRLDAQTLARLARLDPKLLYPVKHRSAQAQADLMMIRARAGLVRARTGLVNTARGLAKSYGERLRGCNVRNMDPEKAESLSPELQRALEPLLVTIEELSKCIVEYNDRIEALAETSYPQVELLKQIKGVGTLIALTFLLTLEDPHRFGKSRDVGGYLGLQPGRRNSGQKEPQLHISKEGDPYLRTLLVQGAQHILGPFGIDCDLRRWGLKLAERGGRNGKKRAIVATARKLAVLLHPLWVSGEVYEPLHSSSATTVAAAA

SEQ ID NO: 283112 - protein, 365 aa, unidentified
MLIHVPPDVRVLAMDVHKNTISTALLEPSATTPVLDKISTDDESLRRLVARLGEPGRVWACYEAGPTGYELARMLGAAGVHCEVIAPSLIPTRQGDRVKTDRRDARRMAGLFRAGQLSAVRVPTPAEEAVRDLCRARADMVCDRTRARHRLGKFLLRHGRIWRGGDNWTLRHQAWIRSQRFEERAMEQTFAHYQATLAAREAAVTAIEADLVPWFDRQPFADAVHRLGAYRGITRMGGLTLAAEVCDWRRFPTAGLFMGFTGLVPCEDSSGERSRRGGITHAGNGHLRTQLVEAAWAYKSKASVGTVLGRRQEGLDPAVVARAWAAQLRLCGKFRRLDARKTNRKVVVTAVARELAGFVWAEMTA

SEQ ID NO: 283113 - protein, 347 aa, unidentified
MRFYTKQHQFYCGIDLHARSMYVCILSHDGEIVLHRNMKAAPEAFLKAVAPDREGLVVAVECIFTWYWLADLCAEQGIPFVLGHALYMKAIHGGKAKNDKIDSQKIAALLRGGMLPKAYVYPAQMRATRDLLRRRTHLMRKRSELLSHVQNTNSQYNLPEIGKKIAYKANREGVAERFSDPAVQKTIGVDLALITHYDELLKDLELYILKTAKHHDANTLYLLHTVPGIGKILSLVWLYEIHQIDRFPSVQDFASYARLVKCRKESGGKRLGTSGKKIGNAHLKWAFSEAATLFLRNNPQGQKLLSRLENKHHKGKALSILAHQLGRAVYYMRKRKTAFDMDLFLRS

SEQ ID NO: 283114 - protein, 348 aa, unidentified
MLADQVDYVVGVDTHRDEHTLAVVVAATGVVVAQRSVRASGRGYASARRFAEQQAGTRVWAVEGAGHYGAGLARYLSGRGETVLEISRGPRDERRLQGKDDSLDAIRAARTALASKTLALPRAGQRREALRLLLLARRSAVDVRRLALVQLRSVIVTAPDPLREELRALPVQRLIVRCSRLHRTSSAPADELATKQVLRSLARRIEAATAEAAELEREILAHVRALAAQLLDEPGVGPIVAAQLIVSWSHHGRVRSEAAFARLAGAAPIPASSGQTTRHRLSRGGDRQLNRALHTVILQRRQHDQATQAYIARRVAEGKTRRDAVRLLKRYLARHLYRLLQQQEPLMA

SEQ ID NO: 283115 - protein, 339 aa, unidentified
MGQVSTIGLDLAKSIFHGADASGAVVFRKRLRRGQVRPFFAAQPPCTVALEACGSAHYWAREIGMLGHAVRLIPPAYVKPFVKRQKNNATDAEAICEAAQRPTMRFVAPKSEQTQAAALVFRARDLLVRQRTQVINALRGHLAEFGIVVAKGPAHVSQLVQAVVNPDEPLPEIARPILQILIDTLHRLDGQIALLDREIVQRAKADETAHRLMTIPGIGPVTAVALTALAPPAQTFRRGRDFAAWVGLTPLQHSTGGKQTLGAISKMGERTLRRLLMIGASAVLRWAARHGAPAGSWIARMLTCKPPMLVRVALANKMARIVWALMAKGGTYQAPAARA

SEQ ID NO: 283116 - protein, 422 aa, unidentified
MSYCPVAGIDVSKRFSDMCILSPDNKIFAQEKIYHDETSINRANALLQKAERLFFRKPVIVMESTSHYHLILFQFFSEHGYDVIVVNPLQSNSMKDFSIRKRKTDRVDAFKLAMMYRTKTLRPSQIPQTATRALRQLCRHRAELLNDVSSYKNRLTALLDQTFPGYDKVFSDVGGVTSCAVLVRFPTPTILLVEEESELVEVIAAASKSGYSFAKKKAGLLISAAQKAQTLGIHSCADETLIVCTIQMLRTLSESVLQIETAIDNLLAQIKEMRNNVSLLQSIPGIGSHSAALLLGEIGDISLFKKPKQLAAYFGLDPTERQSGSFRGTKNKLSKRGSSYARAALHMGVVNSICKRGKDSAANPVLLSYYEKKCKNKPAKVAQAASMHKLVFIVFAVLRDQKPFELKTPEQHAVEQGFVKAA

SEQ ID NO: 283117 - protein, 407 aa, unidentified
MDVIYPRCAGLDVHKQTVVACARVAGNGPLLQDVRTFATTTSGLLALADWLESLGVEHVAMEATGVYWKPVWHVLEGHFELVLANAAHVKNVPGRKTDVNDAMWLADLLAHGLIRASFVPPVAVQELRTLTRTRKQFVRERSAHVQRIEKVLEDANLKLGVVLSDILGKSGRAVLQAIIDGQTDPQRLASCVSGRVKASRAELLEALRGHVSAHHRFMLKLHLAHIDALDKAIANLEKEVGLGLEPFRQAAKLLSTMPGLSDVSAHVIVAEIGIDMSRFPTPGHLLSWACLCPRNDESAGKRRSTRVRKGGKWLKTTLVQAAWAAVKVKGGYLQAQFHRLRARRGAKKAIMGVAASMLTAAWHMLRNQTEWCDLGAAHFDRADATKTANRLIRRLQQIGYAVQVTPA

SEQ ID NO: 283118 - protein, 314 aa, unidentified
MKMAMLSFCGIDVSKDRLDVVVLPEGWFFSVSNDTAGWAELVARLRPLTVSAIGLEPSGGYERGIIRALLAAGMSVRRINPNKLRQFARARGVLAKNDRLDARLIAEYVAIMPTRVVQRDPAVERLAEIVTMRRQLCDEHVAAENQAAYLEDAMLRRLSKRRQMRLEADIRLLDKRLAEMVAANVALAQRYELLTSMPGVGPVLAFTLIALLPELGKMSRKQIAALVGLAPYDFDSGKLKGHRSIYGGRMSVRNVLYMAALSASRYSPALKAFHNRLADADKKSKVIIVAVMRKMITTLNAMLRDSAAWQPRSA

SEQ ID NO: 283119 - protein, 457 aa, unidentified
MYRELHSLRQALREELKGTLPPLPGVESDKLLETYLNQLTLYVGLDVADQTVTLLAMNANQEELGHLLDIPNTLKGYTVIGNWLESLRIQHHLRIIAVACETTGVFYWGVWDSLAQRPNVARVLYNPRTTEHMGEVLSKRVRTELVDALLLAEQLRLGGTPEVVLIDNAELLSARLCSRAARDAAQMINRKKNQLRSLVRGYNPVIAQVFPGPKFHHPAVYALLRQYVFPNEVVTAGIEALTTILTEHSRSAFGTEQAQKLVELCCGYLSRPLHHEIVRQRVQDLIEEITLIRKHQQAMLKAGYALIKDRSEAKVLKASTGAGISNTLALVSELGDIKRFPDGEHAASFLGLTTSKHISGTSIYHSKHITKQGSPNGRYAAVNMALHLAVRVPKYQAMYKAIKSRKPPRKGHFVALVAIARDFVTNVLYDMWRYDRPFFIKVEDYRQYRKDHPRPTS

SEQ ID NO: 283120 - protein, 409 aa, unidentified
MRYYLGVDWADQTHAVWVVDERGTKITARTVPHTAEGMTEWGRELDEWRAQGTELWAAIERPEGRVVDCLLDHGVVVYPVNPKTLDRARDRFRQGGAKSDPFDARVLAEFLRTDHPRLQALQPSSEAAQELKLLTEDCQRQIRQQTRLVNQLTATLKAYYPRALEMAELTTALARDFLQAYPTPAAVVALTERQWQRWARAHRLSEARTQELWAILQRPQLPVPAHVVRAKARLMHALVTELEPVVTVVEAYRQAIEDFFAAMPAAQWIRTLPFGEHGVTAPTLWARLGDAPGRWESFHHLQAQAGSVPVTVKSGKQHVVHFRFACDKALRYVVDQVAFLSLRSSEWARAYYDEHRARGHSHREALRALGAKWVKIIFILWERQVPYDEQYHLATMARQQLRQRPKKIA

SEQ ID NO: 283121 - protein, 315 aa, unidentified
MTTSSGKFVGIDVAKEKLDIAVLGETKASQVSNDEKGIASLIKKMKILRLELIVVEATGGYQRAVVLGLYEARLPVAVVNPSRVRQYARACGLLAKTDKLDAFNLAEFGKQVRPRQFEAKSEAGRYISALLVRRRQVEEMLKAEKSRLRTVHVAMRGSLERMIEVLKEEIKRLEKDLDGFMKEHEDWQEQEQILCSAKGVGRVTAATLLAELPELGKLDRKKIAALVGLAPMNADSGKKRGYRKTKGGRIEVRSVLYMSTLVATRYNPLIKAQYQELLRRGKVKKVALTACMRKFLTILNAMMRDRVRFRQTVTA

SEQ ID NO: 283122 - protein, 352 aa, unidentified
MRRPKEKLIAGIDLHSNNLMIGVINQEGKRVAHRKLECNLKEVMDFLKPLKPRLQSMAVESTFNWYWLVDGLRAQDYPIDLANPAGIHQYSGMKHADDKDDAFHLAELQRLNILPKGHIYDPQLRPVRDLLRRRTSLVHQRTALYLSFKSLHARTTGQPLDLKEIKKMEPAEAPKLYEHPANQLIARIQAEHIKALSKSIQRVEKAVLSCAREIPLYEKLLTLPGIGRILGMTITMEVGDIKRFRSAGDFVSYCRLVDARRLSNGKCKGTNNAKCGNAYLSWAFVEAANFARRYDESCRRWYDRKAAKTNRVLATKALACKLAKAAWHLMSKDCVYDEKRVFPELLKPMNKS

SEQ ID NO: 283123 - protein, 343 aa, unidentified
MNLHMLGIDIAKSTFQLHGADSAGREVLRKRLPRHKLAAYIANLPACTIVMESCGGANYWARVFQGNGHKVKLISPQFVKPFVKTNKNDANDALAIVEAASRPSMNFVPIKQVEQQDIQSIHRIRSRIVKNRTALINEIRGLCVEYGVVLITGAARVKSSLCVAIADRDNELTPSSRESLQGLYEELVDVEVRVKNLNTKIRQLCRQNESCQRILKIPGVGELTATAIVAAVSGPGEFRNGRHMSAWLGLVPRQSSSGDKQVLLGISKRGDRYLRTLLIHGARAVLSHHKDAANDYSRWVARKKSTMGHNKAAVALANKNARIIWSMLNTGEEFSYGVTTGAA

SEQ ID NO: 283124 - protein, 342 aa, unidentified
MSVYVGIDVHRKRSQVAVIDQSGEVLTNRNVPNGAEPILKVIGGLPPGTPAAFEACYGTSWLVQLLEDYGFDPHLVHPSRCKAIASARLKNDKVDAAILAQLLRADLLPEAWIAPPAIRQLRALLRHRVALVRLRTRLRNRIHAIVADYGYDRPAGGYWTGPGRAWLAALELAAVSRELVEDYLGLIDALQDRIDRLDWEIRQRARSDPQVKVLTQLPGIGPFTALVIVAEVGDISRFASARKLASWAGLTPTVRGSDRVAHYGHISKEGSAWLRWVLCEAAQTAKRSPEFAAAFQRIATRRGRKIATTAVARKLLTRAWHLLASAEHAAAPQPAAPQTAAR

SEQ ID NO: 283125 - protein, 355 aa, unidentified
MNSTKYVGMDVHQATISVAVRDSTGKLVMESVIETKTATILEFLGGLRGSLWVTFEEGTSAAWLYDLLKPHVTKVLVCNPRKNALLRAGNKNDRVDARKLAELLRTGLLSPVYHGESGIRTLRELACSYLTITKDLTRVMRRLKALYRSWAIPCAGQTVYASRHRTAWLEKLTEAGVRRRAERLFQQLDDLQPLRRQARRELLVESRKHPAHTWLRQIPCVGPIRTALLIALIQTPHRFRTKRQLWAYGGLALDTRISGEYRFAGGQLQRSKKLLTLRGLNANHNHELKNVFKSTATMASNCAGPFRDFYTALVAKGMKPSMARLTLARKIAAITLVLWKKGECFDAGQLTRPAA

SEQ ID NO: 283126 - protein, 351 aa, unidentified
MEITTIGLDLAKRVFQVHGVDATGQVVIRRSLRRAQMLPFFARLPSCLVGMEACGTSHYWARELIKLGHQVRQMPPAYVKPYVKRGKTDAADAEAICEAVARPTMRFVPVKSPEQQAALSMHRTRDLLVKQRTQLVNMMRGLLAEFGIDIPKGLERALLMARRIVDGEAPDVPMEAARIVSTLSRQALDIHIQLRQIDRDLLVWQRGNDVSRRLMTIPGVGPIGATALAASITDPHQFRSGRQFAAWLGLTPLQKSSGGKERLGRITKMGDKYLRKLLIVGMTSLVRRAKYNPKAVDPRLADLLARKPVRVATVAMANKTARIVWAVMARGETYRAGHQPALATSTNTRLG

SEQ ID NO: 283127 - protein, 350 aa, unidentified
MQKIYIGVDFHARQQTICYLTTDSGELLLRQLKHQDKAAVRAFYAQFTGHVIVGLEASGYSPWFERMLEELGCEVWLGHATEIRRRARWRHKNDRRDAELILDLMVHDEFPRLYLPPLQSREVLRMLRYRQKLIKIRTMGKNSLQALALQSGLAKGPHLFTKAGLQELRAAPMSPAMQWQREQWLQLLEPLTQRLLETMLWLKQQSVADQRINRLRTHPGVGLLTSLCLVHSLEPVSRFSNTRKVTAYAGLDPLERSSAERQRFLGTSKAGSRVLRFLLVEAAHTAIRKDADLKRFYQRLAERHGRPKAKVAVSRKLLIRAYIMLRDEIDYAEFQRRAVAARSALPAHGL

SEQ ID NO: 283128 - protein, 355 aa, unidentified
MSQEKYIGMDVHQATISVAVMDASGKLIMECLLETKAATIVEFIQGLHGTLALTFEEGTSAAWLHDLLNPHVSRLIVCDPRKAALLKEGNKSDRIDARKLAEMLRTNQLKSVYHGEHGLRTLKELGRSYLTITQDVTRSMNRIKALYRSWAIPCSGSTVYAPRHRAEWLAKIEQPGVRIRAERLYEQLDSLQPLRLQARCELLRESHKHAAVRLLRQIPSIGPIRSALLVALLQTPHRFRTKRQLWAYSGFAVETHDSGEYRSVRGKLQRNRERITVRGLNDNHNKDLKNLFKSAAISASTRPGPLQDFYVALVAKGIRPTMARLTLARKIAAITLTMWKKGVSFDPKQLHRQAA

SEQ ID NO: 283129 - protein, 394 aa, unidentified
MRVIGIDIGSETHVVAAVDAEGRTLLKPTAVAEDATGYARLLQVLGDPPDALVVMEATGHYWQNLFATLAARGFAIALVNPLRTQRFAEEELRRTKTDAVDALGLAEFGRQKRPQPTRLPDRATEELRELVHLRDRLVQDIGDRVRQLHRLVDLGFPEFARHVGDLGSPLATTILREYPTAQAFRGIPVHRLAGLRVAGRPRVGEALAQALVAAAATSVGQHHGEPYRLQIRYACEDLDLWRGRLRTVERDIERLLSTHDVGTLLTTIPGIGPQTAARLVARVGDPAEFRSAGALAAFMGAVPGLRQSGKRQGHRAGLHPLGHARLRAQLWMPTLSAVRCNPWLRAYYQRLLARGKPRKVAVMAAMRKLLIAVYSVATHRRPFVPHLTPQEMLA

SEQ ID NO: 283130 - protein, 413 aa, unidentified
MLLFIGDDWAEDHHDLELEDETGRRLAKARLPEGLEGISRLHALVAEHAPADWADLPSEEVAARVFVGIETDRGPWVTALHAAGYQVFAINPLSSARYRERYSTSGAKSDAGDAHVLAEIVRLDRDHHRQIAGDTDLVDAVKLVARAHQTAIWERTRQVLRLRSTLREYFPAAIEAFEDLAAKDTLLLLARAPSPARVAKLTRSQVVSALRAARRHHVEAKADAVMAVLRAPGLRQPPTTEAAYAAVVVGQIGIIGALNEQITQLQEVVAEHFGRHPDADIYLSQPGFGVVLAARALGEFGDDKKRFHDARDRKNYSGQSPITRASGKKTVVLARYATNRRLGAALHAQAFSALAASPGARAYYDALRARKIGHHAALRQLANRLVGILHGCLKTGTKYDENTAWQHQIVVAA

SEQ ID NO: 283131 - protein, 380 aa, unidentified
MPDVSSTAPAEVRTWVAIDQHKLSLVAAMLPSSGGEPEVMRVENTERAIRRFVERLGGAQGLAVAYEAGPGGYQLQRLLNSMGVACDVIAPSLIPIRAGDRVKTDRRDAKKLVRLYRAGELSFVAAPSPAQEGLRDLVRARDDLRCARTAARHRVVKALLRHGHIYRDGGAWTLRHRTWLSAQCLDDPLAQAALQHMLAHMVALDAQIAAIDQQLERIAVTEPWVDPVRWLCSFRGIATRTALGLLAEIGDFRRFGSPRELMSYLGLTPSEYSSGQQQHRGHITKTGNRHARRLLVEAAWHYQHRPRQSARTTKLTEHVPPQVTARAWQAQVRLHHRHRALTQNGKRSTVATTAVARELAGFIWATMTNAPLREQEATAA

SEQ ID NO: 283132 - protein, 312 aa, unidentified
MELFVGIDVAKETLAVALTTGEQWSCANDGGGIARLRERLVAARPALVVLEATGGYEGELLAALIAAGLAARRVNPRQVRHFAQAGGQLAKTDRIDAQVLAQFAECIRPQARALPDPEREQLKALVTRRSQLVQMLTAERNRRAQAPGWLGKSLERTIRGLARELAVIDREIAERLDRSITLKPLRDLITSVPSAGPVLGATLIACVPELGQLSRRQIAALIGVAPFTRQSGQWRGHDMIFGGRAPVRAALYMAVLSAVRYNPPLRAFYRRLRERGKPAKVALTAVMRKLLTILNAMLKHHTPWSAPCPTPA

SEQ ID NO: 283133 - protein, 359 aa, unidentified
MQSNKKNFKGQKIFVGIDVHKKTWEVAILTESGVLKRHPQEASAKVLFDFLRKHYPDGEYHAVYESGFSGFSTYYALKEYGINCIVIHAADVPVTQYESIMKTDRVDAERLVRALKKGEIERPVYIRERDNIDDRGVIRIRRTIQKQLSGYKARVKHMLHCNGVELPKRFSTPTNYWSRAFITWLMQDVKLLSSTRTSLNLLIRQVETIRGTLLEATREIRKLSQTERYKHRLELLMTIPGIGQNVAMCILTEVWDVKRFSNEKKFAHYLGLIPTCHDTGEHKSDGVKTFRGNKHLGPMIIEACWVAIYKDMGLGACYADYKKVMKPQKAIVKVARKMSNIIYSVLKHDKPYEPYQWDK

SEQ ID NO: 283134 - protein, 388 aa, unidentified
MTPTSGSLSHPITLDYENTLVLAIELSKASWVLAAQVPGLPRIKAKQTVEPRTEALLAAIDGYRARSRAAGRTIERVVAIYEAGWSGFWLARWLARHGAETHVVQPSSVPVDRRARRAKSDGIDAELLLRTLLAWFRGEPRVCSMVPIPDEADEDERRRVREREDLVAERISLVNRVGAVLATLGVRDYNPLRRDRRARLEALRTALGDPLPPHARARILRMLDRLELVCAQIAELERMRDAVLEEEAPDKAEGMIQQLAGLRGIGVQSATVLVREAFVREFANGKTLGSYAGLTPTPFSSGTTEREQGIGKAGNRRLRTVMIELAWLWQRYQPGSAQASWFRERVGGTGRRMRKVMVVAMARRLLIALWRFATQGVVPEGAVLNPAP

SEQ ID NO: 283135 - protein, 346 aa, unidentified
MTIVEGTRIVTGGIDTHGEVHVAAALDEVGGLLGTESFEANPDGYSALLAWLGSFGDVTKVGVEGTGSYGAGIARFLTRAGVKVVEVDRQNRQARRQSGKSDPLDAVEAARAVLSGRAHGQAKSRDGSVEAIRVLVVAKRSARGARIKALTQMRQLTYSAPDQLQSRLKGLPIAQFVAVAQGLRPSRSSDSVTAATKASLSSLAHRVADLEEEIAELDTRITPLLEATAPELLAVYGVGIDTAAALLVAAGDNPERLRSEAAWAHLCGVSPLQASSGKVTRHRLNRGGDRQANRALWHIVMSRLASDPKTQTYMERRVKDGGSKREAIRMLKRYVAREVYHYLPRR

SEQ ID NO: 283136 - protein, 312 aa, unidentified
MQTEQVHFEQVIARGCGIDVHKKTVVATIKGRGLKKETREFSTFTSSLTELKEWLLANQITHVAMESTGVYWKPVYKTLEPSGLKVWIVNARHIKYVPGHKTDKRDSAWICKLLLAGLLKPSYIPPKAQRELRDLTRYRVKLIQQIASEKNRIIRFLEDSNVKLSCVLSDTQGVVATKLINLLCEGKQITMEDIDKVYHNKLQCTKEELYEACNGVMSENTIMLLGIIRKNIAHTQALIESINQRIKSALSEYENVIELLKGVPGFNQKTVEDLVAEIGFDMSVFPTEKHLASWAGMSPGNNESGGKKKVDE

SEQ ID NO: 283137 - protein, 397 aa, unidentified
MIAVGIDVSKSKSTVAILNADGSQLVRPFNMAHTLPEMNSFVEHLRTLEGPIIILMEYTGHYHYPVLNKLQAEGFPVCLINPYQMKKYGDVEIHKAKTDRKDAVRIATYALEKAYKLTPYSAMDQKYEDLRFLSRQYGQRISDVSRLKTQLLDHLDQTMPGITGLLSLKSRTPDKCMLLLFIKRFKSFDEVCRIGKTRFLSAYATLVKKTADRFAAAKALVIYELALNSITTRGNDPYIWSVQDQCVDLLAAAQNAADAIILQMQNIAETIPEYKVLHAMHGVGDRLGPIILAEIGDVRRFHSAKALNSYAGNDAPPYQSGQFESRNRHISKRGSPALRKACFEVMQALKLTKPQDDPVYLFILKKEQEGKPHNVAKMAGVNKFLRIFYARAMELYR

SEQ ID NO: 283138 - protein, 343 aa, unidentified
MPVTIGVDPHKASHTAAALDQAGQLLDQQQFPATDAGYQALRRWAESWPQRCWAVEGAGGMGRPLAQRLVADREHVLDVPAKLAARVRVLSTGHGRKTDPVDAVSVAVVAHNAAGLRQVVVEDHAVVLHLLTNRREDLVGMRTQTLNRLHRLLADLIPAGASRNLTANRAAGLLGQVRPTGAPATLRRELAADLIADVRVLDRQIKAIEARIKTAVVQSQTTLVELFGVGPVLAAKVLGEVGDVGRFPSKHHFATHTGTAPLEASSGQVVRHRLSRAGNRQLNHALYLMAIVQIRHPTAGQAYYRRKRAEGKAPKEALRCLKRRLSDAVYRCLLADQHYSPGI

SEQ ID NO: 283139 - protein, 352 aa, unidentified
MRRTTTLHTVSTLGIDMGKYTLHMIGLDTRGAIVLREKVSRGRINSRLANLPRCLIGIEAGMATHYVARELTALGHDVKQVPVSYAKPFRQGHKNDFRDAHAVAEAVQRPTTRFIPIKTNDQLDLQVLHRVRSRLISSRTAVINQIRACLLERSIIIRQGVSSLRQSLPDILSQRTDVLSPRTVRVIIDLASDWHQLDNRIETVTDEIEALAKDDETCRRAMTIPGIGPIISSALVAAIGNGVAFGNGRDFSAWLGLVPKQRSTGDRTILGRITKRGNGYLRMLFIQAARVILRRPKNWPKHGFGLWLTHAAQRLHTNVLATAFANKLARIAWTVLAQGRSYEARTTEITTA

SEQ ID NO: 283140 - protein, 425 aa, unidentified
MNYKQNEKINQVKESTLVVGIDIGSTKQYARAFDWRGIELGKVFTFSNSREGFEAFKAWMQHLQDKYRKSDVIVGIEPTGHYWFDLGAYLEDEGILLVMVNPYAVKQTKELDDNSQSKNDRKDPKVIAKLVTEGRYSAPYTPDGVYADLRIMVTNRKRLIREMTQIKNRFARWFAIYFPEYTDVFGDYEAQSSMLLLKKVCTPEAIVELGAEKINKIWRDAKLRAVGMKRATTLCETAKRSIGLKKGSSAARYEMKLLLEDYEYKKAQLDAVMEEIEKLCRKIPESEQMLAIKGIGVITVAGFLAEVGDVRRFESPRQIQKLAGLSLRENSSGKHKGQTTISKRGRSNLRAVLFNAAIPLIAKNPEFKSLHEYYTTRANNPLKKKQSVIAISCKLIRVFYAILANGVTYDPQKMLSDIHRQPQAA

SEQ ID NO: 283141 - protein, 344 aa, unidentified
MNHIAIDLGGRESQICVRAADGTIVAEDRWPTRSLKKYLKGLPRSRVVVETCAEAFGVADMALSTGHEAVVVPATLVRALGVGARGLKNDVRDARNLSQASCQMSSLPSVHIPTQVSRERKMACGMREALVGTRTKLVNTVRGWLRGQTLPVLPTGAVETFPGRVRAFVKKHDRPLPDCVERQLKVIEVMNEQVVIADRELEVLAKQDPICKRLMTVPGVGPLTSVRFLAAIDEVGRFPDAHALQSYLGLTPGEDSSSNRKRITSITKAGARQLRWCLVQAAWSAQRVRGNDPMVAWAKRIGERRGKGIATVALARKIAGVLYALWRDGSSYEMARAADTISAE

SEQ ID NO: 283142 - protein, 334 aa, unidentified
MEEAPSSSSRLTFSLGIDVGKTALELALRDGKDTVAGTTVSNDPEGHKNLAHWLQDRGAEPENTCVCMEASGDFQEAVARFLHEEGYRVSVVNARRIKGYAASQLQRTKTDAADAALIARFGWREDLRAWEPPSASESRLQELTRARQALKKEKTRTQNRLDEAEDEAVRRAHRNLLDEIEQQIEDLEEEIEEHVEEDPELKGRCSLLDTIPGVGLQTAAIVISELGSPERFDSARQAAAYAGLVPSHHQSGTSVRGTPRMSKVGNGRLRRAMYFPAMTALRFNSAVKAFGDRLKERGKEKMVVVGAAMRKLLHICYGVLKSGRPFDASLHPGT

SEQ ID NO: 283143 - protein, 428 aa, unidentified
MASSTDPSAPRTWVAIDIAKGWNVALVEHADGRQQRFRFRHCCEDYDGLVGLLRAAAGSCRIAIEPTADYHRTLAYRLVTEGFDLVLVSSVAGARLREAVFNSWDKNDPKDAAVILRLLKQGMTQRYCDPLLMQTHDLQELSKTYHHIARARTRLQHVLITHYLTLYWPEIERFWSTQRNEWFIRLLMRFPTPRSVSALTQPEFVATVWELVGRRVHKQEKIEEIYGLATRSIALPIEEDSPAVGTFRLQLERYLQLCQIRQGLETQADALLASRADYQRLRSLPGVGPIIALVILAEAGDLRRFTHHRQFLKFCGLDLAKSQSGGSRSREQLSKRGNARLRCALWMAAISAARMRENSFRDKYQRYIARAPEDADLKRKARTAVTAKMARVVYALIKHDCDYRQRFELGFPSGSTPLTRAVEAFGTS

SEQ ID NO: 283144 - protein, 423 aa, unidentified
MMKLKYSICCGLDVHKNVIVATIVITNNDGISEYKQKSFSTINSDIQKFHNWLIENHCYHVCMESTGKYWIPIFNYLESDIDVCLTHPKYVKAINGKKTDKKDSKWIADLYKFDLVRCSFIPPKDFRQLRELARYRFKLVCMKSSEKNRIQNCMTVSNVGIASVLSDPFGKTATDIMSYLLEHTADSMDEKAVRKLIKKGAKAKSDEIIEAIRGYNIETDQAKKLELARGHLEYLDDMITQTEVELYVRIKPYYEFVEFVSTMPGMTELSSTIVLAETGVDMNIFDDAKHLCSWCGLSPASNESAGKKKSVRIGKAGDYLKPMMIQCALAAVKNKKQPYFAIKYGRIKKRRGHKKAIIAIARMMMVCIYHMVSEKKSFNPTDYEELMDPRNHVERVVLNETNVFAYLESLGYDSSKLVKRNDS

SEQ ID NO: 283145 - protein, 355 aa, unidentified
MNQEKYIGMDVHQATISVAVMDSSGKLIMECILETKAATILEFIVGLRGTLSVTFEEGTLAAWLHDLLKPHVSHLVVCDPRRNALLKDGSKSDRIDARKLAELLHANKLHAVYHGEHGVRTLKELGRSYLTITKDLTRVMSRIKALYRSWAIPCSGTTVYAVRHRAEWLAKIPEAGVRLRAERLYQQLDLLQPVRQGARRDLMVESHKHHAVKLLRQIPSIGPIRAALLVALLQTPHRFRTKRQLWAYSGFAVETHDSGEYRFARGKLVRNRERITVRGLNHNHNHDLKNLFKGAALSASTRPGPLCDFYGALVEKGMRPTMARLTLARKMAAITLTIWKKGVDFDAQQLNRQAA

SEQ ID NO: 283146 - protein, 386 aa, unidentified
MRVFYAKRSHNNVGSLDPSRLWLSDDQRLGRKEPEMIIIGVDYHPSDQYIAFVDTETGEYGERQLKHSDREAEKFYRELAARGVSVRVGMEATGYSRWFERLLAELGIEVWIGDAAEIKTKRVRKQKTDREDARLMLRLMRENNFPRIWVPSPENRDLRQLLWHRHRLVQMRTRIMNQLQALAMNEGQRRKKKLWSEQGRAQLEKLPLATWASRRRKDLLELLDRMNPTVEELTRAIDQEVKKWPEVLRLMTHPGVGPLTALAFVLIIGTPKRFKCGKQIGSYVGLIPSEDSSAGHQRLGHITKQGSSLLRFLLGEAAQAAARWDSDWRRRYVHLAMRRQRNIAKVAMARRLAVRMYWMWRNGWEYAEWVKFGSHAGQLEIRHGVN

SEQ ID NO: 283147 - protein, 420 aa, unidentified
METIKTKKVKKFNPKSLIVTIDIGKETHYGYFRAPDGTEVKPFAFHTTRTSFDKFYYKMQRFANSQGVEEIVVGFESTGPYAEPFFHYLKDKPVKLVQINPMHTKRIKELTGNSPNKTDRKDPRVIADVITLGHVLTLVIPQKHAAQLRRLSHARQRLIKKCTAASNQLNALVYSLFPELSTIFKDITCKSALYVLRHHPMPSDIVALDRQALTRMLKKISRGRIGTQRTSALVDAASRSVGIQEGREAIAMEIGLLIEEIDRNRHCIEQLEDQMEEELKEIPYSGSILSIKGLGIVTVAGLIGEVGDFGQFKTISEITKLAGLDLYEISSGKQTNGRRRISKRGRPLMRKLLFFAAINTIKRGGIMHDRYHQMLNRGMVKIKAVTAISRKLLALIFALVRDNAVYVDNYHRTHEFKRAA

SEQ ID NO: 283148 - protein, 346 aa, unidentified
MKIIGCDFHPSFQQIAVFDTETGEITEHKLVNGNGEAERFYRSLPVGSLIGIEACGNSHWFIDLLGQLGHEVWVGDAAKIRASYVRKQKTDRRDAAHILTLLLENRFPKLWTPSRQERDQRQLLIHRHKLVQIRTRIKNSLQHLALNQGVQKKQKLWSKEGQKLLIQLPLQGWTAVRRQDCRELLAQLDQRIAKLDKAAELAAEAHPQASLLMQQKGVGPITSLAFALTIGDVSRFPHSNQVASYLGLIPSEHTSSNKRRLGSITKQGNSFLRMLLVESAQSVTRCDPQFRKHYLHLCRNKHKAVAKVAAARKLAVRLYWVLRTDQNSQNAVHIESSPRVPLVGAS

SEQ ID NO: 283149 - protein, 338 aa, unidentified
MYQLGIDVSKKTLDICLMLEGIRGRLKTKRIKNDFRAVHTINAWLQKHDCALCDVHIIMEATGVYHELLATGLHLAGGKVSLANPHRTREFARGMDILTKTDKVDAWMLACYGALKKPDAWTPPAEEIRHLSALLKRRDLLVTDATREKNRLEKYRATHTPHVVIVSAENMLRRLNDELSEIELMLKQHVERHVFLKEDYALLTSIKSVGPQLGLNMLVILRSHDFRTAEQVAAFLGVAPVEKRSGTSVRGRSRMSKIGPPEIRAKLYLAALCGLRFNKAMKSMYERLCLNGKAKMVAIGALMRKLIHWCFGVLKSRQPFDIDFINVGRMQASIAALG

SEQ ID NO: 283150 - protein, 340 aa, unidentified
MQVTTIGVDLAKNVFQVHGITESEEVVFNRPLRRAQFLSFFEKLDSCLVGMESCSSAHHWARELTALGHEVRLIPPMYVKPYVKLGKSDAIDAEAICEALTRPTMRFVAIKTVEQQSLLSLHRARDLLVRQRTQLINGLRGLVAEFGIFIPRGLARVISFAEDITLGEVLDLPEIANEVILNLSEQLMSLHKRIRWYGERLKLVAKEDARVRLLRTIPGVGAVTASAIIASIGDGHQFRNGREFAAWLGLTPANKSSGGKEKLGRITRMGDQYLRQLLVVGMTSLVRQTRSHPERASKWLTSLLERKPARVATVAMANKTARIVWAVLTRNEPYSPRAAV

SEQ ID NO: 283151 - protein, 315 aa, unidentified
METFFSSVAGIDVHKDQITVSVIIGEHGENLLKETWESNTFTEDLENCGRKLISLGIKHVAMESSGIYWRPIYNVWEKMGIIITLGNATHIRNVPGRKTDVKDSQWIAELHRNGLIRPSYIPEEEFRELRSLTRHRRSLVEDIGRTKKRVQKILEDGNIKLSSVISDVFGVTGFKIVSALAKGITDPYVLAKEISTNIKASEKEVIRSLKNTLKGYQIVLLRELLTQYLYLSQLRDNIEKEIDIKMTPYNELVKRLDGIPGVDKISAEEIIAEATTKMGNFKSGKHFAAWAGVAPGNHESAGKKKRQNVDTGTQH

SEQ ID NO: 283152 - protein, 403 aa, unidentified
MNAVGIDVSKGKSMVTILRPFGEIVSSPFEIKHTSSDIHSLIKLIHSIEGESRVVMEHTGRYYEALAHQLSAADLFVSAVNPKLVKDFNNDSLRKIKSDKADSVKIARYALDKWQSLEPYSITDELRAQLKVMNRQFHFYVKQKTAMKNNLIGLIDQTYPNANTYFNSPTRSDGSQKWVDFVSTYWHVDCIRKMSLNAFVEHYQNWCKRKKYAFNKSKAEEIYTKTKELVPVFPKNEITKHIIRQAIDQLNSTSVTVETIRTLMNETASKLPEYSIVMQFKGIGPSLGPQLMAEIGDVTRFTHKGALTAFAGVDPGVNESGSYAQKSVPTSKRGSSNLRKTLFQVMDVLIKTMPQDDPVYKFMDRKRTQGKPYYVYMTAGANKFLRIYYGRVKEYLSVLPDPS

SEQ ID NO: 283153 - protein, 370 aa, unidentified
MAQPTPLFVGLDVHKDSIAVAHARGQSADPPVFVGAIGPRQADLDKLIRRLQGKTPELVFAYEAGPCGYGLHRYLTGQGFTCQVVAPSLIPKKPGDKVKTDRRDAMDLARLLRSGDLTNVYVPTVEDEALRDLCRARDAARLTLKNAKLRLKAFLLRLGRTYEGRADWNDAHRRYLAKVVCPTPTQQIVFQESVRAVDEQVDRVRRLEAELLDRAPAWRLYPVVQALQALRGVQFLVAITVVAELGDLTRFDAPRQLGAFVGLVPSEDSTGPRRRLGAITKTGNGRARRALIEGAWAYRHPAKVSEHIQRRIDALPKPIQDLGWKAQVRLCKRFRRLVARGKHPNVVVTAIARELIAFMWAIAKEVPITR

SEQ ID NO: 283154 - protein, 412 aa, unidentified
MQDILTCAMGLDIHRDVIVACLAKGELGTDPEIEIRSFSTLIPEMRKLRDWVLEAECRYVAMESTGIYWQPIYEMLEPCFDGQISILVVNARHMKNVPGRKTDMRDAQWIATLLRAGLLKGSFIPDKTFRELRHLTRYRKSIVRDITAQKNRIDKFLQSSGFRFTAFLSDAFGASGRNIIRHLMEYGNISREALDRCLKTQTRKRIDEILIALNGSLSEHQRGFLRMIFGHLEALEQHRHTVEDAITKEITKHEEALSLLCSIPGIDVTAAAAIIAEIGTDMSAFPDSQHICSWAGLSPGNNESAGKRKSAHINKGNPYLKSMLCEVGWVISGKRSLYLSGWYWRIKQRKGAKRATIALARKLLALIYTMLKTGSPYNEDCFEIRRKQSERKRAGRMVNELQKLGYFVVAPD

SEQ ID NO: 283155 - protein, 375 aa, unidentified
MTNAAARSNNLFVGIELSKNSWRLAFSDGAKIRQRTLPAGDQAALQQELAWSKQKLGLSADCAVRSCYETGRDGFWVHRLLSGWGIENVVVDAASIETARRGRRAKTDRLDAEKLVRKLMAWAGGEQTVWRIARVPSVEAEAQRRPMRERQRLTGERTAHRARIASLVALHGVRAKLNGRQEFGVVVEQLRDWQGQPLPAQTVVELQRELQRLALVHQQILGLEKQQATALANPQTAAERAAAKLMGLSGVGPISAMLLAVEFFGWRQFRNRREVGALAGLCATPYASGDSAQEQGISKAGNKRVRWVEVELAWSWLRFQPESALTKWFWRRFGLGSSRVRRIGIVALARKLLVALWKYLEWDELPAGAKLRVAR

SEQ ID NO: 283156 - protein, 354 aa, unidentified
MNPIIGCDAHRRYSLFAVLDTSTLSAEQTRVNHQPGAIKEFLSDFPEGTPVAVETVGNYYWIVDEIEQAGCVPLLAHAAKAKVIMGNINKTDKLDAQGLATLIHLGSLPTVWLPPGDIRDERELHRTRMALSKVRTALKNRIHATLAKYALNTSTYSDIFVGKGRACLDRTIQKLPTETGRCVDQELELLDATMLQISVLEKRIKERIELTPNMQRLKTLPGVGNILAIVIEREVGTVDRFPAAGHLAAYAGVVPKVHSSGGKTRYGRMRKQANNYLKWAFIEAANVVVAHRHHASWREKKVTLVYERICRRKGHATAVGAVARHLAESTFWALKKGEDYQDPALRRQGSPKLV

SEQ ID NO: 283157 - protein, 417 aa, unidentified
MKKRSWKHGLTENTLLVTVDVGKFKNTGYYRGPDGTDIPTFDFGNSGEGFKTFWSRIKQGMRHFNLTEVVVGVESTGSYAEPLLHFLRKRGVQLVQVTPAHTKKVKELYDNSPNKTDDKDPKVIADVIELGRALTVVIPEGVAAELRRLTSARERSQERRTALYNQLHDLVFLLFPEFESVMSDFSTKSARYLIENYGTPTRLLTLTLEELTDILRRVSKGRLGSERAQALYELAQTSVGISDGQLSIVAEVQHELHLIEDCDRFIGAAEEQMLAFLLKMPYSRFLLSIPKIGKVTVASLIGEVSDFGQFQTIAELLKYAGLNLFEISSGEHKGQRRISKRGRPLMRKLLYFAALRMIGKHGIFHEQYQKYLQHGMLKNKALVAICRKLLGLMLALVRDQREYIVNDTACSEYQNAA

SEQ ID NO: 283158 - protein, 402 aa, unidentified
MNAVGIDVSKGKSMVAIMRPFGEIVSTPFEIKHTTSDINSLVELINSVEGESRIVMEHTGRYYEVLAHQLSAANLFVSAINPKLIKDFDNDSLRKVKSDKADAVKIARYALDKWQNLKQYSIMDELRNQLKTMNRQFSFYMKHKTAMKNNLIGILDQTYPGVNTCFDSHARSDGSQKWVDFVSTYWHVDCVRKMSLNAFIDHYQNWCKRKKYNFSRSKAEEIYGKAKELVPVLPKDDITKLIIKQAVDQLNSASATVESLRTLMNETASQLPEYPVVMTMKGVGTSLGPQLMAEIGDVSRFTHKGAITAFAGVDPGVNESGSYEQKSVPTTKRGSSDLRKTLFQVMDVLIKTHPQDDPVYQFIDKKRAQGKPYYVYMTAGANKFLRIYYGRVKEYLSSLPES

SEQ ID NO: 283159 - protein, 279 aa, unidentified
MIVGVDVSKDKLDVHVSTTNKHYVVKNSKPSISSFFKNKLNQTQVGLVVFEATGGYEKMLHLYLLEQEIPYHRAHPSRVYHFAQSKGLFAKTDCIDARTLGRYGQQEEIQADETTHKNQLIIQEYSARRNQLKDMIASEKQRFKTIHFDKEIARSIKRNIKQIERELSLVTEKLNVLIKADKDLDEKRTLLQTVKGVGPEVATLLVTDLPELGCLNREQISCLVGVAPKTKDSGKKSGYRAISNGRFHVRKVLYMAALVAVRFNPRMKHIYNKLVAKGK

SEQ ID NO: 283160 - protein, 433 aa, unidentified
MNTSPPYDLVIGLDRSDKKADLCLITTATGQRRSAIIDTAPEALWEWLLQLRQEHPQARVGLCLEQPAVHLIAFLESYDWITLYPINPITLQKYREAFVTSRAKDDAKDADYQADLLLTHHAKLKPWAPEDSATRAVQQLTVHRRAVVDERTGLSNRLIALLKQYFPQALVLCGDDLWRPLATRFLLKWSSLQAVQKTKPATLKAFYYLNGSRSAKLMEQRLALVAKAVPVTDETARIESFALRVQLICRQLQLVTRTIADYDQQIAAAYAAHPDHAIFASLPGAGPVLGPRLLASMGSQRERFGAAADLQHYTGIAPVTKKSGGSCYIHRRYLCPKFHKQSFHEYSKESILWSRWAAAYYLQQRTKGSPYHTAVRALAYKWQRVIFRCWQNRTPYQEAIYEAALKKSGSPLVALFDKVELGKSPFKNPMKKS

SEQ ID NO: 283161 - protein, 386 aa, unidentified
MPKSNDLSKSLVTLDQASTLIAVIEMSESSWLVGAMVPGLRREPRKKLPADEAALLELLQRWREEARKAGAKIARVVVAYEAGRDGFWLARWLRARGIEAHVIHPTSVAVSREHRRAKTDRLDLALLKRALLGWLRGEAKHCTMAAVPTLAEEDAKRPSREREKLVGERTRLANRMKAALARHGIRGFNPKLKTAPGRLEALRTAEGVPLPPNTQAELRRDMQRFALVGEQIKEIEATRLKRLQDAPAEPGHAMVRLLARVVGVGIETADTLVHEVLARDLRDRRAVARYAGLTGAPDESGKRRREKGLARAGNARVRRIVIQLAWRFLRFQKDSALVQWYQARTDDTRKSRKTFIVALARKLLIALWRMVTTGEMPEGVVLRPAA

SEQ ID NO: 283162 - protein, 449 aa, unidentified
MSKRVSAQAGLPIIHERAAGIDIGSRFHVVAVAPNLTDEPIQTFQAFTGDIERMADWLVAVGVRTVAMESTGVYWVPVYEVLESRGIDVVLTNAREARAVPGRKSDVNDAQWLQRLHACGLLRASFRPGREIAALRVYLRQRERLLDYAAAHIQHMQKALTFMNLQLHHVVSDITGVTGMRIVRAIVNGQRDPQVLATMRDVRCKATVQTVEAALVGNYQPEHVFALAQAVALYDFYQACVAECDIEIERSLVVLNADKLPPATALPKARHRTKQPNEVNFDVRAVLYQLTGRDLTQIHGIGPYLALRLIAECGTDLSKWRTAKHFTSWLTLSPGCKISGGKVLSAHTRKTTNRVAAHLRLAAVTVGRTSTALGAFYRRLAARIGKAKAVTATARKIAVLFYNAMRFGMEYQDPGAEHYESKYRERVLKNLHRRAAEFGYTLQQAERVS

SEQ ID NO: 283163 - protein, 412 aa, unidentified
MQIVYERCAGLDVHKKSVMACLITPAANGERRKERRTFSTMTADLVRLRDWLTEQQCSQVAMESTGVFWRPIFNILEGHLEVMVVNAQHIKAVPGRKTDIKDAEWIADLLQHGLLRPSLIPPAWQRMVRELTRSRVSLSEERSRVIARLQKGLEDANIKLASVASDLMGKSAQQMLHALLEGELTPEAMAEFARGRMRPKREQLVQALTGHLQAHHRFLLAEHLKHLSELQEAIARLSTEIAERLRPYEELLVRLETIPGVKRRLAEIILAEIGPDMQRFPSAQHLASWAGMCPGNHESGGKRLSGKTRKGSQWLRTALVEAAHAASHCKNAYLSAQYHRLAFRRGKKRAAVALAHTLLIIVYHLLAQEEKYQDLGGTYFDELDREKKEQRLVRQLEKLGFEVSLTPAVSQA

SEQ ID NO: 283164 - protein, 381 aa, unidentified
MRSVALDLGAKKIAYCEVSNGKVAARATVSSLESLESLLGPEAKPARVAIEACREAWFVHATLTKWGNEVLLVDTTRSRKMGIGQHRRKNDRIDAEVMARAVETGSIPAAHVLSPHRQELRRQLNVRRALVETRAQYVTTMRGLARELGCPLPRCGAEQFGAKMRKHALSQEVRIAIEPLLALLPPLEEQLAAVEQRLEELCALEPVVEQLRTVPGVGPIVAAQFVSVIDEAKRFRRAHQVESYLGLVPSENTTGGKRRLGAITKQGNSYLRSLLVQAAWSLYRQPARTDPLQQWALAVAKRRGKRIAVVALARRLAGVLWAMWRNDTVYDPELVARAGARGLHKAAQSTEFRAAALERAAAKLRRPRRPAHATEVKKTTK

SEQ ID NO: 283165 - protein, 369 aa, unidentified
MEERIKFFVGLDVHAETIEVAVAEAGRQPARCVGSIAHDVPKLLKVLRRYGDSKHVHVVYEAGPTGYGLQRALAKRGYECQVIAPSLIPKRAGDRVKTDRRDGLRLAELSRAGELRAVWVPDPADEAIRDVARAREDAVKARMQARQQLKAFLLRHELRYAQRTSWTKTFNRWLSTLSFQSDGAQTAFTEYWQAVTAADERVARLSDALVRVIEGWRFEAVVKALLALRGVDQITAIGLVAEIGDLSRFAHPRQLMAYLGLVPSEHSSGERVVRGSITKTGNSHARRLLTEAAWSYRFRARIGYAAQRRAEGLPQVIRDLGWKAQLRLSGRFARLHARGVHKNKVCVAVARELAGFVWVIGRQAQLQQQ

SEQ ID NO: 283166 - protein, 315 aa, unidentified
MTKSLARVNAGVDVSKDTLDVHLLERDLSFSVPNDEPSIASLITRLARYRLERIVVEATGRLEHAFVSAAIAKGLPVVVVAPLKVRRFAEAAGQIAKTDAIDARLIARFAAALKPAARPALDPNSQSIKDLVVRRRQLTSLRTIEKNRRSVMPASLQPSIDRIIETLDREIASLELLIQNAVEQHAAWRHKRDLLTSMPGIGPSVASTLIGDLPELGSLSRRQIAALTGVAPFNRDSGTFRGKRRIRGGRAHSRTALYLSAMVAIRYNPQIKTFYQRLVQTGKHKKVALTACIRKIVTALNAMLRDNKPWQASFA

SEQ ID NO: 283167 - protein, 311 aa, unidentified
MTSQFAGIDVGKDSLTGNLYGQDAVKDYPNTSRGIQRLSAWLQKHEVHLVVMEATGGYEKMASRQLERAGLAVAVVNPTYVRRFAQGMGTLAKTDLIDARMIAWYASVKQPKPRPPRSEAAEALSACVDRRDQLVAMRTMEKNRLGSAAAYVQSSITAHIESIDEQIKQMEVEIDHLIDQEEEWQSRIACMTSCKGVGKVTAVTLLAEMPELGHEKREQIAALAGVAPMNRDSGRKSGRRKTRGGRSKLRRVLFMAAMSAAKFNPVIHAFYQRLIEKGKPKSVVMVACMHKLLTILNAMLRKNEMWRPDFA

SEQ ID NO: 283168 - protein, 353 aa, unidentified
MTDTPSIAWLGLDAHSKNCVLAQLDDQGNEINDWRFPTDPQQLLKHVQAIPATVKRLMLEESNLARWISQLLRPQVQQLVVCDARRNRLISHDANKHDRRDAFALARLLRLNEYRPVWQPADDQRVLFKRAAQAYENSVLRQTRLKLQLKSLFQHWGFFPTGASVFSKAGRSAWLKQLPYDALRSQALLLYELLDQALAGQAQARRLLCQSGRLFPEVQRLRTAPGVGLVGAHLFVAYVQDPTRFAKFSRLTKYCRLSIRDRTSDNKPLGFKQLDRQGNGVLKAISYRAFLQAAKRRSGPLWDFYQASLRHTGSTTHARLNTQRKILLVLWTLWLNNQDFDPNLFSRSQPMDV

SEQ ID NO: 283169 - protein, 415 aa, unidentified
MDVLYPRCAGLDVHKDTVVAGVRLAGDVPAKTEVRTFDTTTPGLLALSAWLAENGCTHVAMEATGVYWKPVWHILSDGDLTLILANAAHVKNVPGRKTDVADAIWLADLLAHGLIRASFVPEAPTQEMRALLRTRKQLVREQASHVQRIQKTLEDGNLKLTSVLTNIMGVSGRAILLALIDGESDPDTLLTLVRRGVKAPAEKLRAALQGRITDRHRFLLRLHLRQVDALDAATAEIDAEVDRELAPFRQAVRQLRTIPGVSDLTAQVIISEIGIDMSRFPTAGHLISWAGLCPRNDESAGKRRSTRLRKGATWLKTTLVQCAWAGSRKKDSYLQAQFQRLRHRRGPKKAICAVAASILTAAYHMLRDGTFYQDLGAKHFHRASPDEQANRLARQIAKLGFTCTMAPTQAKEVSI

SEQ ID NO: 283170 - protein, 362 aa, unidentified
MFYVGIDQHKRHLTICVRNEQGDVALRRQVKTGWLEVDRFLESLQERSVPEGGYVAIMEVCGFNDWLLKRLARWGCTKVYVIAAPPRLRNKTDRRDSAKLSELLWINRERIAAGSRLVEVREVYQPSPQEQKARQLTHLRQRLGREQTRTKNRIGSILRRHNLEQECPTKGLFTQQAWRWLTKVDLPPLDRIALNMEMKRYLLCSKHLDRVTRLIHRQAGRLPTVQLLRTLPKIGDYTALALWAHIGPITRFPHARSLGNYFGLTPGCRNSGESDRPGSITKAGHPTARFLLGQAVLHALRRDAGLRSWYRRVKRRRGVKVARVAVMRRLCEALWHMLSTQEPYRPVGSTEPAKRSRTPYAA

SEQ ID NO: 283171 - protein, 342 aa, unidentified
MSRMIIGLDLAKSVFQVHAVDADGKVVITRKVRRSQMLEFFARLDPCLVGMEACPSAHHWARELSALGHEVRLMVASYVKPYVKRQKNDMVDAEAICEAVTRPTMRFVPIKSESQQAILMVHKTRALLVRQRTMLVNALRGHLTEMGVVAPKGIRRHADLVERVLAHGADEIDLPPLVRDIVLSSARQIGSLNAEIKELERKILEWHRTSEASQRLATIPGVGVITASAMAASVVDPAAFRSGRDLAAWLGLTPRSNSSGGKERLGRITKAGNRYLRTLLVIGATAVVGFSRRTTEGPLMSWVRKLLQAKSARLTTVALANKMARICWAVMARKTVYGEAAA

SEQ ID NO: 283172 - protein, 352 aa, unidentified
MSIIAFDSHKRYTFARVENENGEHPREFRIEHKRGNIAGFLYGQEPGSTVAIETIGNWYWIVNEIEQAKMFPQLVHARKAKMMFGCINKSDKLDAKGLNILQRAGTLPTVWIPPGDVRDKRELPRTRMVFAVERTKLKNRIHSVLDKYGLQDEFEDISDIFGTKGRRVIGRVLEQLPSHARYTTGLLLEQLDQTEQKIKAIEARMEKLFRQTEQHALLKTMPGVGFILSVVILQEIGDIGRFGSAERFASYSGVTPRVHASSGKVRYGRLRTDTNHYLKWAFSEAGNSVAVNRNRVPARHVSQLYNRIRGRKGHAKAVGAVARHLAESAYWILSKNEVYLERGLSKVSPTGA

SEQ ID NO: 283173 - protein, 348 aa, unidentified
MITIGIDPHSRTHSAAALDDHGRVLAELAVGSNARELDRLARWIAGMGPERLVAIEGARGFGLALSRRLLVAGETVVDVAPALTMGERRSARRSGKDDRGDAVAVARVALREQGLPLVSAETRGSDLKLLVDARDQLVAEATRTRNRLHALLLAIAPGYHEHVRDLTSSTALMVARRLAVRARPTDRVRSTLACAAITRLRSLAGEIAALERELTAGLDRAAPANLLAICGVGPLVAAKILGEVRDVSRFSSPAAFASYSGTAPIPASSGTVIRHRLHRGGNRQLNRALHTVALTQARRDDRARAFLARKRAEGKTPREARRALKRHLAVVVYRALVLDAQEVLTSTT

SEQ ID NO: 283174 - protein, 410 aa, unidentified
MYGKAGPMIYAGIDIAKNDHVVGATDECGRDASKPMKFANSAGGFDRCVAYLEGLAESKSDLLVGMEATGHYWLPLFCRLQDAGYAVVVINPMRTDAMRRFKGSSRVKTDIVDCVLVAETLRCGGFQPSRLGDEAVIELRQLTRLHQALKESVADLKRQVIVALDQVFPEYDSVFSDTFGESSKAFLKRCPTPEECLAVRADSLAKTLERASHGKLGRPKADEIKGIAKASCGIGLATSAFSFQIKLLIDQIDFIEGQASEVEARIRAGIEKVEPLILTIPGIGYTLGAQIVSEIGDVRRFRNASSIVKYAGINPSISQSGKFSSGENHITKQGSPYLRRALYLAAMAQLKLKSPFHDYYAKKRADGKSHREALVAVARKLVHVIYAVLSKQEPYDPNAAKSPELASRSE

SEQ ID NO: 283175 - protein, 377 aa, unidentified
MKAPSTRPAAVLGLDVGKSSHWACLIDRDGEVLASAPVRNREAELDALFASAPAGTLVVVDQFRNIGSLAVRRARATGLGVAHLPGLAASRAAGLFAGEAKTDERDAAVIARTALGVPDSLSGVPGRGEALEAARALSSQRDHVVACATRDKNRLRAVLLESCPALEAAVDLSDRRWLELLAGFGGAWGIARSGAEGPRAEAAGEAAAASTAPPPALVEAENRQVRFLAARISEALDEAGALEAETAALLEGDETYACLLTVPGIGPRTAAQLAVSVDIGRFPDHDHLASYCGIAPRVRSSGTSVRSVRASRRGDARLKSLLIFSCNSLVRSSGRYGEYYRACRARGMGHGRALKAVARKRLRAIYAVMRDRVPYRE

SEQ ID NO: 283176 - protein, 400 aa, unidentified
MGQPLWAGVDAGKSDHYCVVIDADGKRLLSRRVANDEAALLELINAITALADGGELTWAIDLNAGGAALLIALLIGAEQRLLYIPGRTVYHASGGYRGEGKTDAKDAAVIADQARMRRDLKPLRPQDDIAVELRILTSRRTDLVTDRTRAINRLRAQLLEYFPALERAFDYSASKAALILLSGYQTPDGLRHAGAARLAAWLRKRKARNADAVAAAAIEAAKSQHTVVPGQQVAAAMVARLAEEVMTLDTEIGDTDAMIEERFRRHRHAEIILSMPGFGVILGAEFLAATGGDIAAFGNTDRLAAVAGLAPVPRDSGRISGNLKRPRRYNRRLLRACYLASHIAIRTDTASRIYYDRKRAEGKRHTQAVLALARRRLNVMWAMLRDHKPYQPTAPNTAAA

SEQ ID NO: 283177 - protein, 345 aa, unidentified
MDDFAGLDVSVKETSICVVDDTGRIVREVRVASEPEALLQVLGNPIYRFKRVGLEAGPLSQWLFSGLAEAGLPVICVETRHMRAVLKAQINKTDRNDARGMAQMMRAGLYRPVHVKTLRSQKLRMLLTHRKLLQSKAIAIDNDLRGTLRNFGLKVGVVGTVKFEARIKELVENLPDLAELIEPLLIVRRTLCEQIGILHRRLLAIVRNDDVCRRLMTIPGVGPVVALTYRATVDVPARFRNSKAVGAVFGLTPSRYQSGEINRPGAISRCGDEMMRAMLYEAAHIMLVRLAKWSWLKAWAMKIARHRGMKKAIVALARRLAVIMHRIWVDGTEFRWTREQVVAAA

SEQ ID NO: 283178 - protein, 412 aa, unidentified
MDTVIERCAGLDVHKDTVVVCVRVPGPDGGRQQLIQTFGTTTTAVLALRDWLTAHGVTIVGMESTGVYWKPVYYVLEDALECWLLNARHLHKVPGRKTDVADAAWICQLVEHGLVLPSFVPPKPIRELRNLTRYRKAQIEERSRESQRLDKILQDAGVKLSSVASDVLGVSGRAMLGALVEGTRDPAVLAELARGALRKKIPALREALRGRFGPHHALLVGTILAKLEFLDDAIAQLSAEIEQVIAPFAHEAALLRTIPGVDRRNAEALVAEIGVDMSRFGAAGRLASWAGICPGNNESAGRQGSGKTRKGSKWLRTHLTEAAKAAGHSKGTYLAAQYVRLRARGGSARATVAVAHSILVAAYHILERRQPYQDLGADHFRRRHSREQQTRRLVRQIQALGYKVTLELVEAA

SEQ ID NO: 283179 - protein, 451 aa, unidentified
MPKNRSRPQAPNFDVLAQINLNAAGIDIGAAEIYVAVPTGRDTQSVRAFGVFTADLHAIAQWLKNCAVETVAMEATGVYWVALYEVLESHSMDVNLINARHVKNVSGRKSDVVDCQWIQQLHTYGLLQPSFRPPEHICAIRSLVRHRDMLTRYRAAHIQHMQKALELMNLKLTNVLSDITGVTGMRMIRSIVAGERNPAVLAQYRDRRCAKSEAEIIKSLEGHYRAEQIFALQQAVELFDFYTHQIETCDVQLEALYAQFDMPDEPSTPPPTKKRKRSKNHPNFDLAQSLYHMTGVDLTQIDGLDALSVQTILTEVGTDMSKFNTVKHFTSWLGLSPNNQVSGGKVKGRSREKTKNRANLAFRRAAQSLARSQSALGAFYRRIRARHGGPKAVVATAHKLARIFYFMLQRQTPFQDPGADYYDKQYRARVIRNLERRAATLGMKLEPIPTD

SEQ ID NO: 283180 - protein, 366 aa, unidentified
MQKLSTRRMTGNRILKGRRLTIDIDLGDRWSFYCVLNERGEVLQEEKLPTTPDAMKRTFEKLPASRIVLETGTHSPWISRLLAEWRHEVIVAHAQKVELITKSSRKDDRHDARTLARLARIDPQLLGPVRHRSAQAQIHLTVIRARAELVSARTALINAARGLAKSYGERLPKKGSEQVGRELAAALSTALREVLEPLLREVESLNERIREYDQRIEQIAKQAYPEVALLKQVKGVGTQIALTYRLTIDDPYRFAKSRDVGCFLGLRPGRRNSGQSEPQKSISKEGDRYLRTMLVQGAHYILGPFGEDSDLRRWGLKLAERGGKNAKKRAVVAVARKLAVLLHRLWVGGEVYEPLRNTNRAMGAAA

SEQ ID NO: 283181 - protein, 319 aa, unidentified
MTQNNPVVVGIDVAKDKVDACIRTVTERKTCRTTAAGQRGLIVWLRKHQVGKAVMEASGGYERVWVRALRQADIEVRIVAPKRVRSFAESAGRLAKNDKIDAEMIAWFAETFSEAPSQVDDPAHEEMKALVKGRKSLIDVRARLEMQKEHELPALVRKAHARLLKKLAGEIATIETAVVAKIKTTPAFAKRAEIIQSVPGFAEATAITLLAGLPELGQVSNEVAAALVGVAPYDDDSGKRHGQRCIKGGRRWVRNALYMPCVGAATLNNPVFKAFYQRLIAKGKAPKVALVACMRKLLVILNTMIARAEKWDTKRYQML

SEQ ID NO: 283182 - protein, 360 aa, unidentified
MQKQSNTLNFEGQNIYVGIDVHLKSWTVSILTEHLHHKTFVQPPSPEALSSYLHAHFPNGNYLSAYEAGFSGFWAHYKLVEMGIQNIVVNPADVSTSQKERLQKTDAVDSRKIARSLRSNELTAIHVPCRETLEVRTLLRSRDALVRDLARMKQRIKAFLYYYGIDYPEEFRHSGTHWSRAFMNWLRNGIRMDTEEGSAGLSLLLDSVESQRRLLLEATRKLRALSRSDRYATDYGLLRSVPGIGMITALSLLAELEDIRRFANSDRLAGHIGLVPTSHSTGEKDNKGEMTFRGQMQLRSKLIECAWFAARIDPALNMAFSKLTRRMEPNKVIVRIARKLLNRIFYVLKYKRRYKNETVE

SEQ ID NO: 283183 - protein, 363 aa, unidentified
MKCSTELNFKKKATTNTLGNMYAALDLGQKNIQVVLKNKDGKIIKENKIQRNTKKILEFIDNSSDKDHNNIDIVMESGYNYQYLYDLLQDEGYNVKVAHPLMVKAIAYAKVKTDKVDARILADLLRMDMIPECYIPNKEIRDLRDLVRRRYYFVSIRTMFKNKVHVEMSKRWLDANVTNNITTTMIKNDPFSKNGKFRLRSLRIPALDDCLDTIDFLDRKIKDLDTEIKKLAIEDKYSKHLLTIPGISYYAALLISSEIADINRFPDYEHLCSYSRLVPGTYQSGSTSFSKTDKKQGSKMLNWIMVQCTHTHVRYCQSSITVHYNKIKNRKRNNKIAIIAAARKLMRVIYVMLKEDRPFRLDE

SEQ ID NO: 283184 - protein, 394 aa, unidentified
MKLVGIDVGKNSHHFCVMDKETGEFNVAPSSFSNNKEGFDFLINSLKPYSKKSILIGMEDTGHYHVALLKFLLSNGYTVALINPKTTDLTRKMEGGITKNDKLDTITICDVLDTPERKKQYRITKVDRFDLYEQRQLTRHHHNLKEELNVYCNRLQKSIDLVFPEFNTLFSSKYSIVYMNLLKTFGSAEAIASTDIRTIRKCFEVKGRGGRISLTPEKLKECAKNSIGISSEVETIQIKHLVSQITLIKEQIAEIDKKIEEFSIKNNSPILSIPGISHFSGTSILAELGDIGNYSKPSQIIKFAGVAPYHYESSQYNAQHTGITKKGSKYLRKTLYQIILTVINNNPVFKKYYRLKISQGKGHRCAQGHCIRKLLRIIYHLLETGQSFDPALLR

SEQ ID NO: 283185 - protein, 344 aa, unidentified
MELHSIGIDLGKTVFHLVGLNHAGEVGVRKKFSRTQLLRFTSKVQVDLIGMEACAGSHFLGKALREQGHEVRLIPAQYVKPFVKTNKNDFIDAEAIAEAVSRPSMRFVPIKSDEQLDMQSLHRVRERWIMRRTAVVNQIRGLLLERGITVRTGRCHLDAALPTILEDAMTSLSGAVRFLLVELKQELEQLAGHIEQAETLIQRAAQQSEVCQRLDAIPGIGPLTATALIAAIGNGEAFRKGREFAAWVGLVPREQSSGGKQKLLGISKRGNCYLRKLFVQGARAVLQFREKQSSGLRTWLAQLTSRTHYNVVGVALAKLARMAWAVLAKGEVYRPPMLADSPAA

SEQ ID NO: 283186 - protein, 373 aa, unidentified
MDQDTTYVAFDTSKETLAVGIAKGGRRREVRFFGTIASRPEAVRKLVEKLARQHHRLAFCYEAGPTGYGLYRQIRAMGYDCQVVAPSMVPVRPGGHIKTDRRDATTLAALFRAGELTAIWVPDAAHEAMRDLSRGRQAAMEGLRRARQQLLSFLLRHGRVYPTRSHWSRAHRRWLSEQRFDHAAQQIVFEELIQAVEQAQSRRDRLEQQMAALPPSWSLREVVAALQALRGVALLSAITLMAEIGDFRRFTNPRELMAWLGLVPREHSSGATTVRGAITKAGNRRARRVLVEGAWTYRLPARVGLELLRRNRALPQAIKDVAWKAQVRLCARYRRLLRAGKPTSVITVAIARELAAFVWAVATTVMPPLEPTA

SEQ ID NO: 283187 - protein, 425 aa, unidentified
MNYKQNEKINQVKESTLVVGIDIGNTKQYARAFDWRGIELGKVFTFSNSREGFEAFKAWMQYLQDKYRKSDVIVGIEPTGHYWFDLGAYLEDEGILLVMVNPYAVKQTKELDDNSQSKNDRKDPKVIAKLVTEGRYSAPYTPDGVYADLRIMVTNRKRLIREMTQIKNRFARWFAIYFPEYTDVFGDYEAQSSMLLLKKVCTPEAIVELGAEKINKIWRDAKLRAVGMKRATTLCETAKRSIGLKKGSSAARYEMKLLLEDYEYKKAQLDAVMEEIEKLCRKIPESEQMLAIKGIGVITVAGFLAEVGDVRRFESPRQIQKLAGLSLRENSSGKHKGQTTISKRGRSNLRAVLFNAAIPLIATNPEFKSLHEYYTTRANNPLKKKQSVIAISCKLIRVFYAVLANGVTYDAQKMLSDIHRQPQAA

SEQ ID NO: 283188 - protein, 350 aa, unidentified
MEHIAIDLGARESQVCVRAADGTILLEGRHPTVALRAFLGQRPSSRVVLETCAEAFGVAAVARELGHEPVVVPASLARALGVGTRGLKSDVRDARHLSEASCRMARLPAVHVPALQSQARKGECALREALVTTRTKLVNTVRGWLRGQTAGPLRRCTPPRLPARVRAHLAAHGQAVPDAVERVLHVIEALNGQIRAADAALTALAQEDAVCRRLMTVPGVGPVTAVRFAAAVDDVQRFPRASAVQSYLGLVPGEDSSAERRRITGITKAGPSRVRWTLIQAAWCVRRLRPQDPAVQWARRVESRRGRPVAAVALARKLAGILYAIWRDGAVYDPQHSATRRAALYLRLPG

SEQ ID NO: 283189 - protein, 324 aa, unidentified
MPQTADQVEIAPMPVTAVIGIDIAKHTMVLHDSVSQHSWTIDNTYADALQALEPFAGHDLAVCEATGGYERALLEAARTLNLPVHRADPAKAKAFIASHGGHAKTDKADARWLARLGLERGGSLTRWTAPDPDREALTALVRYRQDLLKQRTAAKNRRSAPTSGPVRDLLEAEIAFLDGQIAQLDTRIDTLQTAPALVPIHRVLTQMTGIGAVGASSLIALMPELGQINRRQIASLAGLAPHPRNSGRFAGKRRTGGGRHELRPVLFMIALSAARFCPKLNPFYDRLVSQGKPKRVALTAVARKLLVIANAKVRDANLALPQLT

SEQ ID NO: 283190 - protein, 407 aa, unidentified
MEVVYRCCCGIDVHKKVIIACLVNGGEQELREFGTTTSEIKTLANWLTESGCEMIAMESTGVFWKPLYNLFELMDLDAMIVNAAHMKALPGRKTDVKDAEWIADLLRHGLLKASYIPNREQRELREITRYRKSLTEERCREVNRLQKILESANIKLDSVVKDITGKSARKLLQRIIDDDIPDSDEVSKLVHGRMRPKLDQIVASIEGITTPLQRKLLAQIIDHIDDLNRRIGELDKLVQEYMAEYEAAIEAIDEIPGIARRSAEVILAEIGLDMGRFPSAAHLCSWAGVCPGNYQSAGRRKHGKTTKGNKALKTILTQCAKSAKTVKSSYFFAQYQRISARRGKNRATLAVAHSMLIAIYHILKNKTAFHDLGSDYYDSFNRDRKINSYLKRLKALGWEPDAISSSA

SEQ ID NO: 283191 - protein, 450 aa, unidentified
MTDEPAEMISRAAAIDVAKGSGMVCTRVPHEASPHRRIQRVWQVSARYADVVALMDELVSAGIQRLVIESTSDYWRIWYYLAEAAGLHVWLVNARDAKHLPGRPETDKLDCVWLCKLNERGMLRRSFVPPEAIRDLRALTRLRSRLAADSARHQNRIEKILEDALLKISAVISDLMGQSGRRFLAALVAGQRDPKTLAALGDRRLKASTAQLEAALTGRFRDIHALEIGMLLELIDGLTAQITRLDEKVTAALAAIPGIAPACTGCGEIGGTHAPGCAGAGNPVLPVIGRLDEITGIAVDGAQILIAELGTDMTVFPTPGHAAAWAKLTSRTIQSGATSRNGRTGKGNPYLRAVLGRAAMAAAKTESYLGERYRRIARRRGKQKAIVAVGRTICEIACMIIADPSVRFCELGPDYYARLDAGRQTRNRIRDLERLNPGMKVTLTPATQAA

SEQ ID NO: 283192 - protein, 400 aa, unidentified
MKVVFPTCCGVDVHKTFVVATIITTPADSLQPHYQKKRFSTFNSDLNRFADWLLEHNCLDVCMESTGKYWVPAFNILEKRSIRVVIANPKWVKAVKGNKDDTKDSKWIGDLFRIGLVKSSFIPELNIRILREFLRYRYKLVSMKSSEKNRFQNAFTVCNVALDSVVSDMFGKSATAITDYLTSDESFDPDHCVSLLQRSLKKKAEKVLESIEGYSISDEQKARIKIIREHYDFVEKLIAKVDTCVNEMVEKYEGEINLLCTIPGIDRNSAITIISEIGADMSQFGSSKRLCCWAGLTPGNNESAGKKKSVRISRAGVYLKPALVQVAHAAVKDKANPYYALKYERIAKRRGKKRAIIAIARMILTAIYTMLCTGEVWNPVDLFKIDMPEHFEGTAACQSH

SEQ ID NO: 283193 - protein, 366 aa, unidentified
MRKPSTSALRRRGKLQDGHLTIGLDLGDRLSFYCVLNGAGEVIVEEKVTTSPEAMKKTFGKMPRSRIALETGTHSPWVSRLLSDLGHEAIVAHARNVRLIGESRRKDDRMDAQALARLARIDPQLLSPIQHRSAQAQADLSVIRARYALVRTRTALICAARGLTKSFGERIRSRYRRGFKPAMGDTLSPQLRVALAPLLSALETITARIREYDAQIEKLAEESYPDVALLKQVKGVGTLIALTYILTLEDPRRFRKSRDAGCYVGLQPGRRNSGQSEPQLHITREGDSYLRMVLVQGAQHILGPFGEDSDLRRWGLKLAERGGKSGKKRAIVAVARKLAVLLHHLWISCEAYEPLHSARKRRQAAA

SEQ ID NO: 283194 - protein, 344 aa, unidentified
MIHVGIDLHSRNMTLVAINDNGKLVAREKLTNTPANLGQFFERFTKQVQAVVECTSYWYCVADWCDAHQVPLTLSHAKMLKAISYAKVKTDSVDARTLAELLRVGLIPEAHQCRRDQRDLRELTRGRLRMIQRRSALQSSVWQLAAKYNVIVQDVGWRYLDKLGEFLKQQLPEVARIEAQLLLDQIRLSQDHIIALEQAIEQQTGFHEAVERLKVLPGFRLVCAWTVVAEVGDITRFPTPKQFTSYCRLVPGSKDSGGKYRHRSKNKDGNRYLRVAFNQAAIIAYRDYPVVKEFYKKITRRSGKHVARTVVGKELAKIVWHMLAKDEEYKGFKGRMTKITTPTY

SEQ ID NO: 283195 - protein, 341 aa, unidentified
MSDLALVGIDLGKHTFHLHGQDKSGRELFRKKLSRQQMMRFFANLPACTVVMEACAGAHFVARELAALGHQVRLISPQFVKPFVKGNKNDFVDAQAICEAASRPSMRFVSPKTEAQQTLSVLHRLRESLIRDRTKAVNQMHGFLLEFGISLPQGLAVMKRLSAVLAEHELPVRLTVLLQRLHGHFVYLDEQIKELDKELAGQLADDDLGRRLLSMPCVGPITASLLAVEMGDGQQYGCSRDFAASLGLVPRQYSTGGKANLLGISKRGDKNLRRLLVQCARVYMQHLERQKGPLADWVRALLTRRHSNVVACALANKLARIAWAISAHHTQYETGPGALSA

SEQ ID NO: 283196 - protein, 326 aa, unidentified
MAVLGIDIGKTSFDVHLLADDHAASVHLPNAAAGFADLRDWLVRQRQTEPAALHACMEATGNYGLDLAAFLVAEGIKVSIINPKQIRAFGIAELRRNKTDKLDAALIARFCRAQNPAPWTPPLPDMLALREAVRRCAALKEIRTAELNRQKAGFSSEAVRASIQRNLDHLNTEIEAIAGEIRTLIAHNAELHRKAHLLRSIPGIGEITATVLLAELPNIADFEPKGLAAFAGLSPAEHSSGAQTKHSGISRIGNATVRSACYLAALSASRHNPRLSDFAQRLKAAGKPKKLVLIAVARKLLVLAHAVIRTDRPFDADHIDANPANA

SEQ ID NO: 283197 - protein, 354 aa, unidentified
MIIIGVDFHPEFQQIALLNTTTGEVEEKRLAHPDEAEKYYRALASAGETVRIGMEASGHGRWFERLVAELQFDLWIGDAAEIRAKRGRKQKTDRQDAQHILKLMLKDDFPKIWVPNWENRDLRQLLWHRHRMVQARTRVMNQLQAVALNEGLHCKKKLWRERGRQQLESFALAPWASRRRRDLLDLLDRLNPSIAELTQAIEREVENYPAAQRLRTHPGVGVLTSLAFVLILGDAERFRCGKQVASYLGLVPLEDSSGNRRRLGHITKQGSSIVRFLLVEAAQVTVRSLPEWRSKYFHLVLRRGRKIAKVAMARRLAVQLFWMMRKEWNYEQLKKFGSHAGQPGNRHGVQSNTE

SEQ ID NO: 283198 - protein, 391 aa, unidentified
MICIGIDVAKDKHDCCILDSDGTVRADCFTISNNMNGFKQLLQTIQGCTKKSDKIKVGLEATGHYSYNILGFLLDNGLPTYVINPLHTNLYRKSLSLRKTKTDRVDARTIATMLLSDVDLKSYTDTAYHSEELKSLTRYRFEKVRERAKLKQSLSRLVTILFPELEQLVPTLHIASVYSLLSEYPCAKQISEVHLTKLTNLLTTASKGRYGKDKAIQIRDSAKTSIGSVMPAKSLELKHTIKLIRELTSEIDEIEDSIQKIMDELNPPILSIPGVGIQSAAMILAEIGDFSNFESPDKILAYAGCSPSTYQSGKLTNCYAHMEKRGSRYLRYALYNATKYVCHWNPVFAEYLAKKRAEGKHYNVALSHATKKLVRLIYALQKSGKAYLTAA

SEQ ID NO: 283199 - protein, 376 aa, unidentified
MKKGTRFVGLDVHKDTIAVAVAEAERGGEVRSLGTIPNEGDAIRRLIRKLEGPEGLHVCYEAGPCGYVLYWQLAKLGVRCDVVAPTLIPVKAGDRVKTDRRDAEKLARSLRAGDLTPVWVPDAKHEALRDLVRAREAAKADQRRARQRLLKFLLRRGCTAPTKMRSWTDKHREWVMQLKFEQRALEETLTDYAAEVDHQRERVARLERAIDEAVDKVPASMRAVIDALQALRGVSKLTATTIVAEVGELSRFDRAAQLMGYSGTVPSEHSSGGKTRRGGITKTGNSHLRRVLIEAAWTYRHRPRIYGALRARQENIEEPVKAIAWKAQHRLHRRYRRLAERGMPHQKVVTAVGRELLGFIWAIGVHIERQHRAASS

SEQ ID NO: 283200 - protein, 366 aa, unidentified
MDAIYIGVDFHSRQQTICYLKTETGELVISELQHRDKEQVRAFYQQFQGQVIIGLEASGYSPWFEAMLERLGCQVWLGDATEIRRRARWRQKSDRRDAELIWDLMVHNEFPLLYRPSEPSREILRMLRYRQKLIKFRTMSKNSLQAIALQAGLAKGRQLFTAAGQQELQTTDMSPVLQWQRDHWLELMKPLNQQLLETMVWFQAQSKDDVHIKLLRTHPGIGLLTSLCLWHTLQPVSRFRNQRKVVAYAGFDPMIRSSAERAIYLGISKAGSRMLRYLLVEAVHTAIRYDEDLKRFYKRVAERRGRPKAKVAAARKLLIRAYIMLRDEIDYAEFRRRAVAARFARRGQGPTNVPEVLIGQSASPGA

SEQ ID NO: 283201 - protein, 343 aa, unidentified
MVEISIIGLDIAKNVFQVHCIDCSGEPIVRRQLKRGRVLAFFGKLPPCLVGMEACATSHHWAREIEKLGHDVRMMPPRYVKPYLKRNKNDAADAEAICEAVQRPTMRFVPIKSPVQQSILMLHRTRQLFVHQRTTLINAIRAHMAEFGIIAGVGRNGVEALLKIVFKGEDERIPPAASECLMALATQLELVKRQILEADQRVLAWHRSSKLSKRLEAIPGVGPLIATALVASIPDPHAFRSGRDMSAWIGLVPKQKSTGGKEKLGNISKAGNRYLRKLLVIGALSVIRRAKILGYTKHPWLVRLMERRSTMIAAIALANKIARMAWAMMARNETYRTPLVQPA

SEQ ID NO: 283202 - protein, 306 aa, unidentified
MKEIGFTQVVSVGCGIDVHQSLIVASIRKSNDDVETREFDAYTSSLTSLREWCKAEGVTHVAMESTGVYWKPVFNILEESFEIILVNARHVKNVPGHKTDKKDSRWLSKLLLSGLLKGSFIPPRDIRELRDLVRYRKKIVGQIASEKNRIIKILEDANIKLSSVLSNVDGAVGTKIINDLIEGETSVNKLMRHYHGKQKVSREEFRKALEGRITEHHKLMLSIHKESISDKESQLNRLDAAIDKATESYRVEIELLDTIPGVGKDGAIGIISEIGVDMNRFPDQTHLSSWVGMSPGNCETGGKKKV

SEQ ID NO: 283203 - protein, 353 aa, unidentified
MKYVGLDWAYRVAQWCALSPGGEIAGEGRIAADRDGLARLVLELGDEVKACLEMMSGALWVRDELVACGWQVEVADARKVKTVAPLAAKTDKVDARLLAELSRRELVPALWLPSLDERALRERLRRRMHLVRLRTSAKGRIFGLQTQWGIRISLRRLRRADGITLLERAGMPAVWRRSISECLVLIDFLDKRIAPLDAELRPFAKADPRAVLLDTIPGVAELLALTIAVEVGEISRFAGPEKLVSYGRLAPRVHQSGDGRPHTGPLSKSGSRLLGWAAVEAAQQAWRESNPWHQLYLDVAGRSHNHNSAKAAVARKILIAAWHMLSRNEPFKPAPRSTADTSVPASSRFALAA

SEQ ID NO: 283204 - protein, 385 aa, unidentified
MPYRIAGIDVHKKVLAIVVSDVEIESEYQFERRMFGSNPEQLRALATWLLEQEAEEVVMESTAQYWKPVWGALERYWKPICEKREGARRKSGTLHLAQALSNRGRRGRKTDFRDAERLVKRLVAQELTLSFVPDAEQRLWRTVTRKKYQLRCDRVRLQNQVESLLEEAHIKLSSLVTDLLGVSARRMLKALADGETNPTALATLADERLRATPEQLCDALGACTELNPVYRRLLKMALEELRLIDEQIAQLAAKCLSSWVGACPGDEESAGVNYSHRSPKGNRHMRRLLNQTANAAARTKGSIFEIVYRRSVPRLGHNQAIGAIAHRQCRLIWLILHQRVRYEERGPAVTKQSRQKRTARMIRQLRSLGYRIDPPNPQPSQAQAQ

SEQ ID NO: 283205 - protein, 342 aa, unidentified
MEKRYVGVDLHRNQFTVCVRLEKGRTYLRTWRLEALPQFVKQLRAGDELAVEVTGNTRLFHDAVAPHVERVVAVNASQFKVITHSVKKTDPNDARNLALYLAKDLLPEVRMKDKTQAQIASLTQTRDTMVKLRTALKNKVNNLCSAHGVNLNKESLASEKGLKAVLEMHFDLLVNLELKIIVEQIRSLNKSIAELEETIGQEGHKLEGHKNLTSIKGIGGLSGGILLSIIGDISDFADEGKLAAYFGIVPRVSNSNETEHSGRITKRGTKLGRTTLIQCALIAQRYSPYLKTYYEKMKSRRGAGKAIVALARKFLGIIYRTLKNKWVFADFPNFVLAAEATA

SEQ ID NO: 283206 - protein, 368 aa, unidentified
MKKNTNTKQNASKGKRTEQKETFAFYIGIDLGDKNSDVCVLNPAGEVHKEFRIRMNAAAIDEYFAGIGRSRVAIEVGGQSQWVAEVIEKYGHEVHVANTRKVAYIHESDDKDDPGDAYKLAELVHFKPRLLHPVRHRSRALQADLTWIRAREAAVAGRTHLINTVRSLSKGFGERLQRCSTEAFTAKLAEQIPTAIRSAVAPLLEMIDHFNEQIRYYDQMEEHIARERYGKYTLLSQVDGVGVHTALSYMLTMGDPNRFEKSRQVGAFLGMRPRKKDSGASQPQLGITKAGDEYLRKTLVNCAHYILGPHGRDCDLRRFGQRICERGGKNAKKRAVIAVARKLSVLLHRLWVTGEVYEPLRNSHKKAA

SEQ ID NO: 283207 - protein, 458 aa, unidentified
MGRKGKRTKGIEEAHPFAAMSQVNPNAAGVDIGAVEIVVGVAGENNTQIVKAFGNYTVDLQAIGSWLNEHKVKTVAMESTGVYWIPLFEVLESMGFKCLLISSRSLRRVPGRKSDIEDAQWIQTLHSYGLLESSFRPEADLVGLRTMLRHRAQLLEHRAPHIQHMQKALLQMNVQLSQALSDVMGETGQCIIRAIVQGERSPQLLAAFRDPGCKKSEEEIGQALTGTWREEHLFVLKQSLELYDFYTAQIEGCDEEIDRMYALIRPDWQSGELPPVPMKKQKTHSKNAPKSAREIRTHLKRINGVDLSLVDGFGVSLAQTVTMEVGSNVAEKFPTEKNFCSWLGIAPKHEISGGKVLKKKTLKTKNRAGQAFRMAANSVKKSDTLFGAMYKRFRARQGPSQATVSTAHAIARVVYRMLKYQVEFETISVNEYEKKYEEQQVKYFKKKAAKLGYQLVPA

SEQ ID NO: 283208 - protein, 428 aa, unidentified
MHENNENNWRQRRYYMGLDWAKEKHDIVVVDGNGRIILDIIIEHAAKGWHRLRTKLTELAGPDLSVVAVTIETNRGPAVERLLELGCAVYPLNPKAAQRYRDRKAPSGGKTDHLDALSFADALRTDGHGWRQLKPEDPAIQELRLLCRDEINLIEQRTALVNQLQEALHEYYPAALDAFDDWTAPAPWAFIERFPTPQALKKAGKRRWEKFLHTHHLYRPETYQKRLDVFSRATEFCGGQAVTNAKSMLAVSLAKQLRLLAQQLKVYRQRIKEVFQEHPDNYLFGSLPGVGEKLGPRLLSEFGEDRERFVDHQALQCYAGTAPVSFQSGQIHKVKFRYACNKNLRAAVHLWSDLSRARCAWAQIYYQQKRLQGKSHACALRCLGQRWLKILWKMWQTKKPYNEQVHTRNQIEHGSWVLAMKPAHSSAK

SEQ ID NO: 283209 - protein, 345 aa, unidentified
MEHYVGLDVSLKLTAICVVDQTGKIEREGMVVSNPEAIAAFIKSHAPHVARVGLETGATATWLWTELNKMGLPIICIDARHAKAALKMQINKSDRNDAVGIARIMQCGWYKEVRVKDLDSHAVKALLVSRALLVKIKRDLENQIRGLLKNLGLIIGRAKMNVFAGRAAELTDNRPELAAAVDPLLRARTAIEQQIADLDRKVMVIARKNVQARRLMTAPGVGPITALCFLATIDDPTRFKRSRSVGAYAGLTTRRYASGEIDWTGRISKCGDKMLRSYLYEAANVILTRVAKWSALKAWGIRVAKRTGLRKAKVAVARKLAVILHRMCIDGTEFKWANEAANQPT

SEQ ID NO: 283210 - protein, 442 aa, unidentified
MLWPSVDIKGPFISQAIWVRSLQGGNLLRVITQKKGDPTMFYLGIDVSKKSCRYLLLNQEGQKTKSFSLDNTHEAFQNLLKRLEDLSIPKEDLLMGLEASGGFWENLYSFLKDNGFRVILLNPYHTNKFREALAKKAKTDDIDALVIAQLLRTGEYVQSQVAEELIQSLRELTKLRYELMTERKNFQRQVFSLLSIIFPELEKTALKNPFSVASMAILQRFPTAKDLAQAKPKQIEKIVRSIQGNNFNIEEIEKLIQTAQTSIYSGRAKEARATSLRILLRHVETLSSSIEELEAQIKQILSPQQPQDSFPGENLLTIPGVGDKTLAAVLSYLGADGSSFYSSTKAVGYVGYFPKIYQSGQTQRDNAICKRGPKLLRWALYMAAVASLKHNPEMRTLYHRKLSQGKTEKQALICVGKKLLQIMLAMLKSREPYNPAKVFVSC

SEQ ID NO: 283211 - protein, 351 aa, unidentified
MKTTTVIGLDLGDNYTHACMLDGATAKVLERSQIQTTPAHVVDYFSGKKMSRVILEAGTHTGWMQRVISELGHEVIIANPRKVRMRGADNKDDRVDAEYLARLGRADPVLLYPLRPRSERVQIALAVVRGREQLVTTRTSLVNHVRGVVKTLGARMPRSSTRSFHKLTPAIDPALRPALEPLMKCLEQVSLQIRAHDREIARLCKEEFPETACLTQIAGVGDLTALTFVLIIEDPHRFPNSRTAGAFIGLVPRRCQSGDNDPDLPIRKSGDRILRRVLVQAAQYILGPFGPESDLRTFGYRLIARGGKNAKKRAAIAVARKLATILHALWKSGETYKPQQAQPQKDVTEAA

SEQ ID NO: 283212 - protein, 341 aa, unidentified
MGQVSTVGLDLAKNIFQAHGADASGEVVFRKKLGRGRLLAFFAGLAPCVVAMESCAGAHHWGRELARQGHTIRLIPPIYVKPFVKRQKNDMADAEAICEAAQRPGMRFVPLKQEEQQASSVVFRARDLLVRQRTQTINALRGHLAEYGWIVPKGVPHVDRLIARVEDPAEALPAAARTILMVLVATLRWLDQQIGVLDAEIASRARHDPVARRLMTIPGIGPITATALIALAPSHGAFKSGRHFAAWLGLTPRQRSTGGQQKLGAITKMGERTLRRLLTIGASAVIKQAVIRGAPSGSWLDQMLARKPKMLVIVALANKNARIVWALLAKGDVYRAPGVPA

SEQ ID NO: 283213 - protein, 396 aa, unidentified
MLTSTMVNNSLIGKAGVGEASVASRTDTSRRREFGRVQASEAVTEREPRRTRETSPNSRLNRRRPARTASSHLQVREITMSEPIYVGIDVAKETFHVATCPNILKTCLPNTPEGHRQLCQTLKNQTIALIVLEATGGYERPIAAELLNVSLPVVVVNPRQVRDFANGMGQYAKTDPIDAQLLATFAQIVKPASKTHSTPQTDELSEFVRRRRQLNDLRTQESNRLLMIHHPKVKKSIQKMVKTLDFQINEIDRLIREYIDTDDDFKNKDHILQSTPGVGPQTSAMLIANLPELGQLNRQEIAALAGLAPWDRSSGKYDGKAHIWGGRKDVRSVLYMAAFTACRFNPVIHALAHRLKQKGKAYKVILTACMRKLLIILNTMVRNQTLWSPKISIKNP

SEQ ID NO: 283214 - protein, 380 aa, unidentified
MSANCERVGERAVVPSNRPSLDLSPWSPEEKPAEKRGTDLASSISPNSCMGVRARTSKEGSGSMPQGTCVVGLDVAKSKVDACIRSMGLRLSRPSTAEGEAELLAWVRANRVGRAVMEASGGYERRWAKALRAAGVEVRIVDPKRIRHFAKAAGRLAKNDPIDAETIAWFAEAFPDADAQPHDAAREELDRLVQARAALKDEEDRIKQQREHRPPPVVAQALAAVAKAIRVERRKIEAAIAAKIKANPAFARRAEIIDSVPGLGDQTVAGVIAWLPELGHIANEAAAALIGAAPYDDDSGGRKGARHIKGGRRKLRNLLYMPVMGAATQHNPVLKAYYARLRARGKEAKVALIACMRKLIVILNTMLARDETWNPARAAA

SEQ ID NO: 283215 - protein, 341 aa, unidentified
MVHVGLDLSRTRLDVHVMDEAGSALAITTAAPDRGGLAVLASRIDGFGGPVYAAIESMNGARFVHDQLELAGWQVEIADAQKVKGLAPLACKTDKIDAWVLAELSRRDLVPAIWLPTPTVRAERERARWRLHLVRHRTALKNRIHATLLAFGHPCPVSDLFGVGGRELLHRLELPEPWAADTTAALQLIDQLDTEITAGERALRRLGADHRYVPLLMTTPGVGWVLGYTIAAEIGDITRFATPTKLAGYTGLCPRVYQSGGKDHRGSLSKNGPKYLRWALIEAATHACRHPIYAERYRRTKTRLGRQRGPKIAQVDLARRLSEAIWHMLSTNRPFAPAGAA

SEQ ID NO: 283216 - protein, 346 aa, unidentified
MMTQILKQVIGIDVAMDELVCVAAQLDIDQRVQILEKKSFTNNHEGFAQLVEWKAACFKEISYPLGSASKVWFVMEATGVYNQHLAYYLVGAGEEVSIQLANRVKNFSRSLNVKSKTDLMDAEVIAKMGLERKMEAWNPPSDKMRQIRSLCREYSERIQKRSKLRNQLHALGKAYGISPQIMRRYKREEAFVTELIEEIEVELKMIVQEDDLLRDKMKKLKTIPGLGFMTLIILIGETQGFSLIENGKQLASYAGFDVVEKQSGRSRGKSYISKKGNRFIRQALYMPALAATRCNQPMKDFYQGMAERKPAKRIAVTAVARKLLILTYTLWKNDTVFDPNYGKKAA

SEQ ID NO: 283217 - protein, 319 aa, unidentified
MEVYVGLDVSLKETSICVVDGSGKIVSEGTVLSEPLALAEFLRAKAGRAKRIGLETGPTTTWLWHELRALGLPVICIDARHAKAALSLQINKSDRNDAVGLARIMQCGWYKEVQVKSLPCHEVRAVLNSRAQLVKTKCDLENQIRGLLKNHGLVIAKAGGHIFRLRAEELIGGHRLLQEAVRPLLAVREVVRREIAGLTRRLLAMARNNDASRRLMTVPGIGPINALAFCAAIDEPNRFRRSRSVGAYFGLTPRRYASGEVDLTGRISKCGDAMVRTCLFEAAGVLLTRVQRWSKLKAWVTGYGNASASRRPRSRWHGS

SEQ ID NO: 283218 - protein, 338 aa, unidentified
MALYAACDLHSNNTVLAVIDDAGTQRYHHRLPNDLPLIDAALAPFRSELAGVAVESTYNGYWLIDGLQTAGYPAQMVNTLAVPQYAGLKHGDDDSDPRHLANLMRLGLLPTAYIHPREQRPLRDLLRRRMLLVQQSVRLLQSVQGYWARATGQRLSANDFRHLTRTRLADTFVDPTELFAVVNLIQAWRALQEKVAAMEAWLAEDTRRRPDLIALRTVPGIGVVLGLTIVLESGEIARFDEVGQYTSYCRLVPALRFSNGKKKGTGNRKCGNRYLAWAWIEAANFAIRFEPAIQRWYQRNAAKKPRLVALKAVAHKLARAGFYLLRDGGSFDVHRAFV

SEQ ID NO: 283219 - protein, 416 aa, unidentified
MKKHSNLPVRSEQRSKQTKSRVPVQRDTKELMAELLGKLREKQDPKAISTGAGKEQKQGRLRPNLDRLTVGVDLGDRWSAYCILGLEGETLIEGQLQTTQPSVAQFFQGLPSARVVLEVGTHSAWMRELISGCGHEVLVANPRMMEGSKRRKRKNDRIDANKLARLGRMDPQSLYPIQHRSPEVRRDLVMLRARDALVAVRTELINTTRGLVKSVGARLPKCASPSFSKKVEESIPVEIREALLPLVELVAALSDSIQGYDEKIEKLGSEKYGHTALLRQVKGVGPITALAYVLTLEDPNRFAKSRDVGPHLGLVPNQEDSGDIQPQLGISKAGDTMLRRLLVGSAQYIMGPFGPDTDLRRCGLRLCERGGKNAKKRAAVAVARKLAVLLHHLWVSGEVYEPLRQGLSATMRQAAA

SEQ ID NO: 283220 - protein, 348 aa, unidentified
MTVYIGVDFHARQQTISYLTTEDGEIQRLQLDHGQPEEVRRFYQQFAGQRVVVGFESSGRAAWFEELLEELGCEIWIGHATAIRLFARRRQKNDRRDADLILDLLVRGDFPRIHRYSAESRTVLQQLRYRQRLVKMRTMLLNSLVFMAASRGVVLRSQLKTKRGLERLRQIDLPPALREQREELCQLLLDLKLKIDKVEKELAAKAESDLRVRRLRTQYGIGPLTGLCLAHTLERPERFANPRKVTAYVGFDPVEDSSGERRRIGSISKQGSRLLRFLLVEAGQIAVRRDQELARVYQRVLVRRGHAKAKVAIGRRLLVRAFIMLRDEIDYAEFQRRGVAARSSREIA

SEQ ID NO: 283221 - protein, 371 aa, unidentified
MNNTNTKSTSGSEGNEAREQHKGDRVLKLGLDLHYRQVTVAMQEDGGRIKGAGKMSHQAFGHWMDKKLAAGWQIESCYEAGASGYWLHRQLVALGVKNLVVAPKAMGQGGKRQKTDRRDSAELVDGLDRYLRGQDKALSVVAVPSVEGEEKRALIRYHRQVMADRSRLEGRGKGLLCAQGIEVRGRWWQAKGWRELNADPGLKDWMKEQLEAWRQKVLSAEEEQEELRRRIEALAPAMRPKGVGAYSTAVLEYEMKGWQRFHNRGQVSSYTGLCPGIHQSDGRGKEGSINRCGNRVVRWNLVEMVWRLMVWQPHYGPVRQLAAGLVRSKRAKRRLVVKAARQLAIDLWRLATDQTTAEKLGLIMHSDRRRQ

SEQ ID NO: 283222 - protein, 497 aa, unidentified
MPTQRTIYSNCNPQLLRIFEKAGHPAKVLCVALDYAKAQHMALFCNGVGDLLKSVFAVDNTAAGADQLIKEVRACAQRKKIDLQNVFCGGEDQPAFAENFLRRLRQEGLLLVRVNAWEAKKQRDNFQASNDALDLLGIARCCLNRRAASVRDWPAPYTNLRLATRDRDKIVRLRTLISNRIHSQVDRLFPGFLQSPKSGLEAFSHASLDLMEEHFSPEQMSRRSRSGLAQWLGRRGVQEPQEVAQKLKQLGKETLRPAPEQTLMLQQIVNQLVKLYRDLDASIAMFDRQTAYWLARTPGALLTSIGGIGVTLAAGWTAELGPPNQWRAVRRLCSYAGVVPRTKQTGGPSKEPVVGTVQKRCNKRFKNVVLQAVEKVKEFGPEELRRELQELDARGAHTSFAMAKRLLRLCKCLAVTGTIYRPKALLDPQTAAATLVAHYQDTWDKLLSKWRDKADLHDVFAPQLPLGQWRNMARELYALELRLPRQRSATAASASTP

SEQ ID NO: 283223 - protein, 366 aa, unidentified
MKKSITPIGTPVGVDVHKRRCKVVELDHGEIKVRKPMANTREEWLEMLTELPPDAEIGLEVSTAGYFAMSVLEEAGWRERTHWVHTAGMDSHRRQKNDRLDAERLARKLAAHHLDPLPEAWFPPPEIRALRLRARARCWLALLRTQCKNHLQSLLQMHGLLLPGSDPLGAAGQKWLAQQTLPLPLIESLPQIQRLLKLLEEEIKISEKYLQAVEAQFPELALLRTIPGIGAILAPVIWSELGSRERFPSAKALANDTGLVSSFYDSGDVKVSGPITHQGSRWLRWAFVTAANLAIPYRNPFARRYHRLRRGKKPNVAKAAIAPSLARCVYGVLKHGCPYREDRWGRKVGALEQEARGSARSTKTVL

SEQ ID NO: 283224 - protein, 338 aa, unidentified
MKTYAGIDLHSSNNFIGVINAKDKRLYSKRHDNRIEDVLKVLGKFKASLQGVVIESTYNWYWLVDGLMDQGYTVHLANPNAIQTYDGLKHTDDKWDSFWLAHMLRLGILPEGYIYPKHQRPIRDLLRRRLMFVRQRTSQILSLQSMITRNRGLNFSGAQIKRFRDDFIDKLFSDRHLVFTAKKNITTIRFLDQIVSEIEIEVASQIKLKKEFISLLTTPGIGNILGLTIMLEVGNIGRFPKAGNYSSYSRCVESKRTSNGKKKGENNKKNGNRYLAWAYVEAANHAIRCCPKAQKFFQRKMAKSKRVLATKALANKLTKATYFIMRDQVAFDEEKLFR

SEQ ID NO: 283225 - protein, 336 aa, unidentified
MSHYCGIDLHSNNHFVVVIDEDDKRVLEKRLDNDLSLTLETLSPFRESLHGIAVESTFNWYWLVDGLQEQGYDLHLVNTMAVKQYDGLKYSGDRHDAFHLAHLMRLGILPTGYIYPKEQRAVRDLLRRRLFLVHSASAQLISVQSQIWRTTGRRIRSADLRKPDFIAPGIEGYTLQAVEAGLAVYQAVQREINALEQSAQQAVRLSNDFKILQTVTGIGKILGLTIMLETGTIDRFAGPGNYASYCRCVDSRRDSNGKKKGEGNAKAGNKYLSWAFSEAAHFAVRFEPLAQRFYERKKARTNGIIAIRAVARKLSRATWMMLKHQVPYDARLMFPR

SEQ ID NO: 283226 - protein, 325 aa, unidentified
MAKRITVCAGVDTGKRKLDVAIDGSGEPLQVENTAEGHKVLVAWLQRHKVKRIGIEASGGYEQPVVAALRRKRFVMIVFQPAQVRAYAKFHLQRAKNDKIDAALIAACTAAVKQIYPAPDPRLSPFAEHLTMIDQIGEDIMKLKNRIETCRNERIRAVWEEDIARLAKRERTELKALVAAIRQYPDLAERFELIYSVGGAGLPTAVAILVRMPEIGQLTREQAAALAGLAPYDDDSGDRVGARHIDGGRERLRRALYLAALPASFRWNPQLIALYQRLRAAGKEHKRALIACARKLLIFVNTVVARGTPWQSEPPAARAANPSTA

SEQ ID NO: 283227 - protein, 316 aa, unidentified
MEAIAIFVGIDVSKARLDVAVRPWGQSESVTNDEAGIKSLVKRLGEIQPALIVLEATGGVERQLTRALVNAELPVVVINPRQVRDFAKATGQLAKTDSIDALVLARFAEAVRPALRPLPDEVTLELRGLIARRRQLTEMIVAERNRLGGASKTVRKRIDAHVRWLEAELQRADGDLDQSIRQSPIWQDKEDLLRSIPGIGPVISRTLLAELPELGGLNRKQIASLVGIAPLNRDSGTLRGRRAIWGGRASVRAALYMAALVASRRNSVISVFYKRLRTAGKAPKVALVACMRKLLTILNSMIKHKTRWSENILQTS

SEQ ID NO: 283228 - protein, 406 aa, unidentified
MRLPHLHYRLCFHPYMILSLSGWTVPHIFSLLPVTEDCTGWYNFSSCFYKRIPFHSLIELINSVEGESRIVMEHTGRYYEVLAHQLLEANLFVSAINPKLIKDFDNDSLRKVKSDKADAVKIARYALDKWQNLKQYNVMNELRNQLKTMNRQFGFYMKHKTAMKNNLIGILDQTYPGVNTYFDSPARSDGSQKWVDFASTYWHVDCVRKMSLNAFIDHYQNWCKRKKYNFSQSKAEEIYGKAKELVPVLPKDAITKLIIKQAVDQLNSASTTVESLRTLMNETASKLPEYPVVMAMKGVGTSLGPQLMAEIGNVSRFTHKSAITAFAGVDPGVNESGTYEQKSVPTSKRGSADLRKTLFQVMDVLIKTHPQDDPVYQFLDKKRAQGKLLVYKTDPISFQLIFPALI

SEQ ID NO: 283229 - protein, 311 aa, unidentified
MTEHATVGIDIAKDTFDVYIDSTRQLLHLDNTPEGHQQLLSALSAITVKLVVMEATGRYHSLLAATLELAGLPVAVVNPRQVKNFARALGTLYKTDPNDARVICEFGRRMEPEARPTPDEQTQRLAGMVTRRRQLVDNRTMEINRYKSCDDVVVSVGIKRHIDWLTAEIRDADDDIDRQIKVMPLWREKATLLEEVKGIGPTTMAVLLAMLPELGTLNRHKISALVGVCPYAHDSGKMKGKRSIWGGRSAVRSALYMATLSAVRYNPTIRAFYERLIGRGKAFKVAVTACVRKLLTILNAMLRDNKKWVTN

SEQ ID NO: 283230 - protein, 449 aa, unidentified
MRKPQVIEDQEHERVFERVAAVDVAKASGMVCIRTPNPSRPGARHSTVWEVPAAMNAVLALADRLVAGGIEMVTLESTADYWRIWYYVLEGAGLAVQLVTASQARNLPGRPKTDRLDAMWLARLTEMGMLRPSFVPPAPVRVLRDYARARTHLVQDRTRCWQRLEKLLEGALIKVSAVASKLTTVSAQDMIKAMIGGQRDPRVLAGLARGRMKAKHDALVEALTGMFDDHHGELAQMLLDQIAFCDTRIAALAARIEQHLAQIRDAWGVDADGCTGPGAGTGTDAAVLPAAQRLAEIPGVSLELARSIIAETGLDMGRFPTAAHLVSWAGLCPSARQSGPRNRNGKKGQGDGYLRGYLGQAATGAAGTATFLGERHQRIARRRGRAKAQVAIARSILVIIWHLLASPGARFADLGPDYYASRTDKDKKIRNHIRQLQALGLTVTIAPAA

SEQ ID NO: 283231 - protein, 379 aa, unidentified
MKHLSTLFVGLDVHKDSIAVAYASDERGAEVIFLGPIGTRQCDIDRLIRQLHSKASRLLFVYEAGPCGYWVYRYLQKKGEDCMVVAPSLIPRKPGDRVKTDKRDAVQLARLMRSGDLNPVYVPSLEDESIRDLGRAREDLMGDLKAAKHRLKSFLLRHDIRYTGKADWNAAHLRWLADDVALPTAAQRIVFQEYVRAITDLVDRLAQIDEELHEHAKGCRLAPLVAAYQALRGVQFHVAVTIVAELGDLTRFDTPRQLMSYVGLHPSEHSSGNARRQGGIAKTGNAHARRVLVEGAWAYRYLPKVSRQIQVRQESLPQEIRDIAWKAQLRLCKRFRRLVAHGKHPNVAVTAIARELVAFMWAIAQQVQFPTSSQGKLAS

SEQ ID NO: 283232 - protein, 411 aa, unidentified
MNAVGIDVSKGKSTVAILRPMGEVVQAPVDVPHDAVSLERLAYQILSLGENTRVVMEATGRYHEPVAMELHDRGIFVSVVNPLAIHGYCSGGTVRKVKNDQKDSLKIAKFALDHWVDLREYTPMDAVRQQLKIFSRQYNLYMKSRVALQSNLISLTDKVFPGVNEIFTSPERSDGHLKWVDFVTTFWHCECISLVSENAFTERYKKWCKRMGYKFSAAKASDIYIDSLGHIVTLPKNNNTKLLIQTAAKELTAMNELLAVVKAEMIRLAKELPEYETVHAMFGVGELLAAQLMAEIGDIRNYPRRSSLVGFAGVDPEVNQSGKMNSESNPSTKRGSPHLRKTLFQLMTVYLRLSPADEAVYQFLDKKRSEGKPYYVYMTAGANKFLRIYYARVKECMAKIETPAEIAEENG

SEQ ID NO: 283233 - protein, 408 aa, unidentified
MNPLYVGIDVSSKSNVVYLMLPDGSKHSNFSVANSHDGSTQLVKRILSAITSLSLDTVIIGLEATSVYGDNLVYFLKEDATLVPYDKKIHVLNPKQVKNFKEAYNDLPKNDYVDSYVIADCLRFGRINKEVYQSDYRYKALQNLTRARFFAVQNLVKEKQRFINVLFKKYSTMTQEKVFHDTFSTTALAVYEEFESAEALASMDLQELTDFIMEKGKNRFPDPDAVAKAIQKAARSSYRLPKTVNDSVNQVLSISITSIKALDAQIKEFDKAIKAQMELLPNVLTSIPGIGPVYSAGIIAEIGDINRFPSQAQLGKYAGLVWTQNQSGDFEAENTKLIQSGNRFLKYYLCEGALSLVRCDTEYSNFYHSKYKEVNRYQHKRALALTARKFVRLVFRLLKDNRLYRAAE

SEQ ID NO: 283234 - protein, 428 aa, unidentified
MNSTQNKKLNQVTEDMLLIGADIGENTHFARACDWRGVEISRRAFKFKNSREGFERFLAWTVEMQKKGGKKKLLVGCEPTGCYWFTFQHYLKKHGIRLTLVNPFSVNRSKELDDNSPEKDDQKDPKTIVGLIKDGRFCDPYVPEGIYAEIREAQNCRDQIMKQHVRLSNQIQGWLQEYFPEYLECYKKFDSESGMLLLRHAALPKDIVALGAEGINQIWRDAKLRAVGIKRAQTLVEAARTSVGIEGGAGARMAIQILVEDYWKKQEQLEMVEKLLEEAVMKVPNVEKLLAIKGVGLSTVAGFIAEVGDIGRFTDPKQIQKIAGLEIVKNSSGKKKGRPRISKRGRVRLRRVLYEAAGSLTSWDEAFHEVFLYYRKREKHPLGRMQARIAIACKVIRVFYVILKTGCDYDQEKLRSDIRRPKALEEAA

SEQ ID NO: 283235 - protein, 342 aa, unidentified
MNNKKVTKQVVATDIGMENFYACYKIQYDDKSTVIKGTKLFSNSPSGINEFYLWCKKRNKTLGAEPIFVMEATGVYYEELAYFLYHKKEKVSVQLAQKIKYFAKSCNLKTKTDKVDAKIIAEFGIEKNLTGTDLWTAPSKDFKMIRDLAREHTSLKKAQTVSKSQLHALKHAHSSYDNVIKLKEQQIGFYEKQIKSVEKEINTLVRSDISLYSRIKKIETIKGLGFITIIKVLTETNGFLLFKSIRQLVSYAGLDVIEKESGKYKGKTKISKKGNARIRSALYMPAMSAAQHNRTLKVFYNRINESRTIKKQGLIAVMRKLLILIYTLWKKEEEYIENYQMT

SEQ ID NO: 283236 - protein, 457 aa, unidentified
MSNKLRIKKKTKKFKAADLPIELKHVNLDAAGIDIGSDRHLVAVPVGRDEVSVREFGAFTTDLHALADWLKKCAVTTVAMESTGVYWIPLFEILERRGFEVKLVDARKTKHVSGRKSDVLDCQWLQTLHTYGLLTAAFRPADEICVLRGYLRQKEMLVQSSSMHIQHMQKALQQMNLLLHNVVTDITGVTGMSILKAIIAGERDPKALARYRDERCRNSARTIAKSLVGNYRQEHLFALTQAVELYEFYQAKISDCEKAIANFLAIQVTQTEDEPPPSQKNIPPRQRIRAGVDLRSRLFKLTGVDLFSIPGLGADTILTVLAEVGFDMSPWKSEKNFASWLGLCSGTKISGGKVLDRKSKRSANRAAQAFRLAASSLTRSATALGAFYRRIKARIGAPQAITATAHKIAIIFYQLLKCRTAYVEIGQQAYEQKFKERRFKAMQKQALAMGYQLIPAA

SEQ ID NO: 283237 - protein, 371 aa, unidentified
MTQRIRYVGLDVSKETIAIAVAEPDGSVVEYGDIANNPGAVRRLVETLSRDAVVKTAYEAGPTGYPLHRQLTALGVENLVVAPSLIPRRPGDRVKTDQRDAIQLARLLRSGDLTRVWVPDEAHEALRDLVRARDDARTDGLRAKHHLSKFLLRQGVTAPPRVGRAWSAKYHAWLNTVTFRDRAAQITFDDYLACVRAATERIRRLDAALLECSAANPHVELLRALQAVRGIGFLTAVTIVAEAGDLHRFHSAAAFMAYVGLVPSEHSSGGSRRRGHITKTGNRLLRHVLGESAHHARLQPAVSEALRQRQQGVSPDVLEISWRCQQRLHHKYRHLGGRIGRQRTITAVARELAGFVWAIGQAVPPVEVAAA

SEQ ID NO: 283238 - protein, 370 aa, unidentified
MGKSVLYVGLDVHKMSVDVAIAEAGSGGEVRYYGRIGGDLEALDKVTRKLQAQGAELRFAYEAGPCGYQVYRHLTGQGWPCLVAAPALIPRRPGDRLKNDRRDALTLARLFRAGELTPVKVPDADDEAMRDLSRAREDAISVERRAKQRTGALLLRHGRRYPGKTTWGRGHWRWLLQQVMEHPAQQIVLQEYLDAVREASARVQRLTGQIRELIPQWRRGPLVAAYQALRGVSLIVAVTVVAEVGDLSRFNNPKELMAYLGLVPSEYSSGASVRRGRITKTGNGHARRVLVEAAWAYRLRARVTRPLLQRQEGLPESIRQLAWKAQLRLCARYRRLLARGKAKQTIVTAIARELAAFIWAIGQAVEPVTT

SEQ ID NO: 283239 - protein, 309 aa, unidentified
MNIAPGVVGIDIAKHHLDVFEAGAGRAVRLPNTPAAIAALVEPWRAARVRVLFEATGAYDRRLAQALDAAGIPFARVNPRRARDFARAAGFLAKTDAVDARMLAAMAQCLDPPAAPRDEPERRHLAQLHKRRDQLVATRQQERTRHHDADPEIAADIVRHITWLSAEIAALDTRIASLIAARRDLSRIARQLRSAPGVGAVTATTVIALLPELGSRSPQTIAALAGLAPLNVESGQFRGKSQIRGGRKRVRDALYMAAVAAIRTKSRFAATYQALRNNGKPAKLALIAVARKLLVTLNAMLRDNRAFQP

SEQ ID NO: 283240 - protein, 411 aa, unidentified
MRTVLPVCCGLDVHKRTVTACIRREGASPAAATQTRTFTTTTTGLLQLVDWLGQHGCRHVAMESTGVYWKPVFNLVEGVCQEVLLVNAQHIQQVPGRKTDVKDAEWIADLYAHGLLKGSFIPPAPIRDLRELTRYRVKLVQQRADQSNRIQKLLEGANIKLASVVSDVLGVSGHQMLESLAAGETDVVKLAEMSRGRMRNKIPQLQEALNGVLNSTQRWLLDEQLRHVADLDQRIGRLDEKIEELCRPFSEQMERLQEIPGVSQRLAEILVSEIGVDMSRFADDRHLASWAGMCPGQDESAGKQRSGKRRKGNQWLRRALTEAGWAASHTKDNYLAAQYRNLARRRGRKKACIAVGHSILRIAYHLLKSPDAHYNDLGPDHFATQKKSQLAHQLLRRLASLGYQVTVTTAA

SEQ ID NO: 283241 - protein, 433 aa, unidentified
MKVLYERVAGIDVHKEMIKVAIRSPGEKPWTRKTEILEFRTFYGVLQAMARELRKRGVTHVVMEASGVYTEPVYYALAEQDFTEVAVINPAHAKALKGHKTDARDCARLAELFECGLLRGSYIPAPELKEVRDLTRYRMKTVQARTSEIQRLGKALESAGIKLGSVASSITGVSATAMIEALIDGERRGGVLADLARGRMREAGKLADLSMALTGRFTEHHALLCRLHQDRIAGFDAAVAGLDERIAGKVTRWQREAGLLTSVPGFGDVVAQAWLGEIGPAPHRHFATHEKLASWVTLCPGNNISARKRKHGRTGDAGTYIKPMLVQAAWNAVRVRGRLQARYNRLVRRFGGEKNPGAKKKAIIAIAHTLLKIAYQVLKSGVPYQELGADFYTRRESPEQKHAWLERQLQKLHPGCTITITVSPPEAALAPGP

SEQ ID NO: 283242 - protein, 418 aa, unidentified
MDLDEVVYRVACGLDVHFTFVTACLVTTGPKGKPKVEERRFPTNRKGLNSLREWLTENGCEAVGMEATGVYWMPVYAALEGACTLVVGNPQHMKNARGHKTDRMDARWIAGQVRHGRIRSSFVPPPEFREARRLARCRRQLVEARTSIRNEIQRLLAEVGITLAGVVSDVFGTSGTSILNALSEGKCVRDELSIHLYSSLRKKDKMASIAAALEAPLPEVSRQLLAIHLRRIEALDGNIDEVETLLFRQLAPHAGKLDLLQRIPGISKLSAHIILAEIGVDMTVWPTAKKFSAWAGVAPGCNQTGGRSKRAAVRKGNPYLCTMLMECAGGAVQKLDSHLRMKHRKLCAQLGSKKKARMAIAHKLALIIYKVLGENVEYKDPEPKQPSEKAKRRILQTRVKDLERLGYRVVLEPIEAVS

SEQ ID NO: 283243 - protein, 352 aa, unidentified
MEQFIGCDAHKRYSVFVAVGEDGGCSPAWKVSHTEGAFEAFLEKLPEGSEIALEACSSYYWMVAAMERTGHHPHLAHALEAKHRMGKTHKTDKLDASGLRILLRNGTLPEVWIPPAELRDQRELLRLRMQFVQQRTRWKNRIHGALTRYNVHVGVTDAFGVRGREQIARQLGELPGHTRQSVEQQLAVLDFVERQIEDCERRLAGLLEPSEEVRLLRTLPCVGPILSAVLWLEIGDVNRFPDAPHLASYAGLVPRVRSSGGHTRLGPVARDVNHHLKWAFVEAANLVAVNQRRLGPCHVLELYQRLKKRKNHQKAVVAVARHLAEATYWILKKREAYREPKAPRLALSSTRG

SEQ ID NO: 283244 - protein, 334 aa, unidentified
MEKVTTVGIDLAKNVFSLHGVDAAGKTVLQRTVRRDQLLEVVAGSSPCLIGMEACSGAHEWGRRFQEHGHTVKLMAPKFVAPYRKSGKNDGNDAEAICEAVTRPNMRFVPVKSVEQQALLVMHRVRQGFVVERTAIINRLRGLLAEFGVVLPLRSVTVRRQAAAAAETLPELAKRAIGDLLEQLRLLDERIGGYDREIEAQAKLCEPAQRLMKIRGIGPTTALAIVATVGNAREFKNGRQFAAWIGLTPSQHSTGGKTRLGHISKRGDSYLRNLLVQGARSVLNSAGMHQDRMSRWILELQPRRGYYRTLVAIANKNARIAWALLAKGESLRSA

SEQ ID NO: 283245 - protein, 343 aa, unidentified
MQAVTTIGLSIAKSVFQVHGVDAIGNVVIRRQLKRRYVLAFFQKLAPCVVGIEACATSQHWSRELKAFGHTVRLMPPAYVKPYVKRQKNDAADAEAICEAVTRANMRFVATKTPGQQSCLMLHRTRHLFVRQQTAVINAIRAHLAEFGVVAPVGRRGVAELLDVVADSSDERVPEVARACVAALGAQLRMLKAQILEFDRQIMAWHRSNETSKRLDEIPGVGPALATALVAGVADPTAFRSGRNFSAWIGLVPKQHSSGGKDRLGGISKQGDRYLRSLFTAGALAVIRYARIHGTKHRPWLAALLARRPTKVAAIALANKIARIAWAMMTKGERYKEPAALAA

SEQ ID NO: 283246 - protein, 399 aa, unidentified
MYAVGIDVSKGKSNVAILTTEGEIIEEPFEIIHDRNGLDYLLEKVKKYKKDEIKFLMEATGHYHLPILNELIENNYFVCIENALVVKKYCDLDLRKTKNDKKDALKLANYCSEKWFKLRKFEIMDDIRIQLSFLSRQYSNFVVNQTNLKLQLTNMVDKTFPGIKKAIDDENRYNLFLDIYEKYSYPENVLKLSEKEFINDIDFMAKKYRHKVGKTIGKNIYDLAPNVITSCPYNESIQLVINSCILLLRETLKVTNDIITKMDELAMQLEEFNTVKEMKGVGPKTRARLIAEVGDVRKYTNANALIAKCGIDTPQYQSGTFNSENRHITKRGNKYLRKVTYEIVKCIKSSKPKEDNAVYRFIIKKEQEGKPKKVAKVAGMNKFLRIYYARVKEVYNNCQ

SEQ ID NO: 283247 - protein, 428 aa, unidentified
MRLPIGFVETGKKETIFIYEKRKTAFIGIDMHKDIHVAVVIDCWTNILGEITFENRPSKFDKFMQDVKKIYKDLTPCFGLEDTRGFGRNFASYLLGHKYTVKHVNPAYTDSMRSSAPMSKKNDSFDAFCVAKLLRDMVDTLPDEEHNDLHWTIRQLVKRRNSLVKGIVIAKNQLNSNLTNVYPSYKKYFCDVDNKTALLFWEKYPHPQYLKGVKPETLLEELRTIHKGMKQEQAEMILTLSEQNSPKEKEFQTERDLIIKSLVREIRFKKQENEDIDNELERLVELTGYKLQTMPGINLITAANIISEIGNIERFPNSDKLAQFCGVCPVNFSSAGKGKDQRSRQGNRVLNAIFHFLAIQLVQISPSGKPRHPVFREYFEGKIKEGKTKPQALVCVSRRAVRIIYGMMKSKTEYKPFEKVQEVKEIQE

SEQ ID NO: 283248 - protein, 396 aa, unidentified
MYIVGIDIAKRNHEAVVMDDQGKVVRKAFSFANNTEGFEKFLSILTGISQDASGFIIGMESTSHYWLALFSALKRQGYNVQVLNPIQSNALRGLYIRQVKNDQRDSFIIADVIRFGRYTQGQTPSDDLFALRELCRARVFLVNMAADTKKKVIALLDQVFPEYETIFSDIFGLTSTDLLLECATPEEILAIETDKLVAILENASRKRYRLPKALQIKEIAQNSFGVILASDTFSLLIKQHVEHVRFIERQIADIEAKIIELFSHFDTCITTIPGIGPILGATIFSEIGDISRFSSSAKLAAFAGIDPTVKQSGEFTGTHNHMSKRGSPYLRRALWQAAVLSVTCNPSLKAFHQKKVAEGKPRKNSLGHVTRKLTNIIFAVLRDNQPYVPRAMPLAE

SEQ ID NO: 283249 - protein, 348 aa, unidentified
MRESTTFSCVSIFAGIDYHKKFSLVTIGDESGAVITQQRLPNDRIAIKEFFADFPTAICAVESCRGYEWFVDYLKDLGHEVRLVNAYKAKLIAQSKCKTDKIDSRALMQLLAKDFLPTCYQPSPAERRLRERLRWRAHLVRYATRMKVRIHSLLDKENAGLSAPQLFSTEGKKFLRNIQLSDSRKALLMEHLDMLDYFEKLVTAEDAWVKQTVKGSESAQLLTTIPGVGNLTALVILAELGDITRFKTAKQVVSYAGLVPAVHSSADTRYLGPITKEGSKMLRWMLIQAAWIAVRTSPQLRVSFMSVRNRNGKNPGVVSVARKLLKIAYRVLRDQKPFNAELVSKPSA

SEQ ID NO: 283250 - protein, 315 aa, unidentified
MSESESIYVGIDVAKDTFCVAACPDVFNAALPNTPQGHHKLCQSLKKHPVALVVLEATGGYERPIVAELLAASLPVVVVNPRQVRDFARGMGQWAKTDPIDAKILATFAQKVRPTPKTHATPQTAELAELVRRRRQLCDLHTQESNRAATILHPKVRKSIRKMIKTLEFQIAEIDQLIREHIESDEDFKTKDRILQSAPGVGPQTSAMLIAALPELGKLNRQEIAALAGVAPWDRSSGKYQGKAHIFGGRKDVRSALYMAAFSASRFNPAIREFAERLKQKGKAYKVVLTACMRKLLTMLNMMVRNQTLWTPKIN

SEQ ID NO: 283251 - protein, 409 aa, unidentified
MEVTHTHCAGLDVHKKIVVACILIQTTPRKLEPTVRSFGTTTAELLALSDWLNNQKVTHIAMESTGEYWKPIYNILEFNFEVMVVNAQHLKNVPGRKTDVKDAEWIADLLRHGLLRGSFIPPLVQRDLRDLTRQRITLVRERARVINRLQKVLEWANVKLASVVTDITGVSARRMLQAIVDGQTNVQDLAKLAQGRLVHKLPQLEEALLGKVRDHHRFLIQQHLNHLEFLEAQIIQFNQHIEKSIDAQDNPDHQNRSESQSNSSVDETKSASTLSWTQAVSLADTIPGVAQNTAELLVAEIGTDMSRFPSASHLAKWARLCPGNHESAGKRLSGQTGRSNPWLRTSLVQAANAAVRCRNSYLRVVYRRLAGRRGRKKAKNCCGSSDSYCSLSYVQETRTLSRLGSQLLI

SEQ ID NO: 283252 - protein, 400 aa, unidentified
MLLFFEVITMIFVGIDVAKDTHYAAVSDDSGAVLVKPFAFQNNAEGFCLLLKKLSEFDRSKLLIGLESTGIYSENLICFLYESGFRLAVINPIQTATLRKTAIRKTKTDKVDTMLIIKSLMVNSYRLYSQRDADSLKLRTLCRFRQNLKKSKARLKIQLAGYVNLVFPEFGKFFKSGIHIAASYALLKKYSSPKEIAALRTSTLCTLLSKASHGRFGKDTAEALKSLALSSVGVKNPYISIQIAQTIALIELLEQQIKDLNSAIEEAMESINSVLMTVPGIGAVNAACILGEIGDIKRFSKPCKLLAYAGLDPTVRQSGQFTAKSTRMSKRGSALLRYALINSAWQLTLNDTTFKAYYDLKRSQGLNHYGALGHVAHKLTRVIFKLLTSDTPFNPAKLVA

SEQ ID NO: 283253 - protein, 328 aa, unidentified
MKAFIGIDVGKEKLDISWLRDLVKSKKKTKIFKNNPKGYQELVAWLIKNTNLEAQDIVITTEPTGVYSEPLMYFLYEQGFILLHVNPGKAKQYASSLGLVHKTDKSDATMLARYGHDQQHSLLSWQPEPVEARELKVMTRRLEALEQDLRREENRYEAVGFSGASTRVTQSIEDMIAVLKTEMGKLKNDIDEHIDRHPQLKKNRQLLQSIKGVGEVISRMMVSLMACKQFKNAKQLACYLGLIPKLNESGKRAGKTTLSKEGPGYIRAKLYMAAVVAVQHNPDIKAQNKRLVEQGKTKMQAIGAAMRKLTHICFGVVKNQTEYQPQAI

SEQ ID NO: 283254 - protein, 332 aa, unidentified
MGERSQASPADPVSLGIDVAKASFDAALLIHGRLLHRSFAMTAEGFDALHTWLGKQGAERVHACLEATGEYGAALALSRYQARHVVSIVNPARIAASAKSRLARTKTDKADAALIAHFCQTQCPLPWTPPPAEVRELQERVRRVEMLQEMAQQEVNRLHSGLYSAAVRASTEATLTFLRQEIAKMQRLVQEQVERSAELQHKQRLLCSIPGIGRWTAARVLAESDQVRTSVSARQLAAYAGFTPRERTSGTSVRHQARLAKTGNSRLRRALSLPAIVAMRHNPAVRALAERLRARGKRPMVIVGAAMRKLLHLIYGVLKSGKPFDPALAMGT

SEQ ID NO: 283255 - protein, 316 aa, unidentified
MQAQQVFIGVDVAKDSLVSCIHGLAKPQVVANEERAIKGWLKTLAPQAVIGMESTGRYHQSLARLAHQAGLRVYVLNAKDVYFYAKALGARGKTDPGDARVIARYIAEHHAALHAWAPGTAAQLRVQELLQRRARVAVHRASLRQVLAGLEELAPDVLQLEQHFEQLLQHIDDEVQALVASETQLSQGSALLQTICGIGPQGAALLAALFNRIEFANADALVAYSGLDPRPCDSGTRSGRRRLSKRGSPSLRRQLYLAALAATRSKALGPTYRAIRARGFKSTPAVVILARRLLRIAWAVWKSGQPFDAARLQLAP

SEQ ID NO: 283256 - protein, 318 aa, unidentified
MADVHYAGIDVAKDTLELALGADGAVEQFANEPGDHEAIIKRLRHGQVALVVLEASGGYEFALACALQAAGVALALINPRQARDFAKAMGRLAKTDAIDARVLAQLAQVIATHPQRERFVKALADTEQQHLQALVLRRTQLIGMLIAERQRMAISHAVARKSIQMLIGAIRKQLEDIEAQLATHIASHHADVAALLQSIGGVGPATAAMLIAELPELGRLDRRQIAALVGVAPFNRDSGSMRGKRMIGGGRAQVRRSLYMAALVATRFNPVIARFYQRLLAAGKPKKLALVACMRKLLTILNAMVRSGKPWDESLHSA

SEQ ID NO: 283257 - protein, 413 aa, unidentified
MDVLHARCCGLDVHKSSISACILLREAGRVQKHQRRFGAMTQDLRELAEWLRQFGVTQVAMESSGVYWKPVWNILERQFAVVLANAQHIKNVPGRKTDQKDAEWIAQLLQYGLLRPSYIPCEIIRDLRDLTRMRASLSQEASRISSRIQKVLEDANIKLASVATNALGKSGRAMLEDIISGEDDPEHLASLALGHLRVKIPQLRLALEGNIRSHHRFLLRRLLDQMQFVEHEIALLEERLEDIGRQRPELLQAVARWDTIPGIDRVAAWALLAEVGDNMAQFPTAEHLASWAALCPGNHESAGKRLSGATRQGSPWLRRMACQCAWAAARTKNTYLSSQFRRLAARRGKKRAIIAVAHTLIVIGYHLQKNQSNYDDLGGNYFDRIHSDGLKRYLVKRLQQLGHKVTLEPIEAA

SEQ ID NO: 283258 - protein, 456 aa, unidentified
MGRPFLLSGLRARVSSWPPLRLARLRCERVSVGVVPSQRFPIGNGRRKAAEMVRYVGMDVHREFAQLAVVEDGMVRDEGRIGVTPEALRAWAVELRPDDEVALEATGNSDAIATLLTPLVARVVVSNPSKTRAIAEAKVKTDKVDARILAQLLAADFLPPVWLPDDQTRSLRRQVTRRAHLVRQRTRLKNQVHAILARNLAPTPPVSDLFGKAGRYWLLSQPLPVDELSTVRALLRQLDFHGQELAVVDHELAVVAFADPRVARLMTIPGVDAIAGISIVAAVGDFARFDDPDRLVAYVGLNPKVRQSGNSAPVHGRISKAGRAQVRGVLVEAAWSASRAPGPLRAFYQRIKARRGFQTAIVATARKMTVLAWHVINKDQDYAFARPSLVTHKRRKLELAAGAPSRRGNHGTPGAAYNDKQRRNEEKLIAEQAERSYQVFVAHWQNQRPAPSHIRT

SEQ ID NO: 283259 - protein, 347 aa, unidentified
MRFYTKQHKFYCGIDLHARKMYLCILDNTGEVRLHRNINTDREGFLKAIRPFREDIVVAVECMFTWYWIADLCVQEKIPFVLGHALYMKAIHGGKAKNDKIDSRKIAVLLKGGMMPQAYAYPARMRATRDLLRRRNHLMRKRAELYAHIQNTRSQYNLSDPLGRIAKPENREGVAERFEDPSVRNMIAADFAVIAAYDPILAKMERDIIQSAKHHDPVSHALLNTIPGVGRILSLVILYEIENIKRFPTVQDFASYCRLVKCAKESNGKKYGSGGKKIGNAHLKWAFSEAAVLFLKGNEPGKKYLNRIANKHGKGKALSILAHKMGRAVYFMLKNKKPFDQDTFLGL

SEQ ID NO: 283260 - protein, 342 aa, unidentified
MNEYDGRQFVGIDLHRRRSVIVRQSESGEQLSAVRIINDPVALGLEIERAGPNPEVVLEATYGWYWAVDTLQAAGARVHLAHPLGVKGFRYRRVKNDVRDAADLADLLRMNRLPEAWIAPPATRELRELVRYRAKIVAVRSGLKAQVHAVLAKAGVLIPVSDLFGVGGRQRLAKVPLGAAYVQRVISLLELIDALDAHETRFSIMVADKLGGHAGYQAIQQLPGVGPILGAVFVAEIGDVHRFADPAHLCSWAGLTPRHHESDTVVRRGHITKQGSKLVRWAAVEAIQRHPATSKIALDRTRIESRRGKNIAKIAAARKLLTLVYYGLRDGHIRALAPRRAP

SEQ ID NO: 283261 - protein, 344 aa, unidentified
MNNLSRVGVDLAKNIFQLHGIDRTETTIWCRRLKRDNWIKVLLNKVEPGCKIGMEACTGAHHWARLLQAKGFHVKLIAPQFVKPYVKSNKNDANDAEAICEAMSRPGMRFVTVKTIEQQNIQAVHRIRSELVGQHTTKGNQIRGLVAEYGLVAPQRMNHLRAAIPAWLEDAENGLSGRFRRLLDGLWGDLKRLDKRVAEMDKEIALIAQHDPVAKRLQQLRGVGPMIATALIASVGDGKQFANGRQMAASLGLTPKQHSSGGKDRLLGISKRGDAYLRSLLIHGARSVIYAAREKEDRLSQWVMSIASRRHPNVAAVALANKTARMAWAMLRHDTDYHPELAAA

SEQ ID NO: 283262 - protein, 415 aa, unidentified
MTHPKMFYTYVGIDSHKETHTAVFINCFFEKLGEITFRNFPSAFETFLERAQALRPEGTTLMFGMEDCASFGRILAIFLKSKEQNVKHVNALLVACERKNRNITEKSDAVDAECAARVLLSKFGELPDAEPDDKFWVLRSLVARRLLLVRHRAAAKNYLNSLLTHQYPNYRDYFGNVDSKTSLAFLAQYPSPSTLRSTTTEELAAFLEIPSNKRFSTEKANEILDTLADTSVQFQDTRDIVVQSAVRQIEFYMEEIGQLEESIAVFLRKFNCTLTSMAGIDTVTAAQILSCIGDINKFPTPAKLARYAGIAPVSYASGKRDVQFANQRGNRELNSIFFWLAVRLSFPLTSNHLLTNSFFYDYYNRKISEGKTKRQAIKCVERRLVNIVWSMLTNNEEYVNPPLVEATKEKANKGA

SEQ ID NO: 283263 - protein, 339 aa, unidentified
MKLYTGLDLHSSNSYLGIIDETGKRVYKQKLPNDRERILTALNPYKIDIAGIVVESTYNWYWLVDLLMSERYHVHLANPAAIKKYTGLKFADDQHDAFWLAEMLRLGILPEGYIYPKEDRPIRDLLRKRMHLVRLRTSLIVSLQNILSRNNGFKLKTSDVKALTADRVAPYLAGSEDLALAGLVSKESIDFLTRQIKKIETVIENKVELKPPYEKLQSVFGIGKILALTIMLETGPIRRFAKVGNYVSYCRKVSSKWLSNDKVKGKGNKKSGNKYLAWAYSEAAEHARRSYTQARAYYNRKMQKTNFMAAHNALAHKLARAAYYVMRDETIFLPEKIFV

SEQ ID NO: 283264 - protein, 403 aa, unidentified
MNMNAVGIDVSKGKSMVAILRPYGEIVSSPFEIKHTSSNIQSLITRIKSIEGNSRIVMEHTGRYYEPLARQLSLAGLFVTAVNPKLIKDFGAHSLRKVKSDKADAVKIARYTLDSWTELKQYSLMDELRNQLKTMNRQFGFYMKHKTAMKNNLIGILDQTYPGVNTYFDSPAREDGSQKWVDFATTYWHVDCVRKLSLNAFVGHYQKWCKRRMYNFSKDKAEEIYGAAKELVPILPKDDLTKLIVKQSIEQLNTASKTVEELRTLMNDTAAKLPEYPVVMGMKGVGPSLGPQLMAEIGDVTRFTHKGAITAFAGVDPGVNESGTYEQKSVPTSKRGSSSLRKTLFQVMDCLIKTKPQDDPVYAFIDKKRAQGKPYYVYMTAGANKFLRIYYGRVKEYLMSLPE

SEQ ID NO: 283265 - protein, 418 aa, unidentified
MVDPLQIYLWRYTMLNAVGIDVSKGKSTVSVLRPAGEVVRKPFNVPHSAKGLAELISYVRSLDGETKVVMETTGHYHEPVLNAFLDAGIFVTAVNPTLIKNHDSDENPLRKVKSDPADARKIAKYTLDKWEYLRQHSAMDTTRVKLKTLNTQFHFFMQQKVSLKNNLISLLDLTYPGANSLFDSPVRTDGSEKWVDYVHSFWHVDCVRKIGLKAFTERYQNFCKHHGYNFQPGKPAELFSAAKELVAIVPKDPVYKQLILSNIEQLDTISKQIEEFRRTMNELASTLPEYATVMSMYGVGPTYGPQLMAEIGDISRFDHRSAITAFAGVDPGVDQSGTVNHESNRASKHGSPRLRKTLFQIMTTLLQLAPADDPVYLFMMKKKSEGKPYQVYMTAGANKFLRIYYGKVKECLAAQSTE

SEQ ID NO: 283266 - protein, 405 aa, unidentified
MSELEKDLVFAGVDTHKDTHTLCLLDHMGRAIGTFGFAADAKGYDALAGKIGGPATCVGVGVEGTGSYGAGLTRRLLELGYCVYEVMVPGRARRKPGRPKSDPADAEVAARQVLARANLSKPKDQSGWTEELRQLMIARDRLVQATSAMINAAKSLIVTAPEDLRRSLEGLSRKNLRSALSTLDPAAGGIILALGSLGKAWDLQDREADAIEERMKRVLEANAPALLAIYGCGTVSAAALAVAGGGNPERLRSEAEFASPCGVAPLLASSGKTERHRLNRGGDRRANRALYQIAVTRMSYDQRTKDYVGKRKRDGKSKKEAIRCLKRYIAREVFRALRNPLEIKGPSWKDLRPARQALGITLVEAGKALNVGFQRVSYAETGRLMNVRFLEEYDAWLKSQAKRES

SEQ ID NO: 283267 - protein, 374 aa, unidentified
MNTTAGLSIVGVDLAKSVFQLAVADSTWHVVEHHRLTRTQFERWFANRAVGLVVMEACGSAHHWARWLGGLGVEVKLLPAQYVSAYVKRNKTDAADAAALLEAARSAEIVPVRVKLVEQQAWQGLHRTRSLWMGTRTSRINALRGFCREFGLLVRQGARTGVEAISRVLADPNSPVPGLIRGSMKLLVEEIHLLEARIAQLERELTEVAKHSPACTTLLSIPGVGLLTATAMVAATGGQVSHFKDARHFASWFGLTPREFSSGSTRVLGRISKCGDRYLRMLLTHGARSVLRAASTARQAGRSLDGLRTWATAVQARTNHNKAACALANKMARIRYATLRDATPYGQPGAQAAAQDPTLGVCCGRVMACKETTS

SEQ ID NO: 283268 - protein, 436 aa, unidentified
MEEVTDEPLYRDRVCGIDIGKAGMAVTIRVPSETNPARRAAETREFATTKRGVLALADWLRCWQVPAVVMEATSDYWKPVFYRLEAEGFECVLADAKQVRHLPGRPKRDTSDSAWLAACFERGAIRSCFVATPEFRIIRLHTRYRRDLTDERTREKNRTEKLLESAAIKLSSVVTDLHGVTGRDIMDHLIAGERNPRVLAQLARARARRKITELEHALDGAEFFTDDHAALLTTMLERIDRVNAEIARLSEVIERLLAPYEEQLQQAESMPGWGRRSAQDAVAETGVDMTKFPTGGHLSSWAGKTPLDHQSGKRAGRARHKKGNRYLAAVTGETAVSAGKTATREGARYRKLARRRGKAKAQVALGNTQLKVYHKLLSSPGMRYQDLGPDYYERQAAIRRKIAYHVREIEALGLDVTLTRPAPEPGPDAPGNTQAA

SEQ ID NO: 283269 - protein, 420 aa, unidentified
MSKQNVELAAFIGLDWADQTHVVTLQEAGGDRRRENFTLDQTPEALQTWIHQLRIRFGGRPVAIAVEQVRGALIYALMHVEFLHIYPVNPQTLAKMRQAFYPSGAKDDPRDADLLLEVLLTHRQHLRVWVPDDVLTRSIQLLTEGRRHLVDERTALTNQLTAALKTYFPQALDWFGDMHTARACAFLHRWPSLQQLKRASSSSIRKFYQSQGYRGHDKLEQLLGNIKQAQPLTEDGAVLLASTMMVQALVTQIPSLTESIERYDQQIASRFAQHDDSTLFGSFPGAGPALSPRLLAAFGSDRNRFEFAAEMQQLSGIAPVTEKSGKSCWIHWRLACSKFLRQIFHEFAGQSILGSVWARAYYDHQRQRGKSHHAAVRALAFKWIRIIFRCWKNRTLYDETLYCKSLQLRGSSLAVALTTK

SEQ ID NO: 283270 - protein, 395 aa, unidentified
MRFAGIDIASETHVLAIVDGDGEVEVKATPFGEDAAGYEKALGLLGTPGEVLVAMEATGHYWKNVFAALAAVGHRVALLNPLRTRRFADEDLERTKTDAIDALGIARFAAQKRPTPTHLPDSAAEELRELVRLRERLLQDFGDRVRQLHRLVDLGFPEFTRYVRGLDSELASAILHDYPTAAAFHGASVKRLAALRYDGRHPVGLDLARTLIDAARRSVGHHHGAAYRVQVRYACQDLDILRRRLRELDHDIEGKLREHEVGRLLTTIDGIGTNTAAFVIAEVGDPAAHFRSASALAAYVGAIPGLKQSGRHTASRAALTPIGNARLRKALWMPTLTAVRYNAWLRSHYQRLRARGKLPKVALIACMHKLLLAIYSVAKHRKPFVPQLAAAETAR

SEQ ID NO: 283271 - protein, 306 aa, unidentified
MGEVSTIGVDIAKSVFQVHAVDTDGTVVICKRFGRTKILKFFADLPPCLVGMEACATSHQWARELKRLGHEVRLMPPTYVKAYVKRSKNDAADAAAICEAVTRPSMRFVPIKSAEQQSALMLHRTRDLLIRQRTQLINALRAHLAELGLVAAKGREGLHQLVTIVMESCDEKLLSGARFACQAIVMQLHAAQTQINGLDKRIVQAHRVNADSKRLDAIPGFGVILSTAVVATMTDPKAFKTGREFAAWIGLVPRQNSTGGKERLGSISKQGDRYLRRLFVVGAIAIVRTARMRPEKYPWVIKLQRR

SEQ ID NO: 283272 - protein, 337 aa, unidentified
MQKQFSIGLDCHQATISGAILDQNGRIIIEKRFDNKAQELEKFVAPYSLGAQVVIEASSTSLPIYDQLTGLGIQTLVANPLRLRAISTASVKNDRNDALILAKLLHANIVPTSYVPPRHIRELRDMTRSYTTLVQQRTQAKNRIRSVLTRNRLRWPNTNIASEPARVWLAVLPVDPGSKGVIAANLAVIDSLQTEIKKIKQAMLKWKYCREELELLQTIPGFGPLVSRVFISEVGEITRFPSTKKLSCFAGLVPGLRASGEQSHATSIIKASNSALRYAIVMAAWPAIKNDPQLRARYDRLKARGKSSGKAIVAIAHHLLCIAYVMLTKRTPYRVRV

SEQ ID NO: 283273 - protein, 356 aa, unidentified
MSRDTKYIGMDVHKEAIVIAVLNDSGKLVMESIVETQASSILQFIYGLRGELHVTWEEGTWAAWLYDLLKPHVHEVLVCNPRRNALLKEGSKSDKVDARKLADLLRTGMLRPVYHGENGLRTLRELARSYQTISKDLNRVMNRLKALYRGWGIACSGTQVYAARYREEWLHKIPHAGVHRRAEVLYQQLDGLQALRRTLRPELLAESRKHKAAKLLRQIPCIGPIRAARLLALMQTPHRFRSKRQLWTYSGLGIETHESAQYRYVRGQLQRSKKPQQIRGLNQNHNHEMKEIFKSAATRASCGVGPLRDFYVALLDKGMRPEMARLTLARKIAAIALTLWKKEERFDAEQLKPQAA

SEQ ID NO: 283274 - protein, 298 aa, unidentified
MTAFVGIDIASQKFDVAVLYGKNSYKCSSFPNSTQGFIAFTNWLQVYGEVHICMEATGAYSTPLATFLDEISVPVSVENPARIHAFAQSELTRNKTDKSDAKMIARYCRLYHPPLWKPAPLYIRQLLSLMSRLDNLKEMLRMEQNRLLTADVIITVSLQENINSLSRQIVVIQQAVKEHINANKELKKNKALLTSIPGVGDILSCMFLAYVGDVSKFSNNKKLVAWVGLNPMQQESGLWKGRSKISKKGNIELRKALYMPAVAALTHNPILIDLKNRLKVKNKSGKRIVCAGMKNYCN

SEQ ID NO: 283275 - protein, 387 aa, unidentified
MARKRTLSTLDTSIAYEAVGLDLAKTDVALAAFDSDHKEPYLIDRIPYDKLYELLADMAPTLVAMEPCSGAHQIAEQIQELGHEVMMISGRHVQAWVKDHCNGQKTDLNDAFAILNLAYDRWLTPIRGKTREECRLLALQASYRQLKGQRTKTMVHVKATLHAWGFPIRAGSFNQKALHELIDANREAFGDEVVETLHLMINRVHDLDHDIATVLKLLTEATQRDPRASLLRSIPGFGVLTTSRWCAVVGDIARFDSPKQTMAFIGLVPNNRITGHHTETSSGREARGQGKMSKRGDKMLRSLCILGAGALCLMVRNDRLPDCPFVASIKERLTSPRPWFKVLVYVAAKLVRIATALLKYGETFSFEKAGISKAVLKQWELEQAKAA

SEQ ID NO: 283276 - protein, 409 aa, unidentified
MPDYELYVGIDWATQHHQVCCVDGRGQRRDERAVPHSGTGLAGLVQHLLSLVASAPRIAVAIEVPRGTIVDTLLERGCHVFALNPKQLDRFRDRHTVAGAKDDRRDAFVLADALRTDQGAFRRLDVEAPGVIQLREWSRLHGELVEEQGRLTNRLREQLWRFYPQALTLCAAADEPWLWALLEAAPTPAQGQRLTRSAVAALLARQRIRRLSADDVVSALRAPAVHVAPGTVQAASEHIGLLLPRLSLVHEQRRRCEHRLDALLEAAAQGGEDQRVEHRDVTILRSLPGVGRVVAATMLAEASRPLAVRDYQTLRAHAGVAPVTRQSGKARHVVMRRSCNARLRTAVFNWARNSIRLDPCCRAHYDRLRQRHGHARALRGVADRLLGVLVAMLTTRTLYDRQRRVVAAA

SEQ ID NO: 283277 - protein, 354 aa, unidentified
MFVAGIDAHTRYVVVVVVNKTGERVLGPVRVNVDAPERLVALLAPYRPLEAVVETSSSWPWLDETLSAVGVRFVLAHAKRLRAIAEANYKRDGVDAELLARMRLAGLIPEVYATPAGQREWATLIRHRTTLVAQRTGLVNRIHAQLHARGLYVERGWLLTRAGREWLRTTAGPRLAAEQRALVRSHRRVIARLTPLIRALDRHIAQVAATIPEAHLLRTIPGIGPHRALVICAEVLPVTRFRTPGHLAGYAGLLPTSRQTGERPVRHGPIPAGANRWLRGALVRAVVAHVRAAPTSWLSGYYATQKARLGWPVARVATARKLARAVHAMLRTQQPWRDDPARGELHRTHAAATA

SEQ ID NO: 283278 - protein, 379 aa, unidentified
MQTIIKQCVGIDISKGSFTACVCRKLLSGEALLSSVESFENNKTGYNQFVKWNRKITIPSVEVLYLMEATGIYYEGIAYHLHKLKQSLCVILPNKVKHYAKSLNIKTKTDMVDARIIAQMGAERNLPLWQPPLPVLKQLRDLTRLYTDLKNERTVYLNRLDSEKASAIALPFVIKSNLLILKELEKQIKQCEKEIEKTIMSEEWLAEKVNKLITINGVGLITLAIVIAETQGFALVSSRKQLASYAGYDVVQVESGTSVKGKTHISKKGNSRIRAALHFPALTASRYNQELKEDYQRINIAKPSKMVGATALQRKLLLLIYTLWKNNDVFRTSGDQQTKLLLRRNEVPKKVGNPKELPTQDELPDDLSTKVLLRQLQRS

SEQ ID NO: 283279 - protein, 339 aa, unidentified
MKLYGAIDLHSNNNVTVLIDEQDQVVYQKRLPNDLPLIAQQLSGYRDRLQGIVVESTYNWYWLVDGLMDQGHKVHLANTAAIQQYEGLKYTDDHSDARWLAHILRLGVLPQGYIYPKEERAVRDLLRKRGQMVRQRTTNLLSIQNLITRNTGSSIRSNRIKTLDAEQVDDLLPNPDLALAVKANLAMIKCANGQIEILERTVTERIKLRAAFSFLKTVPGIGQILALTIMLETAEIQRFPTVGDYASYCRCVGSQKLSNGKKKGSGNTKNGNKDLAWAFVEAANFAIRYNARIKSFYQRKKAKSHGVLAIKAVAHKLCRACYYIVKNRVAFDIAKAFAG

SEQ ID NO: 283280 - protein, 434 aa, unidentified
MRIIHQRCCALDVHKKVLTACVLVWDGKQAVAERRKNFGTTKKELERLRFRLLACRVTIVAMESAGVYWKPVWHVLERQSKFQLKLVNAQHYHGVDGRKSDQIDAAWLAELLQCGLLKGSFVPAQWQRELRDLVRLRVALREDQNRVQNRIEKLLEDANIKIGSFCSDTLGVSGRKMLKALIAGDKDADWMADYAQGRLRSKRKQLRQALRGFVTDHHRALLAMLLRQIENLDADLARLEGAIRSRLGEHAELIERLTEIPGFGEVTAWTVIAELGVEMAVFQTPERAASWCGLCPGNRKSAGKRGHGRTRQGNRWIRRGLTQAALAASHSKDCYLRSFYWRKASKRGAGQNGSLSLITLSQSRGAVQPAACSKTRQLSPPRNPVDRRGSPYLASRLRERPTSPARSREPAHARKLFAREPGDLRNALLHRAGR

SEQ ID NO: 283281 - protein, 421 aa, unidentified
MKGLKAKMVKMVREGTLIATVDIGLTSNTGYCTTLDGRDIKSFRFDNIKEGFEKFWHMIVASKKRFGCDEVLVGYESTGPYAEPLVHYLANKPVKIVQVNPMHTKKMKEVNDNSPLKTDDKDPRVIADIIRLGRALTIVVPEGDSANLRRLNNARERHVGEQTALLNQLQQLVFIIFPEFKTVLKNMKGKTAQHILKRYTTPERIGTLSKEALGEEMRKRSMGKFGIKDAESLIALARETVGIKEGLAGLFMDIRHILTQLEAEARFISEIEAEMGATLERIPCSVKLLSIKGLGTVSVAGLIGEVGDFSKFSTQSEIMKLAGLDLYEISSGRRKGQRRISKRGRSLLRKILFYAAIQMIRKNGIMYDYYTRLTGRGMEKMRALIAVSRKLLRIIHAILRDNRDYVGGYQAPQRMVIKKAA

SEQ ID NO: 283282 - protein, 587 aa, unidentified
MTSSMTTSTRPAVTGIGVGIDTARYGHRVAFLRDDRQPAAPSITITENDEGFQQLRQQLQQLLSKHPHAHFYVHLDAAGQYATNLEKFIRRLELPITFSVGEPKRNKDYHKAFFPKQTTDDTESQAMARFGVVEQPRPTLEVPDEFVALREIASRLQGQIRDTTRAINRLHNVLARVFPELAMLVKNLATEWLITLLKKYPTPERLAAARLSSIEKIPYLKAALAKKVWTAAQKTIGSLRGELAEQLVIECVEQLTHSRKSEKRLETLLQQAFETLPTSGHIHIASIPGIGPMTAAVLVAKMVSIERFETPENLVGYFGVFPQEETSGVDRLGKKIPPGTMRMSTKGSDLVRRYLFNAAKSAIQHNPAVRDLYARLRAKGARGDVALGHCMRKLLHQVFGVWASNEPFDENKSMSRHLPLPEAVTTISPTEEPSAPSETKTAAGHKRDILPEKKVVTAATVSVATSPASVNQTATESTEAVDYAYLREQITIEQVLSHLGYLDRLRGGEQRRGPCPLHDSADKGKRDFSVNLRRSVFRCFHQECAKEGNVLDFWAAVHNMPLHEAAMHLAKTFHLQIKPEQRRGTRT

SEQ ID NO: 283283 - protein, 387 aa, unidentified
MPQPNDLSRSLVALDQDSTIIAVVEMSQSSWLVGGVLPGIERQPCKKLEPSAERLLGLLHRWRDEAVRAGKKITRIALAFEAGRDGFWLARWLSARGVEAHVIHPSSVAVSREHRRAKTDRLDTELLKRGFLGWLRGERGHCSMARVPTIAEEDAKRPNRERECLVGERTRIVNRMKGSLARLGIRNFKPTLRKAAERLATLQTPEGSPLPPNVSAELQRDMARLRFVISQIREIEEARQKRLEQEPETGSHAMVRRLARVVGVGIETADMLVHEVLSRPIRDRKAVARYAGLTGSPDESGAKRREQGLARAGNARVRRGMIQLAWRFLLFQKESALARWYRARTADSRVGTRKTMIVALARKLLIALWRFVTTGETLEGVILRPAG

SEQ ID NO: 283284 - protein, 421 aa, unidentified
MRKADTRKVKFVKDDTLIVAIDVGMEMNHGYCTRPDGRDIKPFKFDNTREGMDKLWGMVMASKNRFKCNEVIIGYESTGPYGEPLVHYLMKKQVMMVQVNPMHTKRVKEISDNSPLKTDDKDPRVIADIIKLGRTLSIVIPEGDAAYLRRLNNSRERYVKERTALVNQLQQLVFLLFPEFKKVLKNIKCRTPLYLLKKYPTPESISILETPVLGEEMRKKSRGKFREHHADTLINLAKNTVGIREGVLGLSMDIRHILVQLEMLKSLITEIENEMEIALGRIPYSSKLLSIKGLGIVSVAGIIGEIGDFKKFQTRGEIMKLAGLDLYEISSGKMKGRRRISKRGRSLLRKILYYAAIQAIRKNGILYDYYTRLTDRGMKRMMALVAVSRKLLGIIYAIVRDDSEYLVNFESIKRQVIKKAA

SEQ ID NO: 283285 - protein, 324 aa, unidentified
MSKIKEFFGIDISKDVFDVVDASEKHHQFKNDLSGFKAFGKLLNGNTHCIMEATGSYYQGLATWLFSQSFEVSVVNPLSVKRFIQMRLKTSKTDKLDAQMIRMYGESEQPKLWTPPSKLIIEATELHKLIELLVRQRAGLKNRLHALESKGITRSLVLTTVRRQIRNLSKEITELEIKLESVIKEYEPDLLTRLCSIPGVGRRTAIYLIVLTQGFEKFESSRQLISYFGLNPIIRESGSSIRGKSRISKTGDNQVRKLLFMCAFTACEHNKACREIYQRLTRKGKSKKLALIAVANKLLKQSLAIAKSGLYYDENYRSVNVNLG

SEQ ID NO: 283286 - protein, 414 aa, unidentified
MLKIVYRVCCGMDVHKSFVVACIASTTEYGVTTYKSKRFSTFTGDLRRCAAWLAENSCKDVCMESTGKYWIPIYNILEPTCNIVLAHPKYVKAIRGKKTDKRDAKWIADIFKHDLVAGSFIPPADIRQLRDLVRYRWKLTNFTTGEKNRAQNCLTVSNIKLDDVFSDVFGKTSSAITTRILENPAEKITDVSGFRTKGMKATNEQVLAAVDGEMCEEQAEKLRIIRSHMDSLQLCKLDLESLILATAEKYLPQLGLVMTVPGIQSFTAIGIISEIGVDMSVFPTSKHLCSWAGLTPQNNESAGKKKTTRISRAGAYIKPLLVQCALNAVRAKKFPEVRNRYLALKKRRGHKKAIIAIARMLLTAIYNILKKNESYNPELYRQTDRPPAHREVSVAEAIFILQRQGYLVAAPPTP

SEQ ID NO: 283287 - protein, 407 aa, unidentified
MTDYTTRYIGLDVHNYLIALGVDENLEVVLPARRVELSHLEAWMKKTLTRQDAVVLEMTTNTWQLYDELSAHAGSVTVVHPPHVALITRAQVMNDKIAASILARLLAKGLLVGIWVPPQEIREMRGLVAQRQKMTQLATQAKNRLHAVIQRHHLQPPAGNPFSKSQNEWWQALQLGPLEKLNLQTDLETMQFAEKQEARATEEMDKLAAENEPISRLLHVSGFGVVTAVTVWAAIGDIRRFADAKHLVGYAGLGARVHDSGLTTRTGRITKAGRRDLRVALVEAAQIAANTHPHWKAELARLEPRLGRNKAIVAIARKLLVATWHILADKTADRFAQPEAVAQKMLRFAYAVGKEYRAGKTAAQFARERLDVLNIGQELTSIPWGAKKPIPLPPSARLKKESAVPNK

SEQ ID NO: 283288 - protein, 370 aa, unidentified
MKETITSFVGLDVHKNSVAIAVAEAGREAARFVGTVAPSMSTLCKALRRVCEAERTLVVYEAGPCGYGWARHLRAHGWRCEIIAPARIARSPAEQRIKTDRRDALLLARESRAGNLISVVMPDTRDEAIRDLSRTREDACVTRLRARQQLKAMLLRHGHAYQGKTSWTAAHERHLSTIRFEHPAQQIAFEEYRQAVKQAHERLERLTEQLREQCAHWRMNPLVKALMCLRGIDFVAAVTFVAEVGDPRRFAHPRELMGYLGLVPSEYSSGQTRHQGPITKTGNKHARRILVEAAWNYRHTARVSRVLEVRQQGQPRAAREVAWRAQLRLSKRFRHLSARRLPQNKVCVAIARELAGFIWDIARQLNPARV

SEQ ID NO: 283289 - protein, 338 aa, unidentified
MNFIGLDAHSSSCTMCVTDARGREIENITFETNGKSIKNYLRSIEGTKKLTFEECELSRWLYGVINPEVDELIICNPAANAQYKKAKTDKLDARKLAKLLRGEFLTPVFQDGSERERLRNLMSSYQDIVEEGVRLKNRYKSLYRKTGKRIKGTVMYNDESLLEGLSRDDDRFIGEHMFKLLTSLEQTRQDYIKEISRCSKSFKEIKYIKSIPGIGDIQAAKIVSQVVNPSRFESKYKFYSYCGLVRHIQESADKKYGSKRGWGNLTLKCVYKMAGQSVLKGTSRLRIYYDALRKRGLSHDNASNAVSRKIAAIILSVWKHSKRYDESMIPIPNVTINE

SEQ ID NO: 283290 - protein, 344 aa, unidentified
MEITTVGLDLAKNVFQVHAIDSTGGVVVRRSLRRAQVMPFFRKLSPCLIGMEACGTSHHWARELVGLGHEVRLMPPAYVKPYVKRGKTDAGDAEAICEAVTRPSMRFVPIKSVEQQAALALHRTRDLLARQRTQLVNMIRGLLAEFGIDIPKGITNALAFVRRAVAGEANEVPDLATTVIAALAEQAIEVQCRIRQLERDLLASFRSNDLARRIATVPGVGVLGATAIAATVTDPTQFRSGRQFAAWLGLTPLNNSSGGKERLGRISKMGDQYLRRLLVTGMTSLVRRNRHYPNSADPRINALLARKPPRLVTVAMANRAARAIWAIMVRGEIYRMPALGSAVA

SEQ ID NO: 283291 - protein, 419 aa, unidentified
MEQSTRFIGMDVHKETIVVAVTATGDVGKATPYGTFPNTAAALENLIKRLRQAGSGPLKFCYEAGPCGYGVHRSLTRLGEDCMVVAPSMIPRKSGERQKNDKRDAANLAVLHRGGLLTAVWVPDAAHEAMRDLIRTRLAAVRALRTARQQLSAFLLRHERIYPNGRKAWTKAHRGWLADQSFAHPTQQIVLEESIEVVRLGEQRRDRVEGHLRAQIPAWSLFPLVHNLSALRGLDTIASAGLAAAIGDPSRFASAPDFMAYVGLVPSEHSTGRKRRIGAITKAGDIHARTLLIEAAHSYRFPARVARHKLAAVDAVPEAVREIAWKAQTRLCLRYRHMMAKGKLRQVVVTAIARELAGFVWSIACITTDPPAKSVTVTMASEEICPPESTGPLSHAAPPATESRGRRAGRPEQSPYRSG

SEQ ID NO: 283292 - protein, 388 aa, unidentified
MEARLVDTTSTARNDAPARCLIAIELSKASWVVGVQTPLSNKTSQYRLTAGDWKSLLKLIERIRRQVGGELGRPVEMLSCYEAGYDGFWLHRLLEAHGVRNHVLDPASLLVNRRARRAKTDRIDVERMLRALGRYLRGEPDACSVVRVPSVEQEDARRLHRERHRLIRERVQHVNRIKGLCATQGIYDYEPLRSDRKAQLEGLRTGDGRALPARLKAEIIRELHRLELVLKMVAEIEAERDAIVTEAAPQHLNAGKIKALANLKSIGPEFATTLVGEVFYRSFDNRRQVGSYPGLAPSPFSSGSTDRDQGISKAGNPKARSTMIELAWMWLRYQPDSTLSIWFRQRVGDRKGRVRRIAIVALARKLLVALWRYLETGLVPAGAVFKTR

SEQ ID NO: 283293 - protein, 335 aa, unidentified
MLILGVDVAKVQIAAAVWQDGRGHALGSFANTPAGWDALATHLPAPMAADPAQVTLVLEPTGGYELGLALWAYRRGWLVRRPNPRHVRDWAKSQGRRAKTDAQDAQVLAQYGAQVPSPLWQPLPAAVSDLEQLVHRRDEVEALLQRERARRDQVAARPEMPSAVRQSIERLLEALEHERGELEQAIADHLRQHPELAAARTRLLAVPGVGARNVLPLLVLLARWQAQTGGCGTVKGLVAYAGLDPQPYQSGTSVQRHATISRMGERLLRSRLYMGALGALRGHNPVRSFYDHLVSRGKAKKLALVAAARKILVWAWAVFHSGAPFDAAKATARAA

SEQ ID NO: 283294 - protein, 315 aa, unidentified
MVNGKALSHYCIGNNTKDIKSTVSKIMKDLGGSFDDTIFCMEHTGLYNLPIVRWLHKNQGKMWLESGVHIRRTLGLVRGKNDKVDSSRIAMFAYTNRHQVKLWAPPRHVIERIGALLSQRSRLVKAKKQLSTANKEQKKFLDKDIMHSLNKYTNRAITVIEKQVEAIENEIISLIKDDDRLKRMYQIITSINGIGLVTASYILVTTNEFININDPKKYACYSGVVPFEHTSGTSVRGRNRVSHIANKSIKTLLHLAAISTLNTPGEIQDYYNRKIAEGKNKMSIINAIRNKLILRIFACIKQNREYEKNYCYKLA

SEQ ID NO: 283295 - protein, 343 aa, unidentified
MNVFIGLDVSLASTAICVLGPQGKVVEELEAASEPEALVRAMASLPYAVEAIGLEAGPLSQWLSKGMEEAGFDVVLMETRLVKAALKAMPIKTDRRDAQGIARLLQMGWYRPVHRKSVSSQEIRALLTARKSVQQVIINLELSMRGVLRNFGLKLGHVTRIRYEARVRELVEQNEILSASTEALLRARAQLRAELAELDATIADLAKQDDVCRLMMTMPGVGRIVALTVKSAIDDPTRFARSKDVGPWVGLTPRRTQSGEMDIVGQITRAGDRALRTALYQAAMILMHRGSPNWLQAWALRVAHRRGSKRALIALARRIGVVLHRMWRDGTPFRHVQSSPATV

SEQ ID NO: 283296 - protein, 343 aa, unidentified
MNEYDGEQFVGIDLHRRHSVIVRQTSTGERLSAVRIVNDPDSLALQLEEAGEHPDVVLEATYGWYWAVDALQAAGATVHLAHPLGVKGFRYRRVKNDVRDAGDLADLLRMNRLPEAWIAPPPTRELRELVRYRAKLVALRSGLKAQAHAVLAKAGVLIAVSDLFGVEGRQRLARVPLGAAYAQRMSSLLELIDVLDTHERRFAEQIAAKLHDDRGYGAIQQLPGVGPVLGAVFVAEIGDVHRFADPSHLCSWAGLTPQHRESDTVVHRGHITKQGSKLVRWAAVEAIQRQPAGTKISVDRKRIEARRGKNIAKVAAARKLLTLVYYGLRDGHIRALTHQPAAA

SEQ ID NO: 283297 - protein, 310 aa, unidentified
MDKNIVGIDVSKDRLDVEVRPSRETFFVGRNAIGLEKLVTRMRELSPHLIALEATGGFETVVAAALGAAGLPVVVVNPAQVRAFAKAIGQRAKTDPIDAGVIAHFAEATNLEPRPLPDEQTRLLADLVGRRRQIVAMIGAERQREQRLTAPRPRKSIARLIKALEKELASLDADIDDAMKGSPAWRAKEELLTSVPGVGPVITRTLVAELPELGQLSHKQITALVGLAPFTRQSGKWRGKSFIGGGRTAVRAALFMGAMVAKKHNPILKAFFDRLVAAGKPKMVALIAVARKLLTILNAIVRDNRPWQTA

SEQ ID NO: 283298 - protein, 401 aa, unidentified
MEGPIISIDVSNGCSHFRCFIDRNKAFGKVHKIKHDVDGFQYLLDCMERLNEKTNEEVCVVYEATGVYTKPLTRFLNKHKVRHYMVNPLQAAKMRKTDLHSKKTDKNDPNSIAKVYYDKDLYEYADEEPIYHTLRVMNRNYEDQLDHLRKYKVTFQNILCIVFPGYGSLFKNPYCDIALAILKKYPHPDMIRNKKPETVANYIEKHTCHHKDSCLKWAVKVIEYANKTYPGCDKDEIEVIELLRIIKELEVCIASCDTQLNEMVQLAEQLPNYFLVLSIDGIGPNLACRILAEIGDIKRFGNTKQLISYAGIDPHISQSGDVDGLHLSISKKGNKRLRCLLYLAVTCNLRLKKENDPIQQFYKKKKQQSAPLKPKAARVACTNKLLRIIYGMCNNGCSYQK

SEQ ID NO: 283299 - protein, 354 aa, unidentified
MKRTTKHVGLDVHQATTVTSVREDSGRVIARSVLPTEGALLREYFRGMRGTIRVAFEEGTQAQWLYDLLEPEVDHIVVCNRRGDSTSGSKADQADADELSDLLRCNRLRPVYHGSAERRTLGELSRAYQNLVEDGTRLMNRLKALFRARGLKTSGRQLYEPARRAEWLGQLSEPGARVRAETLWAQLRTVQELRPAVKRAMITEAQRDASWAVLRRIPFLGPVRVAQLLATVKTPWRFRTKRQLWAYAGLAVVTRTSAQYEFRDARPVRRQRAALTRGLNRNHNRGVKHLFKSAATSAAARDSGLRAWYEARLAQGMREEMARLTLARKLAALTLRLWKTGEHYDSTKLSVQAR

SEQ ID NO: 283300 - protein, 313 aa, unidentified
MKEEKTFIGIDVSKEKLDVGVRPQVDFMTFANTEDGISLLTDFVKSKQPELIVLEATGGLEMAALRSLVVARLPAVCVNPRQVRDFAKAMGVLAKTDKIDAHVIARFADSVRPEIRPLKTEETEMLDAFNTRRSQIIIMLTAEKNRLTTASKWTKKDVEKSIKGLEKALAKINREVENLIKKSPHWRHMDKILQSVPSVGPVMSLTILADLPEIGTMNRRQIAALVGVAPLNRDSGKYKGRRAIWGGRARIRSVLYMCVISGICHNPKIKAFYNRLISSGKKHKVAITACMRKLMIILNTMIKNGTCWNESGC

SEQ ID NO: 283301 - protein, 322 aa, unidentified
MQGKITSVRADEAVYVGIDVCKAWLDVYVHPTGQTFRFANSKEGIAQLRKELDGASVALVVMEATGKLHRLAQRSLSQAGYAVAAVNPSRPREFAKSIGQLAKTDRIDARLLALYGARLSPEARAIPARKMVELQELVLARQAVKADETALRNRYGAAESPVLKRLLKRQLTACARAVAELEAAIAVLTGSDPALKSRYDILLSIKGIGPTVAATLAACLPELGLLPAAKAAALAGVAPFNDDSGNSKGQRRIQGGRAHVRTALYMAAVSAARCNPDMKAFYAGLRARGKEAKLALTAVMRKLVVLASALIRENRTWTEKHA

SEQ ID NO: 283302 - protein, 412 aa, unidentified
METLIERCCGLDVHKATVQACVRLLDERRKFTGEVRSFTTMTADLLALGDWLASLGVTHVAMESTGVYWKPIWNLLEDRFTLMLVNARHIKNVPGRKTDVLDCQWIAQLLQHGLLRGSLVPNRSIREARELTRHRTQLTAEKARVANRIQKVLEDANIKLAAVASDILGKSCRAMLAALIAGVTDPQQLAGMALGRLQRKHERLVAAAQGEVREHHRFMLQLLLDHLASLEALIARLEARIDQVLTPFGEQIERLNSIPGVNLRSAQSLIAETGGDIDAFPSAAHLCSWAGVCPGNHESAGKRKKGSTRPGNRWLRATLTQCAWAASHTKNTYLAAQYRRLATRRGRKRALLAVGRSILTILYEMLKHETSFKELGGDWFDRQHPQRLERYYTKRLETLGYKVTLEPNRPAA

SEQ ID NO: 283303 - protein, 363 aa, unidentified
MIIIGVDFHPSMQEIAFLDQETGEYVERQLNHSDGEAEKFYREMAARGVRVRVGMEATGYSRWLERLLAELGIEVWIGDAAKIKAKRVRKQKNDREDARLMLRLLRENNFPRIWVPTPENRDLRQLLWHRHRLVQMRTRIMNQLQAVAMNEGYRWKKKLFSQQGRALLEKLSLAPWASRRRKELLELLDQLDPKIRELTAAAQQEAQQRPEVLRLMTHPGVGPITGLAYVQVIGTPDRFSCGKQIGSYLGLIPCEASSAGKQRLGHISKQGNILLRYLLGEASQAAARCNPDWRRRYMHLAMRRHKNIAKAAMARKLGVRLYWMWRKGWDYSQLVSFGSHAGKLATGHGVKSSVVHMIGHPAP

SEQ ID NO: 283304 - protein, 427 aa, unidentified
MKVIYPKACGVDVHKSFIVAVICDSTGQTTKYSKKRFSTFNNSLIEFRNWLLENDCQNVCMESTGKYYIPVYNALEGHISNVVVANPKWVAVIKGEKDDNKDAKWIADLFKLGIVRSSFIPPKDFRILREFTRYLYKLTCNRTSEKNRYTNALTVGNCKLDMVFSDIFGKSSQSIVDIIMNNDNFSDENIISCLHKHCKSSHEDILSSVNGITFTNEQKLRINIIKEHIDYLTNQINSLRDIVDNLITPYEDYITLLMTIPGIDRYSAITILSEISNDMSQFSNHYRLSAWAGLAPGCNESAGKKKSVKISRAGVYLKPCLVEVAHCAVKDKANTYYANKFNKISKRRGKKRAYIAIARKILVAIYHMLSTGEVWNPSDLASNETDDKDRIKYTKNNFNQSLKQLLSLGLTSDELISIINQNAKLDS

SEQ ID NO: 283305 - protein, 453 aa, unidentified
MKKADQSNAPGESFKRKIFSQGLPVFHPYAAGIDVGDTIYDVAISNGGTGHEVREYPTFTEDTTNLVDWLVSEGITTVAMESTGVYWLNLYLMLEEAGIEPYLVNAKHAKNVAGRKKDDTDAIWLQKLHSCGLLQKSFQPEAEMRVLRSYVRQRKNLIRISSDSVRRMQKAMELMNIKLHTVISDILGKTGLQMVNAIVNGERDPNELVKLKDPRIKASEEDLKKSLTGIWKKEYLFMLKQAYDEYLFYQAQITACEEMIKEQLLNQAAKILDGDLTDIQLKKKPKKNQFSFEIQSLLKVIVGVDLCEVDGINEVSCLELISEIGTDMSKWNSGKHLSAWLNLAPNTKITGGKIISSKMQKKKNHAGQTLRMSASGLSKCKSPMGDYARKMKSRLGKTAAVPAIAHKLAIIVYTMIKEKRPYNHKIMANNQEIWKEKRIRYLEKQLNQLKCAV

SEQ ID NO: 283306 - protein, 355 aa, unidentified
MDSIKYVGMDVHKETVSIAVRNQAGKIVMETVIETRANAILDCIRGMRGELHITFEEGTWAAWLYDLLHPHVARVVVCDPRRNALLTEGNKGDKVDAHRLAALLRDGGMLRPVYHGEHSLRSLRELARSYLVITQDVTRVMNRTKALYRGWGIPCGGQQVYAANHREAWLSKLPETGVRRRAEHFYQELDALRALRQQARRDLLTEARKQPATRWLRQVPYIGPIWSALLVALLQTPHRFRTKRQLWSYCGLAIRTSSSADYQFIDGELKRSKKSPLLRGLNTNHNHALKNIFKHAAMGASCGSGPLREFYDAQVAQGKKPAMARLTLARKIAAVTLAVWKQEGGFDAAHLKLQA

SEQ ID NO: 283307 - protein, 326 aa, unidentified
MSRIKGKATTNQTSSETVVVGVDVSKKWLDVFLHPIGERVRVANDATGIGKLLSCCLTNSAKLVVMEATGRYHRTAHTALHEAGIKVAIINPYRTRRFADVLGRLAKTDEIDAEVLARFATIMKPAPTEPSTATMTRIKEIVVARRQVINERLVLENQCEEATSDIVKDLAAERIALCRRHCDVLDAELQAVMKSDPQIAGQYAILTSIPGIGPTTAATLLAEMKELGSANAGEVAALAGLAPMNRDSGMMRGRKTIRGGRVMARNTLYMASVSAVRWNCDLKAFYERLRKAGKPFKVAITAVMRKLLILANTLLKDGRAWSATPP

SEQ ID NO: 283308 - protein, 355 aa, unidentified
MSHLNSGIAVIGIDIGKNSFHLVGQDRQGAIVLRQKWSRGQVEARLANLSPCLIGMEACVGAHHLSRKLQLLGHNARLMPAKYVRPYSKGQKNDFRDAEAIAEAVQRPTMKFVATKTADQLDLQALHRVRERLVSQRTGIINQIRAFLLERGIAVRQGLRFLRAELPGILATRTDVLSPRMLRILEDLSADWRRLDARIEGLTGEIETLARQDQHCERLMSVPGIGPIISSAMVAAIGTGDVFSKGRDFGAWLGLVPKQISTGDHTILGSISRRGNRYLRALFVQAAWVVLVKLGPKQWERYGLKSWIEAAKKRLHHNVLAIALANKLARIAWAVLNKGRAFACDKTDAMASRPV

SEQ ID NO: 283309 - protein, 425 aa, unidentified
MPIIRSNAIRIKRFRELKQDLRTRRDRLLVGIDIAKAQHVAQLRVAHGRILAPQVVIPNTTGGFTTFWRQLQAAQRATGCPEVVCALEPTGTYHEALGRFLEAHGVDVVLVANQVAHANRRTLDGTWGKSDPKDAHNLCELLERGLVLFYSLPEGPLAALRRLVRLLRRARVERAACQVRWRNTLRPALGPAGESLPAALLTQLPAAVQAFERAGGGASGGRPRARRPVDLPPGFAAECADLTARLTAAAGRIATLEAALVQVATPLPAYPLLRSLPGVGPTLAAILLAEIGDIAWYTKFSQLRKLAGLDIIWVESGQWAGTPRISRAGRSLLRWALVQATLGATKCPAWHARREAMRAKRHGDPHAFFKATVELAAKLLRLVWGVWRSGRPYEPAHAASGPTPPPARPRRGGRVAGLRQRVHRA

SEQ ID NO: 283310 - protein, 362 aa, unidentified
MPGTMTWVGFDVHARSIDAAAIDVMSGELSRMRFGAVGAEVPVAWLCSLPGPVKACYEAGPTGYGLYRAAVAAGIDMQVIAPGLTPRGRADRVKTDLKDSELLARNLLAGSLTAVMVPPPAVETARELTRAHDACRRDLMNARHRVSKMLLRHGRVYPSPSTWTQAHRRWLAAQQFPEPISELTYADLIATVDGLTARKKALAVRISELATDPQWWPTVARLRAFRGVDTLTAFAIHLELGGDWQRFEKAHRVGSWLGLTPSRTQSGGSDRQGAITKTGSMLARRLLVESAWQYCREPRIGVTLQNRQDGQPDHVLQISNRAQHRLHRVYTTMRAREKPHNVTVVACARELSCFLWAAATAP

SEQ ID NO: 283311 - protein, 418 aa, unidentified
MKRERNTRELELRYVGLDVHKHYITVGGMNAQQEIVLRPRDVEMERFKTWAESNLRKTDEVVLEATTNTWDVYDTIAPLVKRVVVAHPAEVKQIANSRVKTDNQDVIRLVRLLIADIVPEVWVPPVEVRELRAMISYRWRLVKMSTAIQNRMHSLLHRHNIQAPQGKIDTGENREWWETLKLSELETLRLKQELKTLRLIRENIGEVEKELGRLSNSERWGDQAVHLMQIPGVGIIVTMTILSAMGDIRRFESPKKLVGYAGLGAGVHDSGQKHREKGITKFGRKELRWALVEASWQAVRSNPRWRAEYDALCKRKHQNQAIVAIAHKLLVTIWYLLNRKEVYKQSSEEDLAYKMLTWAWHMDKTALNSMSNQQFAKYGLLRLGKGAELTRVVRGGVPRRIASKEEVLALKPELHLKQ

SEQ ID NO: 283312 - protein, 385 aa, unidentified
MREQNFVPREFDIFGGLDVDKKSIAVTFMNHEGVLQSFSMPYRAEHLLSYVRKHFEGQKVAFAYEAGPTGWGLYDRLTGEGHPCVVAAPSMIPKVPGQRVKTNRLDSEKLCEHLRGGQLKSVHVPSEPYRQLRHLSQLRDTFVKDVVAMKLRIKAMLLFEGLEFPPAPAGSQWSALVRGKLKKLSCSAPVRFKLDRLLESLEYSEKQALCTIQEIRRFCRQDSELCQAMAHVKSISGIGEIVASHLLARIGDPDKITNVRQLGGFIGLAPRERSTGDRIARGGITRTGDGRLRSKLIQAAWSAIRQDPELREFYRSVYQRHPRDRAARKAIVAVARKLTTRIYAVLKQQRPYVVREIVHSAPLTQEETSPQGTTRRLTEPGESIS

SEQ ID NO: 283313 - protein, 310 aa, unidentified
MDTIVVGIDVSKERLDVHVHPSGESFAVGRNADGLDALIARLVPLGVSAVAVEATGGFETVVAAGLGGAGLPVIVVNPAQVRHYAQALGKRAKTDPIDAAVIARFVEATKPQIRALPDEETRLLASLVTRRRQIVQMLVAERQRERQLPTRHLKKSAARLVKALEKELNVLDEDIGDSVRGSPLWREKEELLKSVPGVGDVVARTLIAEMPELGTLDRREIASLAGLAPWTRQSGKWRGKSFTGGGRTSARTVLFMASLVGKRCNPVLKAFYERLIAAGKPKMVALIAVARKLLTILNAILRDKTPWQHA

SEQ ID NO: 283314 - protein, 457 aa, unidentified
MGDDVMISVDPHKASNTLAVMDPVTKTVIARQRFMNTAVGYRRLREFAGGWTHRRWAVEGCHGAGRSLAQRLAGDGEIVLDVPAKLAARVRVYSQGHGRKSDADDAISIGLAALNSTRVAVVRRDDTLVSLRLLCDRRDELGALRTQAVCRLHRLLCELTPGGTHRGLRASRAEQLLAKLRPVDPVDVVRCQLAHQHLDDIRALDAKMTAVRAQIAALVDGTGTRLTELYGIGPVIAGRILAEVETIDRFPSKDHFASYNGTAPIDASSGEQVRHRLSRAGNRRLNHALHMMAVTQIRQPETIGRRYYERKRLEGKTPKEALRCLKRRLSDVVYWQLVADRRATITQCGSATTPTRTRPTSTSATTPVPRTAPPRRPPHPTASTGSSHSTGKTAASSASKSSTPAVGSPKTSSTKQKTRAEATRKPTTNSAAVPDRRPTSAAAAGVKAGAATRRARP

SEQ ID NO: 283315 - protein, 322 aa, unidentified
MIYAGVDIAKMDHVIGAVDETGAEAARPMAFKNTEAGFERCVAWLESVAESEEDVFVGMEATGHYWMACFAYLAAAGYRVCVVNPMQVHAMRKLKGLSGVKNDRIDSILIAETLRQGDYDETRLATDEVQALKRLTRYHQGLKQELATVKTQALCVLDAYFPEYAGLFSDAFGAASLKVLAESPTPAELSRKRTSSIAKLLSEGSRGRLGTDKAAQLKAAARSSVGIRLGGDAASFQIRTMVTQIEFLNATIAKVEREVASLLAKVEPSVTTIPGVSTTTGAQIVAEIGDVKRFKNAASIVKYAGLNSGVDESGKLSAEGAP

SEQ ID NO: 283316 - protein, 332 aa, unidentified
MAYDFVIGVDVGKYFHHACVLDPQGRQVLSKRINQHEGSLRKLFGQFLAHGASVLVIVDQPNNISRLTVAVAQDMGADVRYLPGLAMRQLSRIHVGNSKTDVRDAYVIAHAGLNLPDSLRSVDRVEEVFIQLKVLNGIDEDLARAYTRLINQMRSALVGTYPAFEHVLRGQMIHRKWILHLLAKYGGPTKIRRIGKTRLAAFARSHKARNPEPVIDAMLAAIHGQTVSIAGAEYAELGVAMSAKDALAKLAHRKEIEAQVLKLIQDIPQTEILLSMPGIGPRSAAQILMTVGDMSDLPDAAHLASYTGLSPRTNQSGTSIMSNSPNRAGNKN

SEQ ID NO: 283317 - protein, 343 aa, unidentified
MPTITTIGLDIAKSVFQVHGVDAAGQVVIRRQLKRRYVLAFFQKLPPCLVGIEACASSHHWSRELQAAGHTVRLMPPAYVKPYVKRQKNDATDAEAICEAVTRANMRFVPTKTPEQQSGLVLHRTRHLFIRQQTSVINAIRAHLAEFGIIAPVGRHGVEDLLRVVADPNDKRVPDIARACLAALGAQLRRIKEQILEFDRMIRAWHRSSEMSRRLDDCPGVGPALATAVVASVADPMAFKSGRNFSAWVGLVPKQRSSGGKERLGGISKQGDRYLRGLFVVGALAVIRYAKIHGTKHRPWLAALLERRPTKVAAIALANKIARMVWAMMVKGERYKEPVALAA

SEQ ID NO: 283318 - protein, 474 aa, unidentified
MSGKVNRNQRKELIRRLYSDDPGLEVVHPQTAGIDVGNESHFVTVRPDSDAEPVREFGSWTAALHRMADWLETLGVKDVVMQSTGVYWIAVYDVLQKRGFAVCLTNARDTKNLPGRKSDVQESQWLLKLHTYGLLRNSFRPPEEIRTVRTMWRLRSRHVQDAGREIQHMQKALTTMNVQLANVISDVSGFTGQAIIRAIVKGERDPYKLAELRDYRIQASAEEIARSLEGNWQQDVLFELKQAVERYDFCQQQIAECDQELEKNLGSLPNRTIAEAETPEEEAATSSAAEGKGKRKRKRGKPRKSEPQFDLNGELKRICGVNLATIDGVDVMTIQTWVSELGVDLRPWRTEDHLVSWLNLSPKRQISGGKLIKHERNKAKNRVADALRMAASTLKESDSYLGARFRSLRGRLGSGKAIKAMAAHLARLIYRMLTHGQDWVDRGAEVYQKRREEREKRALERKASALGFRLVASE

SEQ ID NO: 283319 - protein, 329 aa, unidentified
MFVGLDLHKNYLQAAVTDDQGRVLSQERIPNNDENIEEFTRETLKDSHAEIVIESSSTWYHVYQLLSEKENCHVVLSNPVKTKAIASAKVKTDKVDALTLANLLRGGYIPESYVPPKHIMDLRMMVRYRASLVKMRVEAKNKVHAILLQNGTRIKDRPFTLGFIEELRRLGDYRIDGYLNIISSLTQQIDTVSSTIKREAKEDESTRLLMTIPGIGYYGALLILSEVGDINRFPDSHHLCSYAGLTPSIHSSGGVTYHGRITKTGSSHLRWMLTESARVHIRTQKDSALTKFYREVAKRRGGSKATVAAASKLLRIVYWVLKEKRPYHG

SEQ ID NO: 283320 - protein, 348 aa, unidentified
MQYFAGLDVSVKETAICIVDETGKVVRERKVATEPAALLAAFAESAVHCTRIGLEAGPLSQWLYSALAEAELPAVCVETRYMKAVLKAHSQINKTDRNDARGIAQMMRAGLFRPVHVKTLRGQRLRMLLTHRKLLQAKAIDIENDLRGTLRNFGLKVGPVSTPKFEARIRELVEGMSDIAGFVEPMLIARRVLREQFAALDRQVMAIARENVVCRRLMTVPGVGPVVAMSYVATIDVPARFGKSRSVGAVLGLTPVQNQSGETNRIGRISLCGDAMMRTLLFEAAMSLLTRVKKWSWLKAWAMNIAKRRGVNKAAVALARRLAVVLHRMWSDGTEFCWTREELQKAAA

SEQ ID NO: 283321 - protein, 351 aa, unidentified
MVVVLGIDVHKNTHTAGAVDEVGRELDHRTVRATDAGHRQLLRWVLRRWPDAELRFAVEDCRHVSTRLERALLAAGQSVVRVPPKLMATARQSVRMRGKSDPIDALAIARAALREPDLPIATHDGVSREIKLLVDHREDLVNTRTQMQNRLRWHLHELDPELDPAARSLDRLCELDRLDAWLAQQPPSIVVRIATELVTDIRTLTVRANALEHELAALMERVAPRLLALPGCGALTAAKIVGETANVTRFRSEACFAMHAGAAPIPASSGKTIRHRLARGGNRQLNAALHRIAVTQIRLHGPGHDYFQRRRTRGDTTMEALRALKRHLARIVYNALQQSTTHQSPRLTAAA

SEQ ID NO: 283322 - protein, 350 aa, unidentified
MAMLCGLDLHRGQITYDALIEETGEIWRGRIWSPDRARFRRWLEIYVAKKANGAPVAMAVEGCTGWRYVVEEITRAGYEAHLAEPAETQAARGRKKRAKTDRSDSRLQRELLSKGELPESWIPPTGVLEWRERTRLYKTLASERAMWAQRIHAELFQHGVALPEGRIRADETREWLASDEVELSGAARQRVGVGYRMIDAVEDEIVPLRRQLCRFSSRQPACRALAEAHYGVGPLTAVITWAELGDCRRFSRSMQVVRHAGLDVTVHDSDGKRPGGHLSREGPATLRWALFEAGMSAAKLTSPDHDYYQAVKRRHDGKVAGIAVARKLARRCYHTLRALDAKLVYAMPEL

SEQ ID NO: 283323 - protein, 344 aa, unidentified
MKYFTGIDVSLRSVSICVVDEAGAVQYEGKVPAEVDLIVAALQRCKAEIKQVGLEAGTLTQYLTYGLQKAGFEVICLEALQTAATLAAMRNKTDRNDARGLAQILRTGWYRTVHVKSLESHQVRALLASRKALLARCVDLENELRGLLKIFGVRLAPHLAHNRFDETVRAAVSTTPELNTCLLPLLDARTVLYKTYLKLDNAVKSVVRHDPICQRLMTVPGVGPVTSLTFKAGVDDANRFRSSRNVAAHFGLTPRRYQSGETDNPGRISKAGDVDVRQALYTAAHSLMTRSDAWSTLKAWGLRLAKVRGHRRAVIAVARKLAVILHRMWVDGTDFRAARLQGVA

SEQ ID NO: 283324 - protein, 343 aa, unidentified
MRSLGTIPNTPEAVRKAVKKLGSVKDLAVCYEAGPCGYVLYWQLTELGVRCEVVAPTLVPMRSGDRVKTDRRDAEKLARCYRSGDLTAVWVPDAEHEALRDLVRARESAKEDQRRARQHVRHFLLRHGRRPEGATRAWTAKYETWLGSVRFEQPALEATMLDYRTEVQHARDRIERLERAIDAAVEKAPAKMQAVIAALQALRGIAKVSAVTLVAELGEISRFARPRQLMGYAGAVSGEHSSGERVRRGAITKTGNSHVRRIVGEAAWAYQHRPGVCGALRKRQAGLSEEVKAIAWKAQHRLCGRYRKLTGKGKPHQKVVTAVARELLGFTWAIGTHVERTAA

SEQ ID NO: 283325 - protein, 346 aa, unidentified
MQAVTTIGLDIAKSVFQVHGVDATGKVIIRRQLKRHYVLAFFQKLSPCLVGIEACATSHHWSRELKAIGHTVRLMPPAYVKPYVKRQKNDAADAEAICEAVTRANMRFVATKTPEQQSCLMLHRTRHLFIRQQTAVINAIRAHLGEFGIVARVGRTGVEELLDVVADSAGSDDRRLPEVARVCIAALGVQLRMLKAQILAFDRQIMAWHRSNETSKRLDEIPGVGPALATALVASVADPKAFRSARHFSAWIGLVPKQHSSGGKDRLGSISKQGDRYLRSLFTAGALAVIRYAKIHGTKHRPWLTAMLARRPTKVAAIALANKIARMAWAMMARGERYKEPAALAA

SEQ ID NO: 283326 - protein, 449 aa, unidentified
MAKPRKRKHGKLERTLPVMRPNAGGIDMGATEAVVAVPADRDAESVRSFPTFTQDLHALVDWLQRCRVDTVAMESTGVYWIPLFQILEARGIAVHLVNAQHVHHVPGRKSDVLDCQWLQYLHSVGLLKASFRPEHAVCEIRSLMRHRENLVQMACVHVQHMQKSLDQMNLQIHHVISDITGVTGLAIVDAIVAGNTNPKELAKLRDYRIKASSETVIKSLVGDYRREHIFTLKQSLTAYRYYQQLIADCDQEVQRRIDDFDSKNAPPTLSDPSGSPQTPPAVFDLHNHLERIFGVDLTALPGFETLRIQTIFSELGADLSKFPTDDSFCSWLNLCPKDGTSAGRRIRGPKLKTRNRVTLAFRLAALSLHNNKSYLGDYYRAQRARHGALKATKNAAHKLARIFYHLVTTRQPYDETVFAKLETRNQQRRLRKLQSLARQFGYTLVEARA

SEQ ID NO: 283327 - protein, 407 aa, unidentified
MEILHPRCAGLDVHKDTVVASVRCVSEPKHQEVRSFGTTTTGLLALSEWLTSHGCTHVAMEATGVYWKPVWHVLEGDFELVLANAQHIRNVPGRKTDVADAAWIADLLAHGLIRSSFVPPALIQDLRDLTRTRKQIVREISQHTLRIQKVLEDANLKVASVLSNVLGKSGRAMIEAIIAGEVDPGRLADLAQGTARKKRTELLEALRGRITAHHRAMLKLHLDIIDALNKALSEVDASVGKALAPIQYSAELLKTIPGIGDIAAHVIVAEIGVDMSRFPTAAHLVSWAGLCPRNDESAGKRRSTRVRKGAPWLKTTLVTAAWAGVRTKDTYLRSQFLRIKARRGAKKAILAVAASMLTACFHMLRDGVEYRDLGSEHFDRHDKTKTITRLVRRLHDLGCDVEVKHAA

SEQ ID NO: 283328 - protein, 396 aa, unidentified
MLAQSNQRSYCPTEFDIFVGMDVDKKSIDFSCSDSRRILRSVHIPNHVEDLIRYVRKHFPDQKVLFAYEAGPTGYGLYDGLTAGGFACLVSPPSMIPTAPGQRVKTNRLDSKKITEALRAGQLKSIHVPSPTYRHLRHLTKIRDLVVRQIAGTKCRIKALLLFEGIPFPEAPRGGQWTRSVIAQLHKLPCSGAVRFRLDRLLEALEFQRQQYLKITREMRNFCRQDPELSRCLSYLRSIPGIGQIVAPHLLARIGPWQNLQEHRVAELAAFLGLVPTEHSTGDRVHRGSITRSGDGRLRSKLIQSAWTAIRQDPELREFYRSVYRRHPQHLAARKAIVAVARKLTTRIFAVLKEQRPYVLRPAIRSRPLLPGEIGPRERLDASQKEEDRHLPSFVP

SEQ ID NO: 283329 - protein, 380 aa, unidentified
MRDVNRLWMMEWTAPYGIDCARMRLLRSQTREPSVKQIIRIGMDTSKHIFQLHGVDAAEQPVLRKRLRRKEVVAFFAQLPPTVIGLEACGASHYWARELAQLGHQVKLIAPQLVKPYVTRNKNDGRDAEALCEAMSRPTMRFVPVKTAEQQAALMLAGIRERLIARRTQLSNAIRGYAAEFGVTAARGLDKIEPLLAQIAQDESLPALARELFAMHGREYVQLQAELKKIEARLRAWHRTNADSRRLAQIPGVGPIGATALVMKTPDPHAFPSGRHFAAWLGLTPKDHSTAGKTRLGKITRAGDERLRSVLVAGATAVIQQAKHGRGHPSPWVMALLKRKPPKLAAVALANKIARIAWKLMATGESYDGARMLGASALAA

SEQ ID NO: 283330 - protein, 424 aa, unidentified
MIRYNVRLEVKKVKPILETCCGLDVHKEKVTACIVSGPLDKAEERFKIREFSTMTYDLRNLSSWLREKDVKVVAMESTGIYWKPIFNILEEDFKVILANASRVKNVPGLKTDKKDARWIAKLLRYGLVPASFIPPRDIRELRDLTRTRRKLVGELTREKNRIHKILQDGNIKASNVMSKIFGISGEGMIRTLIEKENLTQNEIKSLAKGKLKNKINILIKAFDGNLTDHHRFLLKKHFEHIDFLSSQISDFDNEIYKKLEPYQIEFEKVQTVTGMNEITSASVIAEIGADMSRFPNEKHLSSWAAICPGNNESAGKRKSSKTRRGNNYLKATLTEAAWAASRTKNTALSEKYHNIARRRGKKKAIIAVAHQILKEIYYVLDTGDPYIDIGADAISERKSKARKQSLIRELKRFGYIVQPIPISI

SEQ ID NO: 283331 - protein, 371 aa, unidentified
MSELPAETRPARLKVEASPRPPGARKPETELGAVSTTAVPHPDSRSGPSPHLQGRVMDEQRTVFVGIDVSKDRLDVHLRPSGEAFCVPREGKGMDDLVIRLQGLSVALVVLEATGGFEATVAAALAGVGLPLCVVNPRQIRDFARAMGRLAKTDTLDAEVIALFAERVRPQARPLREPERVHLAELVGRRRQIIEMIGMETNRGRQAIDKPLARRLARHVAYLQKELDAIDHDIGDAIKHSPAWREAEALLKSVPCIGDVTARTLLAELPELGTVSRHQVAALVGVAPINRDSGLMRGRRAIAGGRTSVRAVLYMAALTATRRRSPFRAFYDQLTARGRPKKVALVAVMRKLLTILNAILRDHTPWHPLNA

SEQ ID NO: 283332 - protein, 747 aa, unidentified
MTNNNTETAGIDTAKDKLDIAVHGREQRWQVPNVAAGWRQLAADLGKAGVTKVGIEATGGYERGVVTHLRTKGFVVLVLQPIQVKNFARLHLRRAKNDALDAVLVAACAAVLDPPSVDADPRLTELADHLTFVEQIEEDMVRLKTRLEHIDEPRRRRLVLNDIDRLKARRATELLRIAGQLRDHPDLARRLDLVLSVPGIGERTALALIIRMPELGQISREKAAALAGLAPFDDDSGKHRGQRHIAGGRSRLRRSLFAAALPASFRWNKALCALYERLKARGKATTRRSSPALASSSSTPTPSSSAARHGLKSRPRFNGCYPRAPVKPFRERRSKRRKSHAKACADLAFHWIAGLTMTQPAALRATGSAAWADALLLSFAEAGYQRAQPAILQPAEPFLDLSGEDIRKSLYLTTDASGEELCLRPDLTIPVARDYLASAKAGQPAGFCYLGPVFRYRHGAASEFQQAGIESFGRQDRAAADAEMLALALEAVAASGVSDIEIRSGDVALFTALIDALDLYPVWKRRLIKDFNRKGDLEMDLGRLALAEAPLRNEYEGVLAALAGSDRKAALALVTDLMSIAGASNVGGRSVAEIADRFLEQSTLKGGALPRDALKIITAFLAISGTPDQALAQLRLLTLSSNLDLTAALAELEERIGFMVAHGIDTSKIRFSTSFGRGLDYYTGFEFELHRQGNGVEPLVAGGRYDGLLGQLGAAEPIPAVGFSIWIEALTEVRADVAATGSAGSAA

SEQ ID NO: 283333 - protein, 446 aa, unidentified
MNAAGIDVSSRKSTVAVLRPFGEVVRLPFDVSHSSEDLAGLARQLKALDGETRVVMEHTGRYYEPVANVLHEAGLHVSAVNPLLIREYGGNSLRRVKTDKADAVKIARYALDNWADLRDYTPMDTIRYDLKTLNRQFQLASKQKTATANNLQEQSFPGIRKCFDSPVRQDGTQKWVDFTYTFWHADCVRKHSLNAFAERYRKWCKRHGYIFKQSNAEEVYALAKSAVTLVSSSEVTKLLVQEAANQLTGISHSVETYRAEMNRLASMLPEYPVVMEMYGVGESFGPQLMAEIGDIRRFEHKKSLVAFAGVDPMPNQSGEKNVRSNRSSKRGSPYLRKTLFNIMGIYLRCSPADEPEAGRRETLLHLHDSRCEQVPAALLRQGARLSRHTGWLASCGHGFHRPQPTGLTSEYSDISGQRFYGGLFAVPLFFLPAACNFFFRQAHLWA

SEQ ID NO: 283334 - protein, 354 aa, unidentified
MRTYYVGMDVHRASIVIVVLNGAGKVVERITLQTSATAVRSYLQRLKGKVYVTFEEGTQAQWLYDLVRVLVTEVIVCDPRQNRLLAAGNKSDAIDAEKLAQLLRNRSLKAVDHADHGVRALKELVRNYDCLVQDSTRVMLRLKALYRGRAIDCRGHDIYRQDRRPQWLKKLKEPGAKQRAEFLYKQLAALKPLRHEAKLLMVREARKQAAYPWLLSVPRLGAVSVAQLLAVVGTPHRFRTKRQFWTYVGLAVVTRTTADNEVVNGVLRRSRRPVATRGLNRNHNHLLKRVFKMAATSACHSEPFQAGYQARLQQGMDPALARLTIARQLAAITLSLWKRGEKFNVERMKKQPAA

SEQ ID NO: 283335 - protein, 359 aa, unidentified
MKTYYIGADVHSNSTELAIEHNGKIIRRHSLPTAIPAIKEVLTSLGGTIHMTFEEGPMAGWLYRNLKDTVEEIIVCDPRRNNYIASDGDADDKIDSGKLAALLRGGYLRAVHHSDDEGRAEFKQWVNLYHDRVRDAVRMINKIRARCRMYGIAIPRNVIRDKLQRPQWLAGIQNKALAAQLEVLWIGYDATALQVRRTKRQLCMLSKNYPIIRLWSGLPGIGTIRAFTAFAFLDTPWRFSRPNKLWKYCGVGLQRSASGTDKKGKPKPAQLQLAWAVNRLLKNVILGAAHTAINQNKNTFKDYYERMLHDGIMPSNARHAIARKMLTVMWGMWKTNSRFNEKLAREVSLAAGSSGSVKR

SEQ ID NO: 283336 - protein, 410 aa, unidentified
MKMAGIDVHKKVLMVVVVDTSTPQEKPARRRFVTMPSELHRLLTWLREQEVEEAVMESTAQYWRSVWLELEPHLRLHLAQAFSNRAPRGRKHDFKDAERLVRRLMADELILSFVPSGEQRIWRSMTRMKLQLTRDRVRLQNQIECLLEEMRIKLSIVVSNLLGASGLRILHALANGETDPKKLAQLGGERLQCTEEQLVDALTGRAQPVHGERLALQLQRLQLIDQQMARLNSMIAAAMKAHPDAVIRLAEVPGLGVDSAQQIIAEVGAQASTFASAAELTSWVGTCPGKEESAERNRSSRSAKGNKYLRRVLNQAAHAAVAKKGSYFQMLFRRLLPRLGYQSAVWAIAHRLCRLVWKILHEGVRYIEQGGEADPRTKKKRAQMLARALRKLGYQVTITPINQITATNEI

SEQ ID NO: 283337 - protein, 316 aa, unidentified
MSQESSSVLGIDISKEWIDAHLLPGEKSWKISTASDPLQQWVDHLPAGITLAVMEASGGLEMPIAATLSKAGIPVAIMNPRQIRAFATALGQHAKTDALDAKVIARFGELIRPIPRPLPTETRAFLDELVTRRRQLIETSVAEQNRLSTMRSIQTRQSIETHLLWLKSQVKEIEKQLEDLIKKSPSWMVDKKLLTSVPGVGPITSSIMLAALPELGRLSHREISSLVGLAPMPRESGKWLGKRFIRGGRANVRSAIYMCIVSAIRFNPVIKAFYIRLLAHGKEKKVAMVACMHKMLIILNSIIRDQKPWHFNPIPS

SEQ ID NO: 283338 - protein, 380 aa, unidentified
MTVLSVHSFRRGMSETAGKDNPMAKSKQTIPVVGGVDTHKDLHVAAVVDDYDQVLGTHSFATTRQGYKLMLTWMRSFGDLQRIGVECTGSYGAGLLRYMQVAGVDVLEVTAPDKLDRRRRGKNDDFDAQSAAHAAFAERRTVTPRSRDGMVESLRVLKVCRKTAVQARRVALQIIQTTIVCAPDRLRDLLRNMTRMQLIRTLAAWRPDLTGYRDVEEAYRIALKSLARRYLELHDEVADLDDMIEAIVTDLAPDLIACRGVGFNSAAQLLLTAGDNPERLKSEASFAALCGVSPVPASSGKTTRHRLNRGGDRAANSALHIIAIGRLRLDPKTKEYVARRTAQGHSKLEAIRCLKRYIAREVFNIIARRHKQINQAQIAA

SEQ ID NO: 283339 - protein, 400 aa, unidentified
MRAVFGIDVSKASSEVAILVNGEKVHGYTISNDAIGFARLLGDLRTVHKPEIIFEATGVYSRRLQSFLDEHGYAYTRLNPLEAKKQLDSLRVRKTDQIDAEKLAQSQFVLNRKTTYVQEEVYQNLRDLSRFYQNLTEDIVRAKNRLHKALQVTFPELENILSIPTGEQYWNLVIAFPCKDFVLELSKDELSESIHQSTSKRISDKRVAYLAEKLIALANQSYCAVKKNSPMLEEVRYYTKELLRLSGQRQAVLDEMVELAQPLPEYDILLSIPGIAETTATSIIGELGDIRRFQSTNQINAFIGIDLRHYESGNFLAKEHITKRGNPYARKILFKCIHNIASASHTNPCHIADFYEKRKRQSQTTSTKPHTIASIHRLIRTMYYLIMHNKLYDYASTQNR

SEQ ID NO: 283340 - protein, 409 aa, unidentified
MPTTFDCPTGPVAGIDTHTDTHTVAVISDTGRHIATDTFPATNPGYVAISEFMATYGVTTVGVEGTSSYGAGLTRHLRTQKYSVVEVLRPTRAVRRRDGKSDPVDAVAAARQVLTGEALSIPKDTSGPVESLRGLQITRRQLVMTAAKLMTTIKSLLVTAPDEIRRRYSAMSTLVMVEALSRCRPSADLADPRNGVLLALKTLATTYRDLQKQGTQLEKHIIILVEMINPHVTSIFGCGSVVAADLIVSVGDNPGRIHSEAALAHLCGVAPIPASSGRTHRHRLNRGGDRRANSALHRIALVRMHHDQRTRDYVAKRTKEGLSKKEILRCLKRAIVREVYRVLCLGQAVLPTGQVEVDELKARRIERQLSQAQVAEKLGCAPARISDIETGKRPLPELRLAYEELLKSA

SEQ ID NO: 283341 - protein, 354 aa, unidentified
MSQTLKTSVAVIGVDIGKNSFHVVGQDRRGAIVLRQKWSRGQIEARLANLPPCLIGMEACVGAHHLSRKLQMLGHDARLMPAKYVRPYSKGQKNDFRDAEAIAEAVQRPTMKFVATKTAEQLDLQALHRVRERLVSQRTGIINQIRAFLLERGVAVRQGLRFLRGELPGILATRTDVLSPRMLRIIEDLAGDWRQLDERIEGLSNEIETLARHDQACARLMTVPGIGPIISSAMVAAIGSGDVFSKGRDFGAWLGLVPKQISTGDRTILGSISRRGNRYLRVLFVQAAWVVLVRVKQWERYGLKSWIEAAKKRLHHNVLAIALANKLARIAWAVLNKGRAFECIKTDAMASRPA

SEQ ID NO: 283342 - protein, 351 aa, unidentified
MMRNQPRDCAVFGVDIGKTVFHVVGLDAAGAVLQKAKFRRDTLLQFFERARPALVAMEACPGSQWLARKIGLLGHEVRIIPAQFVKPYVKSHKNDVIDAEAIAEAATRPTMRFVGVKEAHQVDLQMLHRVRGRLVASRTKLICQMRAYCLEHGVAMRPGAGVFKIDILRVLDDEDNDLTDRARLVLRELHAELIELESRIRTVSTEIKNIADADETARRLMTIPGIGALGATAILAAVGDPRRFKKARDIPAWLGLVPQQHSTGGKQKLLGIAKRGSNYLRTLIVHGARSVFMHLDRSKDRLGVWADQLRGRMHANKVVVALAAKIARIVWVILSTPGATYERRPPKAAIV

SEQ ID NO: 283343 - protein, 426 aa, unidentified
MNSTQNRKISQITEDTLIFGIDIASELQYARAFDWRGMELSKKAVSFHNTLEGFEGFAGWLKGLQDRYSKEKVLAVCEPTGHYWFCLAQFLQGRDIKLVMVNPYHVKRSKELDDNTPSKTDSKDPKTIAKLAIEGRYMEPYIPEGIYAELRTLYNMYLSVNKEISSKRNRVARWLKIYFPEYDKVYGNAGCKSGILILQTTPLPQDILKLGIDGIVEIWRSAKLRGVGVKRATSLYNAAKCSIGLQTGGNAVRMEIRHLLDDLARKEEEKGSIEAAMDETSRQIPGAGTLCDIKGVGRVTVAGFFAEVGDIRRFESPRQIQKLAGLALRESSSGKHKGETKISHRGRKNLRTLLFRNMLPLVAKNKEFAELHRYYTTRQKNPLKKKQSLVALCCKLIRVFYAIVMKKSRYDGLRLMSDIHRPEMVA

SEQ ID NO: 283344 - protein, 428 aa, unidentified
MSYRIAGIDVHKRVLAVVISNVEVESEFQFERRMFGGNPEQLRLLAAWLLEQEVEEVVMESTAQYWKPVWGALERNWKPIREKREGAKRRSGTLHLAQAQSNRGRRGRKKDFVDAERLVKRLVARELTLSFVPDAEQRLWRAVTRKKYQLRRDLVRLNNQLESLLEETHIKLSSLVSDLLGVSARRMLNALADGETNPAALAALAHQRLRATPEQLCDALGACADLKPVYRRLLKMTLEQLQFLEQQIGQLDQELATLLHPHQDAVQRLAEMPGLGVDSAQQIIAEVGPIAATFPSEKCLSSWVGACPGDEESAGVNYSHRSPKGNRHMRRLLNQAANAAVKVKGSIFEVIYRRCVPRLGHNQAIGVIAHRQCRLIWLILHNGALYEERGPAVTTLSKYKRTWRMIRQLRQLGYRIESPNPQPSQAQA

SEQ ID NO: 283345 - protein, 359 aa, unidentified
MRETMTYVGLDVHARSTHAAALDVLTGELRRARFGGGSEEVIGWLAGLPQPLRGCYEAGPTGFALYRAAEAAGLTVEVIAPSKTPRAAGDRIKTDRKDAELLARLLLAGQLKVVTVPPPAFEAARHLARAREQVRGDLMRCRHRVSKLLLLHGRVYDGGAWTKTHRRWLEQQRFEQVATELAYLDTLAAVDGLVARKVALDERLSRLAREGEWWPTVARLRCFRGIDTLTAFVLSLEIGDFRRFQRPAQLASWLGLVPSLDQSGESRRQGAITKTGSGYARRLLVEAAWHYLPRPRAGPTIAERRVGQPDHVIQIALRAQRRLHRHYHRLRERGKPANVTTVAIARELACFLWAAAVAD

SEQ ID NO: 283346 - protein, 309 aa, unidentified
MEPIFVGIDVAKNRLDVHIQPSGEAFAVTRDEVGLADLARRVAILSPLVVALEATGGYEVVVAATLAAAALPVVVINPRQVRQFARATGRLAKTDTLDAQTIAAFAAAVRPPVRAIPDAQARLLTQLVARRRQLVDMLGAEQNRRQLIEPALQGRLDAHIRWLQQAVHELDEDIHTAIRSSPMWRATEDLLRSVPGIGPITASTLIADLPELGRLDRRKIAALVGVAPINRDSGTVRGRRMIAGGRAPVRHVLYMATVAAIRHNAIIAAFYRRLVADGRPGKLAVTAAMRKLLVILNAILRDGRPWQPA

SEQ ID NO: 283347 - protein, 352 aa, unidentified
MKLLKYIGMDVHKATTVIAVLDSAGKVLAEAIIETKGSTIVDFLKSQRGTLHVAFEEGTQASWLYDLIQPQVASVVVCNPRKIVRQGNKADKLDAKLLAELLRTGALKPVYHGEKSTRAVKELALSYISVVADGTRIKNRLKSLFRGRGIECSGTAVYSPDERNNWLARLDSPAVCARAARLWQELGLVEHLSEEAEKDLVAEARKHADTRILRSVPGIGPIRAAVILGVAATPHRFRTKRQFWGYCGLAVVTATSAEYELLNGRVCRSKKRPLVRGLNNNYNRALKGVFKSAAKTVAAGEWKSRFEAMVADGTTESLARLTLARKIASITLALWKKGERYDPKKVKSSHAA

SEQ ID NO: 283348 - protein, 321 aa, unidentified
MIANTTTTSTRPVIAGDVGKIEVIVCDSRTGRTETLANSFDVLIEAARQWPEDCLVVCEATGGYETALLAAAVAAGRAAHRADARKVKHFIRSLGRLGKSDRIDAAALARYGEERGDRLPLWQPNEADQDALASLVRLRDSLVEQCSGLKRQLKAPNAAATKPHLALLLADLKRHVAAVMADIEAILARNAALAERVAIIDAIPGCGRVIAATLVALMPELGSLDRKQAAALAGVAPHPRQSGGRDGYRSVRGGRPEIKRCLFMAALVARRCNPELRAFDERLRASGKKPLVALTAVMRKLITIVNARLRDAARAASLQPA

SEQ ID NO: 283349 - protein, 423 aa, unidentified
MPYRIAGIDVHKKKLAVVVADVEVEDEYQFERRWYGSNPEQLQLLAEWLIQQQVEEVVMESTAQYWKPVWGALEQYWKPSCEKREGAGRMSGTLHLAQALSNRGRRGRKKDFRDAERLLKRLVSQELTLSFVPHAEQRLWRTVTRTKYQLRRNKVRLHNQLEALLEEAHIKLSSLVSDLLGASARRMLQALAEGETDPAALAALADQRLRATSTQLRDALGACTELNPVYRWLVKMVLEELQWIEQQIGQLDQEMASLLRQHQDAVQRLAEVPGLGVDSAQQIIAEVGAKAGTFASAKNLSSWVGACPGEEETAEVNYSARSPKGNRHMRRLLNQAANAAVKVKGSIFEIVYRRLVPRLGHNKTIGAIAHRICQLIWIILNKGVRYEERGPAVSENSRRARTSRMIRTLRKLGYRVELQADPA

SEQ ID NO: 283350 - protein, 316 aa, unidentified
MSQFSVFVGIDVSKDHLDVHLLPEGQSWRVANDETGCVELSERLSGLSGSVLVVMEATNVFWRLAATELASVGLSAAVVNPRQVRDFAKATGQRAKTDAIDAYVLALFAQRIEPPVRALPSEQCQVAAELLARRAQLMGMRVAEKNRLSTARAAKVRKDISATIAFLEKRLAALDEEIDQWLKSTPIDQSRANLLKSFTGIGEHTARSLLITLPELGSLSGKQIGALAGLAPFARDSGNKRGQRQIGGGRSIVRAALYMPALTAIRCNAVIRALYQRLIDAGKHHYVAITACMRKMLVILNAMLKSNQPWKDPYKV

SEQ ID NO: 283351 - protein, 339 aa, unidentified
MFVGAIGPRQADLDQLLRRLHGKTSALTFAYEAGPSGYGLYRYLTGKGLPCQVVAPSLIPKKPGDRVKTDRRDAVELARLLRSGDLTAVYVPSVEDEALRDLCRARDAARVSGKDAKLRLKAFLLRLGRHYVGRATWNDAHRRYLEKVVCPTPAQQIVFQESVRAVDEQVDRLQRLEAELLERAPAWRLYPVVQALQALRGVQFLVAITVVAELGDLTRFDSPRQLAAFVGLIPSEYSSGGSRRQGGITKAGNGCARRVLIEAAWAYRHPAKVSLHIQQRIDRLPKPLQDLGWKAQVRLCKRFRRLVARGKHPNVAVTAVARELIAFMWAIAKEVPLQA

SEQ ID NO: 283352 - protein, 401 aa, unidentified
MKRLSGGIDIGKSSHHMVILDEKEDILYQRKIPHNLSKMKEIMRQLEDLEKSKKAHLSFALEGKNGYGNPLDRLLLLKGFTLYNVDNYKLKRFREAFPGEWRDDNRDALMLSKMLSLKEHIDSGQEKIFVPIERPSKVTESLKLLSRHQQDLIAEKVRLTNRLGKKLLEISPELLLLGKLKNKKMIALLAKYPDLSRYHKITLKMLLAVSGIGKKQAPHLLAGLHELAYMSEMTAIYKTIIFSCAKRILQLNKEIKEIEEKMEKIGMLDKSFRHLKSMPGVGTRLASRFIGEIGNIFRFSSQSKLAIYCGIACVTSSSGKMTKTKAVYKANRIAKQTLITIAGCSIRFNPECRDYYFKKRQEGKTHNHALRCLARQMIKVIYNMLTLDRDYEIRKEYVKIA

SEQ ID NO: 283353 - protein, 393 aa, unidentified
MICVGIDVAKDKHDCFILSSEGEVLADVFTIPNNAEGFDTLLQTIRRCARPEDKIKVGLEATGHYSYNILGFLLNEGLDTYVINPLHTNLYRKSLSLRKTKTDRVDARTIAAMLMSDVDLKSYTDTAYHNEELKSLTRYRFDKVKERAKLKQSVSRLVTILFPELEKLVPTLHMASVYALLSEFPGAKQIARAHLTHLKALLNDASKGRYGRDMATELRDAARCSVGSVMPAKSLELQHTIRLIRELNTEIEDIESAIQTIMEEMQSPITTIPGIGFRMGAMILAEIGDFSRFDSPDKILAYAGMSPSTYQSGQLSLSGTYSHMEKRGSKYLRYALYNATKYVCLWDSTFEAYLAKKRAEGKHYNVALSHAAKKLVRLIYAMEKSRQPYNSVA

SEQ ID NO: 283354 - protein, 350 aa, unidentified
MEYIAFDAHKHYTLASVVRPDGQLVREERIEHDRGSLREFLERCERGSPVAVETIGNWYWIVDEIEAAGCVPKLVHARKAKLMMGEINKTDRLDVRGLNRLQQNGTLPTVWIPPGALRDQRDLPRTRMVLVRQRTQLKNRIHATLAKYALHDAEVSDIFGVRGRALLRQRLALLPPHTAYASQQLLEQVESLDRQVRAFEDRIQAAFKPTPAIQLLLTMPGVGLTLAVVIALEVGEVTRFATAEKLAAYAGTTPRVHASGGKTRFGPSRPDVNRYLKWAFVEAANAICITHGRAPQRHVSRLYVRIARRKGHAKAIGAVARHLAEATFWILSKHEPYREPKASAVFVHGG

SEQ ID NO: 283355 - protein, 401 aa, unidentified
MFGVGIDVAKNKSMVAILSDDGEIIKEPFEIANTESGLSLLCTIIEGLDGEAYCVVESTSVYHFPVVSYLQENGVFVSVVNPLIIKKYAAMDIRKVKTDKADSLKLASYVIDNYRHLVNYSHDNEVYSELLILSRQYLHYVNVLTNAKVNLTDMLDRTLPGIKPLLKSNIRTTGKNKLCDFVEKFWHCDVITDMSESRFVSEYIKWAKRKGYHSNETKAKSLYANALECIPTLPSDSPSTKMLVLEATKAVRNIETTLASILTQMSILAKSLPEFSVVRAMSGIGDVLAPRIIAEIGDVRRFHSASALVAYAGIDAPPYQSGSFYGTNRKISKRGSASLRKTGYEIIQALKVVQPQQDNAVYQYLIKKENEGKPLKVAKIAALNKFLRIYYSRVKEIYIHS

SEQ ID NO: 283356 - protein, 319 aa, unidentified
MSHVAIFGIDVDQARLVVARHGMEGTQTIDNQAAAIRAWLKHTPAGSRIGVESTSRYHETVVRLAQAAGHTVYVLNPRDVRHYAKSIGRRAKTDRVDAVVIARYVAKEADQLHPYVPRTDRQQALHVLLQRRAAVQRARTQLRQALTAHGPAPAFQPLMDAARQALRQIDTHIHEHMRQGAQAALFQRLVTIPGIGPVIATCLVHHLQRWPLARVDSWIACTGLDPRPNDSGRKIGVRVLSKRGDATLRQMLYLAAMTFARHPLGKALADRYRQRRFCSTAIYTILARLLARIAWHLAKTSSCFDADRFAKDHHIPLQA

SEQ ID NO: 283357 - protein, 465 aa, unidentified
MKRPQPRRAKPLTSGPSLLERLNPNAAGIDCGGAEHYVAVPPDRDPTPVRAFKTFTTELQGLADWLLACGVTTVAMESTGVYWIPLYEILEARGLDVVLVNARHVKNVPGRKSDVVDCQWLQELHSVGLLRGSFRPTAAIAALRAYLRHRETLVQSASTHVQRMQKALVQMNLQLPIVLSDITGVTGLRIVRAISAGETDPQALAQHRDPRCQASEADIRGALTGHYRPEHVFVLQQNLELFDAYQRQLAACDTAIEAHVAALAAQVPAPAGPLPDPRTRRKPRDNEPRFDIRTPLHHLTGVDLTQIDAIGPYSALRLLAEIGTDMRRWPTEKHFTSWLTLAPHNKISGGRLLSSRTLPSANRAAGILRMAAMSLGRTDTALGAFYRRLAFRIGKAKAITATARKLAILVYHTLKQELVYHDPGAAAYDAQHRQRVIRRLRQRATNLGFALVDRATGERLEGAVS

SEQ ID NO: 283358 - protein, 451 aa, unidentified
MEQEVISMEIVNPQAAGIDVGSRSHWVAVGQSEQDIREYGVFNEDLFAMADWLEQQKIRTIAMESTGTYWQNLYAVLLSRGFHVILCNGKFTKNIKGKKTDVKDCQWIQKLHSLGLLSSSFLPDEQTEILRTYSRQRANLIHSSAATSKKMQKYLRLLNLRLDVVVKDICGLTGLAIIDAICKGENNPQKLASLRHGNCRKSEEEIAKALHSNNRKDYLFALKQELDTYEYLQKKIVECDLEIDKQLNKIIGDDDNKKQHYIEPKPHKRINKNTPKNIDLNLKSYQMFEGSDLLAIEGMSYSTVLALMSEVGIEGIRKFRTAKHFASWLRLAPNNKVSGGKVLSSRVPRGSNRLKIALRNAANAIGNLKESTPLRDFFHRINFRKGRVSAISATARKLAVIIWNMVVKGVPYVNPEGYLFLDQKRKLGLVKRIKKQIDKFALTNKDLGLST

SEQ ID NO: 283359 - protein, 395 aa, unidentified
MFIVGIDIAKRSHEAIIITEDGQVVRKAFSFRNNCTGYNLLLEQVRRLTLVKSQIVFAMESTAHYWLALYARLLKDGYTVMVLNPIQSHSLRELYIRKAKTDARDSLIIADLVRFDRCKASNVPQDKILALRELCRSRAYLVDMAADLKRKLIALLDRIFPEYESLFDSVFSKASIAVLRKYSTPQKVKNANLRKLTDILMESSNGHFGEWKAHQLKEAACSSFGIDDSDGVYSTLLGMFLEQILSLTAQADSLEKQISVFFQEFNNPLTSIPGVGTVLAATILSEIGDITRFSSADKLLAYAGLDPSVKQSGEFKSNQNRMSKRGSPYLRRAIWLASTVAVHRDPMFQTYYEKKLSEDLHYMNVIGHVSRKMTAVIFAVLRDGQPYQPILQSAG

SEQ ID NO: 283360 - protein, 428 aa, unidentified
MKTNNNAKLEAITHKTLIVGIDIAKLTQWARFVDYRGLELGKAAKFKNDKNGFENILATIEWFCKTKSFDAVIVGLEPTGHYWKPLANYLLKHDVKVVMVNPYHTKRAKELDDNSQTKNDKKDALTIAKLVRDGRYYDVYMPQDIFAELRVLTNTRISLMRRHNSIKNTITALLDEYFPEINTVFKNVFRGKASMQILKSCPFPALILELGVEGVLTEIKKVVKRSVGRKKAEQLVETARNSIGVNYGLSSAKFKLDLMVEELDLLTRQLEQIEDAMASALSQLDYADLILGIQGIGVVTAASLLGETGDLLRFDHPRQISKLAGYNLVEDSSGKSKSGTIISKRGRKNLRSILYRIALVMVAKNNEMKELYQYLKTRKDNPLKKKPALVVVSKKIINVIYHLVKKNMEYKPELVLGEYRKNQISQAA

SEQ ID NO: 283361 - protein, 344 aa, unidentified
MGEVSTIGLDIAKSVFQIHGVDRDGEVAIRKRVSRAKLLEFFAGLPPCVIGIEACPTAHHWSRKLQPLGHTVRLMPPSYVKAYLKRSKNDANDAAAICEAVTRPSMRFVPIKSEQQQSGLMLHRSRQLLVRQRTMLSNAIRGHMAELGIISAKGRNGTAELLKIIATENDDCIPAAARLSLDVLARQYVAIAAEIGVIEKRIHAWHRSCAESRRLEEIPGIGPIVATALVAEVGDWKAFSSGRNLAAWIGLVPKQHSTGGKERLGDKTGQGNRYLRWLLVAGAMAVIRYARQHGTKRLWLARIMNRRAIKVAAVALANKIARIAWAMMVRGERFKEPRLLPAVT

SEQ ID NO: 283362 - protein, 400 aa, unidentified
MLSVGIDVSKEKSTVCGMRHLGEIVFGPFEIAHTESDLSELARMIVRLDDDTRVVMEATGIYHLPVATFLREQGLFVTIINPYEMKVYRSQDIRNVKTDKRDSMVIANYGVDKWINLREFTPQEDVYAELRLLGRQYRFYMESRIEQLLNLTHLLDYTMPGLKSCFSGWSEYSGKDKLCDFVEEYWHYDNIIKFSESKFVERYQKWTKKKGYQFSETKAVQIYRLAKEGIPTVPSNAPSTKMLLLEATKALREINSALFAILTRMKELAKTLPEYPVVRAMSGVGDVLAVKLMAEIGDIRKYHSSKSLVAYAGIDPPPYESGKLIGTNRHITKRGSSTLRKIGYEVMRCVKANGRSEDDPAVYDFMLKKESEGKAKKAAKIAALNKFLRIYYARVLEVYA

SEQ ID NO: 283363 - protein, 360 aa, unidentified
MDDGNEVQQRRIVGGVDTHKDLHVAAVVDERDAVLATRSFATTRQGYRQLLAWMRSFGDLQRVGIECSGSYGAGLLRHLQAAGVEVLEVTKPDRRDRRRRGKDDDLDAQSAAHAAFAGQRTVTPKTRDGMIESLRVLKVCRKTAVSARRVALQLIHNTIVSAPDELRETLRVMTRMQLIRTLASWRPDLTDYRNLNSAYRIALKSLGRRYLELHDEIADLDAMIGAIVDELAPALVARNSIGHESAAQLLITAGANVERLRSESSFAALCGVSPVPASSGKVTRHRLNRGGDRAANSALHIIAIGRLRTDERTKAYVARRVAEGHSKLEAIRCLKRYIAREVFVLLSRRRREIGQTQFAP

SEQ ID NO: 283364 - protein, 361 aa, unidentified
MKKISTAGARQTKNFREQKLTIGLDLGDRWSWYCGLDEAGEVVLEQRLGTTPKAMKEVFGEMPRSRIALETGMHSPWVSRVLSELGHARNVRLIGESRRKDDRFDARTLARLARIDPQLLAPVQHRSAQAQADLMVIRARAGLVRARTSLINTARGLAKSYGERLRGCNVRNMNPEKAEGLSPKLQAALAPLLGAIESLSERIYEYNQQIEKIAKESYPQVARLKQVKGVGTLIALTYLLTLEDAQRFRQSRDAGCYVGLQPGRRNSGQSEPQLHISKEGDPYLRTLLVQGAHHILGPFGADSDLRRWGLKLAERGGKNGKKRAVIATARKLAVLLHRLWVSGETYEPLRNHHREVLPAAA

SEQ ID NO: 283365 - protein, 367 aa, unidentified
MKNHSSIDQSVSSSDLSACTTLAVDLAKQVFQVAGEDILGQVFYEQRIKSREAFYDFLRQLPPHVVVLMETGPGAQAWARQLQDQGNPVRILPAGLVATHRSGPKNDRNDALAILRANRDEKICAVPVKSVAALAMQALHRARQGYVRRRTALSNQMRGLLLEHGVALAQGDVAISQKIPRVLEDATQPVPGLLRELIDELLAEWRHLGERISVLTGRLEVAANTDMTAKRLMTVRGIGPITATALVAKETKPERFPNARKFAAYFGMVPDQHSSGETVRLGGMTKRGDAYLRSLMIQGAHAVLQQLRPDSQQPDDRRLLHWMSRLGRKEAAIRLANRNLRIVWVLLQNDQTYRRHAGDGQPATMGH

SEQ ID NO: 283366 - protein, 382 aa, unidentified
MPAYADPTPTPISADTIFLAFELSGTSWLVALHAPDADKVERHRLSAGVAAEVLGLIARTKARVTRRLGTTPRVACCYEAGRDGFWLHRVLEAEGIASHVMDPSSLQVDRRARRAKTDRLDAQALLRALMAWSRGERQVCSMVRPPSPEHEDERRLSRERGTLLKERLRLSNRIKGLCAAQGIYDYEPLGADRRERLARLVTGDGRALPGRLAAEIGRQLDCLELVLRHLAEVEAVRDARAAQAREEGGSKLATLLRLKGIGPELATVLELEVFHRHFANRRDVAAYAGLAPSPYASGGTSREQGISKAGNRRARKALIELAWLWLRHQPESALARWYRDRVGTATGRVKRIAIVALARKLLVAIWRYVETGLVPAEATVRT

SEQ ID NO: 283367 - protein, 319 aa, unidentified
METATSSSLLYVGIDVAKEHLDFAFGATAAPEQSAYTTAALKQLVTRLQALPAVQVIVEATGGLEIPLLTELWAAGIAVARVNPQRVREFAKASGRLAKTDRLDAQLLAQFGAALQPVVTPLPSEASQTLAALVDRRRQVVAMRTMESNRRLSAPQTVQARLEQHLAWLDAEIAALEQEISDFIQQNPAWAEKDGILQSVPGVGQVTARTLLAEMPELGAIDRKKIAALVGVAPFNHDSGHLRGKRFIQGGRYAVRSVLYMATLSATRYNPLIRTFYEHLLAAGKAKKVAIVACMRKLLTILNAMLRDKQAWNPPSTSC

SEQ ID NO: 283368 - protein, 422 aa, unidentified
MLEPTQDHEQIIERVAALDIGKAELACCVRVPDPNASGKRLQEVVTYSTMTRSLLGMADRLRQLGVTQVVMEATGDYWKPVFYILEAAGFETWLVNARDVKHLPGRPKTDKLDSVWLCKVTERQMLRPSFVPPPAIRVLRDLTRYRVDLVGVRTAEKQRVEKLLEDAQIKLSVVASDIFGISGRAMMAALIAGERDPKVLAQMARARMRAKISQLEEAFHGRFSAHHAFLLAKMLARIDAITDDITDVEAQIEAQIAPFADAADRVDGIPGVGAIGARVVLAEIGLDMTRFPTAAHLASWARFAPTVSESAGKKKGRNATGHGNPYLARVLGEAAVAAGKTDTFLGERYRRIARRRGKKRAIVAVGRSILIIIWHLLSDPQAEFVDLGPDHYDTRGGPQRSIRNHVRHLEALGYKVTLQPAA

SEQ ID NO: 283369 - protein, 451 aa, unidentified
MEEPQEVQDEEYEQVWERVAAVDVAKASGVVCTRVPDEDRPGRRRTRVWTVTATMNGVTELADHLRCQGIQIVTLESTSDYWRVWWVVLEAAGLRVQLVNARSVKNVPGRAKTDKKDAVWLAKLTERGLLPPSFVPPPQIRRLREFTRLRADLVHERSRYWARLEKLPERALIKISAVASTLDTDSCRAMIEALIAGERNPEVIADLAIGRMRPKRAALAEALHGDWQPHHGELARILLGQIDALTAQIDALTARVSELIAQIPAAQGVDADGVTGPQAGYGPGAPVLPAVARLDEITGRGVIAAQAVIAEAGLDMTVFGTPGRLVSRAKRCPRTRQSGKKTTGGKTGKGNPWLNGILGEIAASASRTDTFLGERYRRIARRRGKRKALAAVARSILVIIFCLLADRQARFRDLGPDWYDRCIDKHRKTRNLIRQLEALSHTVTLGTPAAA

SEQ ID NO: 283370 - protein, 345 aa, unidentified
MLYAGLDLSRKRLDVEVRDGDGAVVAVTAVSPDADGLRTLVERLEPFGRVRAAIESMNGARFVHDELELLGWQVEIADAQKTKGLAPLACKTDKIDAGVLAELCRLALVPAIWLPDPAVRGERERARFRLHLVRHRVALKNRIHATLIAFGKPCPVSDLFGVGGRRLLAQLALPEPWSHTVEASLRLVDQLDQQISECERDLRRRGADHPYVELLTTMPGVGWVLGYTIAAEIGTITRFSSPTKLCGYTGLCPRVYQSGSVDRRGPLAKNGPRYLRWALIEAAQHAARSVYYQPLYERTKTRLGRNRGSKIARVTVARKLAEASWHMLTRNQPFAPAGATSVLTA

SEQ ID NO: 283371 - protein, 341 aa, unidentified
MRLFIGLDVSLAKTAICVVSEHGKIVREAEVTSEPEPLLEWLQTLDGDIAALGLEAGPLSQWLHRGLADAGLDTVLMETRQVKGALKAMPIKTDRRDAEGIARLLHLGWFRPVHCKSVSAQEVRVILSARKAIQQNMLALEMSLRGLLRNFGLKVGAISRGKFEHRIRELAEGNAMLETATAPMLRARASLRRELAGLERLVRQMAQDDPVCGRLMTMPGVGAVVALTYRSAVDDPTRFTSSKNVGPWVGLTPSRNQSGERDVSGGITKAGDVNLRRALCQAATVMMSRGRATWLRTRGAQVAKRRGRKRAMVALARRISVILHRMWVDGTTFQMEAAPRT

SEQ ID NO: 283372 - protein, 313 aa, unidentified
MSVALSKPIVGVDVAKNELVIYQADGDVLKAIPNTKTSIKQWLKALLGPVSIAIEATNIYHLEFADLAYEAGCTIYMVGGYELKHYREGVKIRAKTDALDAKLLARYLKNEAEELRPWTPPSPMYRQLLSLFRRRAALVQARVGLVQSWSNEPLLKAAFAEQIKSMQRLETMIEKTINDQLKQSGLLGQLKRCLKVEGIGFLTGARLLTAFQRGEFSNADAFIAFLGMDLRVSKSGQKDGRRSLTKRGDPEARRLLHNAAMSASRTKAWKGFYEAQRARGFSTTQALVMLARKLARVVFALLKGQSEYQPKVS

SEQ ID NO: 283373 - protein, 408 aa, unidentified
MNPLYVGIDVSSKNNVIYLMLPNGDKHSSFSLANSHDGSTQLVKRIFTAMTSNNIDSVLIGLEATSVYGDNLVYFLKEDTTLASFDRKIHVLNPKQVNKFKESYNDLPKNDYIDAFVIADCLRFGRINKEVYMDDYRYKALQNLTRARYFAVTNLTKEKQRFINVLFKKYSTMTQEKVFSDTFSTTALAVYEKFESAETLAKMDLQELTAFIMEKGKNRFPDPDAVAKALQKAARSSYRLPKTVNDSVNQVLAISITSIRALESQIKAFDKAITKQMELLPNVLISIPGIGPVLSAGIMAEIGDINRFQNQAALAKYAGLAWQQHQSGDFEAQTTRMIHSGNRFLKYYLCEAAFSLVRCDKEYSRFYHIKYKEVNRFQHKRALALTARKFVRLVFALLKDNRLYRPAE

SEQ ID NO: 283374 - protein, 418 aa, unidentified
MEVLRERCAALDISKRDVKACVRVPSPHRKGARSQEVRTFASMTNALLQLREWLISERVSVVTMEATGDYWKPVYYLLEDAGFELMLVNARDAKGLPGRKTDVSDSAWLCQLTECGLLRASLVPPEPIRRLRDLTRYRTTTTRERNREAQRLEKVLEDACVKLSVVATDILGVSGRAMMQALIDGEHDPEILAGLAKQKLRLKHDALVEALAGRFNDHHAFLCGIILRRIDELTAVIEEVTSRIDAELVPFDDAVEHLVTVPGIDRKGAAVIIAETGGDMSRFRTAAHLASWAGVCPGSHESGGVRKSGTRRNGNKALGAALGTAAMGAARTKNSYLRERYYRLAARRGKQRAIVAIEHSLLTAIWHMLVNNIDYHELGPDHFTRREPAHVMRRITKQANALGFTVRFDPLPETAGAS

SEQ ID NO: 283375 - protein, 467 aa, unidentified
MKSFYLGIDVSKGYADFVIVNQQKQPVVKNFQLDDTFDGHSRLHEIVSRFLTNHPQSIMCAAVESTGGYENNWYNTLIRLQASLNIKTARLNPLAVMHNSKADLKKNTTDKISAQNIAEYLIAHPEKIVYQQQDQLANLRKQWGFIQMLTKQCTQLVNQLHSLLYTANPELLNYCRNEMPAWVLKLLLRYPTAAKLKKARDKTVAKIPYVSLTRAKQLIAGAKLSVASATDPLTAQLVTATVEQILQLKKTIAAQTNLMAAHCDVPEVKLLKTFVGIGDMSAIGLILEIQSVARFKTVKKLASFWGLHPVYKISGDGSGAFKMSKQGRVNPRKILYTVTLSAIEHNPVIKPIYQYHLQQGRHKMDAIGICMHKILRIIYGMLKNNTAFDPKIDAANRQRSLPDMTSDPKKNKNRRFQNYDSKAPVSRRQRKKRLEREQSHSVITDTKCGISAPVPIGDIISDMLCNI

SEQ ID NO: 283376 - protein, 461 aa, unidentified
MKHNPKREANKGRVSISLLERIQPDAAGIDCGQNSHFVAVPPDRDPQPVREFRTFTADLHRLADWLTQCGVKTVAMESTGVYWIPLYEILEQRGFQVVLVNARDVHNVPGRKSDVKDCEWLRELHSVGLLRASFRPSAAIVPLRAYLRQRETLVQETSTRIHRMQKALTEMNVMLHVVVSDITGQTGLKIVRSILVGERDPERLAQHRDHRCRASHAEIVAALTGNYRAEHLFALKQNFAAYEFLLKQTAECDSEIEALLSTLADRQPPPTAPLPDARRKQVSKHAPAFDVRGPLHRLTGGADLSQIDSIGPHAALQLIAEIGTDMRRWPSEKHFTSWLSLAPSNQISGGRLLSSRTRPSANRAAAILHRCAMSLSRTSTALGAFYRRLAARVGKAKALTATARKLAVIVYRVLSGNLIYNDPGATAYHQLHHARELKSLRKRARLLGFQLVDQTTGEVTA

SEQ ID NO: 283377 - protein, 358 aa, unidentified
MEYFAGLDVAMEETAICVIDREGKVALETTATTDPDAIVTVLRPYVAKLRRVGHEAGSLSPWLQVELKQRGVPAVCLEAWHARAALSAMRNKTDRADARGIAHIMRTGWFREVHVKSEESYRLRLLLTQRRNLKRKFLDIENAIRHSIKTFGLRVGQVSRGQFEARVRELVANDPLIAGLTDCMLRARAALWQEYVRLHKVVVDVVRRDELCRRLMRIPGVGPISALAFKTAIDDPRRFRQAKTVGAYLGLTSRRWQSGTSIDIAGRISKAGDGDVRHTLYEAANIMLTRFRGFCSLKAWGLRIAKRRGHKRACVAVARKLAGIMFAMWRDGSEFQFKAQRQADGNATSMPKLIGTAA

SEQ ID NO: 283378 - protein, 443 aa, unidentified
MSFNGAPVMAATVVAVDVGKNKAALVVTSADRHRLFGPAEFAMTAPALAGVLARVCAVLPAEPVKVGVEAAGHYHRPLLGSGVWPSGWEVLELSRARVSEQRRVQGRRRVKTDAIDLEAITELVLAGHGVVVTARAAAVTELTGWAMHRDRRVQARTATKNQLLGQLDRCFPGLSLVLPDVLGTKVGRLVAAEFADPHRLMALGVSRFVRFAAHRGLRVRRSTADRLVAAARAALPSADARVACQVLADDLVLLACLDDQIAAAETKMAQLLPDTPFAPLTTVPGWGTVRAGNYAAAVGDFDRWLGARQLYRASGLSPAQYESAGKRRDGGISREGSVGLRRALIDLGIGLWRADAAARRYGQQLRARGKKGGVIGCAMANRANKIAYALVRDQCGYDPRRWALTALGDSSIAAYPGARSSGQLGAPAAQRGRMRLIAASSDA

SEQ ID NO: 283379 - protein, 315 aa, unidentified
MSESKVEVFVGIDVCKSTLDVRIEPPGEVFQVDNDDAGIRALCTHLSELAPTLIVMEATGGLETRAAGELAARGLCVAVVNARQVREFAKATGQLAKTDRIDAGVVCSFARAIRPVARPMKEALTAELDDLVTRRRQLVEMRVQETLRLQGASKVQAKSLKAHIVWLNKRIKSIETDLGTRLRSSDAWRVKDDVLLSIPGVGEITSRSMLSRCPEIGQLNRREIAKLVGIAPLNNDSGKYRGQRHIWGGRADVRSVLYMAAVSAKRCNPVIKALAERLKRAGKAPKVVIVACMRKLLTIMNAMIRSNTPWNPKIA

SEQ ID NO: 283380 - protein, 388 aa, unidentified
MQIVTDRSQAPTAIRTDLGAIFVSLELSRSTWLVTSLSPGGGEKMSKHMIRSGDVAGLWSRFSQLKDKALDRTGQVVPIIVIQEAGLDGFWIHRLLQSERIESHVVDPASIATSRRRRRAKTDKIDGEALVRALLAYKRGEPRVCTMVRAPTPQEEDRRRICRERKTLTAERVEHVNRIKGLLFAQGISDYEPLLRKRWERLEELRTGDGRPLPEHLKAQIRRELDRLELTLQQIKAVETERNAMLSPSDDGTPAPGAILKNLKGIGPEFAGVLWSEGLFRSFSNRRQVAAYAGLAPTPWRSGSVAHEQGVSKAGNPRLRTTMIQLAWLWVRHQPRSILTLWFHQRTQLNGGRVRKVLIVALARKLLIAFWKYVTAGVVLEGAETTSA

SEQ ID NO: 283381 - protein, 376 aa, unidentified
MRNVRFIGLDVHAETIAVAVAEPDGEVRSLGVIPNQPESIRKLVKKLAPAEQLRVCYEAGPTGYVVYWQLTALGVPCEVVAPTLVPVKSGDRVKTDRRDALKLARSYRAGDLTAVWVPDAAHEALRDLVRAREAAKKDQLRARHRLGKFLLRHGRRPSLAMNTWTQRHLEWVKTVHFTQGAQEATLVDYLHEVEHVAERIMRLERAIDEAVKTVPGSMRTVIEALQALRGIALVSAVTIVAEVGELSRFAKPSQLMGYSGAVASEDSSGGRIRRGAITKTGNAHLRRVVIEAAWAYRYRPAVGAALRKRQATVAPEVKEIAWKAQHRLHTRYRHLLAKGKCKQQVVTAVGRELLGFIWAIGVHVEAKRRQSEPVAA

SEQ ID NO: 283382 - protein, 324 aa, unidentified
MGIDVSKSTLDCHLYLQREDFSSVANSVQGFKQVSKWLKKQCKGNTNGLLVVMEHTGIYTYGLEQYLYKQGIAYVKRPALDIKRSLGMVRGKTDRADARFISKYGWMRKEELTPMKPVSDKLVELQQLMSYRDKLVADRASYLTRIKELEGQMGKKLSSKISDSSTYIMDVLNREIKDLEQAIKELLKEEQALQTNYELATSVVGIGFATAVHFIIATENFTRFPDARKLICYCGVAPFKHESGSSIRGRTRVSPLANKKLKSLLTMAAICAVRFDKDLKGKYEQKVAEGKPKMSVINIIRAKLIERVFAVVKRQVKYEIRAAA

SEQ ID NO: 283383 - protein, 491 aa, unidentified
MSFFSKATKQLTGPRYFGIDLAKRESQVAVLDADGVQIETKRFATTRENFLAMAREFRTGDTAALEVTTNSTSIARLLRANSPARVIVSNPIKTKTIAQAKIKTDKIDARVLAELARVGYLPEVWLPDEDTEALRQFITDRTSLVRRRTECKNTIHSVLHRNMVRQERSDLFGTGGRRWLDGIVRGVGVKAPVPELDRMRIGSLLNEIDRIDALVADLESVIASYVACRPHLKEQMDRLLSITGVSLVVGASLIGTIGDISRFPDKKKLAAYFGVVPSTYQSGDTSRNGRITKQGRAEARWLIIEAAEILRRSPGPMRSLYTRIQRKRNHNVAVVAVARKLVELVHHLLTKEEDYVYKLPRLTQEKRARWRFLAKRKIGVELKSAAARRAGRSALYGTGIGVQGRKLKSDIAKRAALDAERLYTAIVDQRQRHLEDPSIPLIPSSDFVFDPTQPRETDWERILSQHTERLLLRYQKREASRSASTPKPDIA

SEQ ID NO: 283384 - protein, 378 aa, unidentified
MSRGLGDVYKRQEIIIEPFKFTNDADGFQLLVSKLESFDKNSLIIGLESTAHYGDNLVRYLVTELYQVCVLNPIKTCQMRKNNVRKTKTDKVDTYVIAKTLMMQDNLRFVSFFDLDMMDLKTLGRFRQKTIKQRTRLKIQLTTYVDQVFPEIQYFFKSGLHQHAVYALLKEAPSPKEIASMHMTHLANLLKVNSHGHFTKEQAKELRVLAQKSVGANDSAISIQITQTIQQIELLDSQLEKIEAEMTDIMKFNDSVIMTIPGIGYINGGMILGEIGDIHRFSNPNKLLAFAGLDPSVYQSGNFQAKTTRMSKRGSRVLRYALVNAAWNVVRNNATFKAYYDAKRAEGRSHYNALGHCSGKLVRVIWKMLTDNVEFNLK

SEQ ID NO: 283385 - protein, 344 aa, unidentified
MNLTRVGVDLAKQVFQVHGVDRHERVQVKRTLSRRQVRSYFAEQAPCLIGMEACASAHYWARELSQLGHTVKLIPPQFVKPYVKSQKNDANDAEAICEAVGRPTMRFVAVKSAAQQDVQALHRIRSELIRQRTAKANQIRGLLSEYGIVVPVGIGTLRRAIPEIQEDAENGLSSLFRRLLSGLRQDLETFDTRVAELDAEIVQAALSDETAQRLQSIPGIGPMTATALVAAVGDARQFARGRDLAASLGLTPGQHSSGGKERLLGITKHGDCYLRTLLVHGARAVLKGAARKDDPRSRWVTSVAHRRHKNVAAVALANKMARIAWALLTRGGTYDSQHGMTAAA

SEQ ID NO: 283386 - protein, 348 aa, unidentified
MKEQIAIQNKIEVVGIDLAKNNFQICCADARGKILKEHLVRRKDLLAIMAQLPPSLVAMEACGGAHYWARQCQKLQHKVLLIPPQYIKPFVRTNKNDRADAEAIVTAALQPNMPFVPVKQESQQEIMTIHRLRSILVKHRTSLINNIRGLLAEFGMVFPQGFASVRRGLADILSPTNESLPNSLKTAFSEIFHELLQLDQRITIYDTQLHANVRTSESCRRLMTIPGIGVMTSTALVGTIGDWKRFSNGRALSAYLGLVPRQHSSGGSHRLLGISKRGDKYLRSLIVHGARSVLWYSKRKSDRFSQWACACKEKRGFNRACVAVANKLARRCWAIMVHNTKYQEAFIS

SEQ ID NO: 283387 - protein, 342 aa, unidentified
MTLYIGVDIHARQQTLSYLDTVDGSIACAELDHEKDDVREFYSQFKGEVVIGIEASGYTNWFEEMLEQLGHKLLVGDPAEIRRLARRRQKNDRRDADLILDLLWHQEFPALFRYSRESREVLRQLRYRHKLVKLRTMVANSLHALALNAGLSLRAQLLTKGGKKQLRSLPLSAITQQQRDELISLADELSKRILKIEQWLQLQAHQDPRVRRLQTHPGIGLLTSLCLIHTLGELSRFPSTRKLAAYVGFDPMEDSSADRKAYGGISKAGSKLLRYLLIEAGQTAARQDDQLKQFYRRLLPRRGKARARVAVGRKLLIRCFIMARAEIDYAEFLRRGQQDVTE

SEQ ID NO: 283388 - protein, 318 aa, unidentified
MAEKGCCIGIDVAKNWLDWAADGHGRVQRLGNDAAGIAELVSELQALRPALVVMEATGGYELAGVRALQEAGLPVTVVNPRHVRDFARASGKLAKTDAIDARVLAAFGAAFRPAPLPQSKASAAAFADLVARRRQLVEMMIGEKNRLEHAQGQVRSWIEESLAAMKSQLAQVDETIALAVKADPQFQRRFEILTSVGGIGKVTAAVLIAELPELGKIDRKKLAALVGVAPINRDSGMRSGERHIGGGRASVRCALYMATLTAIRSNPSLKAFHHRLRPNGKRPKVAIVAAMRKLLALLNALIRDDQLWTPKPLAQDGC

SEQ ID NO: 283389 - protein, 373 aa, unidentified
MRFYNGQHPFYCGIDLHARSMHLCILDQAGQVVFDRNLSCRPETFLRAIAPFRDGLVVGVECMFAWYWVADLCKHEGIAFVLGHALYMKAIHGGKAKNDKIDAGKIARLFRGGTFPLAYAYPKGMRETRDLLRRRTYLVRKRAELLTHVQILNAQYNLAPFPKKLSFATNRTEMNIAARFADASVQKSAAVDLAVVDRLDELIGELELYLTRTAQVDDVQTYHRLRTIPGVGKVLALILLYEMHDVQRFERAGQFLSYARLVRCAHESAGKKLGSGGKKIGNAHLRWAFAEAACLFLRSSERAKKWKQKQAAQRGEGKALAILAARLGRAVYHMLRKREAFDEERFWQGGTRRNGTGSSSRSPAEACHAGTMT

SEQ ID NO: 283390 - protein, 345 aa, unidentified
MKCNPAVATIAIDLAKSVFQVLAVDQDGRAIDSHRLSRAQFIAFWQNRAPVRVVMEACGSAHHFGRWLSALGHQVTLLPAQYVRPYVRRSKTDAADCLAMIEAARAIDLKPVPIKTELQQVIQLLHRARQQWQETRTARINLARGLLREFGIVIPEGAERGQQAMRTALGHEALDQRMRDLIASLLDEIRALEQRVVDADRALASTAKDDRVIADLEKLPTIGWVTATAVRASVGDIHRFKNGRVLSSWLGFTPKEHSSGSTRQLGRMSKCGDVYCRTLLIQGARAVLAAAKRAQAAGKPLDRLRAWAVALAERRGFNKAAVGLANKMVRIIWATWHHARSFDAD

SEQ ID NO: 283391 - protein, 429 aa, unidentified
MNYNTQNAKIASITEKTLIVGIDVGSETHYARAFSWRNYEYSKKPFAFRNDEDGFASFKAWMDDIAEKHEMEKVIPGMEPTGHYWLNLGAYLQGQGMRPVHVNPHHVKKSKELDDNNPNKNDRKDPKTIAGLVNEGRFSYPYIPTGIYAEIRNLSNLRIQTQEEITRIKNRIARWFSIYFPEIKDVYRNPDAVSGLMVIKQAPLPCDIKGLGVDGVNKIWRDARLKGAGLKRAKTLVTAAEHSIGNTEAPRSARKEIRNLLNDYEIYKSRMDELMEEIEELLSEIPYIDKLMGICGIGIKTVSCFIAEVGDIERFDNPKQVQKLAGYAIVADSSGKHNGESRISHRGRKRLRYALYEAAISVIGKNKEFKEIHHYYRTREKNPLKKMQSVIAVACKLIRIFYTILTKGIDYDGQKMLRDIVRPGMQSAA

SEQ ID NO: 283392 - protein, 350 aa, unidentified
MNSCLSRMTVGVDTHADTHVAAAVDPLGRTIATAAFPTTLAGYADLLAWARSHGDIDGVGVEGTGCWGAGLTRFLADHDVRVVEVLRPDRRDRRSHGKSDTLDAEAAARAVLAGTATNTPKSRDGVVEAIRALRSARDGAVKARSAARNQLRCLIVAAPAGLRADLQDLTWTRLVAACANLTAGDLTDPAEAVKTALASMARRWQHLHAEITALDRQLDTLVTAAAPQLLERTGIGVQSAADLLITVGDNPQRIATEASFARLCGVAPLPASSGKITRHRLNPGGDRRANRALYTIVITRMRQDERTRDYVARRTEQGRSTREIIRCLKRYVAREIYRDLIAPTQPVTTT

SEQ ID NO: 283393 - protein, 353 aa, unidentified
MAHGTTNAAMVTIGLDLGDRQTAGCVVDAGGQILERFQARTTPTRLLAAVTRWPGARVVLEVGGQSPWVSRRLQAAGYGVVVANARRVRLIAEGDAKSDRLDAELLARLGRVDPALLAPIQHRSERTQRDLGVVKTRAALVRMRTLGINHGRGVAKALGHRLPACAAEAFPARVRAQAVGATLPGITELLAVLEQLTASIRALDRQLATLATTRYPVTELLRQVPGVGPLTALTYVLTLEDPTRFPRSRTVGAYLGLRPKRRDSGAQQPELSITKAGDVLLRRHLVTAAQYILGPFGPDTDLRRWGLALAGRGGKAAKKRAVVAVARKLAVLLHRLWLTGEVYEPVGYRARAA

SEQ ID NO: 283394 - protein, 414 aa, unidentified
MKLFVGIDVSSEKLDVCFLDSSDTTLKEVTLPNNITGASSIKEDVLRYHQLFDYEKIVIGMESTSIYSFHPATFLSEDLDLKSLGIVEVVVQNPKAIHRYKSLFDEDKNDRIDAFRIADFLRIERFNKTVLKEECYVALQRLTRRSRYQMVHQLTECKQHFLENLYYKCNTLSKELDTSVFGATMLDLLSDSLSLDEIAEMELEDLATLLQEKGRGRFSDPQKLAKTIKKAIRDSYRLGKVVQESVDIVLATYARLIQTLKKQIKELEKSIVALFEVVTEAQCLKSVPGIGVVYAAGIVAEIGQIERFENEAQLAKYCGLYWKKNQSGNFESERTPLTRTGNQYLRYYMVEAANSIRRHEETYRCYYQKKYNEVPKFKHKRALVLTARKLVRLVDTLLRNHQLYTPERSVSLKS

SEQ ID NO: 283395 - protein, 337 aa, unidentified
MKFSGIDLHSNNSVVVVSDEEDRIVYQKRLPNNLEQIRAALAPYRDELVGVVVESTYNWYFLVDGLMDAGYRVHLANTTAIKKYEGLKYSGDFADAAYLAQLLRLGLLPEGYIYPREERAGRDLGRKRMQLVRCQTMQILAIESILARQTGGRMSSERVKRLTAEQIKELGLVPDVALALEANRAVSETLQRQIEALEERLKERVKLRPEYRLLKTVPGIGETLATTIMLETGTMARFASVGNFSSYCRCVDSRRESNGKKKGEGNAKNGNKYLAWAFVEAANFALRYCPEAKRFYERKKRKTNGIVAIKAIAHKLARACYHMLREQKPFDVQRCFV

SEQ ID NO: 283396 - protein, 425 aa, unidentified
MKEEAQEEREFGVYIGLDWADRTHVISLRRNGSKKMERYVLAHTPEALAEWVSGLQQRFAGQRIAVALEQSRGAVVYALMGYDFLVLYPVNPKTLAKYREAFSPSGAKDDPTDADLLSELVTLHRDKLRAWLPDDEQTRTLSALVEYRRDLVATQTRLTNQLTSLLKLYYPQALAWAGELTTVQACDFLQRWPTLAKVQQAAPAKLRQFYIQHGCRKADVIERRLQEIKLAQPLTRDGAVITASLAMVQASTSQLRPVMEGIAQMEKQIAALFSQHADHDLFSSFPGAGPVLAPRLLAAFGTDRGRFATATEVQQLSGIAPVLERSGKTCWVHRRWACPKFMRQSFHEFAGQSILRSAWARAFYDQQRQRGKGHHAALRSLAYRWIRIIHRCWQMRVPYCEETYCRALERRQSPLARVLSAQTQN

SEQ ID NO: 283397 - protein, 319 aa, unidentified
MQCLGIDVSKDKFDVALLVDESNLEKFKQKSFSNDADGFGRLIIWLNARASEPVHFGMEATNTYWESLAEFLVDQGLLVSVINPSLVKKEAQSWGMRNKTDKADARVIARYCAAKRPQAWVAPSMEVRELRDLVRHLSCLQEERQRHRNRLETVSSDAVRSSLEQLIVFLDEKISDLENGISDHINRHPGIKSDADLLRSIPGIGDKTIAVILSELPDVSNFRSAKSAVAYGGLSPRRVESGNYKGATRLCKFGNAKLRRALYFPAVVATRYNPLIREFYIRLRANGKCKMSAIGACMRKLLAIAYGVLRTGTPFRVPA

SEQ ID NO: 283398 - protein, 343 aa, unidentified
MQMITTIGLDIAKSVFQVHGVDAAGEVVIRRQLKRRYVLAFFQKLPSCLVGIEACASSHHWSRELQALGHTVRLMPPAYVKPYVKRQKNDMADAEAICEAVTRANMRFVPTKTPEQQSCLMLHRTRHLFIRQQTAVINSIRAHLAEFGIIAPVGRKGVTELLHVVADPSDKRVPEVARACLAALGTQLLRLKQQILEFDRMIMAWHRSNQTSKRLHYIPGVGPMLATALVASVADPRTFRSGRNFSAWIGLVPKQHSSGGKDRLGSISKQGDRYLRSLFVAGALAVIRYAKVHGTKHRPWLTALLGRRPTKVAAIALANKIARMAWAMMAKGERYKQPVALAA

SEQ ID NO: 283399 - protein, 321 aa, unidentified
MTYVGIDVSKATFVVAYSSAKSSETKTFKNTTKGIREFIRTISPEENHCVLEATGNYSMLLVYLLSKAGFTVCMENPLKIKNFARVMLSVVKTDEIDARLIALYGERMQPAPFKLRSDSLLLLKQKRTVLRQLKKQLIANRNLEGSLKVLPFIDSKCKKVLEKTIKFLEKQIEEMEEELTSLAEIEYKKQMDLLTSIKGIGATLAAALIIATGGFTYFDNAKQLTRYLGLSPTYQQSGTSVNVKGHINRNGDAYLRSQLYIGAMASLRCNTECKACFDRLRSNGKPGKLAIVAVANKLIRQAFAVVAHEKKYIDGYKSVKP

SEQ ID NO: 283400 - protein, 416 aa, unidentified
MFAVGVDVANGRSMVAVLDGMRNMVAKPFEVVHTAQGFAALVEKLRQLDGEVRIVMEHTGRYYESFAMTMHRAGFFVSAVNPLLIKNYQGSINVRKVKTDKADAQKIAQFALDKWTILPHYTPMDTIRYNLKTLHRQFQLASKTKTALSNNLIALLEQSYPGANRYFDSPVRTDGSQKWVDFVDTFWHVDCVAMSSEHAFVERYRKWCKRHGYVFSEQKAIELHADARQKIPLVPKSDTCKLLVREAVSQLNAVSRTVETYRAEMDRLASQLPEYETVMGMTGVGKSMGPQLMAEIGDLRCFAHQKSLVGFAGTDPIKEESGDKVSQSAPSSKRGSPYLRKTLFVIMTILLQLQPQEDPVYQFLDKKRSEGKPYYVYMTAGGTKFLRVYYGKVRDCLKAKGLWEVPASASQEVNPG

SEQ ID NO: 283401 - protein, 344 aa, unidentified
MNSMHYIGFDIHKKIISFCEKQVDGTVIYQGVIRATRKDLNKWATERKIPWIGAMEATLFTGWIYDYLHPFAKELKVAHPEMLKAITAAKKKNDAADAEKIADLLRCNLLPECYMAPTEHRNLRRILRYRNLLVREAAKMKTKTATLLMEVGAEYSKRRLHGGRYFQELLRNLDYVPDSVLNLLQMSHDSADFFSKMQKTLIYALRNESQISKRVELLMSIRGIGEVTALTWVLEMGDINRFGSIGQMVSYCGLCSAQKESAGKEIRGPISKKRNKHLQTVLVEAAKLAPQWNPQLAEIHERELKKGNRNRATLAVARKLVAYMQAVDKTKKSFVPKEILKEAA

SEQ ID NO: 283402 - protein, 342 aa, unidentified
MGVDLGDRKCHICIVDAKGEIVKEEAITTSPTAFQDYFKRLPKRSVVAIEVGPHSRWVSQVIGECGHDAIVANASKVKFIFANNGKNDRVDARSLARLARVDRHLLFPIHHRSNSAQFALSVLRARDALVRARTRLINCVRGLTKPTGVRLAAVSADCFPLRAAKQIPAELQLSTALTLEQIQSLSDSIAVYDQYIEHLVETQYPKAKLLQQIPGVGALTSLAFILTLDDPARFPKSRQVGCYIGLRPRQDQSGDSNPELGITKGGDEFLRRLLVNAAHYVLGHFGPDSDLRRWGLAIAARGGKRAKKRAVAAVARKLAVLLHHLWVTGDVYEPFHNSGKAA

SEQ ID NO: 283403 - protein, 468 aa, unidentified
MELILGIDLACRAAHQASLAGPDGTFVWTGRKFFTRPAELEKLWKQIGLGEHDTLRVVMEPTRNAWAPVASWFRRRGARISMVPTTQSADLRAYYSKHTKNDHLDSKLLARLPLLHPEGLREHTGDGPAEPLRRVVKIRSSIVKRRTAVFQRLDALLELLGPAWYDALGSNYGKAALALLARYADPHSLIRVGHARLTRFLIRHSRGAWREQHATMLLAAAQESLQLWGSGAEAAIDFAELAADIAVEAQQAQMLTEQIEDLDERCANLYAEADPTGIIASAPGVGPVTCAVIAGRIGDPHRFHCLAAIRSYSGLVPKLSQSGQAQHQHGLTKAGDPLLREALFAAADQARKTDPQLAAKYKRLMATERHHDSAICHIATTLLTRIATCWRTGEHYNLRDTDGRTITPEQGRQIVRTHHAVDKQTRIKAANTRQSQRRKGRTGREQKESPSAPVLRPDNTSINTVEVA

SEQ ID NO: 283404 - protein, 411 aa, unidentified
MLKIVYPVCCGLDVHKSFVYACVAATDDKGVTTYKSHRFSTFTGGLRDLASWLASHNCNDVCMESTGKYWIPVYNILESTCNIVLAHPKYVKAIRGKKTDKKDAKWIADIFKHDLVSGSFIPPYDIRQLRDLVRYRNKLTSFNTGEKNRTQNCLTVSNIKLDDVFSDVFSKSASAIIEKLLSNQGESFNVAPFVHVRCKTPIEEIQLAVDGLIAPEQAEKLKIIRSHMDNIELCQANLDSVILGLAAKYDHELELVMSVPGIQIFSAIAVISEIGVDMSVFPTAKHLCSWAGLTPQNNESAGKKKTTRISRAGAYIKPLLVQCANNAIRTKANPEIANRYLKLKKRRGHKKAIIAIARMMLTAIYNILKKNEPYNPELYCKVDKPPEHREVTVEQAIFILQRQGFLVSAPT

SEQ ID NO: 283405 - protein, 433 aa, unidentified
MSSPFIEFKAKGVFTVKVVYPTCCGVDVHKSFIVATIIKTEGITPKYAKKRFSTFNNDILRFKQWLLENDCRDVCMESTGKYWVPVYNLLEDKINVVVASPKWVRAVKGNKDDTKDSKWIGDLFRLGLVPGSFIPPKPIRILREYTRYRYKLVSCRSSEKNRYQNSFTVCNAALDSVVSDMLGKSASLITDYLVKTDNFDPEHCRTLLYRSLKKKYDAVIESIVGYEIAPAQKERMIFVKAHLEYVEKSLEMMDEGIDRLVAPYESRIALLSTIPGVDRRTAITIISEIGTDINQFSNSKRLCRWAGLTPGNNESAGKKKSVRITRAGVYLKPALVQAAHAAVKSNDSPYYKNKYERISKRRGKKRAIIAIARMILTAVFHMFKTGEVWNPADLFKVDMPPVLMEKQKQKAIKNAIKLLASQGLAVVELQPTA

SEQ ID NO: 283406 - protein, 343 aa, unidentified
MEAYSGKQFVGMDLHRRRTVIVRTTESGEVLETVRIVNDVERLASVMARAGECPEVVLEATYGWYWAVDALQAGGASVHLAHPLGVKAFEYRRVKNDVRDAADLADLLRMGRLPEAWIAPPAVRELRELVRHRAKLVGLRSHCKAEVHAVLAKCGVQVVMSDLFGVAGTQLLERLDLPAPYAARIASLRRLMDDLDFEIDLFAGMVRGRMVREPGYTAVQSIPGIGPTLAAVFVAEIGDINRFASAPKLACWAGLTPKHHESDTHVHRGRITKQGSRLVRWAAIESVKRIPATSPVGVLRERVAERRGRNIGSVAAARHQLEFVFYALRDGHVRALEHLPAVA

SEQ ID NO: 283407 - protein, 334 aa, unidentified
MLYAAIDIHKHAFQAAVLDLESGEVVEERFPADRESLARWAEPWRGRVAAVAIEATTGWRWVWRELVARGFEVQLAEPVQTRALLGRRRSAKTDRLDARWLARLLAKEMLPQSWIPPTQIQELRDRTRLRKALAEDRRRWGQRLHAYLLHEGWPCSRSNLLRPPGLRWAAALRLPAHARLQVDSLLAVMAALETQLDTVDAELRRFARADERCQALQSIYGIGPILGCHLLAEIGEARRFRRAEQITRLAGLDPVVDESGETRRRGHLAKAGSPHLRWALVEAAVHAHRTTAPDLALYRATRQRRDTTVARLTVARKIGKRAFHALRELELATT

SEQ ID NO: 283408 - protein, 328 aa, unidentified
MYRIIKIGMDVHSTNYTLCAMEPVIGAEDRIFANIKVTPDYKNVLMFIENLKLKLGLNDTYDIECGYEAGCLGYSLYNQLTAAGVRCVILAPTTMLTQQGQRIKTDARDAVMIAQCLSYGGYHPVYIPAEEDDSVKEYLRMRDDHKLALKKVKQQINAFCLRHGHRYEKTKWTIAHLKWLKQLELSALYRETLDEYMASYDEQTAKIERFDKRIEELASQERYQKKVKKLGCFLGIKTHTALSLIVETGDFERFAKGNVYAAYLGLAPGERSSSDSINRLGITKAGNQHLRLLLIEASGGICKGAVGHKSKDLRQRQNGNPADVCERG

SEQ ID NO: 283409 - protein, 420 aa, unidentified
MVYLERGYNLKELPWSKTVSNSFLFKEACMILVGVDVAKDKHDCYIMTSEGEVLFKSFTIANNMEGFNQLYEKILSVIDNFDNVKIGLEATGHYSYNILGYLLDKGLTPYVINPLHSNLYRKSLSLRKTKTDKVDSHIIASMLMSDVSLKPYSNTLYHNEELKSLTRYRFTKVQERAKLKISISRLVTILFPELEKLVPTLQMNSIYALLYEFPSAHAISKAHLTRLTNLLNTTSKGHYTKDKAVLIREAAKNSIGSNMPAKSLELKHTIKLIKELTSEINEIEEEIKIIMNKINSPILTIPGIGLSIGAQILAEIGDFKNFSSPDKLLAFAGLSPSTYQSGNMYSSNAKMEKRGSKYLRFALFNAAIYVSYWEPTFSQYLKKKRVEGKHYYVAISHVVKKLVRLIFHLEKTNERYSTVV

SEQ ID NO: 283410 - protein, 357 aa, unidentified
MSAMLVIGYFPLLQNNNPYNNTGIYVMKDSKIILGCDLSKEKIDIASIEKLSNKILSETTESNNLNGFKKIIKPYTSIVGELHVILEATGNYHIKFTDFLEKENIKFSIVNPLRIKRFAQMKMLRLKTDKADAMIIAQYGIEQAPKPHRPLTTAQKELKELGTVRNHLIKQRTMTKNLLHSHNLLAITTKESVSAIKSTLKTLDAEIKNLDDKIEAVIKEHYSDTYSKLLSIKGIGPKTASGTIAYLGDLSNFESHKQMASFIGITPAIRQSGKSLNKTTGITKQGNANLRTLFYLAALSASRSNFACIELYNRLILKGKQKKTALIAVANKLIKQLFAIIKNNRTFINNYNINLDF

SEQ ID NO: 283411 - protein, 339 aa, unidentified
MIHVGVDLHKSFSEVAAIDDQGNILDQRRLSNDDPAAIVRYFRSLSGEVTVTVEATRNWYWLYELLETEVAKIKLADSRQVLWIAKARLKNDKIDALKLAELERANLLPEAYIPPRPIRDNRELLRYRICRVHDRTTTKNRIHGLLDKLGISHGFTDLFGKAGMAFLKQVPMRDVYRIELDGYLRTLEHLAKEIDAITRRIEKAVRADRRCDLLVTIPGIGALTANLLLNEIGDIKRFPSARHLCSYGGIVPRLRQSADHIWQGRISKEGNRYIRWAIIESAQKAPSKDNELRKIHARIAFRRGKQKARVAVARRLLVAVWHVLTYEEPYNYKFRSPEV

SEQ ID NO: 283412 - protein, 360 aa, unidentified
MGALYAGFDLHGNSNYLGIIDGDGKRVFRKKLLNDLGWIREVLLPFKEELVGIAVESTYNWYWLVDGLMEEGYKVHLANPSAIQQYSGLKHADDRHDAFWLAEMLRLGILPEGYIYPKEERPVRDLLRKRGHLVRLRTSLVISLQNILSRNLGRKVNVNDVKALREDRVSPLLESSEDLALAGRVSKEAIDFLTHQIRRIEGVVEERIELREKYRYLLTLPGVGKILALTMMLETGPIGRFATVGDYVSYCRKVPSQWTSNGKRKGSGNKKNGNKYLSWAYAEASELARRFYPEPRAYYHRKMQKTNAPVAHSALAHKLARAGYYVMRDQVPFEAQKLFGTRRRGWNGEPELGLVKSHEA

SEQ ID NO: 283413 - protein, 374 aa, unidentified
MNEFSKYVGLDTHKETIAVAIADAFGGKARYYGEIANTPEAINKLVTKLSADDDALSFCYEAGPCGYGIYRQINRLGHHCSVVAPSLIPTKAGERIKTDRRDSERLSQLDRAGELTPVWVPNHEQEAMRDLTRLREDMKGLERVTKQRLNAFLLRYNRYYDAGKSRWTQAHFRWMEGLKFDVAVQQIVFQEYLEAVKESESRVAGVEKEMEKALKSWELAPVVEALMALRGVKLITAMTIMAELGDITRFDSPSQLMSFLGLVPSEHSSGPTRRQGGITKTGNGHVRRVLIESGWSYRFPARKTAHLQRRAEKCSKEVQAISWKAQKRLCGRYTHLLGRGKLKVQVCTAIARELVGFIWAIACEVMGKPIVSAR

SEQ ID NO: 283414 - protein, 339 aa, unidentified
MKVYAGIDLHSSNNYVGIIDEEDKRLYQKRLPNQLEYILPALEPFKKDLEGVVVESTYNWYWLVDGLQDQGYKVHLANPSAMKQYEGLKHTDDKWDSFLLAHMKRLNILKEGYIYPKEERPVRDALRRRLLFVRHRTSHILSLQSSVTRNLGYKMSVREIKNLQESDAERLFNDPFLVLTARNNISVIGFISNKIKEIEKAVTSHVKLKPEFKLLLTMPGIGKILGLTIMLEVGDINRFSKVGNYSSYCRAVKSERLSNEKKKGEGNRKNGNKYLSWAYVEAANFANRHYPEVQSFYKRKKAKRNGIVAIKALSNKLARASYYVMRDRVPYDANRLFRS

SEQ ID NO: 283415 - protein, 434 aa, unidentified
MSGLRARMAICRYGLEGASSSVSDNVEVKCMSELGCGVDVHRDVLVASIMGESLKDARRFMNDVDGINGMKEWFRGHGCRRVVMESSGIYWVSLYLALEEAGFDVLLANAWQVKAIPGKKTDQSSSEWLANLLKSGLVKPSYVPEKRVRELRELTRLRVKLIGTRTAFKNRCHKVLNRVNIRLGSRLSDVFGKAGSEVLEGLMEGKTVDDILEHTSNRWLKKRGDEIKAVVKGILSQSDIFVLKHCVDMVKQADEKVLMMDAQIETLVNEHDVEIVASVPGVGRKSAAAITAEIGDAKRFLDGKKIASAAGLAPSVYQSAGKSLTGGITKQGSKWLRRSMVEVAHAAVKKRDSKLREFYLRVKARKGEKTAIVAVARKMLTIIHHLLVNGERYVEEGFEKRLRVNRTVRVGDVALQDMVAVLRGAGYVVRGPFG

SEQ ID NO: 283416 - protein, 386 aa, unidentified
MKTKSKVTQIGLDSHRTFSKVTARDAGNRIVWRQRLEHKDRGELREELRSWPKGTPVILESTFGWGWMSDELAEADLEPHLANSRKVAAWRDARGLAKSNRIDSDLLSELWSQQPRWWEVWLAPPEVREQREWMRYRMTLVALQTGLKNRIHAVLHRHGIVNEHSDLFGTKGRRMLNSLITPPVGDVTLPDSGRATLKGYLQLLDQLRRQIAGVTRELRKQIARTPAGGRLMTLPGIGLILAYTILAEIGRIERFRNAKRLAAYSLLAPRADDSGEEDPEHPKGRHIGHMGRRTLKWAWIEAAHGAMRSGGRFRAIYDRVTHGGKKDRNRGYIAVAHELCRIGYVLIERDMDYCADRPARPGQRSSEKDSRPGTGQPGHPMVAAVA

SEQ ID NO: 283417 - protein, 344 aa, unidentified
MLYVGMDISSKSFVVHAVDERKRVVLKTEIAASREGLRWLVRQLGPQPKLIVFEAGNQLKWVADTLRKQEAVSLHVVHPNEVKWISTSSGKTDKVDARKLAELARGDLLPRKVHLVEGEARALRELISARTQLMQKRVSLLNALRGYLTQEGVRLGENFFARRDWNDRLENTKLSSTLKVVLRAFRPSVEALEVSEHELNQRISNIKNKKTELLETIPSIGVLSSRTIFAALDDPTRFENRKAVAKYGALSPTIYQSGDTVQLGRINRDGRREVRRVLLQCAHLLARMKSPAARPLRLFYERIAKRQGKKKALVALARKLLTVAYGLLKSESPYDPMKLLPHAT

SEQ ID NO: 283418 - protein, 339 aa, unidentified
MIACGFDVHRAQITFDLVDHETGELRRGRIAPATREQLRVWLAGVETARLVVAVEGTTGWRFVAEEVEAAGARAVLAEPGETRALRGPKRRAKTDRADARWLRELLERGELPLSWIPPQHLLELRCQVRLRQTLADERRAWLQRVHAQLFHHGVPVDGELAKRERRDWLGAVALSPAGRSVVETALATVDFLDAQLVALDGELRRYARAHPATRALGRLYGVGDLTAIAIYAAIGDARRFSSARKVVRLAGLDVTVHESAGKRHPGRISRQGPPMLRWAAYEAGLAACRASSPDHADYLALRDRLGHKTACLTISRRVLRRAYHALVAIGGAALDPIAD

SEQ ID NO: 283419 - protein, 359 aa, unidentified
MTSISPPGLSSKIIIGVDTHKHVHVAVAIDDDGQRLGDLRIPVDSLGYQELDRWAQTHGRVFAYGIEGTGSYGANLTSYLRRQGRKVVEVNRGDRRARRANGKSDTLDAELAARSVIAGTSTSVPKSADGMVEMIRKIKVARDIACKNRTSAIITLKTVIVNTPQELKEQLDALGDKALIQKCSGFRPGTVEDPISASKHTLRALARRWEFLNAEVKDHDAVIAKLTTSLSPTLCDGFGIGPDTAAEILIVFGDNPDRVHSEAAFAKLVGVAPIPASSGMTNRHRLAWNGHRQANAAIYRTAIVRMQHHQPTKDYVARRSADGLSKRDIIRCLKRFIAREIYGRVMADFRARTAPAATT

SEQ ID NO: 283420 - protein, 329 aa, unidentified
MKEFLIVGVDVSKSTLDIYFKPAGSALRIDNNLHGFKLWHKEFKRLWDGASKALVVMEHTGQYSYRFETFLRSRFIDYCKLPALQIKRSLGMIRGKNDKVDAVRIAGYGWLRRDILMADQYPGQEIRALRALLSLRHKLVRDISGYKSRFREMIATGTCVKSDWQGNMHQQIIDFMESKKAMVEARINTLITAHPNLQKTSQLLRSIKGVGLIISSYMIGCTENFKRFSNARKFNCYAGLAPFTHQSGSSIKGKARVSHMANKAVKTLLNMGASSAIQHNKELKEYYQRRIEKGMGRMSCLNIIRSKLISRMFAVIKRQTPYQEVAPAA

SEQ ID NO: 283421 - protein, 343 aa, unidentified
MYYIGLDVHKMTISYCVKDAAGQVHREGKIGSTRRELDAWVMTLPQPRTIAMEATIFTGWIYDHLLPHAEKVKVAHPLMLPAIAAAKKKNDKIDARKIADCLRCDFLPECHMASTEIRDRRRVLRYRGLVIKQMVQMKNRVSGLLMETGVDYNKRRLHKVGYFEDMLKTNKEVNQSIRPLLKLSRETIERSQKLDYALVSSLERDPLLAERLRRLRTVPGVGPITALTWALEIGDFTRFPSVKEAISYCGLCGDESSSADKVLRMPLSKQRNKYIQRTLIEASKLAIRYNHELAEVYEKERERGNANRATLAVARKLVAYLLAVDRRKQDFVPAEVFRAMTAA

SEQ ID NO: 283422 - protein, 340 aa, unidentified
MQVTTIGVDLAKNVFQVHGIAENEVVLFNKPLRRAQFLPFFAKLNPCLIGMESCSSAHHWARELTALGHDVRLIPPMYVKPYVKRGKSDAIDAEAICEAVTRPTMRFVAIKTVEQQALLSLHRARDLLVRQRTQLINGLRGLVAEFGIYIPRGLARVIGFAEDITLGEVLDLPDIANEVIRNLSEQLMALHKRIRWYEERLKQVAKEDARVRLLRTIPGVGAVTASAIIASIGDGHQFRNGREFAAWLGLTPANKSSGGKEKLGRITKMGDQYLRSLLVVGMTSLVRQTRSHPERASKWLTSLLERKPARVATVAMANKTARIVWAVLTRDEPYSPRAAV

SEQ ID NO: 283423 - protein, 407 aa, unidentified
MEVVHPTCAGLDVHQHTVVACARVGAGSAVTRDVRTFGTTTQELWALSDWLTAHGCTHVAMESTGVYWKPVWHVLEGSVELVLANAMHIRNIPGRKSDVNDATWIADLLAHGLLRGSFVPPAPIQELRDLTRTRKQLVREITQHTLRIQKTLETANLKLTGVLTDILGVSGRAILQALVAGETNPDRLAELARGRLKASRADLVAALHGRVTAHHRFLLQLHLAQIDALEGAVRAVEARLGDALAPFRAAVDRLITMPGVSETVARVLVAEIGVDMTRFPTAGHLISWAGLCPRLDESAGKRRSTRTRPSNPWLKTTLVQGAWAAARKKDGYLRAQFLRLKSRRGPKKAIIAVAASMLTAAYYMLKDGADYRDLGADHFDRRDKAKLAQRLLARLHDLGFNVELRAA

SEQ ID NO: 283424 - protein, 394 aa, unidentified
MRFAGIDIASETHALAIVNAEAAVELKPVSFAEDAVGYQRLLSLLGDPAELLVAMEATGHYWKNLFAVLAAAGYSIALLNPLRTHRFAGEDLARTKTDALDALGIARFAAQKRPSPTLLPDAATEELRELVRLRERLLHDFGDRVRQLHRLVDLGFPEFTRHVRTLESELAGAILRHYPTAAAFRGASVRRLAGVRYDGQHQVGLELARSLIDAARCSVGQHHSAAYRIQVRYACDDLAVLRSRLREIDRDIESKLREHEVGRLLTTIDGIGPNTAARIIAAVGDPADFHSAAALAAYVGTIPRLRHSGKRQPARAPLTPIGNASLRAALWMPTLTAVRSNPWLRAHYERLRARGKLPKVALVACMHKLLFAVYSVAKHRQPFVPMLTAPSADV

SEQ ID NO: 283425 - protein, 409 aa, unidentified
MDVIVERVAALDVHKASVTACVRVPAADGREPHLAEFATTVRGLLGLRDWLVAHRVSQVVMEATGVYWKPVWHILEDDFELMLVNARHVKQVPGRKTDMSDAAWLCQLAEAGLLKANFVPPKPIRDLRQLTRYRKTQIAERQREAQRLHKALEDTNVKLDCVASDLLGASGRAMLDALVAGTTDAEILAELAKGRLRQKIPALREALEGRFSDLHALLIGAILAHLDFLDEQIDRLSDAIEERIAPFEQAVRLLCSIPGVQQRTAEIIVAEIGPDMTVFPSARHLASWAGQCPGNDRSAGKQRSGRTRKGSRWLNAALKDAAMAAMRTKNSYLRALYERHRSRIGHGKAIGAVKHSILVAAWHMLTTGELYTDLGPDYYRRRDPARTTKRLVAQLERLGHTVTLQEAAA

SEQ ID NO: 283426 - protein, 293 aa, unidentified
MKPHFRATSKGAGWNELYHKICRIGCIERNNSGGGAVAESGRDAARYVGAIKHEAGAIRKLLKQLGKKEELEVCYEGGPTGYGLHRLLTSLGVRCMVVAPSLIPVRRGDQVKTDRRDALRLSELLRAGELSGVYVPSAEDEALRDLVRAREDAREDLHRAKQRLLKFLLRYSITPPAGIKRRWTKRYRLWLEGLKLEQEAQAITFREYLHAVKEGEERLKRIETGLLEQAAQGANGALVKALQGLRGVAFVTAVSLVAEIGSFRRFRSPMQLMAYLGLVPREYSSGQSVRRGN

SEQ ID NO: 283427 - protein, 331 aa, unidentified
MNYSHFVGLDVGKKTFDASLMSADEKELSHKSFDNTPTGIQSLLDWIAGYHLSLSKLLFCAENMGSYVTELSVSSVSMGFSLALVCPLTIKKSIGLQRGKNDRIDAKRIANYAVLHYRKLELYKLPDKDLVRLRGWIIIRDNLVKQKVSSIKLLETFSWMAKLADVTESISFLKEQLKSIKERILEVEEDMEQLIAASTSLYTNYLLLRSIKGIGIINAIVLLCVTDNFQRFDNPRKFACYCGGAPFEHTSGISIRGKTQTSSLANKEVKVYLTRAAITAISWDPQMKAYYKRKIAEGKHKASVINAVRAKIIARSFAVIRRQTPFVTLAV

SEQ ID NO: 283428 - protein, 411 aa, unidentified
MIYLDKQLKYFVGIDWGSQNHRVVVLDHEGRMIERYDAAHSGKGLENLVDRLRKTCLGPAIQTGIALEVSWGALVETLVEAGFSVFSINPKQSDRFRDRHTAAGAKDDSRDALVLASALRTDPKSFKCVQVDDPSTIRLRELSRLDEQLKNELHRTANQLWEQLHRYFPQMLKLSSGADDPFVWELLREAPLPAKAAKLKVSRVAQILKSYRIRRLNADQVVAVLREPSLQPAPGAAEAAAEHVLLLLPRLALLNVQIKDVARRTAKLIEELPENVEQNGNAREYRDVDLLLSLPGLGQTIASTILAEASRPIRERDYEQLRCYAGTAPVTKQSSKRRMVSMRHACSERIRQTVFHWSSRSIMLDSRSRQHYDKLRAAGHCHARALRGVGDRLLAVLTAILQSGKLFDANR

SEQ ID NO: 283429 - protein, 373 aa, unidentified
MGIVWVGMDAHKKAINVAVLVGHQRQPQEWSVENKPAAIRRLVKKLVREADGSEVRSCYEAGPCGYALQRQMEAAGPVICEVIAPALIPRKPGERIKTDRRDARKLAELLRAGLLTEVQAPTPEQEAVRDLCRAREDAKEDLLRCRHRLGKMLLRRGLVYAVGKKAWTGAHRQWLRSLQFEHASDRAVLQDYLLAIEQLEERLKTLEQELTRAAESEPFREPVAWLRCFRGIDTVTALTVVAELHGIERFASPRELMAYVGLVPSEYSSSERTRRGGITKAGNSHARRVLIEASWHYRHPSRVGMALQQRRTGQPTAVIAIADKAQQRLYRRQRHLVARGKKPTQAVVACARELTGFIWAALLHDRRAPAAPA

SEQ ID NO: 283430 - protein, 348 aa, unidentified
MRIIGCDYHPSWQQVCWMESETGEAGERKLEHASGEAERFYRELSGSALIGMESTGNCQWFVELATKLGHTVWIGDAAKIRASDPRQQKHDRRDAALILNLLLEKRFPRIWTASSEEKDLRQLLIHRHKLVRIRAQVKNELQHLAMNQGVTKKNRLWSRAGEKVLRELPLKPWAGRRREDLLKVRAMLDEQIVPLDQAVSDTAWKNEKARLLMTQPGVGPITAMAFVLTMGDVSRFPRGKQVASYLGLIPREYSSGGKQRLGPISKQGNRFLRMLLVEAAQVAVRHDPGMRNEYLHRCHRKAKGVAKVAAARKLAIRLYWMLRTNRAYPEVVRVESSPRVPLAVRHGG

SEQ ID NO: 283431 - protein, 344 aa, unidentified
MKLTRVGIDLAKTVFQVHGVNGHGKCVWRRRLKRATWLRVFTETVEVGCEVGMEACGGAHYWARELIARGYIVKLIPLQFVKPYVKGQKDDAADAAAICEAMSRPEMRFVPVKTIEQQDIQAIHRVRTLVMSERTAKSNQIRGLVTEYGLVAPQHVGPLRQAIPCWLEDAENGLTDPFRALLQGLWHELLALDQRLKELTAEITRISNTHPEAKRLKQQLRGVGPLVSTALVARIGDGRQFKRGRQAAASVGLTPRHHGTGGRNRLYGITKQGDRYLRSILIHGARAVVSHAKRQDDPLSVWVTDLADRTYPNVAAVALANKTVRLAWAMLRHGTDYDPEFAVN

SEQ ID NO: 283432 - protein, 348 aa, unidentified
MKIVKQVLGIDVAQKELVVCFGTINEHFEASLIAHETFVNSKAGFGQLSKWVKNLSVEDVPPRYIMEATGVYHENLAYYLHDHDMDTSIVLPNKISNYARSLDVKTVTDKTASRAIAMFGLERRLDNWIPPKGIYGALKQLGRERGQLLDERTVIKNQLHAKNAGAKPSRKEIKRAEIRLALLEEQEKEIKEELADLIKQDPEVKEIVLLICSISGIGLITAASILGETNGFEHTSNRRQLTSYAGFDIKEKQSGTSVKGKPKISKRGNKYLRKAMHMPSSSAIKHDPTFRAIYERVFAKTGIKMKGIVAVQRRLLEMCYIIFKKQEQYIKDYSKIKEQPEATAEILT

SEQ ID NO: 283433 - protein, 355 aa, unidentified
MNSVRYVGLDVHRDTISAAVLNESGRLVQQSILATRAAAILDFIGGMRGSLHVTFEEGTHSAWLYDLLVRRVARLVVCNPRKNALLKSGNKSDAIDARKLAELLRADMLSPVYHGEKSAQEVQHLARSYTMLTEDTTRVMGRLKAVFRSHAVPCAGKKLYGRKHRGEYLSELGAGGLRRRAECLYAELEALQQLRRQAKREMIVECRKYPESKVLCSVPFLGPVRAAVLIGRVQTPHRFRTKRQFWAYCGLALEMRDSGEYRMVDGQVERRKRPAQIRGLNWNHNHELKNLFKAAATAASACDGVFREFYLGLLKKNMQPEMARLTLARKIAAIALKIWKKGEAFNADHLKLQAA

SEQ ID NO: 283434 - protein, 343 aa, unidentified
MYFIGLDVHKKTISYCVKDAAGRVHQEGKIGSTRRELDGWIRNLPQPRTIAMEATIFTGWIYDHLLPHAEKVKVAHPLMLRAIAAAKKKNDKIDASKIADCVRCDFLPECHMASTEIRDRRRTLRYRNLVIRQMVQMKNRVSGLLMETGVSYNKQRLHKVGYFAELMATNEDVHESIRPLLRLSRDMISRSQKLDYALVSSLERDPVLKERLRRLRTVPGVGPITALTWALEIGDYTRFSSIKQAISYCGLCGDEKSSADKVMRMPISKQRNKHIQRVLIEAAKLAPNESHELALTHARELERGNRNRATLAVARKMVCYMLAVERRQQDFVPAEVFSRTVAV

SEQ ID NO: 283435 - protein, 290 aa, unidentified
MKIHTIGIDLAKTVFHLVGLNAQGEVVVQRKCSRSQLLRFTSNLPVCLIGMEACGGAHFLGRALRDQGHDVRLMPAQYVKPYVKTNKNDYIDAEAIAEAVGRPRMRFVPIKTDDQLDLQSLHRIRERWVVRRTAVINQIRGLLLERGITIRKGRLYIEASLPAILEDADNKLSGILRVLLTQLQLEMQYLGRQIDESDKLILEIAKGMDSCRRLIAIPGIGPLTATATIAAIGNGAAFKKGRGFAAWLGVVPGEQSTGGKQKLTGTSKRGNKYLRKLFQPAGNGLQMTPA

SEQ ID NO: 283436 - protein, 322 aa, unidentified
MLYVGIDVAKNKHDVTALNVPGKTVLKPLTFSNNKAGFELLDLSFRQLNQDCLIALENTGHYAFNLLNFLHEQGYKVYTYTPLLIKEFAKSLSLRKTKTDKKDAHGIALKLLSDPNREQFQHDNRQVELKILARHIHRLKRKQSDWKVQYTRCLDIIRCLDIIFPELDKIVGKHSEYTYQLLTCYPNPQKRLEAGFDKLIEIKRLTASKIQDILSVAPHSIGTTSPAREFEIIENIKHYKRLIDKAEKCVNDLMAEFNSVITTVTGIGNRLGAVILAEIQNIHAFDNPAQLQAFAGLDSSIYQSGQIDLAGRMVKRGSPHLR

SEQ ID NO: 283437 - protein, 342 aa, unidentified
MSEKRYIGVDLHRKVFTCCIRLENGRPFLSEWRLEQVPQFVKKLRATDEVAVEVTSNTRLFYEAVAPHVARVVVVDPHQFRVISQSVKKTDPNDARNLALYLAKGLLPEVRMKEKQQAQVASLTQTRDRLVKLRTALKNKVNNLLSARGIALEKEELSGEKGLTRVLAMEVEELTRFELQVLVEQIRSLNHSIAELEKVIDREGKKLKGHGNLTSIKGIGSLGASILLSVIGDIRDFSDEGRLASYFGIVPRVHNSNETEHSGHITKRGSKLGRTALVQCALIAKRYSPYLANYYERIRSRRGTGRAIIALARKLLGIIYRTLKNNWVFEDFPNFALREATA

SEQ ID NO: 283438 - protein, 388 aa, unidentified
MNVGADKSDPLTAIRTDLGAIFVSLELSRSSWLITSLSPGGGEKMSKHSVPGGDFAGLMERFAQLQEKARLRTGQSFRIIVVQEAGLDGFWIHRALQNEGIESHVVDAASIATSRRRRRAKTDKIDGETLVRALLAYKRGEPRVCAMVKAPTPGEEDRRQLCRERKALTAERVRHVNRIKGLLFSQGISGYQPLRRDRRQRLEELQTGDGRAFPQHLKALVNRELDRLELLLKQIKTVEAARDALLAVGQTGKPAPAAMLLDIRGIGPEFAAILWSEGLFRHFENRRQIAAYAGLAPTPWQSGAVDREQGVSKAGNPRLRTTLIQLAWLWLRNQPRSALSVWFHERVSRNGGRLRKTTIVALARKLLVALWKYVTAGVVIEGVTMKVA

SEQ ID NO: 283439 - protein, 351 aa, unidentified
MRKEHFIAMDAHCRTTDVCIKTAGGKLRRREHCLTAIPQLREVIESVPRPRRVALEESSIAGWLYRNLKECCDELIVCDPRRNAYVAKDGDKDDPIDAEKLNDLHRGGFLRPVHQLESVEQAAAKQLVGMYHDRVRHRVGEGCKLLALGKRWGLLLNRLDLIKQEGPGYLQLALQRAGAPQRIVQLGELMRQSLSEAVQQEEALYRQICQLVKEQKIMARVAQVPGYGPVRAATLISYLDTPWRFRNKAALWKYVGIGLTKERSGDGPEIVHVEQSCNRLLRNVVIGAAQSAINQKENVFAQRHARWMHNGLSPGNARRNVARDQVSAIWAMWKSDRAFDAELIGASLIQG

SEQ ID NO: 283440 - protein, 386 aa, unidentified
MHHPTTLPVSEQTCSREDCATLFVSLELSRSTWVATSLALGSRKMSKHTLVGGDARKLLDLLARLKSRAEQRIAAPVKVVAIQEAGLDGFWIHRVLEANGVESHVVDPASIAVPRRHRRAKTDAIDGETLLRTLMAWQRGEPRVCAMTVPPTPSEEDRRRVSRERATLLRERIRHTNRIRGLLFGQGITNYNPLHKNRREGLEKLRTGDGHPVPVHLKAEILREIDRLELVLRHINEVEAERDEMLRPGQASSPVALLMRLKGIGPEFAAVLYLEGLFRHFENRRQLAAYAGLAPSPWKSGSVDHEQGISKAGNPRLRTTMVELAWMWVRYQPASALSCWFRQRVGSERGRIRRISIVALARKLLIALSRYINHGEIPAGAVVKPV

SEQ ID NO: 283441 - protein, 321 aa, unidentified
MTYVGIDVSKATFVVAYSSAKTGRTKTFKNTVKGVHEFIQTISVTEHHCLLEATGNYSALLVYLLSEAGITVSLENPLKIKNFARAMLAVTKTDEIDARLIALYGERMQPAPYKLRSDSILVLKQKRTVLRQLKKQLVATRNLKGSMEALPFFDPKCKKTIERTIAFLDKQIKGMEEEIASLAQGEYKKQMDLLTSIKGIGVTLAAALIVATGGFTYFDNAKQLTRYLGLSPTYQQSGTSVNVKGHINRNGDSNLRSQLYVAAFSSLRCNTECKACFDRLRSNGKPGKVAVVAVANKLVRQAFAVATQGKPYVDGFKSERP

SEQ ID NO: 283442 - protein, 363 aa, unidentified
MKRTTTRNSYIGEDVFVGIDVHKKTYYVVARVNQEVAKKWTAPASPQKLVEQLEKFFSGARIHTAYEAGFSGFALHRQLISAGIDNIVVHAAGIEVAVNNRVKTDKRDATKLATMLEAKRLKGIRIPSEQEENQRLLTRTREQLIRDRTAAKNKIRMKGHQMGIIDYDDNRVMTHKLVEEILKRSTSLELTIAIKAYWQIWKSLDTEIRHIEKELSKQAETDPNEETYCSAPGVGTISARILSNELGDLTQFNNERQLFSYTGLTPCEYSSGEAIRRGHISKQGNSRLRAILVEAAWRAIKIDSALAEFFNRLYPRRGKTRAIVAVARKLIGRIRAAFKQGIAYQLGYSNNSPGSTSMSGVTN

SEQ ID NO: 283443 - protein, 475 aa, unidentified
MTPKRRTSKGKQTPLKRRRQKGMHQRRAPQQSIPVREANAAGIDVGAREMYVAIPPDRDSEPVRVFPTFTCDLEALADWLVERGITTAAMESTGVYWIPLYQILEDRGIRVCLVNARHMKNVPGRRTDWHECQWLQYLHAVGLLRAAFRPEPEVVAIRSVVRHRRRLVEAAGVHIRHVHKALTQMNLQIHHVINDITGVTGTAIIDSILAGQRDATELAKLRRPEIRADEETMRKSLEGDWRREHLFALRQSWELYGTYVRSIEACDQEICAMLSEQEPKVDPEKKPMPSDTKRRTKRKHQRTGDFRFDVRTEAYKQFGVDVTRIPGLEGIALVLYSEVGNDMSRWSSASQFASWTALCPDNDKSGGRVLWTGVRQLKNRAGQLFRQAANSLHHSKTQMGEYLRRMKAKLGAEAGITAAAHKIARIFYGVVKSQVEYDQTSWHLQELERQRRFEAKIRRQARGLGFQLVPLQPVP

SEQ ID NO: 283444 - protein, 396 aa, unidentified
MPRIWAGMDIGKEHHHCVVINADGERLLSRRVLNDETALLELIGDVLALGTDVLWAVDLNHGGAALLIGLLLGHDQPIAYITGLAVHRASASYRGEGKTDAKDAFVIADQARMRRDLGLLRLGDEIAVDLHTLTTRRTDLMCDRTRQINRLRAQLLEIFPALERELELTNKGPVVLLTGYQTPAAIRRAGAKRIETWLRNRKVRSAAALARTAVEAAEAQHTALPGEKLAAAMVVRLAKGVMALDEEIAEADTLIEARLREHPHAEVILSLPGMGKQMGAVFIAATGGDMDAFGSADRLAGYAGLAPAPRDSGRVSGNLRRPRRFHRGLLNAMYLSALSSLKSCPASKAYYARKRAEGKGHKQALLALARRRVNVLWAMIRDGACYQATPPVTAAA

SEQ ID NO: 283445 - protein, 320 aa, unidentified
MTYIGIDVSKDSFVAAYPAKSGYTTKTFKNTSSGVHQFIQSLPAECHCVMEATGNYSMLLLYLLQQANIIVSMENPQKIKHFARAMLSTTKTDDIDAKLIAMYGEKMEPAPYKIPSESIMLLKQKRTVLRQLKKQLTMLLNLQHSLAVLPKQDPTAKVATEKTIKFLRKQISKLEDEITHLSNKEFKRQMDLLTSIRGIGKTLASALIVATGGFAYFSNAKQISRFLGLCPTYQQSGTSVNFKGHINRNGDTYLRSQLYIAAVSSIKFNAACKETFKRLKDKGKSGKVAVIAVANKLIRQAFAVVTNNRPYVDGYVSALP

SEQ ID NO: 283446 - protein, 339 aa, unidentified
MELYAGLDLHSRNTYIGILDKEFNQVFKKRVPNKIELILETLNPFSDQLKGLVVESTFNWYWLVDGLMDAGYHDVHLANPAAIKQYEGLKYSDDQHDAFFLAQLLILGILPQGYIYPKSERSVRDLARKRLFLVRHRTAHKLSLQSLIQRCCAHSVSANDIRTLTDQDLRHWFKDEHLLLTAQASLNSIVFFNQQIKQIEKVIKKQVKLKKSFQYLKTVPGIGDILALIIMLEVGDINRFAKVGNFASYCRCVSSKRLSNGKNKGKGNRKNGNKYLSWALVEATHFTRRHHTRLRRYYDRKAAQRNPIVATKALSNKLARICYYIMRDQVPFHEQLLSG

SEQ ID NO: 283447 - protein, 366 aa, unidentified
MDKDSRFVGLDVHAETIAVGVAEPGGEVRSLGTIPNTPEAVRRLVKKLGPPETLRVCYEAGPTGYVLYRQLSALGVPCAVIAPTLVPVKAGDRVKTDRRDAEKLARSYRSGDLTPVWVPDPGHEALRDLVRAREAAKKDQLRARHRLGKFLLRQGRRAPTGSKAWGVKHRAWDATLLDYRTEIDHAADRIARLERAIATAADLTPAPVRAVIAGLQALRGIAKLSAVSVVTEVGALSRFAKPRQLMGYSGAVASEHSSGPHRRRGGITKTGNAHLRRIVIEAAWAYRHRPAIGGTLRTRQAGLSEEVKALAWKAQHRLHGRYARLIAKGKAPTQVVTAIGRELLGFIWAIGVHVEQHAAGGAPAGA

SEQ ID NO: 283448 - protein, 458 aa, unidentified
MKGKRRSAEKHPGMVTVHPNAAAIDVGATMHMAAVGADCTSDPVRSFGTFTGDLHRLADWFAECGVKTVVMESTGVYWIPIFELLDERGVEVFLVNARDAKHVPGRKTDVSDAQWLQRLHSHGLLRASFRPKGEITELRAYLRQRERLLDYAASHIQHMQKALTEMNLQLHHVVSDITGATGMRIIRAIIAGERDPTVLALMRDTRCHAGVDIIEKALTGYYRAEHLFGLEQALALYDEYQQKVSACDKRIEEVLMALASLRGHRGEPLGSPRRRMPRQANGPAFDVREALYALLGKDLTQIHGLGPYLALKLVAECGDDLSAWPSAKHFTSWLCLAPSNKISGGKVLSSRTRRSGSRVAALLRLAAVTVGRTETALGAFYRRLSARIGKAKAVTATARKIAVLFYNALRHGMDYVDPGASYYETRYRERVIGNLHRRAKAFGFILQQDTVASEVAVS

SEQ ID NO: 283449 - protein, 425 aa, unidentified
MDDQKELMQRRWVGIDWGKSRHAVAVVDDEEQVLARFMVGASLEDLRGLGERLRGFGPVAGIAIESTPNPVVCFLQTEGFTVYPVNPKLSRHWREGNSVAGSKSDARDGLVLAKELARRYRSLRVLREPSIEVAELAGLCKQISKMIGQRTALVLGLEAALIGYYPAALSVFSDWTSPVAWRFLKRFPTPKDLACARKDTLIRFLRANRVGLKPIWLERIERRKEAVDWPQPRNSFALRILAAAYVAQLQALEPQIRKCQKLIDERAKDHPRARLMRSLPGAGERLAPALAAMTLLVDEEPDRFQAVRCQSGVAPIQCETGQAKPSKIRRRCNKYWRCVMHEFAHCSKRNCPWARAYYHLCRERGDGYATALRKLADKWLNIINRMIEEDQPYDNERYVEALRRSASPVYQKLCGEACGKLPQKT

SEQ ID NO: 283450 - protein, 361 aa, unidentified
MRIIGCDLHARQQVLAMLDTTTGEMVTVTLKHEGNNVREFYSKLPRPVRVGIEATGSMQWFVNLMEELGIECQVGHPANIRAAEPRKQKHDRRDADLILKLLVENRYPKIWLPSKEQQDLRALLRHRHQWVRIRTRIQNALQAIALANGLRRGPALWSQDGQRTIASLPLAPHAAYRRSELQAMYAKFAKEIEKLNQRVEEQACERPGARLLMTHPGVGPITALATEVFLGDAARFADSKALASYVGMIPSEYSSGERQRFGGLSKQGNPLLRFLWGEAAMHAVRRDPELQRFYRRKLVQKGLGKTRVAVARKLGIRLWIMLRDEIDYNEFCRRGQMQQKSSEACAGMPDTGHGAKQSPIV

SEQ ID NO: 283451 - protein, 354 aa, unidentified
MTSTKYIGMDVHTESISIAVRNSIGKVVMECVIETKASTILQFIDGLSGDLRVTFEEGTWATWLYDLLKPHVTEVLVCNTRKNASRNGSKSDRIDARKLSEQLYMNNIKSVYHGEHGLRTLKELARSYLTITKDLTRVMNRLKALYRSWGIPCAGKEVYAPRHRAEWLAKISEAGVRRRAEHYYQQLAVLRPLHQEARRDLLLEAKKHKPWKLLRLIPGIGPIRAAIVIAVMQTPHRFRTKRHLWTYSGLALETHDSAQYRVAEGQLQRSKKPATVRGLNKDYNHDLKDIFKGAAMRASTAAGPMHDFYEALLAKGRKPTMARLTLARKIAAITLIVWKKEVRFDANYLKPQAA

SEQ ID NO: 283452 - protein, 316 aa, unidentified
MDVLYQSCAGIDVHQANIVVCILYGPLTSTRPKREMATFDTTTKGLRACHDFLNQFHVEAVGMESTGVYWRLVWHALCDDFELILAQPAHMKAIPGQKTDKKDAHWIAKLTRIGLLPRSFVPDETIQELRELTRQRKHYVESRNRETNRIHKFLQSGGIKLTTYIEDIMGLSGRNLLQLLVDGTPITPRIVHQSVYTSLKKKVPQLLEALDGYFSDHHRFMLKQSLEIYDFYQKQIELLEERITVYLSQYENHVETLDSIPGIDVITASVIISEVGVDMSQFPTSGHLASWAGLCPGNNESAGKNEVPRFDTEILI

SEQ ID NO: 283453 - protein, 346 aa, unidentified
MTIVEDTRVITGGVDTHADLHVVAALDPVGGLLGVREFPATAAGYASLLGWLSGFGNLALVGVEGTGSYGAGLARHLAAAGIRVVEADRADRQDRHRQGKSDPLDAVSAARAAQSGRASGAPKGRDGTVEAIRALMVAKRSARAERTQAINQARALIVTGPDELRARFAGHRPAALVEAIAALRPRPGDVPGYATRVALRELGRRAQFLDAQLDRLDELIGPLVTARAPGLLALHGVGPDTAALLLIAAGDHPERLRSESSWAHLCGAAPIPASSGKVSRHRLNRGGDRQASSALWRIVIVRMSSHPATRAYADRRSEEGLSKKEIIRCLKRYVAREVYRQLRDGA

SEQ ID NO: 283454 - protein, 343 aa, unidentified
MDYFAGLDVSVKETSVCIVDDAGKIVREARVASEPEALLQLLTNTIYRFKRVGLEAGPLSQWLYSVLAEAGLPVICVETRHMRAVLKAQINKTDRNDARGMAQMMRAGLYRPVHVKTLRSQKLRMLLTHRKLLQSKAIAIENELRASLRNFGLKVGMVGTTKFEARIRELVERLPDLSVLVEPLLIVRRIIREQLGILHRRLLAIVRDDEVCRRLTTIPGVGPVVALTFRVTVDVPARFRKSKAVGAVFGLTPAKYQSGENDRTGAISRCGDEMMRIMLYEAAQSMLVRTAKWSWLKAWAMKIARHRGMKKAIVALARRLAVIMHRMWVDGTEFRWTRELPAA

SEQ ID NO: 283455 - protein, 316 aa, unidentified
MNSNQIESFVGIDVAKNTLDLRLEPVGESLHVAYDDAGIAEIRKHLRALSPTLIVMEATGGLETRLACELAACGLPVAVINPRQARDFAKATGQLAKTDRVDAAVLCAFARAIRPAVRVLKDADTRDLDDMVSRRRQLIAMRVQETLRLGSAESKALQKSLKKHMAWLDKQIAGLDGDLTKRLRASDAWCAKDNLQQGIPGVGAVTSVTLLAKCPELGQLNRREIAKLTGVAPLANDSGKHRGKRFVWGGRADVRAVLYMATVSAISCNPAIKAFADRLKQAGKPAKVVIVACMRKLLTIMNAMLKNNAPWTAKTA

SEQ ID NO: 283456 - protein, 342 aa, unidentified
MSFYCGIDLSARESQICVIDKRVKKVLEVKTINKLEQIKQLLEPYKADLQIVVESTFNWYWLVDGLQEAGFQVVLAHTLGLHMITGAKVKTDRRDAFALAKLLLAGMIPSAYIYPAETRPVRDLLRRRARLVQVRAGEYGSLRRLMLRQGILSRRQQEIKQAEETDLEKWFTHPLVRMHASQELERIRLYSQQLKELEATILEQAKKEWAFTQLQQLPGIGPIIALTIFYEMGELGRFATEKNFSSYCRVIPGVAQSGQSTKRGRGSKQGNHYLKWALSQAAVHAVRCHPRVRRYYERQLRRHRGRARQMVVYNIIAHKLAQGIYHVLKERTEYREELLFGR

SEQ ID NO: 283457 - protein, 415 aa, unidentified
MAEARLEQVHRRCCGLDVHKDTVVGCVRVSDGPASVEEVRTFPTTTRGILELGDWLAERQVTIAAMESTGVYWKPLWNLLEDRFSLMLVNARHIKQVPGRKTDVKDCQWIAQLLACGLLNASFVPDRPQRELRDLTRQRAQLIQGRAQVANRIQKVLEDANIKLGSVASDVLGASGRDMLAALIEGKQSPEQMAQLARYRLRVKIPQLTEALRGGFNDHHRFMLKSLLSQVDHFGNQIESFDERIEQVMPPFFKAVITTMDEIPGFDRRAAQNVLAEIGADMSRFPSGAHLASWAGVCPGNNQSAGKRRSGRVTEGNRWLKRTLTQCAYAASRCKASYFRAQFHRVSKRRGCKRATLAVAHSQLRVVYELLRHNLKYKDLGVDYFDKLQGERYKSRLVKGLEKMGYKVTLEPQAA

SEQ ID NO: 283458 - protein, 342 aa, unidentified
MKVTTVGLDLAKNVFQIHAVDARGKLIVRKQLKRDQVAPYFAKLGPCLVGMEACGSAHHWARKLQSFGHTVRLIAPQFVKPYVKANKNDAADAEAICEAVSRPSMRFVAVKTVAQQALLAMHRVRQGFIKARTAQANQIRGLLGEYGLIIPQGIGHIAKRVPSLIEDASNELPGTFRVLIDRLLEHLKALDQQVAELEAQITAWHRESEASRRLEQIPGIGPITATALIATMGEAKNFSNGRQVAAWLGLVPRQHSTGGRATLLGMSKRGDSYLRTLLIHGARSMILALRRKTKPEGWLHNLVKRRNPNVAAVALANKNARIAWALLAHDRSYRADYVRVQA

SEQ ID NO: 283459 - protein, 341 aa, unidentified
MAADRFLVQTRTVVRAYTPHTQGRDIKMAQSAPVVGVDLSAARWDVACYPHGPAASFPTTPQGQADFLAWFAEHAHGACVACEASGGLERTLLILLAPTAISLRILDAARVRIFANAAGKRAKNDRIDAALIAHYAATFPGKPAQRDEPRALLAELLNVRDRLVADITATTNQARSAANKSIKSMLTRQLATMTRWLRQADTQLEAAIKANPQMAARAALLRSMPGIGPANAARLLARLPELGQVGPRQAAALVGVAPYDNDSGGRNGKRHISGGRKDLRNTIYMAALVAKKHNPVLAAVYERLIAAGKPPKVALVAIMRKIIVILNAMLKTAQPWQPRAA

SEQ ID NO: 283460 - protein, 428 aa, unidentified
MSYKIAGIDVHKRVLAVVVCNVEIENEYQFERRMFGGNPEQLRLLAAWLLEQEAEEVVMESTAQYWKPVWGALERYWKPIREKREGAKRRSGTLHLAQAQSNRGRRGRKKDFVDAERLVKRLVARELTLSFVPDAEQRLWRAVTRKKYQLRRDVVRLNNQLESLLEETHIKLSSLVSDLLGVSARRMLKALADGETNPAALAALAHQRLRATPEQLCDALGACTELKPVYRRLLKMTLEQLQLLEQQIGQLDQELATLLHPHQEAVQRLAEVPGFGVDSAQQIIAEVGPTAATFPSEKCLSSWVGACPGDEESAGVSYSHRSPKGNRHMRRLLNQAANAAVKVKGSIFEIIYRRCVPRLGHNQAIGVIAHRQCRLIWLILHQGAHYEERGPAVTQQSKYKRTWRMVRQLRQLGYRIELPNPQPSQAQA

SEQ ID NO: 283461 - protein, 388 aa, unidentified
MHTLGIDVGKRQHVAVMLDANGQQVGKALPFANDQAGFKQLRERLSTVEEIALIGLEATGHYWLALYTMLMDAGYDLVVLNPLQIHAYRKSGIRKRKNDRYDAYWIADYIRISQQPQQHQSQPELLQLRELTRFRASLTAQVGDCKRKIISILDRVFPEYESLFSNVFIQTSRRLLAEAMTPDEFADFDLTELAQLLAQASRGRHGQAKAEEIQALARDSVGIGFLGNTLRVQMNCLLQQLSLLDTQRQQLDAEITALMDQFPQHITSIPGVGPITGAIILAEIGDVQRFATPEKLVAYAGIDPTVYQSGQFTASQTRMSKRGSPYLRHALWQAAFMATQHDPQLRAYYQRKRTEGKAHGTTVGAVCRKLLHRIYVVLKEQRPYVIRD

SEQ ID NO: 283462 - protein, 359 aa, unidentified
MKATLSKKQRFFNQIKLTKDDDLYIGIDVHKTTYHVALYLNGGHAIDFITPADNSKICTTLKKLEPAIKNIVYEAGPTGYSLARQLQHQSLPVQVIAPSKTPQSCARDSKTDRLDGRKLAEYAAKGLLRPIAIPTHTQEANRQLPRLRIQFVKKLKQTKLQIKSFLLQHGISEPQSLRYWSQLAIEKLNKLQLIDQLRYTLDMLIIEYKFLNEKIKDIEKKLEETFAKTTHAKKIQILKTHPGVGRVTSMMFAAELFNPRRFNNKEELAKYVGLAPTIIQSGQSLRDGPISKTGRPQLRSILIQAAWVWIIKDPQARQVYLRIARNTGQKNKAITAMARRLAIHLWKMLCNNEPYRKSA

SEQ ID NO: 283463 - protein, 351 aa, unidentified
MPRKSTVHAVTVIGIDMGKNTLHMVGLDSRGAIVLREKVSRGRIASRLANMPPCLIGIEAGMATHYVARELAALGHDVKQVPPTYAKPFRQGHKNDFRDAHAVAEAVQRPTTRFVPAKTDEQLDLQALHRVRSRLVSERTAVINQIRGFLLERGIIVRQGLRFLRQQLPDILAKRTEVLSPRMVRIVTDLAGDWRQLDERIEVVTDEIETLAKSDDNCRRVMTVPGIGPIISSAMVAAIGNGAAFARGRDYSAWLGLVPKQMSTGDRTILGRISKRGNGYLRTLFMQAARVILVRPANWPKHGFGAWLIRAAQRLHPNVLAAALANKLARIAWTVLAQQRNYEARVTKAVA

SEQ ID NO: 283464 - protein, 344 aa, unidentified
MYHYAGIDVSLESSTICVVDGAGKILRETKVASEPEALIGWLRSLGLALERIGLEAGPLSQWLFAALRGAGLAVELLETRHVRDAFKSMPVKSDRNDARGIAQLMRLGWFRPVHCKSIEAQETRAILTARKLLQSKLRDVENSLRGVLRGFGLKVGKTTERTFAERIRELVAGHPGLELVARALLEAHAVLRHEFNGLDKHTQKLARLHPPTRLLMTTPAVGPIVALTYAAAIDDPNRFRSSKATGAHFGLTPKKYQSGQTDYTGRISKIGDAAVREALYQAAHVMLTKPVKGCPALKSWAMRIAKRAGMRKAKVALARKLAVILHRMLADAKPFTPAAKAAAT

SEQ ID NO: 283465 - protein, 411 aa, unidentified
MSDESYELYVGVDWASTSHQLCLLRPSGGREELVVPHTGAGLAALRSQLQQRVSRPERIAVAIEVPHGAVVDTLLEHGCHVYAINPKQLDRFRDRHTVAGAKDDRRDAFVGADALRTDRAAFRRLRVEEPHVIELRELSRVHDELSEEHGRLTNRLREQLWRFYPQLLVLSPAADEPWLWEVLAQAPTPAAGRRLTVSAVRAVLARQRIRRLSADAVYAALQEPALPASAGTVAAASAHVGLLLPRLQLVHQQRRQCERGLERLLQALAAPRAGAEPQEHRDVTILRSWLGVGRVVAATMLAEAWQALAARDYQILRAHVGTAPVTRQSGKSRLVVMRHSCNPRLRAAVFHWARNAIRLDASSRAHYDRLRQRHNHARALRGLADRLLYVLITMLKTGTLYDPTRRQRVAA

SEQ ID NO: 283466 - protein, 383 aa, unidentified
MKAVCGLDVHKDNVYLCILSEFGELIEKVFGVLTFQLEEMRDLMLHYHVVEVSMESTSVYWIPIWRVLSPHFKLNLANPYFIKQLPGRKSDVKDAQWIAECTMKELIRGSFVPPEIIQQLRQYDRRIFDLNEEIVRKLSKLDAVLQRCNIRLSNYVSNVDSKSYKAVVRAISQGITAPEELVKLIHGRIIKHHGMDVITASLKGVVSLAEIDMISQLRDELDMAEAHKEKCQARMLEICEREFPEELKRLQTIPGIKERAATSLIAEIGTDMNKFETANHLASWSGLKPRNDESNKKIKSRSITHGNVYLRKTIIECAWAASRTKDCFFSRFSYHQTQVRKKNKMKVLVAVARKILVAVWHVLHDNTNYIDFTTDRKTSQTRG

SEQ ID NO: 283467 - protein, 344 aa, unidentified
MNIASIGIDLGKTTFHLVALGERNKILLRRKFSRSQLLAYTANLPASLIGLEACAGSHFIGTVLREQGHQVRLIPAQFVKPYRKSNKNDFIDAEAIAEAVTKQNMRFVQIKTQEQLDWQAMHRVRDRLMQRRTALINEIRGFLLERGLTFAARPIYLRKNLPTVIEDAEQNLSPRLRWLLDRLWQEWKQTEIDIKAITDEIEHISNNDARCRRLRQIPGFGPLVATATVAAIGNGAAFRRGRDFAAWVGVVPRQYSTGGKQKLFGISKRGNIYLRRMLIHGARAVLLRVKYDTGGFGQWVHRLAQRAPRNKVVVAIANKLARMAWAVLSSGQQYRHQPLQLAAA

SEQ ID NO: 283468 - protein, 408 aa, unidentified
MATSSLHLTMECRDAPAKRPRPAPGQALSRSLVALDQNSTIIAVVELSQSTWLVAGMLPGIERQPRKKLEPSPERLLALLHRWRDEAVRAGRTITRIALAFEAGRDGFWLARWLAARGIEAHVIHASSVAVSREHRRAKTDRLDTELLKRGFLGWLRGERGHCSMARVPTIAEEDAKRPNRERDCLVGERTRIVNRIKSTLARLGIRNFKPTLRKAAERLATVHTPEGMPLPPNTLAELQRDIARLGFVVSQIREIEDARQKRLEHQPETGPHAMVRLLARSVGVGVETADLLVHEVLLRPMRDRRAVARYAGLTGSPDESGARRREQGLARAGNARVRRGMIQLAWRFLMFQKESALALWYRARTADSRSGTRKTMIVALARKLIIALWRFVTAGEPLEGVVLRPAS

SEQ ID NO: 283469 - protein, 337 aa, unidentified
MYYTGIDLHRKTSFLTTVDSRGQIVKKANLANNEPTILEYFLTLNDDSQVVIESTANWYWLYDLLTEHGIAVVVSNPVKTKAIASARIKNDKLDSLMLAQLLRADLLATVHVSSQQTRQLKELLRHRSKLVRDTVRMKNRIHSIMAKNNFTLPASDLFGKQGLAFLSQAQFPLYQRHQVDTYLKLYHQIKEHTEALTQQVKQYAKDDPMAQLLMTIPGVGAITAMFMAAEIEDISRFKSYRHLSSYAGLVPRLDASADKQRIGRITKQGSPYLRTALIEAAQAAARTKSRLNVFFRRRIVKSGYQKAIVATAHKIVQYAFYILRDQKPYRDSIDALA

SEQ ID NO: 283470 - protein, 343 aa, unidentified
MRHSSVPVAVGIDVAKATLSVCFRSREGAEIALTFRNIEADINKKLIASLKGFTGKIVLEATSYYHWLVTLLLTDAGYQVYVVNPLLAKQYTTGNIRKVKTDPADAASLARMAAIADNLPPAFQETRATLAIKRKLSCIARLTNQIQSLRGMLNQLKESHDILGIPLSKGEKALSKTLQTLCKQKKVLEQETIQGLQPIAVTHLDTIPGVTPFVAKACLTYFNYRPDQTAKSWIGFAGLDVSSRESGGWKGQCKLTKRGNNFLRHRLFSAAWGAVMTNADFKSYYTILRLQGRSHVESLLIVARRIVRVMFKMVEQNKSYDPSRMILSRKETIPATLSTVVTC

SEQ ID NO: 283471 - protein, 363 aa, unidentified
MFSERTSVGLDVHARSVAAAAIDGVTGEVLQSRLTPCFDDIQSWIARLPGPVAVAYEAGPTGFGLYRALTAAGVRCEVVAPSKLHKPSGDRVKTDARDAVHLARLLRLDEITAVSIPSVDQEAARDLVRAREDCRGDLMRARHRLSKLLLRHGIVYYEGAAWTGAHDRWLRAVAAPQLATAASRMAFDADYDHVLTMQSRRRRLDSAIEGMADDSEFTPIVRRVSCLRGVSTLTGFGLAVEIGDWTRFTGNTIGSFVGLVPSEFSSGSSRVQGAITKTGNTHARRLLVEAAWHHRPRYRVGAVMRSRWDQASPAARARGDEGNRRLHSRWVGFMERRKRSTVANVAIARELAGWCWSLAVMDD

SEQ ID NO: 283472 - protein, 369 aa, unidentified
MLEYSEAFVGIDAAKARNAIAIAEAGREGEIRYLGEVDATPQSLRKVVARLAAKYQRLHFCYEAAPTGYGLYRQLTALGHDCIVVAPSLIPRKPGVRVKTNRRDAIALARLLRAGELTPVWVPDEAHEALRDLVRARDAAVADLRRKRQSVTSLMLRHGRIFPGKTTWGARHARWLQEQRFEHPAHQIVLQELVLAIQHAQERLERIEAAIAEFVPGWSLAPAVEALQALRGVNLISAVTFLVEVGDLRRFETPRQLMGYLGLVPGERSTGDTVRKEGITKAGNSRARRTLVESAWTYRYPPRIGKVKLYHLQRVTPAIRDIAWKAQSRLCARFRALAARGKKSTVAVTAVARELAAFMWAIVRAVPAT

SEQ ID NO: 283473 - protein, 333 aa, unidentified
MGSPGSERGAPGNGRPYRDKHVFQLHGVNAAEEAVLRKKLRRQDLIAFFEKLPPTMVGIEACGGSHYWARLLQSLGHQAKLIAPQLAKPYVKRGKNDAADAEAICEAMSRPTMRFVPVKTADQQAALMLMGLRNRLIGQRTQLTNAIRGYAAEFGLTAAKGLCKIEPLLERIRADETLPALARELFEINAKEYAWLRAQLEDVEDKLMAWHRADECSRRLAQIPGVGPIGASMLVMKTPTPEAFRSARHFAAWLGLTPKDHSTAGKVRLGVITRAGDEALRSVLVVGATAVIRHAQRSQARVSPGWRRCSSASRRSWLRWRWPTKSPGLPGSS

SEQ ID NO: 283474 - protein, 367 aa, unidentified
MKDSITVVGLDVHKNSIQIVTADTDGAMEVRHFGKIGGTMDALDRAVRKLASGGSPLRFVYEAGPCGYEIYRHLTGKGFACKVVAPSKTPKKSGDRIKNDRRDAETLARLERAGELTSIYVPREEDEAMRDLTRAREDAVKSLKTARHQLNAFVLRYGKRYPGKGSWTPAHMRWLSDIALPHPSQQIVLQEYITTVMVCTERVTRLTDQIVKLLPEWRLNPVVKALQALRGVAPIVAVTTIAEIGDLSRFENPRQLMAYLGLVPSEDSSGESTHRGSITKTGNGHVRRALVEAAHAYGFPARVSRHLLKRQEGLPEPVLAIAWKAQVRLCGKFRRLMARGKLKNKIVIAIARELSGFMWAIAREVEV

SEQ ID NO: 283475 - protein, 455 aa, unidentified
MPKQKRTRNARTLPVARVLEPNAAGIDIAATEVYVAVPTGRDPQPVRRFSTFTDDLHRLADWLQACRVQSVAMESTGVFWIPLFQILEDHGFRVCLVNARHVKNVPGRKTDVSDCQWLQYLHSVGLLRASHRPTQTICAVRSIWRHRESLVQMAAVHIQHMQKALDQMNLQLHHVISDITGTTGLAIISAVLDGERNPENLATLRDPRIVASRETIARALVGDYRVEHLFTLRQSLQAYRQYQQWIAACDSEIERQLQVLPSNLPDDPKPLSKPRDHHKPRRNEPRFDLRSQLYRVFGVDLTAVPGVSSLTAHTLLTEVGPDLRRFPNAAAFASWLGLCPDNRISGGRVLSVVTRKVKNRLTIALRMAAQSLHRSQSYLGQYFRRMRIRLGTPPAITAAAHKLARVLYHLITTRQPYEESTFAAMEERARQRQLLRLTKQAARFGFQLVPGRSVP

SEQ ID NO: 283476 - protein, 418 aa, unidentified
MKSNKTEKIKTINEKTLIVALDIGKKVHHGYFRTPTSQDIKPFPIYNTGQSFNKFWEKLCRFKEKHMLDEVIVGFESTGPYAEPISNYLRKRSVKLVQINPMHTKRIKELTGNSPNKTDKKDPRVIADVISLGHSLTVVVPEGSAAQLRRLTQARERATERRKAMTNQLQGLVFVIFPELVSIIKPSTKTGMYLIKNYLDPESIVSIGIETLGNIVRKISRGKIGINRAEKLYHAAKASVGITDGRKSVLLETSHLVSNIENENRYIEGLEEQMIVYLEQIPYSHSILSVKGIGNITVAGLIGEVADFRRFKTISEIMKLAGLDLFEVSSGKHKGGHHISKRGRSLIRKLLFLAAINTVRSNGIMHGRYQKMLKNGTPKIKALVAVSRKLLRIIFALARDNALYDESYNRKHEYKLAA

SEQ ID NO: 283477 - protein, 349 aa, unidentified
MPNSSPKPFKYAVGIDVAKDQFVVRFGTLDADLRTWFSENAKFDNTPAGFVSFLSWVKKKQVTDAPVQFVLEATGVYYEELTYFLTDQHYQVSVLLAYKVKHFAQSTEKKSKTDPEDAELLSRMGLERNLPVWTAATVTMRAMRGLYRELDALKQDSTRLQNRLHAYEHSYKPNLCTITRLKEQLQFLDQHILAINQELTQLVAGDGELKAKMDLLTSIPGVGLATAVAVVSETNGFALIENERQLASYSGLDVVQRKSGKMAKPTSISKRGNPRLRKALYMPALTSKRWNPQLKAFFEGLKARKLNGKMPLIAVMRKLLLLCYALWKKNQPFDLAYQQGKTVMITRPS

SEQ ID NO: 283478 - protein, 370 aa, unidentified
MQATIRFIGLDVHKDFISVAIADEGRGDVTSYGDIANTPAAVSKLARKLSRQSLDLCFVYEAGCFGFVLYRHLTKMGHSCVVAAPSLIPRKPGDRIKTDTRDALKLARLLRSGDIECCHVPDESDEAMRDLVRAREDAVCACRISRQRLNGFLLRHGKVYDGKSRWSGAHMRWILETKLPHEAQQIVLEEYRRRVEHDADCVDALTMQIRRLNEFWRWAPVVSALQALRGVCLITAVTVVAEMGDLRRFAHPKQMMAALGLVPSEYSSGGKRHQGAITKTGNGHVRRILVESGWNYRFPARLTRQMEHRQRGLDKAVTDIAWQAQKRLCGRYHQLNMRGKNVKLITTAVARELCGFIWDIAQQVEPKTNI

SEQ ID NO: 283479 - protein, 405 aa, unidentified
MNAVGIDISKGKSMVAAMRPLGELLVKPYEVIHTAGELEKLAFSLKKLGGETRVIMECTGRYHEAVAGALNEAGIFVSTVNPILIHGYGNNSVRRAKTDRKDAMKIAKYGLDNWADLREYTPMDAVRQNLKTFSRQYNLYIKTKTALKNNLVALLDQSFPGANNLFDSPARADGHQKWVDFVMEFWHCKCVAGLSEKVFTERYRKWCKKNSYNFSENRAADIYAAAAGHFVTIPKNEHTKLLITGAAAQLTAVSVTVEVFRAEMLRLAQSLPEFPVVMAMYGVGNTLGPQIMAEIGDVRRFERKQSLVAFAGVDPEPNQSGTHNPSSRPASKRGSPALRKSLFLVMSALLRTAPDGDPVYQFIDKKRAEGKPYYVYMTAGATKFLRVYYGRVKEYLNSLEDNRDT

SEQ ID NO: 283480 - protein, 356 aa, unidentified
MSHYRVGCDAHKHYSLFAVMDEAGQLREKKRVNHVRGAIRDYLSQFPKGTPVALESVGNWYWIVDEIEEAGCLPRMAHAAKAKVMMGNIHKTDKLDAEGLATLQHLGSLPTVWIAPCEIRDARELPRTRMAFSKMRAALKNRMHSTLAKYALSLDDASDIYAPKWRPQLLDLIATLPQETARCMHQELELLGLVQDHIDRLEARIKERIKVTESIQLVQTLPGAGAILAIVISLEIGSIHRFPSASNLAGYSGAVPKVKSSGGKQRHGRMVKQANNYLKWAFIEAANVVAMKRNHPIWRRKHVCVLYDRIRRRKGHAVAVGAVARHLAEATFWVLKKAEPYRDPMKVSPRQGQARA

SEQ ID NO: 283481 - protein, 342 aa, unidentified
MRIIGCDLHAAQQTIAMLNRETGEIVERTLLHEGTTVRDFYADLPPPIVVGIEATGSMGWFLRLMEELDVTCHVGDPARIRKVETRRQKHDRRDAALLLELLTENRFPAIWMPPSELRDLRALLRHRDQWVRMRTRVKNALQGLALAHGLRRGAGLWTRDGQATLASLPLAPHAGHRRSELQMLHDHLTTHIDQLDEEVSEQARARPQARRLMTHPGVGPVTALATEVCLGDPSRFVDAKALASYVGMIPSEYSSGDRQRLGRLTKQGNPMLRFLWCEAAIHAVRRDAALGRFYRRKLQQKGLGKARVAVARKLGIRLWILLRDQIDYEEFCRRAPSRAAAR

SEQ ID NO: 283482 - protein, 311 aa, unidentified
MDSKEKFIGIDVSKDTLEIAVTPTGERMTFAQTEDGFALMVDFIQSFSPRLVVLEATGGLERAAIGILGAKGLPAVVVNPRQVRDFAKAKGILAKTDKIDAGVIAAFADAIRPEIRPLKTEETQELEALLTRRRQIVEMLTAEKERLYTAPQCTKKDIRAHIEWLQKCRDKLGKDLDDMIQKSPLWRAKDEILQSAKGVGPVLSQTLLTKVPELGSLNRKEVAKLVGVAPLNRDSGKFRGRRSVWGGRAEVRSVLYMATVSAIRSNPVIGAFHDRLIKAGKLPKVAITACMRKHLTILNAMVKNQTPWRLA

SEQ ID NO: 283483 - protein, 366 aa, unidentified
MLYLAIDQHRKQLTVNLRDEDAQVLVQRQVSTRWQAVREFLQDIQQRGRQAGGWLAIVEVCGFNDWLLKLLVDYGAKEIVLLHPEERSRQKTDRRDANRLGELLWLNRHRLAAGRRVQGLRRVVIPSADDQLDRKLTSLRWRIGRERTRLLNRIKNILRRYNVEQECPTKSVTCQTGLRWLRQLAVGELDRLDLDQLLARLETVDSERATLEQKIRERQGRNVAAARIATIPGMGAYISLALACRIGDVSRFPRPRSLANYWGLTPRARNSGENKQRLGSITKQGSALARFLLGQAVLHVLRKDSVLREWYKGIKRRRGSKIARVAVMRRLATIIWQLLRKEQNYVPGGPRRQVKRRAKAAQAAVA

SEQ ID NO: 283484 - protein, 326 aa, unidentified
MNLSVAVLGVDIAKLKFDVCLIKENGKAKHKVFTNKTHGFEQLVVWLASHQTGSLHVCLEATGSYGEALALYLFDAGYRVSVVNPAAVKAFAASRLTRTKTDKVDAELIARFCLAQQPEAWQPPAPEVRELQALVRRLESLIEMRVAEENRLSSGVSIETVRHSLQTHIAYLVAEIKQTELMIREHIGNHPDLKEQSDLLDSIPGIGATTAALLLAEVTDFTQYKSARQVAAYAGLVPRERRSGSSVRGRTCLSKIGNARLRKALYFPAMTALRCSSFFQQWAKGLRERGKSKMAVIGAAMRKLIHLAYGVLKTGKPFDPNWTKNA

SEQ ID NO: 283485 - protein, 347 aa, unidentified
MLHLGLDLSRKRLDVCVLNEAGTKLAVTQAPPDLDGLRHLAKEVAALGGPVSAAIESMNGARFVHDSLELMGWDIEIADAQKVKGLAPLACKTDKIDAWVLAELSRRDLVPAIWLPDPEIRAERERARFRLHLVRHRVMLKDRIHSSLLAFGKPCPVSDLFGRSGRELLGRLELPDPWTKNIATALSMIDDLDSEIDACEKELRSLGADHPYVSLLQPAPGIAWVLGFTIASEIGDISRFSSPKKLMGYTGLCPRVYQSGGKDFRGPISKNGPKYLRWSLIEAAVHASSHPVYRDHYDRTKARLGRQRGAKIARIEVARKLAEAIWHMLQTGSMFAPARSPAAPLVA

SEQ ID NO: 283486 - protein, 438 aa, unidentified
MIRYVGIDLHKRLLVACFLDERGQIIARKTLTSVSESSVSAFARTALRPEDHVALEATANVWAVVRLLEPHVARVVVSNPVLTRAIAHAKVKTDKVDAQVLAHLLRLGYLPEVWQPDEPVRHLREWTARRSGLVSQRTALVNRLHSTLAQRLRECPHDPASPRGRAWIGALSVDDDTRWLIDSDLRLLEAVQAEIEAIDQRLAQRGYDDPRVRLLMTLPGVSQHTAQSLLAAIGDVTRFRDGRKLASYLGLVPSTRQSATRCYHGPITKQGRSHTRWMLVQAAQSVRNHPGPLGHFFRRLKKRKNHNVAVVAVARKLAILAWHVLTEGTPYRYALPETTAAKLRTLRVQATGKKRRGGTARGTKCVSKLPGVPGGSRAVKSLPDVYAAEGVPPLAAAPAAEQRHLAAHQLDTFAAELQQARRVPRRAQHSDASCPCDP

SEQ ID NO: 283487 - protein, 329 aa, unidentified
MMTNPPQIVFNHIVAFEVSKETLVVHTLPADEQCTIDNKPQAVRRLIKAEIKRNRNKQLGQMLVICEATGGYERHVLDVALEMGVSVHRAHGTRVRHFGHYRGLLAKTDPIDARLIAQYGLKTENIRLYSPPPPDTAALRALHARRTEIQQMIIAETSRLDHAQHKSVLKSLKAHIASLKAALAAIEADIAQLVEGCEMLRKKVALMQTVIGIGPISAMVVLAYLPDIGQLTKGQAARLAGLAPINNDSGKKRGARHVEAGRTAIRRALYMAAGVAMRVNPILKAFSDRLRGKGYPFKYVVTAVMRKLIVILNAVLRDGQSWKGAQMAA

SEQ ID NO: 283488 - protein, 348 aa, unidentified
MNHVAIDLGSKFSQVCMRSTDGTIVLERKERTALLPTVMRTWEPSRVVVETSSEAFRVADAAVAAGHEIRVVPSILAKQLGVGERSQKTDVRDARKLSEISCRTDLRSVHVPSSEARELRSLLRTRHLLVGSRTKLINSVRGWLRTHLEGVRTRYAPTLPTRIREHATAHALNVPVHVEHVLTAVEMLNIQLKALDALVEARALANPICLRLMSVPGIGKITSLAFVASIDDVKRFPTAHHVGAYLGLTPGEDSSSQRQRRISITKAGPSLVRFSLVQAAWVILRKYPADPIARWGAQIAARRGAKIAAVAVARKLAGVMFALWRDDSLYNATRAARADSVQTGVTAA

SEQ ID NO: 283489 - protein, 391 aa, unidentified
MIYVGIDVSKDKHDCFITNSEGEVLAGVFTIPNNIEGFNCLLRRIQACATSQGQTKVGLEATGHYSYNILGFLLDNGLTTYVLNPLHTNLYRKSLSLRRTKTDRVDARMIATMLMSDVGLKPYTDTAYHNEELKSLTRYRFGKVKERAKLKSSISRLVCILFPELEKLVSTLHIASVYALLDKFPGSHQIAEAHLTQLKSLLHESSKGRYGRDMAAAIREAAKLSIGSKIPAKSLELRHTIQLIRELDAEIEEIEAAIQSIMDELRSPITTIPGIGFRMGAMILAEVGDFSRFDSPDKVLAYAGMSPSTYQSGQLTNGYARMEKRGSRYLRFAIYNATKYVCHWNPVFAAYLTKKRTEGKHYNIALSHAAKKLVRLIYALEKSGKSYCAVV

SEQ ID NO: 283490 - protein, 421 aa, unidentified
MEEITEEAVGLVERVAGLDIAKASLVCCVRVPHDSRPGRRRQQVRTFATTTGQLLELRDWLAAEGVTRCVMEATSAYWKPPFYLLEDAIAECWVVNAREVKNVPGRPKTDKLDAVWLARLAEQGMVRASFIPPPWQRELRDLCRYRRTLTQERTREKQRAEKLLEDTQIKLSSVISDIFGVSGRAMLEALIAGQRDPRALAQLARGSMRGKISTLVEALTGHFRDHHGYLLAMMLGRIDDLTAQIEQLTTRIGQAIAPFACQVAQLDEIPGIGTTGAQEIIAEIGVDMARFPTPGHLVSWAKFAPAARQSAGKSKPGSTGKGNPWLGGALGEAVIGAARTKTFLGARYHRLARRRGKRRALVAVGNSILTIAHRLLSDPAAHFSDLGPDWPDRIAPLRRKRQLIAELERLSGRKVLLQEAA

SEQ ID NO: 283491 - protein, 387 aa, unidentified
MSQTVAALIPAAVDYERTLVLAIEVSNKNWVLAAQVPGLPHTKAKRTVNPEAEALLAAFAGYRARAATMGRNVERVIAVYEAGWSGFWLARWLMRHGVEVYVIQPSSVPVDRRMRRAKSDGIDAELLLRTLLAWLRGEPRACSMVPIPDEADEDARRCVRERTELISERVGLINRIGAVLATLGVSDYNPLLRNRGRRLAELRTALGEPLPANAHAKIKRLLARLELVLRQIAELERERDAVVETEASDKASEMIQQLTALRGIGVQSATVLVREAFVRRFANGKALGSYAGLASSPYCSGGIDREQGIGKAGNRRVRTVMVELAWLWTRYQPCAAQVCWFRERVGSTGRRVRKILAVALARKLLIALWRFVTDGVVPEGAVLKPAA

SEQ ID NO: 283492 - protein, 408 aa, unidentified
MEILYPRCAGLDVHKETVVACVRCVSEPPHSEVRTFSTMTSGLLELNQWLESHRCTHVAMEATGVYWKPVWHVLEGNFELVLANAQHIRNVPGRKTDVNDAMWIADLLAHGLIRSSFVPPAPIQELRDLTRTRKQLVREMSQHTLRIQKVLEDANIKLDSVLSSVVGKSGRAMLKALVDGEDDPERLADLAQGHARKKHAALVEALRGRVTKHHRSMLKLHMQMIDAIESALREIDGHVGKALEPIQACAHLLTTIPGVSDIVANVIVAEIGIDMSRFPTPGHLISWAGLCPRNDESAGKRRSTRTRKSGTWLKTNLVTAAWSAVRVKATYLRAQFLRIKSRRGAKKAVMAVAASMLQAAFFMLRDGVEYRDLGSEHFERRDKTKAIGRLIRRLGDLGCQVEIKATAA

SEQ ID NO: 283493 - protein, 416 aa, unidentified
METKREVVCGADIHKQFLLATILSNSGQKIQARFDMDFEGLLSFRKWLLDHSCQKLAVESTANYWQPIYLIIGKDVEFVLANAYQIKHVPGRKTDVLDSEWIAELCLKNLIAPSRIFSGEYRDLRAITRTRENYVKMRSQIKNRIHQELESACIKLSSVLSDIFGKSGIHIIRGILSGSNIEDILNRIPSKKIKAKREEIRNAIQVNISPVQVDLIGRLLDSIDFLSKEIASIDMQIQTLTAGRQEDLKIAMSIPGMGITSATTILAEIGNFADFKTGEQLAAYCGLVPSVYQSAGKLITGHITKRGSPHVRRMLIEVAHAISRTKADSKLKRFYFRIKSRHGAKVAVVALARKVICILHHLIVNKEMFEDETKNKFRRVKSVRSSSSPEMIVSDAIQILIRAGYVVQKRSEQEGG

SEQ ID NO: 283494 - protein, 366 aa, unidentified
MLITKHSDRSLVKPKEEQPIIKLGLDVHASQITVCRQEGGLLPQPAQKMSWEKALAWIAGLVAGGARVHSCYEAGPCGYGLHRQLGAMGVSNLVVAPQRWDEHCKRVKTDKRDARELADRLDRYLRGNHGAFSLVRVPSEDQEQRRALARQRGLMVRDRNRFVVRGRLMLLAQGRRVACQWWKPVHWIELRDTLPAWLGELLQPWQAQAVSLEKEIEALTPKVEALHGSKPIPKGIGTLTAAILGSEVLDWHRFKNRRQVASYTGLCPSEASSGDKRKQGSINRCGNARLRHQLVEAVWRLERWQPGYPPIKKLRKTTGVRSRKRIAVAAARRLAIDLWRIETGQCSARKLGLKLAVPSLSEPMGE

SEQ ID NO: 283495 - protein, 369 aa, unidentified
MQNYCGLDVHKGSVFMCIINDSGVVKEQQFSTLTSDLYELRSCLELYNVYQVAMESTSIYWIPLWRVLSDAFDLKLVNPLFIKQLPGRKTDVRDAHWIALVLMKGLVYGSYVPDQQIQSLRQYERRYSALNKRIVHGEQSLDMQLQRCNIRLSNYISDIGSQAMRKVVKCLINGISNPDELLKCVHTRTKNKHGTGVIRESLNGVVSQVDRDMLALYMEELELYHRQQEECQMRMMEICQESYELELSLLTTIPGIKTASAMTILSELGNDLSAFKTSSNLVGWAGLRPRNDESAGKIKSRKTMHGNKFLRVILVQCAWANSRSKSSRLGYKYALLAKRMAPQKALVAIARKLLVIIWNVLTKKEVYSV

SEQ ID NO: 283496 - protein, 345 aa, unidentified
MQPMYYIGLDVHKRTISYCAKDSSGKVYAEGSLPATRLDLDHWMKTLPQPWTAAMEATMFSGWIYDYLKPHAAALKVAHPLMLRAIAAAKKKNDRIDASKICDCLRCDFLPECYMAPTAIRERRRTLRYRNLLVRQMVQMKNKIGMLLMEAGVSYNKQRLHKAGYFRELLATNPDINEGLASLLRLCRETMVRLQKTESALVRSLERDPLLLERVERLMTIPAVGPITALTWALEVGDVQRFSSIKKAISYCGLCGAEKSSGSTIQRTPLSKQRNKHLQTTLIEAAKMAPRFSPALAMLYEQEKQKGNANRATLAVARKLVAYLMAVDRGQRNFQVLATSNCVAA

SEQ ID NO: 283497 - protein, 311 aa, unidentified
MNAQDCFIGLDVSKDNLEVAVRPTEERNTFANQEDGLSLMIDFIKPFSPRLIVLEATGGLEKAAVCACAVEGLPVVVVNPRQVRDFAKAKGILAKTDKIDAGVIAQFAEAIRPELRPLKAEEAQKLDALLSRRRQILQMLTAEKNRLQSAPVWTRKDIQKHIAWLQKELDQFNQDLDRMVKESPIWRAKDEILQSVKGVGPVLSVTLISQLPELGALKGKKIAALVGVAPLNRDSGKYRGRRTIWGGRAEVRSVLLMATRIAIRFNPVIRAFFERLKKAGKIRKVAETACMRKLLTILNAMMKNNTRWQPA

SEQ ID NO: 283498 - protein, 377 aa, unidentified
MKNVRFVGLDVHAETIAVAVAEPGGEVRSLGRIPNRPESVGRLIRKLGKPEQLRVCYEAGPTGYVLYWQLSELGVKCQVVAPTLIPMKAGDRVKTDRRDAEKLARCYRAGDLTAVWVPDAAHEALRDLVRARLAAKRDQLRARNRLSKFLLRHGRRAPEGASAWSTKYLSWVKSLHFEQTAQQLTLEDYLHEVEHAGERIARLEHSIDAAIETLPVKMRAVIEALQSLRGIAQVSAVSIMAELGEMSRFERARQLMGYSGVVSWEDSSGQRVHRGGISKAGNAHLRRIVVEAAWSYRHRPAIGKALAARQRRTSKQASELAWKAQHRLHQRYVRLIGRGKCKQQAITAVARELLGFIWAIGVEAQRAHNTKQVRRAA

SEQ ID NO: 283499 - protein, 370 aa, unidentified
MSVYVGIDVHRKRSQVAVVTGDGTVELNKNVVNGSEPMLRLIGDLPPGTPVAFEAAFGWGWLAELLEDYGFGAHLVHPLRCEAIAPARPKNDKAGAATLAQLLRADLLPEAWIAPPEVRQLRALLRHRAGLVRLGTQQRNRIHAVVADFGYDRSGSYLSGPGRGWLAGLELPAASREIVSDCLAVIDGLAPLTGRIDGELRQHARAGSRVKTLTTLPGVGQFTALVMLAEIGDITRFPSARTLASWAGLTPTVRGSDLTVRHGHISKQGSPWLRWVLNQAAQTAKRSPDFAASYAAIANRRGTKIATIAIARKLPTRAWHLLPTAQAPGPAAPPASPAAMPHPQTGRVTKPRASSLTRHEPASGRARSPE

SEQ ID NO: 283500 - protein, 415 aa, unidentified
MDYFLGIDPARKGFHAWALMDGKKAVYECDKSNTNEGLLKQLEEVRKNFEGDGNRIWVGIDDGHEYLTELLYREGFDRIYQLNSAKLSAYKRINDLSGGKWDALDASVAGEYLVENRRKLKQYRPPTELERQARILAEGMEGIRECRIQAWQRFWAVTDYIAPEMSRLKLNFDANYFTDAMDLLGRCRNMGAKAMLSFCKKRKSGAKPKELEKLLACMKKLEKHGNMELIKLQARNIRGLNEEDKAWEKKARSLLATWEKGMPLFTINRFGPKTGVRFLAYIGEDWREVKVEKLSAYAGAAPVLKGSGTPDRKTARRLRQKGKKPKQERRQHRLACNKSLKTALCLFTLYSMESHPWARESYDSMRARGQKHWEALRNLSIKWLRIMVHIMQNNLVYDADLHSANQRIRKTQPAA

SEQ ID NO: 283501 - protein, 391 aa, unidentified
MTKRKTETVNDLSRCLDPLDMDATLIAVIEMSQSSWLVAGIVPGVERQPLKKLAIDEHALLKLLSRWRAEAEKKGHKITRVTVAFEAGHDGFWLARWLAALGVEAHVIHASSVAVTREHRRAKTDRLDTELLKRGFLGWLRGERGHCKMVAVPTLAEEDAKRPSRERETLVGEASRIITRLKAAFVRLGIRSFNPKLKAAAERLGTLRTPEGEPIPPNTLAALKRDLERHQIVKRQIREIEQTRLEHLAQAPAKGPNAMVLLLARVVGIGVETADMLVQEVLSRNMRDRRAVARYAGLTGSPDESGAKRREKGLARSGNARVRRGMIQLAWRFLLFQKDSALAEWYRQRTANAPSTRKTFVVALARKLLIALWHLARDGVVPEGVRLRPAA

SEQ ID NO: 283502 - protein, 337 aa, unidentified
MMYSGIDLHSNNSVVAIIDEADRVVAQKRLPNDITTIVGFLARWRDDLAGVVVESTYNWYWLVDGLQDAGLHVHLANTAAIKQYDGLKHSGDETDAQHLAHLLRLGILPTGTILPREHRAVRDLARKRMQLVHSCTAHVLAVENIMARQLGGRMSSNQIKRLTGDAIDEMALAADVSLAIKTNVAVIATLQAQIEILEKRLQQHVKPRAQYGFLTSVPGIGQALATVILLETGPIDRFADVGNFASYARCVDSVRTSNRKKKGEGNVKNGNKYLAWAFVEAANFARRFCPEAKRFHARKKAKTNNIVATKALAHKLARACYHILKEGKPFDVTRCFA

SEQ ID NO: 283503 - protein, 355 aa, unidentified
MLNTKYIGMDIHTETISIAVRNAAGKIVMECVIETKANTVLQFIHGLRGDLHVTFEEGTWAAWLYDLLKPHVTEVLVCDPRKNALLKRGSKSDKIDARKLAELLRLKHLKPVYHGEHGVRTLKELARSYLTITQDLTRVRNRLKALYRSWAIPCSGTQVYAPRHRSEWLGKITEAGVRRRAEHFYQQFDALRPLRQEVRRDLLTEGQKHKAWKLLRQIPGIGAIRATLLIALIQTPHRFRTKRQLWNYSGLGLETHDSAQYCVVEGQLQRSKKPLVLRGLNQNHNHDLKAIFKGAALEASSGAGPFHDFYEALLTKGRKPSMARLTLARKIAAIALIVWKKEVSFDAKHLKQQAA

SEQ ID NO: 283504 - protein, 340 aa, unidentified
MEKRYIGIDLHRNRFTCCIRLENERTYVTEWELEDLDKFVKKLRPADEVAVEITGNTRLFHEAVAGHVARIVVVNTSQFRVIRQSVKKTDPHDARTLALYLSKNMLPEVRMKDKQRGQLASLTQTRDTLVKLRTALKNKINNILSARGLNLPKEALSSEKKLAEVLELPFDEIVQIELRVIVGQIRSLNQSIAELEKTIGEEGSKLDGHKNLASIKGIGKITGAILLSVIGNVEDFADEGHLASYFGIVPRVSNSNETEHSGRIHKRGTKLGRTALVQSALIAARYSPYLKRFYEQVKARRGAGKAIIALARKFLGVVYRTLKNGWVFEDFPNFVLAEAS

SEQ ID NO: 283505 - protein, 424 aa, unidentified
MPSAVNRRRRAFAGTSVSWVFMANAIVRSVVTLYKELRVPGCLTDVGAEGSRTPWLCISFELGEGTWKLSFTTGFGEKVVGRSVPSRDRDAVLRQIEAMKERLGLTPGCRVVSCYEAGRDGFWLHRFLEAHGIENLVVDSSSIEVSRRRRRAKTDRLDGESLLDLLLRHLAGSRKRVWSVVRVPTVEQEDRRHLHRELQSAKRDRTRVTNRMKGLLANQGLTLDLRHDVPAQLAALRQWDGSPLPAGLQARLAREWERVAFTTGLIERLEAERRELLRHGGDPALEKARELNLLRGIGMNSAWLYAMELFGWREFRNRQEVGAIVGLVPTPDDSGQRERERGMSKAGNRHVRAMAIEIAWGWLRFQPRSELTIWYQRRFGSGSKRLRKIGIVALARKLLIALWRFLETGVVPQGAELKADVRIR

SEQ ID NO: 283506 - protein, 327 aa, unidentified
MGKILGTESFPATAAGYRQLPVWARKRGTVRRASVKGTGTFGAGLSRYLPAQHVQVLEVNRPDRTARRLLGKSDPIDAQAAARAVLSGRAQARAKSSDGPVHSARIFKLAKDSAVKARTQAINQLKAVLVIADPALRDRMSSLGNAELFRTCARLGSPDGGGVEDVVAQATHITLRMLAERIEQLTAQIDELNQRLTRLVERHAPQLLVPVGIGPDSAVTLLITMGDNPERLNTEASFAALCGVSPIEYSSGRRRTRRLNHGGDRQANAALHRIVFTWLRHDPRSQAYYERRTQEGKTRREIIRCLKRYAAREVFNLARPASRTPAL

SEQ ID NO: 283507 - protein, 414 aa, unidentified
MESGYRLLVGIDWATQAHQVCVLDSQGRLLEQRRVEHRAEAIAAMIDRLIGLAGGDPGSIAVAIEVPRGAVVEALVERGLHVFAINPKQLDRFRDRHTVAGAKDDRRDAFVLADSLRTDLSAFRRIHLEDAWTIQIRELTRIEEDLKTEINRLANQLRDLLLRFYPQLLRLCPAADQPWLWALLKLAPTPMKAQRLRRSSIERLLRQYRIRKWTADQVRTELTTAPLSVAAGVTEATSAHIALLLPRLELLMVQLRLCSKAVETALDERIAEEKQRREHRDVEIILSLPGVGRVVAATMLAEAPQLLAQRNYHALRTLSGIAPVTRQSGKRLAVRRRYGCNQRLNDALYHWARVSSQCDPRAKHHYQTLRQIGHSHGRALRGVADRLLAILVAMLRDQTVYDSTRAHAPNPIAA

SEQ ID NO: 283508 - protein, 394 aa, unidentified
MQRDTKEVLAELVGKLKEKLDPKKVAATSTGEKYQQGELSPNLDRLTVGVDLGDQWSHYCILGLEGETLAEGQLRTTPQDVAEFFEALNAARVVVEVGTHSAWVQEVIRGYGHEVLVANPRLMEGSKRRKRKNDRIDANKLARLGRVDPQSLHPIEHRSPEVRQDLVLLRARDALVAARTELINATRGLVKSMGTRLPKCSSPSFAQKVEEAVPAQIREALLPLVRMTAALSDGIQGYDEKIEKLASEKYGHTALLRQVKGVGPITSLAYVLTLENPERFEKSRDVGPYLGLVPKQEDSGESQPQLGISKAGDTMVRRLLVGSAHYILGPFGPDTDLRRYGLRLCERGGKNAKKRAAVAVARKLAVLLHRLWVSGEVYEPLRQGMAATTAHAAA

SEQ ID NO: 283509 - protein, 309 aa, unidentified
MEIVVGIDVSKERLDVAILPQEEVFAVGNDHAGIDELVERLKGIGVDAIALEATGGFEMLAVAGLSSAGLTVLVVNPAQVRAYAHAIGRRAKTDPIDAAVIAAFVLATKPEIRPLRDAETQALSELVARRRQIVQMVVAEENRLRMALAKQAQKSIKRLLKALRRELESLDADLDSHIRKSPVWRVREALLTSVPGVGATTARTLLAELPELGSLDRRQIASLAGLAPWTRQSGKWKGKSFIGGGRGKVRAVLFMAALVASRYNPDLKAFRDRLVAAGKPKIVAIVATMRKLLTILNAIIRDGRPWQTA

SEQ ID NO: 283510 - protein, 317 aa, unidentified
MTKKGETILAIDVSSTQLEAYIANSQAVLLRKAFNNNKSGCSRLFKIAQNHNVTRCALEATGGYEQAIAEYFYNSEITVNILNPARIRRYAQGLGILAKTDKIDAYVIERYAREVKPRANFEATKSQLMLKRLITRRSSLKNTIIAEKNRKRTAEKQIVKSINRVINFLEKEVKSIEKSIDQLLQQDIGLQEKVDVLTKQKGIAKITACSLIGLMPELGYLNKQQVASLAGLAPFSRDSGKMKGKRYIQAGRFLARKSLYFPAWVAVMYDQKLKQIYNRLIGRGKPPKVAIVAIMRKMIVEANKNLKFYYKNVQKNY

SEQ ID NO: 283511 - protein, 335 aa, unidentified
MTIVTIGLDTSKSWFQVHGVDEDGQAVVRRKLPRSKVLEFFANLPPCTVGLEACGGAHYWARELTKLGHIPKLMPARYVRPYVKTNKHDAADAEACCEAVQRPGMRFVPTKTTEQQSMLMVHRVRDLLIRQRTAAVNALRGHLSEFGIVRPKGTASARELMSLVATDERVPALAHEALDSLVNQIRDTERKIEAFNERIAAMAKNNDVCRRLMTVLTIGPFVATALVATAGDPNYFSSGRHFAAWLGLTPKQHSTAGKERFGGISKRGDSYVRKLLIHGARATVHNIRSGRVNGAWVVGLLARRHFNVTTVALANKTARIAWAVMTTGQSYRAAV

SEQ ID NO: 283512 - protein, 347 aa, unidentified
MRFYNRQHRHNCGIDLHVKTMYICVLDAAGQVLVHRNVKSTPEAFLEIVAPYREDLVVAAECMFTWYWLADVCAAEGLAFVLGHALAMKAIHGGKAKNDTIDSHTIARLVRGGLLPQAYVYPAGMRSTRDLLRRRLHLVRKRGQLLAHIQNTRAQYNVPAFERRIAYPANREGVAECFADSSVRKSIEVDLTLIDQYDTLIVDLELTIVREAKRHDADACHRLRSVPGIGKVLALTILYEIHDITRFDRVQEFASYARLVKCKKQSGGKTLGTGGAKMGNVHLKWAFSEASVLFLRHTTGGKKLLAGLEKTHGNGKALSILAHKIGRAVFYMLSRGTVFSMEKFLAA

SEQ ID NO: 283513 - protein, 415 aa, unidentified
MTEDTQWFVGLDWAREKHRVVVLDAKGESVAERDVTHDGAALSELCAWLIEVTGAQPAQIAVAIETPRGPIVETLLERGFVVYSINPKQLDRFRDRFTVAGAKDDSRDAHVLASSVRTDRRAFRRLTFDDPLIIELREWLRIEDELKQERIRLSNRVREQLWRYYPQANRLSDDVADDWFLDLWEQVPTPTTAAQVNENTVAKILKTRRIRRFNAAEALAILRQQPLQVAPGTAKAATAHIRTMAVRLRLINEQIKQAERRLDELCAGIKASAPGQICEQRDVAILRSFPGLGRINIAALLAEACQPLRERDYQVLRVLSGSAPVSRRSGKSWIVLRRYACNNRLRNAIYHWARVAIQHDAVSKRRYDELRRRGHGRARALRGVGDRLLYVLCKLLQRQTPYDPEYKIQQMQLTA

SEQ ID NO: 283514 - protein, 340 aa, unidentified
MSLVLQSFLPYPDSCLGTSPHQQGWDTKMAELSFGGIDVSKDRLDVLLLPEGVCFSVCNDAPGWAELIKKLRPFAPAAIGLEPSGGYERGIIRALLAAGLSVRCINPNKLRQFARAHGVLAKNDRLDAQLIAEYVAIMPTRVVRRDDAVERLAEIVTMRRQLCDEHVAAMNQAAHLEDAILRRLSKRRLVRIEADILLLDKRLAELVAANSRLTHRYRLLISMPGVGPTLAYTLLATLPELGQLDRKQIAALVGLAPYDFDSGKLRGHRSIYGGRMPVRNVLYMAALSASRYNPALKAFSKRLAAARKKSKVIIVAVMRKMIVTLNAMLRDNTEWRPTFV

SEQ ID NO: 283515 - protein, 385 aa, unidentified
MTVQSRVSEFIPRHYEIFSGLDVDKGSIGVTFTDHNQLLNSLRLPYSSAQLLNYVRKHFPRQRVAFVYEAGPTGFGLYDEITAAGHPCLVVAPSMVPTAPGKRVKTNRLDSKKLSEGLRGGQLRSIHVPARPYRELRHLVQLRDTHVQQLTATKCRIKALLLYEGIPYPDPKGGWSAAVIAELRALPCTEAVRFKLDQLIGTLYFHFNSAAVVQKQIRRFCQADPELRQSIALLKSIPGIGWIVAAHLVARLGDWREIDNVRSIAGFLGLVSSEHSTGDKQNRGAITRSGDSRLRNKLIQSAWTTIKKDPELRAFYRSVYQRQPKKLAARKAIVAVARKLTTRIYAVLKQQRPFVLRPDISTAPLTAEETAGPRERLDTAQNEQP

SEQ ID NO: 283516 - protein, 398 aa, unidentified
MTRKNTLKSLPTDTEFRVVGLDLAKSDVSVAAIPVDDNTPSLVDRMTYADLLDWAGKISPTLFAMEPCNGYSLLCLQLENLGHEIKVISDSTVSMWINTHLSGQKTDLNDAIALARLAVSDAELTPIRHKSITEIRIQTVQAVRQQLMSQRSKSIVSFKALAQQWGIPCAAGHRNLKKLRESIEAKVDLITRPVANAMLFLLDAVKSLDRQIGQLNQTLQELVMSDERGRLLQSVLGVGTQISARVITVVGNVERFNSPRSLVAYVGVAPRNFITGHKNLTKKKHGNCPDLSHKGQGKISRRGDKLLRSLFIQGAACLYMQFCKDQLPECQLKRWILKQLAMQKPYGKLIVSLAAKLIRIVWAVLTYGEKFNIQKAGMTRSMWSEMALETPLNKEVPA

SEQ ID NO: 283517 - protein, 423 aa, unidentified
MDVIQDCVAGLDVHKDTVVACVRTMSGTRAMRECRTYETTTDGLLALLEQLSSSGCSVVAMEATGVYWLPVWKMLSDGDFKLVLANAAHIKAVPGRKTDMNDAMWIADLAAYGLIKASFVPDEQLHELRTLMRTRKQLTREQTRHVQRIQKTLTEANIRLDSVISDIMGASGRRMIEAMIAGQRDPRKLAALAHRSVKATPKQLYDALHGRLTEHHRFLLKLHLGQWDALDASIRVIDREVDARVARLDAERPADKARFSDLIDLLDLIPGVNRLSAVSVLSEIGTDMTRFDSDGHLIAWTGLCASQNESAGKRKRTRLRKGNPWLKTALVQCAWAAKNAKTSYYRAQFLRLRARRGPQKAICAVAASILTAIYHMLSNGTAHQDLGADYFDRRSPEAKVGRLVRQITKLGYEVTVQPTTKAA

SEQ ID NO: 283518 - protein, 392 aa, unidentified
MNAVGIDVSKGKSTVAVLRPFGEVVASPFDVIHNDNDLKRLVKLIRSLPGESKVVMEYTGTYFEPIAQFLHNNALLVHNYGGNSLRKVKTDKKDALKLASYALDRWTELDEYVPADEQRKILKLLNRQYNQSIKIQTTMKNNLISLTDSVFPGINRLFTSLERQSDGHEKWVDFLHAFPHKDCVAKLYLSAFKAKYKSWCSRNKYRYSESKAEKIHSYAKSVIAVLPLNESVKLIVTQVVSQLNTILETAFSIRTEMNRIASSLPEYDTVMSMFGVGKVYGPQLIAEIGDTRRFRNRRAITAFAGLDAPPYQSGQLDVSSRHISKRGSAALRKVLFQITEIFILSKPENEPVYQFIIKKRSEGKHYYSYRIAAANKFLRIYYAKVNQILNAT

SEQ ID NO: 283519 - protein, 409 aa, unidentified
MIRVIGLDIHRVFAEAVMLDGHKVIRLGRIGMTREHLYRFAQTLTHDDHVVVEATGNATAVSEVLAPHVGRVVIANPRQVRLIAEARIKTDVIDATVLAKLYAANFLPEVWVPDQRTLALRRQVTRRRQIVRQRARLKTMIQSILHAHLVPPCPHVDLLGPKGKTWLLAQSLPPDEQDAVARHLREHDRLSDDLRVAERELARDALARPDVKRLMTIPGIDMVVSIGILAAVGSVKRFASPDNLVAYLGLNPSVHQSGEDRPRHGRITKQGPAHARSMLVEAAWQAVRSPGPLRAFYERVARRRGNHIAAVAVARKLAVIIWHLLQKGEDYAWVRPALHARKLRDLELRSGQPAQRGQRGAAYAYNLAGTRREEKRRAEQAETAYRRQTEGWTRRGRKVPTGAANEERH

SEQ ID NO: 283520 - protein, 420 aa, unidentified
MKAYNINDFAALIGIDWADKKHDVCEHQVHNKKHHYSIIKSTPEALHDWAMSLKKRYPNQKIAVACELKKGPLIYTLTKYNHLVLFTINPSAVANFRKAFTPSGAKDDPTDALLQVEILTLHMDKLSIIEPESAAIRSLAQLVEYRRSLVQDSVDLSNKITATLKNYYPQALEWFKEKDTYIFCDFISKWPSLAKVKRVKKQTLLDFFNSHNSHYVHVNEARISSIKSAMPLTEDSGVIEPNQMLVEVLIKQFKVLLKGIEMLDKAIKLAYKAQHDKVIFDSLPGAGPQLAPRLLVAFGSNRERYEDASELQKYAGIAPVIERSGKKMWTHWRYSCPTFLRQTFVEWAGFSIRYSFWAKAYYEQQKSKGKPHNSIIRALAFKWIRIVFRCWKTNTPYDESKYLEALKRRGSPLLKFAINS

SEQ ID NO: 283521 - protein, 492 aa, unidentified
MVLHPTKRNAKAQSSSKRRKKADAEERKRKELRRFLAGKRKSLPRGLQQINLHAAGADLGSEKHVVAVGPGVDPDGNDVREFSACSDELRRAVVWLKACGVTTIAMESTGVYWIPFYDLLEQAGFDVYLVDARQAKNLPGRKTDLEDAQWIQQLHTYGLLSRAFRADLEARNVRDLMRQRDRLVRERGRQVQQIQKALDQMNIKLHKFISDIQGLTGMSIVRSIVAGERDAAKLAALRHPNCKKSEAEIARSLDGLWNEAYLFELAQALERYDLFGKQILQLDAEWARQIDGVALVAAEEVPEDCKTEKFQHNTPRLFDPRIEAYRLCGVDLAMIPGIDGYSALKLLSELGFTVEAFPTPGRFASWLALCPGNKISGGKVLSSKSKRCQNRVADMLRMCASTLWHCDSWLGAFFRAMKARMGPAKAITATAHRLAKLVWIMLTRKCRYEEAGAEVYERNHQQRRKTWILREAAELGFHLVPTRSGADDCTAE

SEQ ID NO: 283522 - protein, 347 aa, unidentified
MILVGCDLHTRKQQVAVLDTETGEVVEQELAHAGDAVERFYAALSGPVTVGIESTGYSLWFHTLLQRLGHTLLVGEAAKIRAMVVRKTKTDRRDARHLLDLLQHERFPTVWIPDPAARDLRVLIKHRLRLVRIRTMIKNGLHAIALNQRLALGPSLWSQRGLAQLRTLALLPHTSRRRDDSLELLDWLTHRIAALDLQVAAAATAHVDVERLMTHPGVGPLTALATVLVLGPVRRFPGSKHVVSYIGLAPTVHASADKYRLGRISKQGSALLRWVLGQAAPLAARADVDLKRVYFAVLRRRGRPKAKVALARRLLVRLYVMLRDQIDYDEFCARGQARRRTAASSPV

SEQ ID NO: 283523 - protein, 327 aa, unidentified
MRYIGIDVSKATFSVAYPLPKGGYKPREFKNTAKGVHEFIRTLEADDHCVMEATGNYSYLLLYLLNQANITTSMENALKVKNFARTMLSVTKTDKADAQLLSLYGERMRPAPFKMPSEAILLLKQKRAALRQFQKQLLSSTNLKKSLEVMPQKDAATFKAIDKIIETLEKQIRKIEEDLIVLTQKEFDRQMQRLTSIKSVGVSLAAAIILATGGFTYFDNAKQVSRYLGICPTYQQSGTSVHFKGHINRNGDAHLRSQLYVAAWSMSQHNAECNKLYMRMKEKGKSGKLIMIAVANKVMRQCFAVVKNDTDYVDGFVSQKPQSSNFS

SEQ ID NO: 283524 - protein, 359 aa, unidentified
MDNNEDGTRHVVGGVDTHKDLHVAAVVDGQDRVLGTACFATTRQGYRQMLVWMRSFGDLRRIGIESTGSYGAGLLRFMQQAGIDVLEVTAPDKHDRRRRGKNDDLDAQNAAHAALAGRRIVTPRSRDGMVESLRVLTVCRKTAVAARRVAIQIIQTTIVSAPDGLRDTLRSMTRMQLVRTLAAWRPDLTAYREVEAAYRISLKSLARRYLELHDEIADLDAMISAIVDDLAPELIARNSIGYTSAAQLLLTAGDNPERLRSEASFAALCGVSPVPASSGKTIRHRLNRGGDRAANSALHIIAIGRIRTDSATKAYVARRTSGGHSKLDAIRALKRYIAREVFHIITRRRREINQTRIAA

SEQ ID NO: 283525 - protein, 317 aa, unidentified
MNSKNNQNEINVGVDTGKTQLAIYIRPLDIYFTVTNDESGIKEAIKKLKKHTITRVVIEATGRLEQPFIMACAEAKIPFVVANPVNIKRFAGAIGQKAKTDKLDAQLIAFYGEAIKPKLSTLKPQQMRLMSDLLSRRGQLMAMQTMEKNRSQIMPKEILSLIKPILTALKIQLEKVDNKLLKLIQSCDDYKIKNDIIQSVPGVGNVVTFNLLSDMPELGYVNNKEAAFLVGVAPFNRESGSYKGKRMIRGGRPKIRTAMYMAMMSAIQCNPKFKGIYQRLVAAGKPKKVAIIACIRKLVIVLNSMVRDGVMWDPKMV

SEQ ID NO: 283526 - protein, 341 aa, unidentified
MSVYVGIDVHRKRSQVAVVAEDGKVQLNRNVVNGSEPMLRLIGGLPAGTPVAFEAAYGWGWLVELLEDYGFDPHLVHPLRCRAIASARLKNDKVDAAILAQLLRADLLPEAWIAPQPVRQLRAQLRHRASLVRLGTQLRNRIHAVGADFGYDRAGSYWTGPGRGWLAELDLPPVSREIVTDCLASIDALAPVIERLDGELHQRAKADPRVKVLRTLPGVGEFTALVMLAEIGDITRFASARKLARWAGLTPTVRGSDLTGRHGHISKQGSAWLRWVLNQAAQTAKRSPEFAATYAAISRRRGKKIATIAIARKLLTRAYHLLAEQAAGTPGTTMPDTSAAT

SEQ ID NO: 283527 - protein, 338 aa, unidentified
METYAGIDLHSSNNYIGIMDQDHKRLFGKRLPNSLDKILMVLEPFKSDLKGVVVESTYNWYWLVDGLQEHGYRVHLANPSAIKQYEGIKHTDDKWDAFWLAHMKHLNILPEGYIYPKEQRAVRDLLRRRLFFVRHRTANILSLQSTITRNLGIKMSSNEIKRLDMDNACDLFDSANLVFMAQNNISTIKHLGEIIKGIEREVKSQVKLRKEFVMLTTTPGIGLILGLTIMLEVGDIGRFFKVGNYSSYCRCVGSKRLSDGKKKGENNKKNGNKYLAWAYVEAAHFAKMHIPKAQRFYQQKMAKANGFVATKALANKLSRASYFIMRDQVPFDEDMLFR

SEQ ID NO: 283528 - protein, 390 aa, unidentified
MIYVGIDVAKDKHDCCILGPDTEELFQVFTIRNNSDGYGELFHKIESVSKDKSQIKIGLEATGHYSYNILGSLLDHGYHTFVINPLHTNLYRKGQSLRKTKTDKVDARSIAEMLVTDKTLKPYTGTSYHSEELKSLTRYRFELVKERAKLKTSVSRLVNILFPELESLVPTLHMNSVYRLLQELPGAYFIASSNLTHLKALLADASKGHYGREKAIVIRETAKSSIGSLMPAKSMELRQTIHRIDTLTSDIKEVEQSIQKIMDECGSPITTIPGIKYRMGAMILAEIGDFTRFSNADQVLAYAGLSPSTYQSGQLISSYARMEKRGSKYLRYALFNAAIYASVWDERFRLYLSKKRAEGKHYYVAISHVVKKLVRTIFRMEITHTSYQPL

SEQ ID NO: 283529 - protein, 332 aa, unidentified
MTDPQYAGFVGIDIAAKTFTATWVPRGPARPRQVDQTTHGYETFDQQLRAAMPDPMTVLVVMEATGSYWIALAVFLHDHGYHVAVINPAQIANFSKSLPRRPKTDPHDSLLLLQFAQERQPNCWTPPPAVYHELRQRLVARDALMEMRQQARNQRHALEQWPVHVAPVLTQFTTIIADFDTRIAELDRAIAQVLKDGAWAASAALLASIPGLGATTSAWLLVATMNFVLCPTPEAAAAYAGLAPMAHESGTSVRGGSHLGRGGHRRLRTAVYMTTLSAARYNPVIRPFFQRLRAKGKPFKVAHCAAARTLVTLAWAVVTKQRPFDPQQGSVA

SEQ ID NO: 283530 - protein, 343 aa, unidentified
MKGFAKGNEKGFFVSLPQITLKPYRYGDTEEVVARGCGLDVHKKEIVATVSGTDIKKETRTFQSTTRSLTQLKEWLLELGVTHVAMESTGVYWKPVMNILEPGGFAIMVVNARHIKYVPGHKTDKKDSAWICKLLRAGLLKGSFVPSREQRDLRDLTRYRRKLVQQQAAEHNRLIRIFEDANLKLSSVFSNIRGKTCTAVIDAVIAGETDPQKLSELCIHPRLKHSQEEIALAVEGHFTEHHKFMIRAIRKSIKNIESEIDVLDKEIDRRMQPLQGRIEQLCEVPGMQQTSVKELLAEIGVDMEVFPSAGHLLSWAGLAPGNNESAGKKKVHTPTTETRPRRQ

SEQ ID NO: 283531 - protein, 445 aa, unidentified
MKQRKSLKRVGMTLPKHLQHINVNAAGIDIGSRSHFVAVPEGVDEKPVREFSVFTGDLEQMAEWLIACGVTTVAMESTGVYWIPVFEILESHGLEVKLVNARHVKNVPGRKSDVLDCQWLQQLHTYGLLRGAFRPVEQVCTLRAYVRQRGMLVRSAASYIQRMQKALAQMNLQLHNVVTDITGMTGMRIIKAILGGERTPDVLASMRDRRCKNSSTTIARSLQGSYRSEHLFSLQQAVELYEFHQEKIADCDRQIMEQLKSFDVQIAPDDAPPSNVEEALQRMSGVDLTSIDGIDTNTALKILAEIGTDMNRWKTAKHFASWLGLSPGTKVSGGKVLSSATKPVANKAAAALRMAAFTLFNSKSALGAYLRRQRARLGAPKAITATAHKLARLVYTMLKHGTAYVDAGQEYYEKRYRSRVIQNIKRKAQELGFELVAIKGAISPA

SEQ ID NO: 283532 - protein, 328 aa, unidentified
MPNDPTQFVGIDIGSKAHEVCVVDRGKTRKRSITSNPADQARFIKTLDPARCRVVMEATGVYHLDLAIGLAEAGIAVMVINPRTAHHFMKALGKRSSTDAISAQALSEFAQRMEFKPWTPPPPAWLEFRAIARQINRLKKDETKAKNRIHALEATHNHSSLILRDEKDGLRALSQRIERLLEAAAEAIDQSEELKRLLGHLTVAKGFREASIIPILGELLLLPRTMSGKQCASHAGLDVRLRRSGTSVEGKPRLSKAGNAYLRAPFFMPMLSVIQHEPRAKAHFERLVARGKTRKQAIGALMRKYLTGFWSVIRYDQPFDTGKLFAPE

SEQ ID NO: 283533 - protein, 360 aa, unidentified
MKKVSTATAKQGRNISQQKLTIGLDLGDRNSWYCVLDEAGQIQLEQRVRTSAKALQEVFGAMPRSRIALEIGTHSPWISRLLSELGHEVIVANARKVRLIGESRKKDDRLDAQTLARLARIDPQLLYPVKHRSAQAQADLMMIRARAGLVRVRTGLVNTARGLAKSYGERLLGCNVRNMDPEKAESLSPELQAALEPLLNAIESLSERIETLAQQSYPQVALLKQIKGVGTLIALTYMLTLEDPHRFRKSRDVGCYLGLQPGRRNSGQSEPQMHISKEGDPYLRTLLVQGAQHILGPFGVDCDLRRWGLKLAERGGKTGKKRAIVATARKLAVLLHHLWVSGEVYEPLHNSNRTTLAAAA

SEQ ID NO: 283534 - protein, 355 aa, unidentified
MESVKYIGLDVHQSTISVAVVNGEGKLTMQSVIATRASAVVDLLKGLRGMLHVTFEEGTYSAWLYDLIVREVAQVVVCNPRKNALLKSGNKSDQIDARKLAELLRAGMLSPVYHGEQSTRILQQLVASYTALTEDTGRAMRRIKALYRSQAIACAGKKPFGKRHRGEWLARLNDSGQRRRAEWLYQELDAVQILRREAKQAVMVECQKNPAAKFLRSLPFLGPLRAAVLIARVQTPHRFRTKRQFWTYCGLGLETRSSADYVEQDGQIMRRRRPVYIRGLNWNYSHELKNVFKSAATTASVMDGPFRAFYESRVANGTLPAMARLTLARKMAAIALILWKKGETFEAEHLKPQTA

SEQ ID NO: 283535 - protein, 399 aa, unidentified
MSDRREIAVYLGLDVGKGEHHAVALAPNGKTLYDKALPNSEPRLRAVLAKLARHGRVLVVVDQPASIGALPVAVARDAGCLVAYLPALTMRRIADLYPGEAKTDARDARVIADAARTMPHTLRDLQPDDETIAALQLLLGFDDDLAAEATRASNRIRGLLTAIHPSLERVLGPRIAHPAILDLLAEVRSPTGIRAAGKDAVAELLRRQAPRMAERLAGEIFAALHEQTVTVPGIDAAAVILPGLAASLAGTLQQRAGLEAEIDTLLEAHPLSKVLTSMPGIGVRTAARILAEIGDACAFPSAAHLAAYAGLAPVTRRSGTSIRGESPSRRGNKALKRAFFLAAFAALKDPASRTYHDRKIAQGKRHNQALLCLARRRCDVIYAMLTNGTFYQPNPPRPA

SEQ ID NO: 283536 - protein, 459 aa, unidentified
MRTIGIDLAVRAEHRAVVADEQGSFVTSVLAFHTAPAELDRLLAQARATAPGCELQAVMEATGMSWFPVAVYLHRQGLQVYVVNCQQVADLRRYYKRHAKSDRIDARVLARLPLVNPDQLHPLHLATATALACQRGCRELDRLAKQITASLNRLRASDRWAWPGLETAVFPDPFNPAGRWFRQHWYDPHQVLAVGATVLRQRWQESALNPADSGEWVEPLVQLAQESLTLYGQEATYLDYAYLQAEVQREQARMQAAEEAHHALQLKTVRRLYRQLHPSRNLETIKGVGQDGAAVFASYIGDPKRFRSVRACRSWSGLIPDSRQSANTEAKGLHITQAGPNLVKKFAYLDAETARQWDPQLAALYYDQMVHKGKHHNQALCAVATHLLDRILVVLRDDRPYELRDVAGRPLTTTQAREIVLRDYTVSDEVRSRNNKRARQTRADGRAERKQKREIASAG

SEQ ID NO: 283537 - protein, 343 aa, unidentified
MQQQLSVVGIDLAKRVFHVAGMDDKGKIVLRKRLTREALLPFITRLSPVVIGMEACGGAHYWARRFREHGHTVKLIAPQFVKPYVKSNKKDPADAEAICEAMTRPTRRFVPIKEVEQQDLQALHRARERVVKARTALVNEIRGFLGEYGIVLPQSVTKFRSGFLATLEAERAKLTALGQELFGQLYEEFGALEKRLAYYTAKLEAISAAHPVCQRLETIPGVGPLTATAMVAAVSDVTHFQHGRQFAAWIGLVPRQHATGGKPRLLGMSKRGDVYLRTLLIHGARATLRWIGLKTDRRSQWVRGLIDRRGKNKAAVALANKNARIAWVLLKTDAVYIAEDAAA

SEQ ID NO: 283538 - protein, 466 aa, unidentified
MAYKRKNVKSKERKRMPRSLKAIQPNAAGIDLGSREHWVAGPPLEDETPNVECFGTTTPELLRLADWLKEQGVETVAMESTGVYWIPLFEILDSRGFEVVLANARQIRNVPGRKTDIEDCQWVQLLHACGLLRGSFRPSDDICQLRALIRERNTMVEQRADWVRRMQKCLDQMNVCVHQAVSDITGVTGMAIIRAIMDGERDPHALARLRDRRCRKSEAQIAENLTGNWRAEHLFNLRQALKMYDQLCAVIADYDSEILSYIATLQPADTSDESAPPPASKSKAKNLVKRGQEPMRQGLYRLCGFDMTTIDGIGVDTATVIVSELGLDFTVFPNENHFVSYLRLAPNLSISAGKKVPKKSKASTCTRVATALRMSALTLRNSKTALGGYYRRVAWRKGASVAVFATARKLAQLIYRLIRYGQAYVDTGVEAYEARFNQRRLKFYTKTLNDMGYNVEPLKTKEAILA

SEQ ID NO: 283539 - protein, 322 aa, unidentified
MAMLSFCGVDVSKDRLDVLVLPEQQSFSVSNDVAGWAEVVARLRGFAIAAIGLEASGGYERGAMRALLAAGLPACQVNPFKLRQFARASGVLAKNDPLDTRMIASFVATMPTRPAQTRPLAIERLTEMLAVRRQLNAEKVAAENASRLLEDAMLQRLSRRRVARLVADIGSLDAHLVEIVDTDAALAHRYRLLTSMPGVGLVLACTLIALLPELGVMSRKQVAALVGVAPYAFESGKFKGRRCIWGGRAPVREVLYMAAMSAGNWNPVLKQFRKRLQGAGKLPKVIIVAVMRKMITMLNAMVRDDVAWADHLHGRRRVPTAW

SEQ ID NO: 283540 - protein, 375 aa, unidentified
MNNAYNTAIGLDVGDRKTQVCVMAKDGKSPKIVMEMAIPTTKEGLAKFLSTQDRSTPVAFETGTHCRWMDEVARKLGFKAYVANPCRLRMITESKTKNDVNDARMLARLALLDPELLHPVKLRGPEHQKMINLHEARNLAVKQRTEAIVQLRAMAKSMGFRIAKCQAAGFHNLDRRAWPEAFRDIAWPMLKNLEQLAITIKTYEKQIRELAETPTFKAQVERLREIHYVGLYVATGFVAATGGDMDRFEKPRDVGPWLGITPKQDQSGDVDRQCHITKAGSPFMRRLLVESAQMILRDGAVDTDLKVKGLRICARGAKIAKRKAVTAVARERKAVTAVARALAVLMVAMLKKPDAPYVPLSERSEKELVAMRTST

SEQ ID NO: 283541 - protein, 461 aa, unidentified
MKNKGGGKAVRQNRQPVVGLPTVRMSVAGIDLGSEQHWVCAPALDGLGREVADFGGTTAELLRLATWLKERKVESVAMESTGVYWIAPHEVLEGQGLQVLLVDTRQLAQVPGRDKKSDPTDCEWIQRLHSCGLLKGAFRPPQEICMLRTMVRDKANLVAESGDWVRRMHKSLDQMNVRLHRAVAEVDGVTGMAILRAIVNGERDPDKLAELRDRRCHKNREQIAEQLRGHWREDHLFSIKQALTMYEAVQERIAAYDEEILRRLGAMERESLKGSPAPKVENPKKAKAIRKRGQEPMREALYRMSGVDLTSIDALGVETVQVVLSEYGPDLSRFETENHFVSHLRLAPYQPTSAGKPLKKKRRSTASTRTAAALRMAANSVRHSQTALGAYHRHIARRVGGDVAVFATARKLATLLYRLLRWGQAYVDEGAEAFERRYEQNRLLALKARAKQLGYELVQTA

SEQ ID NO: 283542 - protein, 313 aa, unidentified
MEHTTVVGIDVSKDRLDVHVLPEGEHFTLARDEAGLKALTRRLAKQALQVVALEATGGLEGSVVVELHAAGLPVRVVNPRQVRDLARGLGMLAKTDAIDAAMIARFAEAAKLTGAPVPDAQAAHLGALVARRRQLVGMATAERNRLQQAADKRIRRSIQRLLRSIEAELEGVDRDIDDAIKHSPLWCAVAELLDRQPGVGNITARNLVAELPELGRVTGKKITSLVGLAPHARDSGTLRGKRTIWGGRASVRATVYMATLSAVRCDAVLKDFYQRLIARGKPPKLALVACMRKLLVHLNAIVARYYAQIEQAA

SEQ ID NO: 283543 - protein, 315 aa, unidentified
MATHHGPFVGIDVSKDRLDVAELGERQTVQVDNTQTGIKELVARMQELQPELIVVEATGGYQRAVVVALFWAGLPVAVVNPARVRQFARAGGLLAKTDRLDAQVLAEFGKKMRPRLYESKSEAGKQLSALLVRRRQLEEMLKAEQSRLRTTPASLKSSVQKVVTCLKEEKKSLEKQIRDLLAEQTAWQEQTEILDSAPGVGLVTMATLLAELPELGKMDHKKIAALVGVAPMNYDSGKKRGYRKTKGGRGGVRSVLYMATLTATRYNPVIRAQYQQLLKRGKLKKVALTACMRKFLTILNAMIRDRQPFRCAAIT

SEQ ID NO: 283544 - protein, 351 aa, unidentified
MPRATSSTNLIATIGIDIGKNTFHAIGLDDKGAIILRQKLSRGQVYARFANIPPCLIGMEACVGAHHLGRQLRTLGHDTRLMPARYVRPYSKGQKNDFRDAEAIAEAVQRPTMKFVAIKTVEQLDLQALHRIRERLVCQRTSVINQIRAFLLERGIAIRQGLRTLRTEMPIVLAKTDKLSQRMIHMIEDLCMDWRHLNGRIETVSKEIETLSEQDDGAKRLMTVPGIGPIISTATVAAIGTGEVFSKGRDFGAWLGLVPKQMSTGGRTILGPISKRGNRYLRMLFVQAARAVLLRPQSWEKHGLKLWIEAAARRLNRFKLAIALANKIARIAWGVLHGGRNFEVRPMNQAA

SEQ ID NO: 283545 - protein, 344 aa, unidentified
MTYYAGLDVSLRSTHICVIDDDGELLAEGKTDSEVVDIIAFLDDLHVEITEAGLEAGTLTQCLTYGLQSAGFEVVCMEARQVKVALSAMRNKTDKNDARGIAQLLRSGWYSRVHVKSIESHQVRALLSSRRAVLAKCIDLEQEIRGLFKVFGIKLPKRLGHGAFDPKVRPLIEADEALSHALLPMLDARLVLYHSFRELDNRTRHMANDDPTCQRLMTAPGVGFVTALTFKAGVDDPTRFKRSRTVAAHFGLTPRRFQSGEIDFDGHISRAGDANVRSTLYVAANSMLTRSSKWSPLKAWGMKLAKSRGHKRAVIAVARKLAVILHRMWIDDTQFQWSTEAARS

SEQ ID NO: 283546 - protein, 338 aa, unidentified
MKITTIGLDIAKSVFHLFAVNQTGRFVKKKQLKRKQVLAYMANLEPCLIAMEACGGANYWAREFIALGHQVKLIAPQYVKPYVKGNKNDYNDAEAIAEAAQRPNMRFVPIKSVEQQDVQNFHRQRERIKKERTALVNQVRGLLAEYGVVINKGVAAVRKRLPEILEDAENGLTTRSRELFAELLEELQVLDQRFEQCGQRIASLNQENDVCRRLDEILGIGPIIASATYAAAGDGKDFVNGRHFSAWLGLVPGQHSSGGKAVLLGISKRGNAYLRTLFIHGARAVLRHSANKTDRFSRWAQAVLERGGYNKACVAVANKMARMAWVIMAKGETYRVAG

SEQ ID NO: 283547 - protein, 379 aa, unidentified
MKKHTTAKKNAKAKAKNEIRKRAAGERLTIGLDLGDRTISYCILSEAGEVASRGTLPCSGSGLDSLLAKMAPSRVVLEVGTHSPWVSRHVSGQGHETIVANSRRVKLITESVKKNDRIDAETLARLGRVDPKLLAPIQHRGAQAQADLAVIRARAELVGARTNLINSARGLVKPMGERLKKCDAGQVGKDLAADLSAAVRQMLDPLLKSIESLSAQIEEYDKRIAEVARRYEEVELLTQVYGVGTLIALTFMLTIEDAGRFEHSRDVGAYLGIRPKQRDSGESQPELGITKAGDRLLRAYLVQAAHCMLRKGAPDSDLREWGMTKAGTGKRAKRRAVVAMARKLAVLLHRLWVTGGVYDPHYNRTALESKGMKAGRKAA

SEQ ID NO: 283548 - protein, 344 aa, unidentified
MSEVSMIGLDIAKHVFHAHGADERGRAILSKRISRGKLLDFFAAQPRCTVALEACGGAHHWARQLTQLGHEVRLIPPAYVRPFVKRQKSDSIDAEAICEAAQRPSMRFVAVKSEQQQAAGLVFRTRDLLVRQRTQLINAIRGHLTEYGWIAPKGPSHVAMLADLIEEDEMANSLPEAAHVMFRLMLDLFAGLNSKIADLDKEIARRAREDEVSRRLMTIPGLGPISATAIVALAPPIETFARGRDFAAWLGLTPLQRSTGGKQKLGATSKMGERTLRRLLIIGSSAVVQQASKRGALKGSWLEQMLARKPRMLVTVALANKMARIVWALLIKRENYRAPVAAKA

SEQ ID NO: 283549 - protein, 360 aa, unidentified
MGNGTWVGLDVHAKSVVAGVICDDTGELRVMRAPHRTEDLVRWVRQFDPPLRVAYEAGPTGFGLARSLEGAGIGCVVAAPSLIARSPAGRNHKNDAHDAEHLARLLRQGELTPVRIPDPADEAARDLVRAREDARADLMRARHRLSKLLLRHGVVYESGRAWTRAHDAWLRRQQFAHPAARAAFDDAYDAVLGAGIRRELLHCEIAQMASDLRWADVVGRLGCLRGVGTLTAFALCVEIGDWHRLTGATIGAYLGLVPSESQSGARHARGPITKAGNSHARRLLVEAAWHHRQPLRTSVAIEARRSGQRPEVRARAEAAGVRLHHRWYHLERRRGVRSTIVATAVARELAGWCWSLAVMD

SEQ ID NO: 283550 - protein, 343 aa, unidentified
MTKDTMIGVDLAKNVFQLHAASMTGQPKFRKKLSRQGFAKFMAEQPPAVVVMEACGSAHYWAREMVRLGHEVKLIAAQYVKPFVKRQKNDAADAEAIVVAAQRPEMRFVEPKSAEQQSRAILFRARERLVHQRTELVNALRACLYEYGHAVPQGVHHIKRIAEILDAPGSDLPDLMREECAELLEQIAEQTARIDTRTAKIKALAAQTDTARRLQTIPGVGPLTALAVEAFAPPMESFKCGRDFAAWLGLVPRQFSSGGKERLGRISKAGQSDIRRLLIIGAMSRLNWLGRKSIPEASWLARMVARKPRMLVAIALANKMARTIWALLTKDEDYRVPAQAVAA

SEQ ID NO: 283551 - protein, 403 aa, unidentified
MIFVGNDWAEDHHDIHVMNTEGKKLAVRRFPEGVAGVSGFHALIAQHAEDPTEVVVGIETDHGLWVASLVAAGYRVYAVNPKAVSRYRDRHHVGGGKSDAADAKVLADLVRTDAHNHRVVAGDTEQVQAVKVLARAQQALVWSRNREVNRLRNALREFYPAALVAFEDLHGRDALALLGRAPDPVTAARLTVSQVKAALRAGGRRRNLDLTAEKIQAVLRTEQLHAPAAVAAAYAAVVRAQVGVITALNTQLAALEAQLEQSFEQHPDADIILSLPGLGDILGARVLGEFGDDPERFADAQSRRNYAGTSPLTVASGKKRAVLARHARNQRLYDAIDQWAFCSLQASPGARALYDTRRAAGHTHHQALRSLGNRWVGILHGCLKHRTPYNEHTAWAHRQPAAA

SEQ ID NO: 283552 - protein, 355 aa, unidentified
MTAAPGQPLPVVGLDLGDRNSHYCMLSNRGEWMEEGRIPTTVAALQKHFGGEPRMRIALETGTHSPWISRLLTSYGHEVIVANPRKIPTLTGSESKNDRNDAEQLARMAAFDPKLLHPIEHRSLERQQDLNLIHTRSVLVRARTMLVNSARGLVKSAGGRLPSCSSEAFPEKVSVAVPRELKAACEPLLKQIAQINRTLAGIDQRVEGLAKKYPEIALLRTAPGIGPIVAACYVLTLGNPETMETNRQAGAYLGLRPRQQQSGGCDPQCGITKTGNSYLRSLLVQSAQYILGRFGPDSELRCWGLKLAACGGKRGKKRAIVAVARKLAVLLLSMWRNGKKFQPFPQSATQLAKAV

SEQ ID NO: 283553 - protein, 390 aa, unidentified
MYLVGIDISKFKHDCFIATETGQTIKNNFSFANDFGGFSELLRVLKSLDHSSEIRIGLEATGHYGSNLKIFLHDNGYPFMELNPLLSERYRQVSSLRKTKTDKIDAMMISKLLLVLDFKPYPLKSYHILALKSLVRFRWRLIEARTKHKVRLQNIMDLTFPEYFKLFAAPFGETSLFILSHYPTAEKLARADLNALADNVRRLSHGRFTDSKLYRLVELAKSTIGNCNEIFEMQMAATLDQIKLHDEQIHQIEVKIMDIMDKYHFPTASIRGIGVISAASIISEYGDFSLFCSPAQMLSFAGLEPAIYQSGTQTFSGKMVKRGSPYLRLTLMNVSNSIIHFNPVFHQYYQKKRNEGKPHRVALSHVAKKLIRVIFKLEKNKIPFDLNQLK

SEQ ID NO: 283554 - protein, 404 aa, unidentified
MYNAVGIDVSKGKSTVAVLQPGGTVIRKLFDVSHTSQNLNELADYLSSLDGTTKIVMECTGRYHEPMVKALSEAGLFVSIVNPHLIKNFGNNSLRKVKSDPADARKIARYTLDNWTELRQYSGMDNTRTQLKTLNSQFSFFMKQKVAAKANLIALLDNTYPGVNKLFDSPTREDGSEKWVDYAYSFWHADCVRKIGLKAFTERYKSFCKKHHYIFQQDKPEKLFNASKELVAVFPKEKTYKLLIQQSIQQLNLASEHVERLRREMNELASTLPEYSTVMGIYGVGKTYGPQLIAEIGDVSRFTHREALTAFAGVDPGVDESGQHKSKSNRASKVGSARLRKTLFQIMTTLLQNAPEADPVYRFLDKKRSQGKPYYVYMTAGANKFLRIYYGKVKECLRNLEQTE

SEQ ID NO: 283555 - protein, 312 aa, unidentified
MYAIGIDMSKDTFHACFEGEIVQKFNNTDRGIEQFMSHLEEHGFTQEKTLIGVEATGVYHLLFTVTLSDNDWDVKVINPLESHKFITAGIRIVKTDRLDAIKIAEMAALGRGYLFCETKESIALKALVVERCALVEMRKQTKQRLQAHDLKMNAIGIPMTDYLSPTITTLTTTIKSIGREMKGYEKDTQELLKSIPGIGDVAAASLVAFVGNIYRFDSPQKLVAYIGLDPRVYESGTSVKGKGYISKRGNKYLRHVLFNAAFTALRCNPLFKSYYDKKISEGKHHTSIICALERKLVHVVYAVWSRQTPFKK

SEQ ID NO: 283556 - protein, 391 aa, unidentified
MTILVGIDVAKDKHDCFFMNSEGEVLAKPFTIFNNKEGFDFLYEKIQSVSSSDNIKVGLEATGHYSYNIIGFLLNKGLATFILNPLHTNLYRKSLSLRKTKTDKVDAHTIASMIMSDVNLKSYSDTSYHNEELKSLTRYRFDKVKARAKLKSSVSRLVCILFPELEKLVPTLHMVSVYSLLSEFPSAHAIASAHLTRLTNLLSESSRGRYGKDTAICFRDAARSSIGSHIPAKSLELKHTIRLILELTSEIDEIEAEIKTIMDEINSPILTIPGISYKMGAMIIAEIGDFSRFDSPDKILAYAGMSPSIYQSGQLDNCYAHMEKRGSRYLRYALYNATKYVCHWDESFGTYLAKKRAEGKHYNVALSHATKKLVRTIYAMEKSGQAYTNAA

SEQ ID NO: 283557 - protein, 360 aa, unidentified
MQPEASQEVKDGMARFVGIDIGKAKCRAAIMDPGGIILEEFTFTNNHEGIEGLASRLTLDDRVVMESTGSVWTNLYNHLDERHIPVALANPLKTKAIASAKIKSDKVDARILAHLLRSNLIAESYVPPQHLREIRALVRHRVGIVKIRTMIKNEIHALIDKHGLKHEFSDLFGKHGLEWLRNIELPPLDRLILNNHLTHLESLDQQTERVDEEIHNKACEDEDVRLLLSMTGIDVYSALLIRSEIGSIDRFPDYKKLVSWAGLAPSLHQSGNVEYHGSITKQGSRMLRWIIVEAARVAVNHDTRMRGFHERVKHRRGDQKAIIAVANKMLKIIWFMLTRREPYQSRNEKRYQQKLNSIAS

SEQ ID NO: 283558 - protein, 341 aa, unidentified
MDNCGIDLHLKSSEVCVVDESGETSERATIPTTERSLARWFGGRERMRICIEASGLSPWVARVLTGLGHEVIVANAQRVRLIAESTLKNDRIDAETLARLVRMDPKLLRPIVHRRAETQRLRGMLRVRRILVNNRTACLNTARGLLRSFGYRVPGQKPERLARSLARGTVPEELCGLVAPLVATALELDERIRALDEEVVDAGRGYPEVDRLQQVPGIGPLVALSYVLCIEDPDRFRTSRDVASFLGLRPKMRESAERSRFGAITRHGDAEMRRLLVQAAHGCLRSRQDSDLKRWAEQLGGRVGKKKAVVALARKLAVLLHHLWASGEDYEALRPPIAAAA

SEQ ID NO: 283559 - protein, 337 aa, unidentified
MKQIKFFVGTDVSKDWLDMCIMGDDEILHRHRIDNKVAAIRKWLKQTRQQYGYLMESTLFSMEFTGIYNNHLLEVLNVAAANIWLIPGIEINAFRGLRRSKNDQEDARLIAEYAAGNRKKIRLWKKPRIVLKQLASLLMMRDKLMLTKHQYETTFKESRGYSTKEEYQIVKGYSDPVLKAIHKELEKIEKQLAALIKGDERLKELHGYITSVDGVGIIISANTLVETNEFLDINEGKKFSNHSGVVPHTDDSGKKIKKARVSNKANKKLKKLLHLAAMSAIRMKGEMKNYYERKIAEGKNKMSVLNAIRNKIVLRIFACVNNKRKYDKNYVYSLAIP

SEQ ID NO: 283560 - protein, 339 aa, unidentified
MNNSVIGLDIAKNIFHLFTLLADGKTLKKKLKRNELLVFFANYPASIIGIEACGSAHHWARELTKLGHEVILLNARFVKNYVVGNKTDFNDAEAIFEAVNRPNKRVVAIKTVAQQDIQLVHNIRKELVDQRTALVNQTRGLLSERGIVINQGITHVREQLPLILEDAENGLTGLSRELFAEHYEKLKVLDDEIKAQDQRINRLCNANDLSKRFLDVPGVGPLTATIVAADIGDGGKGYKSSRDYAASLGVVPKQHSSADKQHYLGISKRGNRYIRTLLIHGARAVLKNCTKKTDKLSLWLQALVARRGVNKAAVALANKNARILWAMANNGKDYEALVA

SEQ ID NO: 283561 - protein, 430 aa, unidentified
MLRRILAPSRYIMIIPVVGMLLCSVALTLYEVIVLVLGTVNTIRKLVRTSPIARAASIGVIMAVATQPSVKGEVMERITRVGVDLAKNVMQVHAVDGAERVVARKAISRERFVNWFANLEPCLVAMEACGGAHYWARKLRALGHDVRLIPPQFAAPYRKGGPHVKNDAQDAEAICEAASRPQMRFVPIKSPAQQSVLVLHRMRTGFVEERTALVNRLRGLLAEFGVFLPQGIGSLHKHFVDRLEDGSNELAGPARQALMRGWVQCQVLDQEIAWLDKQIAEHAVHDEQAQRCMEVCGVGPLTASAAVATVVNARQFKNGRQMAAWIGTVPRQNSSGGKQRLGRITRQGNDYLRTLLYQGARSAILTAPRRVDRLSRWIVQLQARIGYYKTLVAVANKHARILWAVLAKGEKFDPSHVNGVPRVVNRATDM

SEQ ID NO: 283562 - protein, 322 aa, unidentified
MKQKPVLGIDVSKAKAECGLLWADSKYRSKVVSNQAVGFAQLRQWLQQYDASQAHVCLEATGVYWEELALALNAQGMAVSVVNPAQIKAFGESCLVRTKTDKVDARLIAEFCRAMQPPLWQPPSPSEQALRALVGRLDALQRMRIQESNRLGVARDAVRSNIEAHLHWLDEQIKALTQQIDRHIDQDPDLRRKRALLDTIPGVGGRTSAMFLAFCSRTDAFAHARQCAAFAGLNPQQHQSGSSVRHKARLSKIGHALLRKAMYMPAVVTLYKTAWGKAFRLRLSAAGKPPKLIIGAMMRKLIHVAYGVIKSNKPFDPTLHAT

SEQ ID NO: 283563 - protein, 346 aa, unidentified
MEQYAGIDVSLEFSSVCVVDAAGKIIREARVASEPSSLIAWFAALGMVVARIGLEAGPLSQWLYAEMKAAGLAVELLETRHVRDAFKAMPVKTDRKDARGIAQLMRLGWFRPVHCKSLPAQEVRALLTARKLLQGKRHDVEMSIRGLLRGFGLKVGPTTPKTFEHRIRELVENHATLSLIADALLKARAALGLEFRAIEKRLLTIARADKRVRRLMTTPGVGALVAMTFSAAIDDPDRFRSSRMVGAHFGLTPKKYQSGETDVTGRISKIGDHEVRVVLYEAANVMLTRPVKGSTLKSWALAVAKRAGMRKAKVALARKLAVVLHQMMRSGAAFSLTGQPAAAAKS

SEQ ID NO: 283564 - protein, 394 aa, unidentified
MAFKIFRKNCCGLDVHKTWIHACIGITDTNGRTEYKQARFSSFTKGLQELADWLAKYDCNDVCMESTGKFWIPVFNILEKTCWVTLAHPKYTKPQKGNKTDRKDAKWICDLYMCDMVNPSFIPPPDIRQLRDLMRYRSKLTNAMTSEKNRALNCLTVSYLKLDDVFSDVFGKSSRSIIRYILEHPGETFQVAPFIDRRCKHPVEEIQAVIDGTISHQQAVKLRECLQHLDELEVHKTNVEKEILCLVQQYPYQLELLQTVPGFSGNIMTAIALISEIGADMSVFPSAKHLISWAGCCPRNDQSSKKVKSTRISRAGVYLKPLLVQVAIQPFTANADKLSAAGALEIRCQICDGRFLSMWAALFIFLGCPLPPCPKNLHVHNGRIVILASVAWIF

SEQ ID NO: 283565 - protein, 342 aa, unidentified
MEQYVALDVSLKEISVCIIDSKGEVIFEGKTAAEPAMLVELIRSKAPQVKRVGLETGATSPWLFHALAAAGLPVVCMDARHAHAALSMRPTKSDRSDARGLADMLRMGWYREVHAKSVTSHEHRTILGARHQLVTMRSDLDAQIRGILKTFGLILGTGNKDTLIQRAEKLAAGHPVLSGLVAKLAEVRRHVTSQIAAIDRDIRHLVHTEPTLKRLISVPGVGPITALAFRSSADDPSRFKHARDVGPYLGLTPTRYQSGETDRQGRISKCGDTFTRTCLYEAAHVLLTRVQRFSPLKAWGMRLAKRIGGRKARIAVARKIAVILHCIWTDGTEFWWTREKAA

SEQ ID NO: 283566 - protein, 376 aa, unidentified
MKDIRHVGLDVDSEKLAVAVAEPDGEVRSLGAIPYNADAVRRLVRSLGPARRLRVCYEAGPHGYGLYWTLTKMGVHCDVIAPTLIPVRPGDRVKTNRRDALKLARCYRAGDLTAVWVPDASHEALRDLVRAREAAKKDQLRAKHRLGKFLLRRGLRAANGVRNWTWKHLAWVKALRFEQAPQEAAFLDYLHEVEHSAERVKRLEAAIDQAIGAAPEQMRALVAGLQALRGIKLISAASIVAEVGPVSRFPRPKQLMGYSGLVSSESSTGAVVRRGAITKAGNAHLRRILGEAAWAYQSRPSMSADLRKRQQGLSEEVKELAWKAQHRLCSRRRRLIAKGKQPQKVTIALARELLGFIWAIGMQIEKEQPGQRRPAA

SEQ ID NO: 283567 - protein, 316 aa, unidentified
MQGEHPVCCGIDVHKDTLTACLRRVDINGQVRKERREFATTSTSLLTLSDWLVEQHCPIVAMESTGVYWKPVYHVLVGTVEVYIGNAHELRSRPGKKTAKRDAAWIAALLAHGLIQPRFVPPPEIGALRDVTRTRVAFVQTRSQSKNRVHKLLEDTNLKVGSVVSDLFGVTGRRMLAALVAGERDLQVLASLALGAFKHKRPQLELALTGQFTAHHGTLLGLLLELIEVLDRQMATLDQEIGALVAPLQAQIAQLDSIPGVDIIAARDILAEIGTDMSRFGDAARLASWAGVCPGNHESAGKRYRGKTRRSIYSGL

SEQ ID NO: 283568 - protein, 355 aa, unidentified
MNEIKYIGMDVHQTSTSIVVLNASGRVLTSAVVETQEQALVAFIQGQRGELHLTFEEGTYAAWLYDLLAPRASRIVVCDPRCNALLKAGSKNDPIDAHKLAELLRVNALRPVYHGQHSLRTLKELSRSYTTLVQDSTRVMNRLKALYRSRGIPCRGTEVYSPSHRTSWVDQLKEAGVHQRAQLLYQHLDLLGRLRREAKRALLAESRKHSVSRILRPVPGLGPVRIAVLLAMVQTPCRFRSKRLFWAYVGLGLVTRISAEFALVNGQLQRSGKAPTIRGLNPNHQRELKEIFKSAASAAVRRPGPWQQFYQRRVEAGRKPELVRLTVARKLAAVTLHLWKKGERYDVKHLKSTAV

SEQ ID NO: 283569 - protein, 437 aa, unidentified
MNHLRFQTNRQLLQGKIVIGIDPAKLNHQAAVVDTTGTQQGNSFAFPASAVGYHEILWRRLAKIIPAHQPEDVVFAIETSCNLWETLAFYLHSRGYTVALVSPLSTHHARPVMNLEFSHTDPKDAFLVATIAQRGAFHRYESFNPHTNAMHQLAITYDKLRQDLAHNRARIRSLLDRIFPEFLHILKPDTQTAMHLLKNSLFPDEFLHLDLCAESLRIEQISRRQLGRSTLAALQQQARRTIGVARQSHERLADRLALDAYLALVETLQTQLDRVLDELIARANELPQFARITSLSGVGNRLGALFLAEVRNLSRYTHYKHIEKLAGLNLRLHQSGRYTGNRRLSRIGNPRLRWIIYKMTEETAKRVPEVRIKYLRRQLKRRRHVKNVVAATPQLLQLIVSMERHQHAYELRNDTLEELQKLENQYAQLKAVRKSAA

SEQ ID NO: 283570 - protein, 396 aa, unidentified
MHFAGLDVSKNLTSICVLDQDGAIAAEGTVATEPKQILAFMRGKRRRYAHVGLEAGSISSWLQGELARKGLRAVCIETRHAHKVLSARRNKTDRNDARGIAELMRLGSFRPVHAKSVQSRQIKAVLTARRLLIQKRVDIEEAIRGLLLQGGHKLGRSQARGYEERVHACASRDPFLASMLEPLVVARTSVAEQADSLHRRALALASSDPVCRRLMTAPGIGPLTALEYRAAIDDPARFRRSRTVAAHLGLTPKTRQSGDIDQRGRITRWGDGAVRASLFMAARNVIFTLSRPTSLRTWGRAIAARRGKDKATVAVARRLALILHSMWRDGSDFRWGEARSVGESCVDEPPASAESRMVSLMSKTDYARAPSSHGEVIPRITFERQPVGTSFGAQAG

SEQ ID NO: 283571 - protein, 370 aa, unidentified
MATIGIDVGKRQHIAAIQYDGEREARRAVLHFGADRAGLATLSAWIARQGGISRAVLESSGHYHLNLAAALQRQGLPVAVVNPLESKYFGKRRLQRTKSDPADARTLATLAMVDEPQVRDVLAGAELREAARFAMGLVDQLGRVDQKICRLVEIGFPELEQAYDDPTCVSALAVLRTAPTAQAAARKHTATLAQVARPGGGRRIGPKKAEHISALAHDTIAAPELAAQIGFQMRLLIAQHDMLESPGVGPAIVATLIAEIGDIARFSEFDKLVAFVGVHPAERSSGEKGKNPETSWRMSKAGNAYLRTALYRMAIVGITHNPLIRAHYARKRAQGKSKMNAVGHCMKKALAIVWGVWRSGTDFAAPPSHP

SEQ ID NO: 283572 - protein, 397 aa, unidentified
MIAVGIDISKAKSTVAVIDSDGTVLVSPFTMAHTQPEMEAFVTYLKGLGEPTTILMEYTGHYHYPVLKKLQDEGFPVCIVNPYQMKKYGDVEIHKAKTDKKDALRIAAYALEKSYKLVPYSSMEQKYVDLKFLSRQYSQRITYVAKLKVQLIALLDQTMPGITRILPLNSRNPEKCALLLFIRRFKSFDEIHRIGKARFLASYDVLAKKTSERSASSKGLSIYELAVDSITTRGEDPYIWLSQNQCVDLLSATQNAADEIISQMRNIAETIPEYKVLRAMRGVGDRLGPIILAEIGDIRRFHSGKALNSYAGNDAPPYQSGQFESRNRHISKRGSAALRKACYEVMQALKLTKPQDDPVYLFMLKKEQEGKPFNVAKMAGVNKFLRIYYARAMELYK

SEQ ID NO: 283573 - protein, 380 aa, unidentified
MTTTATHNGHDTTPERVLFVAFALREKTWKLGCTTGHGQKPRERTVTARHHEHVLNEIAQAKRRLGLPETAPVVSCYEAGREGFWLHRFLQAQGITNHVVDSSAIEVNRRRRRAKSDGLDVRKLLSMLMRYAQGERQVWQVVKAPSVEAEDQRHLHRDLETLKQERASTTTRIQGLLRSQGLRVTRLTKLPEQRETLRLWDGSPMPPGLRRRVLRVYAQYTLLSEQIAAVEVERRALLQTSPEASIDKVRQLMQLKGIGSNGAWLVVRAFFGWRAFKHRREVGGFAGCTPTPYPSGERAREQGITKSGNRHGRWMTTELAWSWLRFQPDSALRCWFRERFGGGKRLRRLGMVAVARKLLMALWRFLETGVVPEGAVLKEG

SEQ ID NO: 283574 - protein, 315 aa, unidentified
MTITSEEYVGIDVAKDKLDMAVLGQKATSEVFNTKRGITALVKKMCQLNPKLIVVEATGGYEEALVLALYEAGMPVALVSPQRVRQYAKARGLLAKTDKLDAQNLAEYGKHIQPRLFVAKSEEGRRLSAIIGRRRQLADMQKAEKNRLRTAYLEMKSSIQTVIDCLEAEIERLDEEIRNFMNEHENFKEQEELLRSAKSIGPVTAATLLADLPELGKLDRKQIAALVGVAPINQDSGKKRGYRKTKGGRPEVRSVLYMSALSGIRYNPIIQAQYDQLVKRGKEKKVAITACMRKMLTILNAMMRDQQPFRKVSMV

SEQ ID NO: 283575 - protein, 389 aa, unidentified
MLLDHPTDGLTAIRTQFAAIFMSLELSRSNWLVTSLSPGKGEKMSKYSLTAGDVAGLMRLLADLRRKAEVRTGQSYPIITIQEAGLDGFWLHRVLQQQGVESHVVDPASIAVPRRRRRAKTDKIDGETLLRTLLAYKRGEPRVCAMVVAPSPEEEDRRRLCRERRTLIEERVRHGNRIKGLLFAQGISDYAPLRRDRRARLEALRTGDGRELPSHLKAQIGREFDRIELLLEQIKSVEAAQQALLAAARKPASEKAAPDPVTMLLALKGMGANFTTVLWSEAFYRSFSNRRQVAAYAGLAATPWQSGGIRHEQGVSKAGNPRLRTTMIQIAWLWIRHQPQSALTRWFKERSQQGRKRAIVALARKLLVALWKHVTQGVVIEGAVMKSAG

SEQ ID NO: 283576 - protein, 373 aa, unidentified
MENRVAGRRRVGKELRLLAEEVAFVGVDVHKKSYQVSVWTEGREWVAQWSQPADCEALCRRLEPVRTQVAHLVYEAGPTGLGLVRVLRARGFSADVVAASKTPVAAGRSNKSDRRDAAALARLDAKGLLTAIYVHTPQEEGDRQVLRRRGQMVGDVSRTQHRIRSFLLQHGIAEPAGLRHWGRVAVAELRGLVLLGELRFCLDLLLDDLEHGRAKLVAAARKVRELAASERHAAAVACMRSVPGVGLLTPMTFATELPHPERFTTPEAIGAITGLAPRVRRSGETAKGGPILKTGNARLRRVLVQSAWQWVRLDPAAKDLFRHLVGETGCVHKAIVAVARHLAVLLWHLVTTGSTYTPGQPGAQEPEPAATEA

SEQ ID NO: 283577 - protein, 401 aa, unidentified
MNSIFVGLDWAYRSHAVCVIDAQDRVLKHLTISHDREGLGELQRALASFGKALPVAIERPSGLIVDALVEAGHQVFAIHPNAVKASRPRYRSTNAKSDAGDAFMLADLLRTDGHRWHALQPQSAGIRALRTLVRTRDDLVATRIRLANQLTALLDAYWPGATCIFAAVDSPIALAFIEQWPTPRQLTARQIAAFCRRHGYSGRRSPGVLLERLQAAAPSFCEPALAQAQATAALALVALLKPLSAQIKALDGHIAQAMAALPQAVSVMSLPRAGCICAAQILAELGDVPERFASAEQLCSEAGVVPVTYESGKSRAVTFRWACNHRLRRAITCLADNSRHASPWAASLYHAARKRGCDHPHAVRILARAWTRVLWRIWTDGTVYDPAIHSSACRIEINQEG

SEQ ID NO: 283578 - protein, 411 aa, unidentified
MRIFVGDDWAEDHHDVHLMNDDGARLAARRLPEGLEGIRTFHELVAVHAGDPGEVIVGIETDRGLWVTTLVAAGYQVYAINPLAASRYRDRHNVGGAKSDKGDAKMLADLVRTDRHNHRRVAGDSPQADAVRILARGHQNLIWVRTRHTNMLRSALRDYYPGALETFADLADRDTLQVLAKAPTPAQGAHLSISQIEAALKRGGRQRKLRSRAIEIHSGLRGGQLAAPDAVADAFAVTTIAAVGIISELNRQIAHLETTLAASFEQHPDSDIYHSLPGFGVVLGARALGEFGDDPNRYANTKSRRNYAGTSPLTIASGKNKTVLARYVRNRRLYDAIDQAAFCSLTQSPGCRAFYDEHRAAGDHHHQALRALGNHLVSILHGCLDHRCLYDEHTAWDHRQPHEPEHVRQAA

SEQ ID NO: 283579 - protein, 356 aa, unidentified
MSRDIKYIGMDVHKEAIVIAVLNSSGKLVMESIIETKASSILQFIHGLRGELHVTWEEGTWAAWLYDLLQPQVAQVLVCDPRRNALLKEGNKSDKIDARKLADLLRTGMVRPVYHGEHGLRTLRELGRSYQTLSQDLNRVMNRIKALYRGWSIPCGGTQVYAPRYREDWLQKIEHAGVRRRAELLYQQLDGLQGLRRTLRPELLAESRKHKAAKLLRQIPCIGPIRAARLLALMQTPHRFRSKRQLWTYSGLGIETRDSAQYRFVRGQLQRAQKPQQIRGLNRNHNHEMKEIFKGAATRASCGVGPLRDFYGALLAKGMKPEMARLTLARKIAAIALTLWKKEERFDAEQLKPQAA

SEQ ID NO: 283580 - protein, 424 aa, unidentified
MAYRIAGIDVHKRMLAVVVADVEVEGEYEFERQLFAATPQQLRSLAEWLLEREVEEAVMESTAQYWKPVWAALEQYWKPPCRKKDGAGRMSGALHLAQARSNRGRRGRKRDFPDAERLVKRLVAQELNLSFVPDAEQRLWRTVTRRKYQLTRNRARLQNQLESLLEEAHIKLSSLVSDLLGVSARRMLQALADGETDPATLAAMANKQLRATSEQLCDALGACTELNPVYRRLLKMALEELRFIEQHIGQLDQEMATLLCQHQDAVQRLAEVPGLGVGSAQQIIAEVGATAASFPSEKHLSSWVGACPGDEESAGVSQSHRSPKGNHQMRRILNQCANAAVKVKGSIFQILYRRLVPRLGHNQTIGAIAHRICRLIWIILHRGVGYVEHGPAVQESSKRARTSRMIRQLRNLGYRVELLAQNPA

SEQ ID NO: 283581 - protein, 345 aa, unidentified
MQAEYDGRQIVGIDLHRRRSVIVRMSEAGEKLETVRIDNDPVALGLEIAKAGPDPEVVLEATYGWYWAVDVLTAAGARVHLAHPLGVKGFAYRRVKNDARDAADLADLLRMGRLPEAYVAPPAVRELRELVRYRAKLVAWRSGLKASVHAVLAKQGVHIAVSDLFGVGGRELLSRAPLDGAYRGRVSSLCRLIDAVDFEIDAVAGPIRARLAGHAGYTAIQAIPGVGPVLGAVFVAEIGEVDRFPGPAQLTSWAGLTPRHRESDLVVHRGRITKQGSTLVRWAAVEAAHGVPHTAAWLTSTRARVAERRGRNIATVAVARKLLTLVYYGLRDGHIRALQQVEAVP

SEQ ID NO: 283582 - protein, 374 aa, unidentified
MRDHIEAFVAFDTSKLRNAVAIAEAGRTGEIRFLGEIDNDGAATGKLVRKLAARYERLTFCYEAGPTGYGLYRQIEGLGYDCMVVAPSLIPKKPGARVKTNRRDALSLAKQLRAGELTAVWVPDRRHEAMRDLTRGREAAVEDLRSKRQQVSSFLLRQGLHFTGKKTWTKAHMSWLASQKLEYAEQRIAFEEMLLAIRQAQERIERLEQAIRAAVPDWSLAEVVTGLMAMRGIDLIAATAFLAEIGDLSRFQTPRELMAYLGLVPSEDSTGDTVRRGPITKAGNRRARRILVECSWSYRHPPRVGKKKQEKVAAAPRAVREIAWKAQCRLSARYRALTRKGKLATVAVTAVARELAGFIWAINREIAAPRPVAM

SEQ ID NO: 283583 - protein, 386 aa, unidentified
MKVAANRIESPDAIRTALGAIFISLELSRSKWLITSVSPGAGEKMSKSVVSGGDIAALLARLADLQRKAQARTGQDFRIVSIQEAGLDGFWIHRVLEQEGIESYVVDPASIATSRRRRRAKTDKIDGETLVRTLMAYKRGEPRVCAILRVPTPGEEDRRRLMRERKALVNERIRHVNRIKGLLFSQGASGYEPLNRDRREHLERLMTGDGRPLPNALKAQISRELDRLELLIEQIAEAEDARDAMLAAAEQSAREPALLLKLKGIGPEFAAVLWSEGLSRQFDNRRQVAAYAGLAPTPWQSGQISHDQGVSKSGNPRLRATLIQVAWLWVRHQPTSALTAWFNGRVAQNGGRQKKSTIVALARKLLVAPWKYVNAGVIIEGAVART

SEQ ID NO: 283584 - protein, 345 aa, unidentified
MKTVYIGLDVGSSTCVARVLDGSGKVIHRSEFETGERNLIEAIQEIPGNAIVHLEASELAGWIREILMREKGRVQRVIVSDPKANSLISKDPNKSDESDAYNLADLARMGRFKEVYYPDDRGRAEFKMLVQHHARLGVQSVRVQHHIKSCLRRLGVIIKDRKLFSEEGRVPVLNQVASEIPHKILREHYAIRDCILKQRKEALRLIRRESKKYPEIALLSEIPGVKCVLASRFSAYVQTPFRFGSRKKLARYSRLNIVDRTSNGKPLGYKRLERQGNGPLKDLSRKVFNATCKRGKKENAFYRSYMKSLATTHDEVHARLSTQRKILSVMAAIWRTKLHYDDSRG

SEQ ID NO: 283585 - protein, 341 aa, unidentified
MRQYVGLDVAMDETKVHILDGDGKRVWRGKCRSHPDDIEAVLHQRAPQAERIGLETGPLTTWLWTELTGRGLPMVCLDARHAKRALDMRPNKTDANDAEGLAYIVRSGWYREVRVKGSEAMLSKALAGARGQLTTMVTDLSNQIRGIMKTFGLVVPKGSGGVFERNVRALLDGAEAIATVVTPLLDVWRLARQRAAALDRRLLAAARESSDCRLLMTMPSIGAVTAASFVAAIERPESFARSRNVGAWLGLTPRRYQSGEIDYQGHISRRGDSRLRALLYEAAMRLLTRVRADSALRRWGLALKKRLGFKRAAVAVARKMAVALHAMWRSGVAFDPAPLPR

SEQ ID NO: 283586 - protein, 345 aa, unidentified
MEQMYYIGLDVHKKKISYCVKDVSGRIHAEGAIPATRTDLDLWMKTLPQPWTAAMEATIFTGWIYDYLLPHAAALKVAHPLMLRAIAAAKKKNDRIDASKIADCLRCDFLPECYMASTEIRERRRTLRYRNLLVRQSVQLKNKIAVLLMEAGVSYNKQKLHKVGYFGDLLKTNPDINESLRSLLQLCRETLVRLQKIESALIRSLERDRLLAERVDRLMTIPAVGPITALTWALEVGDVKRFSSIKKAISYCGLCSAEKSSADVIKRGPLSKQRNKHLQCMLIEAAKLAPRNSSGLTMIYDRERQKGNANRATLAVARKLVAYLVAVDRSRRDFLLIENQNRTAA

SEQ ID NO: 283587 - protein, 375 aa, unidentified
MKKRSSDDTVVVPSKTKSSKERPMNTSKYIGMDVHMATTVIAVLNSVGETVAEAVVETKASTILDFLKSQRGTVHVTFEEGTQAAWLYDLIRPHVAEVVVCNPREVPAQDNKADKSDAKRLAELLRTNGLKAVYHGEHGTQALKELSRSYGAILSDSTRVKNRLKGVFRGRGISCTGTNVYSKKGREQWLRKLDNSAVRSRISKLFKELDCLTELRNEAEKELLAEARKHPATKVLRSIPGIGPVRAAVILGFTITPHRFRTKSQFWKYCGLAVMSEITGEYAVIDGRVVRSRKKPLVRGLNINYNHALKEAFKGAATTAAMGVWRSHFDALVANGTRPSLVLLTLARRIASITLDVWKRGELYDTDKLKFMHAG

SEQ ID NO: 283588 - protein, 365 aa, unidentified
MALKEWLEPDAGRLARPVLRGRRRSNASLLPDQIHGVNELGKATLRKQLKRAQVAEFFATLPPSVIGMEACGSAHHWARKLQSFGHTVRLIAPQFVKPYVKTNKNDAADAEAICEAVARPNMRFVPIKNVEQQAVLALHRARQGFVKARTSQANQIRGLLAEFGLVVPQGIGNIARQVPELIEDATNELPGSFRLLIQRLLEHLKELDRQVDEIGAQIEAWHRDSELSRKLAQVPGIGPITASALVASVGNARNFTSGRQLAAWLGLVPRQNSSGGKNVLLGISKRGDTYLRTLLIHGARAVIYRAKPKGVTSSWLQTLLLRRNVNVAAVALANKNARIIWALLTQNRDFCPDYAPTAARQPAQA

SEQ ID NO: 283589 - protein, 373 aa, unidentified
MNNNTTVYIGMDVHQANFTLCSLADGEETPKNVQTIPADYLLVVKYINGLRKRYEEGTDFICGYEAGCLGYSLYRSMKACGQECVILAPTTMAVEGSNRSIKTDKRDAKNIAKCLRNHTYRAVHVPTEEDEQIKEFIRMRDDVKANLKRIKQQLLAFCLRHGWVYSGTKHYWTQAHMKWLEQLKLEGVYQEVLDGYLIELKRLTEAVDRYDRRIEALSQHDTYREPVNQLTCFLGVKRPTALCIMVEVGDFRRFPSAEQFAAYLGIVPGEHSSSDSRNRLGITKAGNTHVRRLLVESAQSYGRGKGGYKSKALIKRQEGNPAKVIAYADRANERLRRKYYQMILRGRHSNVAKTAVARELACFMWGMMTGRID

SEQ ID NO: 283590 - protein, 452 aa, unidentified
MEEPQEVQDEEYERVYQRVAAVDVAKASGVVCTRVPDEARPGRRRTKVWTVTATLSAVTELADHLRCHQIEVVTLESTSDYWRIWHVVLEAAGLMVQLVNARSVKNVPGRAKTDKKDAVWLAKLTERGMLRPSFVPPYDIRRLREFTRLRADLVHERTRHWARLEKLLERALIKISAVVSSLDTLSARAMIEALIAGQRNPRALADLAVGRLRPKRAELAEALDGRFEPHHGELARILLDQIDALTGQIDQLTARITELIAAIPAAQGIDADGATGPGAGTGPGAPVLPAVMRLDEITGCGLIAAQAVIAEIGLDMAVFGTPGRLVSWAKRCPQTRQSGTKTSTGKAGKGNPYLNGVLGEIAASAGRTDTFLGERYRRLARRRGKRKAIVAVARSVLVIIFCLLADPEARFRDLGPGYYDTHIDRQRKIRNHIRQLEALGLDVTTAPRRDAA

SEQ ID NO: 283591 - protein, 311 aa, unidentified
MQLTIGIDISKETVVAYRLPDNQSIQVANDRAGQKTLVRWIGKQNGSLVVFEATGAYHRCLEAALAANGTPFAKVNPRQARRFAEATGRLAKTDRVDAIMLAKMGAILGLKADQPKSEVLYILRELLTARRALMKDKVAAKARLQTTRQTLLRNQINARLKQIEIQIRQVDAAIAEKVQLDEALSNKLAILISIPGIAETTAFSMLIEMPELGTLEGKQAASLAGLAPMSRQSGKWQGKERIQGGRAFLRRAIYMPALVATRCNPGLKAKYDQLIRAGKSGKVAVTAIMRKLIVMANALLRDDRKWSELRP

SEQ ID NO: 283592 - protein, 418 aa, unidentified
MTATHSTVSTLLVAIDISKHRHEVLIGIPGKKRRRRLTVMNTLEDFQRLSAALASYDLPVLIGFEATGNYHRTLAHHLGQAGFELKLISSVGLARTREALHNSWDKNDPKDAQVFLHMLEIGAVQFFHDPLVTGTADIQELSKTHEIVSRSKTELWHRILTHYLPLYFPEAERFHRSSRTDWFLAFLEKYPTPHMISAMSRDAFIADAWQVVGRKVSKELLLSDIYATAVDSIGLPVHPDSDAIRMFRLVLAEGRSLIRQRNEIEARAVELLSDLPDYQLLTTIPGIGPINAMTILAEAGDLRRFRHHRQFLKFCGMDLATVQSGMFRGQSKISKYGNARLRRTLWMAGQTAVLKRTNSFRDKFERYISKDRHNAHLRRKAYTAIAAKMARTVHAVVKHGDPYRPFFEGVSPGGKTSL

SEQ ID NO: 283593 - protein, 356 aa, unidentified
MSRSSSSAAIATPGIDLGKNSFHLIGQDQRGSIVLRIKLSRVQLTQRLANIPPCLIGMEACAGAHHIGRQLQALGHEVRLIPAQYVKPFLKGHKNDYRDAEAIAEAVQRPTMSFVAIKTPEQMDLLALHRVRSRLVSQRTGVTNQIRGFLLERGITVRQGLAPLRQALPSILGSSDALSPRLVRLIADLTEDWRRLDERIADVSTEIEALAARDEHCQRLMSVPGVGPIISSAVVAAIGTGGGFKQGRDFGAWLGLVPKQESTGDRTILGKISKRGNKYLRTLFVQAAHIVLVRRPHGARLGLWPWIETAGRRLHRNMLVIALANKLARIAWAVLARGHGLSAPERLPCGVRRTCA

SEQ ID NO: 283594 - protein, 410 aa, unidentified
MDAILERCAGLDVHQETIVACVMFGPLDKRAKKEIRTFGTTTKELLQLQDWLAEYNCTDVAMESTGVYWKPVWNILEGSFHLWLANPQRIKNVPGRKTDMKDAVWIAQLLRCGLIEASFVPPEDIRDLRDLTRYRRKLLGDATAEKNRVHRILQDANIKLTTYVSDIFGVSGRALLESLVNGEVLEPHEVERMVKTQLKRKVPQLIDALNGRIRFHHRKMIQKHLKHLEYLEKEIEVLESDIAQLLSPYQEAVDLLVTIPGIQKDAAAGILAEIGCDMSMFPSEGHLASWAGVSPGNNESAGKKKSTRTRNGNKGLKSILCQAAWAAAKAKNSRLSSFYHRLVKRRGPKKANMAVSHLLLRIIYQMLLRNQPYSELGWDYLPKKEKSLEYWVQRIKTLGYNVVQLQPEIT

SEQ ID NO: 283595 - protein, 347 aa, unidentified
MLYVGMDVHRDSTVFCLFDPQAEPAAQYRTVTRSTTAEGIETVLAPLAGQCRVAFEVGTQAQWIAGIVRPLARQVEVANPSRIPWLFRDGRKNDKLDARKLATLLYLKQLPQVHLPSLEVSAWRALINHRRTRVQRRTRIKNQIRAVVRTFGCRCPFKSLWTRSGLAWLKAQIFDRPRELMVRILLEELEATDRGLKLVEEQLDAISAAQPAVALLRTIPSIGPRTAEAIVAFTDRADRFGRSKQYASYFGMTPTQDSSGRVDRQGHISKRGPSVVRWVLCQAAHSIIRGRSALRTWFDRVYRGQRNRFKKAVVALGRKVLAIAYRMLMENKPYDNARVCGPTATAA

SEQ ID NO: 283596 - protein, 416 aa, unidentified
MKRNKPKKLGKVNGNTLIAAIDIGKKMNYGYFRAPDGRDIKPFAFYNLRDGFEKFWAKLVEFQKGHNLEEIVVGFESTGPYAEPMLHFLKKKEITLVQTNPVHTKRLKELTGNSRNKTDEKDPRVIADVIALGHALTLVIPMGPAAELRRLSQARERAIKSRTSMSNQLQHLLFVIFPELSWKTKSKSVLHLVESCPTPESIVRMGIEALCATLRKVSRGKLGQKRAKEIFEAAKKSVGISEGRESILKEIGHLVSNMRNHDGFIDGLEKEMKHYLEKIPYSHSILSIKGIGEVTAAGLIGEVGDFRKFSTISEITKLAGLDLYEISSGRKKGQRRISKRGRSYLRKVLFFAAINAVKSNGILHAKYQQMLCRGMAKIKALIAICRKLLRITFAIVRDDTVYVSNHQHMSDTKLAA

SEQ ID NO: 283597 - protein, 321 aa, unidentified
MEGTPVSTGLEVFVGIDVSKHSWDVCILPAMIRRSFPATDEGLASLLELLRQHPATLIVLEATGGYERRLAAGLHDAECQVAIVNPKQVRDFAKALGRLAKTDRLDAEVLALFAQKIQPRPSEKCPEKRAELDALVARRRQLLQLRTMERNRLHMAEHKLPRKSIQKVIDVLQKQIDQLDAAIAKLIESDDDWRQKAQLLESVPGVGAVTSATLVAELPELGKLNRQAIAALAGLAPFNHDSGLHTGQRQVRGGRASVRTALYMAALAARRFNPVLKRFADRLQSAGKAAKVILTACMRKLLTILNTMVKHNTSWNPKLAS

SEQ ID NO: 283598 - protein, 337 aa, unidentified
MGLYCGIDLHSNNHMLTVIDEADRRVYERRLPNELAITKAALEPYRAELVAVAVESTFNWYWLVDGLMEAGYAVRLVNTAAVRQYEGLKHTDDKHDAFWLAHLMRLGILPTGYIYPKSERGLRDLARQRMRLVQHRSSLITSVQNQVWRSLAVRLRSETIKGRGKQPWPEISDPDLALSVKAGRAAIDTLTVQIERLEKLILKRVDRSPRFRMLKTVTGIGPILAMTIALEVGDIGRFAGVGEFASYCRCVDSQRLSNGKKKGEANRKCGNRYLAWAFMEAAHFAIRNLPAAKRFYERKRRQRHALLAVKALAHKLARACFYVLRDQVPFAPERLFV

SEQ ID NO: 283599 - protein, 371 aa, unidentified
MSELPAEVRSARLKVEASPRPPGARKPETELGAVSIIAVPHPDSRSGPSPHLQGRVMDEQRPVFAGIDVSKDRLDIHLRPSNEAFHVSRDGKGLDDLVSRLKKLPVALVVLEATGGFEATVAAALAGIGLPLCVVNPRQIRDFARAMGRLAKTDTLDAEVIALFAERIRPEVRPLPEPERNHLAEIVGRRRQIIEMIGMETNRGRQTVDKHLARRLACHIAFLQKELDAIDHDIGEAIKHSPAWREAEALLKSVPGIGDVTARTLLAELPELGTVSRHQVAALVGVAPINRDSGLMRGRRAIAGGRTSVRAVLYMAALTAIRRRSPFRAFYDQLTARGRSKKVALVAVMRKLLTILNAILRDRTPWRHLNA

SEQ ID NO: 283600 - protein, 444 aa, unidentified
MGRKSKKQRLQIIHSNCAGIDIGSREHWVAVDPDRAKEPVRCFSSFTDSLNNMADWLESLGVEIVAMEATGVYWIPLFELLDRRGFEVQLVNSRSTRQVTGRKSDVLDCQWIWQLMSYGLLKGAFRPADAICCLRTIVRQHASKVQEQSRCVQHMQKALTQMNIQLDNVVSNLMGKTGMAILRNIVAGERDPHKLATLRDKRLHADEETVARSLYGNWREEHLFSLTQALEHYDFLTQQIQSCNQLIEQQLNALPQLADNPPKPSKALRNPLRTTAQQKALHQGLYGVMGVDLTAIPTIGIETVLVLASEVGEDLSRFPSEANFCSWLSLAPPTCIPGGKQLNGKAHRVFNRAGQALRQAACNARNSNSFIGASHRARLARMDKASAVKATAHQLARLIYAMLTKGQPYVEKGIETFEARTQDRQMKALQRKAQKLGFELVEVS

SEQ ID NO: 283601 - protein, 353 aa, unidentified
MKQVVKQVVGIDVGKDTFYACYKIKFQDSSISLKGAKSFDNNYKGFSALSEWCAKRNKTTEIKPIYVMEATGVYYEELAYFLHGTGELVSVHLAQKIKYFAKSCNLKTKTDKVDSKMIAEFGIEKNLQGTDFWTPPSKEFKLIRDMAREHTSLKRTGAAAKSQLHAMNHAHGYSEKMKEMKKQQIAFYEEQIKEVEAEIKRKVAEDKKLASKIKRITKIKGIRIISVVKIITEVNGFLLFNNIRQLVSYAGLDVVENQSGNHRGKTKISKKGNARLRSVLYFPAITASNHNKTLKKYYERIIENRTYKNQGTVAVMRKMLILVYTLWKKDEEYIEDYLSVKQKNKGEVLILNH

SEQ ID NO: 283602 - protein, 322 aa, unidentified
MTTAVGIDVSKKTCHIALRHQDGTYAEKVFCNDAKGAKKCISYLRTRDVSRETPLVLESTGGYHLLFAMTLRDTHFRGVKVINGILTKKYHKAKVRKTKTDSVDAKILADMGIMEKLVPFEETKEQFAQKQRITMLKKLEHVRQKLAGSIRDIEETASVLGLEVTRQEGSRHILKSIEKEIEQLNQKIVDHQYDPLVELLAEMPGVSMKNAAIISALMGNKIFGSRDQMVAFAGLDLNVRESGSSIHGKRRLSKRGDSFLRKKLFQTAWALMMNNSYYKAYYDKKRAEGHHYYTCLIAIARKFLYRIFALQKQVQSNNQKLV

SEQ ID NO: 283603 - protein, 310 aa, unidentified
MSKTNYVGVDLSKSELVADLSTGTAPRVFPQTVEGRSALLAALPLGAHVICEASGGYERALVATLQAAGIPVSVVMPVRVRAFACAQGLRAKTDPIDARLLSAFGAALQPAPVLAQTRAHAELQELVRTRRVLIEQLNDEASHLEHTALPLLVELAQARRQLLESQMETIEARLRELIALDAAWRWRAERVQQVCGIGEVSAWTLLAELPELGSLERGQAGALLGVAPHPDDSGPRHGRRRISGGRSGARKVLYMAALSAAHRNTILRAFYQRLIGPKNKPKLVALTAVMRKLIELLNRLLADPNFKLAT

SEQ ID NO: 283604 - protein, 343 aa, unidentified
MEHTTIAVDLAKSVFQVAISHRPGHVDEERRLSREHFLTFFAQQPPATIVLEACGSAHYWARQLQTFGHTVRLLPAHDVRRYVRRNKTDRTDTKGMLEANRNDEIHPVPVKSTAQQAIASLHRLRSTWLATRTARLNTLRGLLREFGVFLPEGASRVVPGVHAFLAGADEAVSSALRGTLTDACTEIEELETNMEGVERQLTALARQLPDVKRLQTVPGVGLLTATALVALVGDIRRFRSGRHFASFLGLTPKEHSSGDRRHLGAISKQGDVYVRMLLTHGARSVLRHGHTTATPTPLQRWGLHTEQRRGHNVATVAVANKLARMVWAVWLHQQPYAAEHRPR

SEQ ID NO: 283605 - protein, 332 aa, unidentified
MDLHGKNVLCSLTDENDKVVVERRLPTKLADVLRFLEPYRKSIINIIIESTYNWYWLVDGLREEKYPVSLANPNAVKTYDGLKHGNDKGDARHLAHLSRLGVLPTGYIYPKEQRGLRDLLRRRMYLVQERTGLILSLQSLCERLNGGKIAAEKFKHMKPEALVEKIDDPYHRLGAVEYLEIVRRINQSIYRLETKVLQECEETHQFKLLTTIPGIGRVLGMMIALESGPMNRFAGPGNYASYARTVNAERYSDGKKKGENNRKCGNKYLAWALVQAAHHLIQHCPEARSFYDRKKAKKNGAVATKALACKLARCIYHMLTEKEEFDVKKIFG

SEQ ID NO: 283606 - protein, 374 aa, unidentified
MTDDTALYVGLDVSKEKIAIGLAEAGRKGEVRYYGEIANRADAVRKFVDRLAGRHRRLCLCYEAGPTGYGLYRQLRDLGHECLVVAPSLVPTRPGLQVKTDRRDAVALAALLRAGELSSIWVPDETHEAMRDLCRAREAAVSDLRRARQHLLSFLLRHGRVFEGRSHWSKAHRNWLATQRFDHRAQQIAMEEYIRAIEQIEERRDRLTRQMVELLQDWSLNPIVEAIQALRGVAQISAMTLVSEIGDFRRFSNPRQFMAWLGLVPKEHSTGASVSRGSITKAGNIRARRMLVEGAWTYRLPARVNQEILKRTEGLPEAIRAIAWKAQVRLCQRYRRMQASGRPTNIVIVAIARELAAFVWAIATTVPIPPTKTA

SEQ ID NO: 283607 - protein, 366 aa, unidentified
MKKTSTVQALQSEIFKGQKLTIGLDLGDRWSFYCVMDEAGRVLFEQKLPTTPEAMKQTFGKIPRSLMALETGTHSPWVSRLLTELGHEVIVAHAQKVQWITKSSRKDDRHDARTLARLARVDPQLLGPVRHRSVQAQLHLTVIRGRAELVSARTALVNAARGLVKSYGQRLPKCGTYQVSRELAAALNTELRDVLEPLLKEIESLNERVKEYDERMEKIAKEVYPEVSLLKQVKGVGTQIALSYVLTIEDPYRFAKSREVGCFLGLRPGRRNSGESEPQKGISKEGDRYLRTMLVQGAHYILGPFGEDSDLRRWGLKLAERGGKNAKKRAVVAVARKLAVLLHRLWVGGEVYEPLRNSQKAMREVA

SEQ ID NO: 283608 - protein, 482 aa, unidentified
MKKKNIYTNRSQELLTLFEEAGNGVKVMCVPIDYAKKDHVAMLCNGHGHILRKPFSVKNSPEGIEYLTEQVTRSCKHRQIDLKHVFFGGEDVGSYAENFVNILRSGGWIVAGVNAHDAKEQRANMQASTDRLDLMGIASMLLNRRGNCSPAQSGIYRNLRTLVRHRKKLVAMSTEVRNRMHTVVDRLFPGFLDEKKSGIYSFSKSSLYLMEDRFSPRQIRRRKRQKPIEILKRCGTEKPESTAAKLQKYAARVLNTPNEYITTLQLSLTQHVKHLRCLQDSIDQLEHEVAVWLAQTQGAFLTTFRGIGIVLAAGVSAEIGNPHEQEPLNNLVSYSGIIPRVKQTGGSEGKTYTGKVAKRCNHILKDYVVQSGNHMGLHGPEELMADYKRREAAGQHADFGIGRRYLRTAMCLMRTSQIYMPEQLRNTKVKPEERAGYYLTIWPYLRKKWKKAGALDAAFEKDRPLGQWRCMVQELYEIKLKL

SEQ ID NO: 283609 - protein, 417 aa, unidentified
MKEMSSSETKTDRVGKPRGMRKKRGPVQRDVKEVVAELVLKLSQKLEPERAREGEGGRQCVPRPNRDRLTVGVDLGDQWSNYCILGLEGETLAEGQLRTTQQDFAEFFQSMAAARVVMEVGTHSAWGRDVVAGCGHEVLVANSRQMEGPKRRKRKNDRIDARKLARVGRVDPQSLFAVQHRSLGVRQDLVAVRARDTVVAVRRDVINSTRGLVKALGARLPKCSSQSFSKKVVGALPAEVSEVLLPLVRVVETLSNCIKAYDERIEKLATEKYPHTELLRQVKGVGSLTALAYVLTLEDPKRFAKSRDVGSYLGLVPKQEDSGNRQPQLRITKMGDMMLRRLLVGSAHYILGPFGPDTDLRRYGLRLCEPGGKNAKKRAVVAVARKLAVLLHRLWVSKEVYEPLRHAPPPATGQEAA

SEQ ID NO: 283610 - protein, 387 aa, unidentified
MIYYVGIDISKYKHDFCIISNAGELIVENFSFQNNKIGFQSLLNQLKPYNKCDIRIAFEATGHYSLNLELFLVNNGFSFIKVNPLIIHQFLKTRSLRRTKTDKADSITIAKYLMSVPYKPNSDLLYNIFTLKSLCRARENLIKERSKFAMLLTNELDKSFPEIKPFFNNMISTTLLYILEKYTNTKHIAAMKDYESLRKLSHGKFTYARFAQLKELAKNSVGFHNENTDLLISTYVSIYNDFNNKIDPIEKQISTIINVLNPRMLTIPGIGEISAATILSEYGDIKNFSNPNKMLAFAGLDPSINQSGTLESNGKMVKHGSGHLRYAVMNSALSILRFSPEFYDYYLKKRSEGKCHRVALSHVCKKLIRVIYSLEKNNIDFNPSLLK

SEQ ID NO: 283611 - protein, 307 aa, unidentified
MSVFVGIDVGSDQLDVALTAGKGARQFRNTSHGWQALIAWLQPLAPQWIVLEATGQYDAGVLSALHEAGLPVTRINPRQARDFAKASGQLAKTDELDAQMLARLASVAAALLLRPHQPKAAWQKELAAYQQQRTHLQQMLLSERQRYLTLEPAWLRRQVRGTIAHLERRLWQIDQQLKAQIQAQPQLATLRTLKGVGEVTVATLAAHLPELGHLRGKAIAKLVGVAPLARDSGYQHGKRAVWGGRSVIRQVLYMAALTAVRHEPCLRDFYQGLRQRGKAAKVALVAVMRKMLVILNARMRDALLTAT

SEQ ID NO: 283612 - protein, 346 aa, unidentified
MYFDPKEAEMKYCGIDLHSNNSVVVVSDEEDRIVFNKRLPNDLGQVQAVLEAHREELAGVVIESTYNWYWLVDGLMDAGYRVHLAHPSAIKKYEGLKYSGDFADAGYLAQLLRLGLLAEGYIYPREERGARDLARKRIQLVHYRTAQILSIENILARQTGARMSGEAVKRLTAEQIEALGFMPDVALALEANRAVSQALGQQIEALEKRLKERVSLRGEFKLLKTTPGIGEILATTIMLEMGAPERFAKVGNFSSYCRCVDSLRESNNRKKGEGNAKNGNKYLAWAFVEAANFARRYCPQAKAFYERKKRKTNNILATKALAHKLARACYHMLREHKPFDVNRCFG

SEQ ID NO: 283613 - protein, 356 aa, unidentified
MLSKKISGKSKKDNSSLTVTDSYDHYVALDWSERNMAIARMGKKDLEPKVIDVPTDLKGLKKYLSDLVGKKILTIEETTTSQWLYVELHDYADKIFICDPYRNRLLSDGPKNDKIDAGKLCKLLKNGMMKEVYHSTDEMYELRKLVSYYDDEVRAGVRLLNQKSALYRAENKSLKKKEEIEGSRVNKFIVAQLDEKIESYQEKHKRYEKEFERISKKNKVLRSLKSIPGLGPISSVTILSIVIDGRRFKSSNHYLSYCGLVKHEKLSGGRSYGRRLPRYSRRLKGVYVSAAVRAASTENPLREYYEYLLNEKKLPVYNAKNALARYIAKISLGIIKSGEKYKPYKWRENKKEREAA

SEQ ID NO: 283614 - protein, 412 aa, unidentified
MQVIYPRCAGLDVHEKTVVVTAMLTQEDGKVYKTQRTFRTMTADLLALDDWLEQQQIEVVAMESTGIYWRPVFNILEAGRTIILVNARHMKAVPGRKTDVKDSEWIADLLRHGLLQASFIPPQPIRDLRELTRYRKTLVQERADEINRLQKVLETANLKLGSVATDVLGKSGRDMLNAVLHGEGDPETLAALARGRLRAKLPDLRLALEGRVQPHHRFLLTRILAHIDFLEESICTVYQEIAERLRPFEEAVELLQSIPVLQETAIASIVSEIGTDMSRFPSDKHIASWAGLSPGNHESAGKRLSGSTTHGNPYLRAVLCQVAWVVAHTKDTYLSAYYHRIARRRGKKKAIVAVAHKLLIIIYHVLSTKKPYEELGADYFDQLDKARIERRAVQRLEQLGYIVTLTTQDDAA

SEQ ID NO: 283615 - protein, 393 aa, unidentified
MLKVLWVGFDVHALTIAVAVAMASGEVRSLGVIPNTAESVSRLIRKLGKPQQLRVCYEAGPTGYVLYWQLTKLGVHCEVVAPTLIPVKAGDRVKTDRRDAEKLARCYRAGDLTPVWVPGAAHEALRDLVRAREAAKQDQLRARNRLGKFLLRQGRRAAEGTQAWTGKYMKWIKEQVRFEQPAQEATLLDYLHEVEHAAERIQRLERSIDQAIQTVPEKMRAVIQGLQSLRGIAKISAVSIVAELGEISRFPKPSQLMGYSGAVSSEHSSGERVQRGSISKAGNAHMRRIVVEAAWSYRHRPSVGAALAARHKNLGKQYAEEVKEMAWKAQHRLHSRYSKLSAKGKTKQKVVTAVGRELLGFVWAIGTHVERAVSVKAPRRPPHVTLLVAWIER

SEQ ID NO: 283616 - protein, 356 aa, unidentified
MQAQVTKKIDFTGKQLFVGLDVHKKSWSVTILVDGTEHRTFTQPPDPESLNNYLHRMFPGGEYNSAYEAGFCGYAIHRKLNELGINNIVINAADIPTSQKDKLQKRDPVDSRKIARSLEKGSLHGIHIFDRELEELRSLNRTRFYLMRDLRRSKTRIKSFLQYYGEPVPLEFDNNQWTLKFVSWLKQVKMQTISGQDAFSNLISSYEFHRSQLLTLSRQIRQRIGEYDRELYTLLKSISGIGPLTASALITELGDINRFANIDQLGSYVGLIPRIRESGETTYTGGITFRCNTFLRTLLIESSWQAIRMDPALMQYYHAHLINNKGHKVVIKVARKLLNRIRYVMKNRKPYITGVA

SEQ ID NO: 283617 - protein, 419 aa, unidentified
MSFKIFKFNCCGLDIHKTWIFACIGITDSNNRTQYKQARFSSFTKGLNELCDWLAKYNCKDVCMESTGKYWIPVFNILEQHNLWVTLSHPKYTKPMKGNKTDRKDAKWICDLYMCGMVKPSFIPPADIRELRDLVRYRFKLTCMITGEKNRAQNCLTVSNLKLDDVFSDVFGKSSRSITEHILQHPGEKFDIAPFVDSRCKTPIEEIQAAVDGAISHEQAVKLRQCLKHIDELEMHKAEIEREIFRLSQKYESVLDLIRTIPGFDKNPLTAIQVLSEIGADMSVFPTAKNLVSWAGCCPRNDQSSRKIKSTRISRAGSYFKPVLVQVANALIKSKKHPEFTTRYRRIKARRGHKKAIIAICRMILTAIWHILTDLNPYTTEGFLESRPVNDSKILTTSQALNLLKQRGYVIKDDIVSVP

SEQ ID NO: 283618 - protein, 402 aa, unidentified
MEVMHERVAGLDVHKAMIVACVRITAGGKISRECRTFETTTAGLEALLGWLTASGCTDVAMEATGVYWKPVWNILSDGAFELIVANAAHIKNVPGRKTDVNDAMWIADLVACGLIKASFVPEQEMQELRSLLRARKQLTREQTSHIQRVQKTLEEANIKLDSVISDILGVSGRRIIEAMIAGVRSPLRLAELADRRIKASPKALYDALHGRLTDHHRFMLELYLGQHDALAAAGQATFRSLIMLLCTIPGVGVLSATVILAEIGRDMSRFPTAGHLLAWAGLCPGQNESAGKRKSSRLRKGAPWLKTMLVQCAWAASRKKDSYYKAQFNRLRSKRGPKKAICAVAASMLTAIYHMLKDGTFHHDLGADHFDRRSAEVKAKRLVAQLTKLGFQVELQPLAQAA

SEQ ID NO: 283619 - protein, 435 aa, unidentified
MFGGRVREEMTESMLAESQDEEEIIARVAALDIGKAELVCCVRIPAEGNRKKRLQEVSTHSTMTRSLGELANRLVGLGIERVVMEATGDYWKPVFYLLEAHGLQPWLVNARDVRHLPGRPKTDVLDAVWLCKVAERQMLRPSFVPPVEIRRLRDLTRYRIDLVGERTAEKNRVEKLLEDACIKLSVVASDIFGVSGRDMMAALIAGERDPKVLAQLARSVMRNKISDLEEAFTGRFDDHHRFLLARMLARIDGIDADIAALDEQIEVQLAPFAAAAERLDDIPGIGPVAAAIIIAEIGVDMSQFPTAGHLCSWAKFCPGISSSAGKTKGNGSSGHGNRYLARALGEAAVIAGRTNTFLGERYRRIARRRGKKRAIVAVGRSILVATWHILQDPDTRFQDLGHDYVHARTNPDARKHNHIRQLEALGYTVTLTPVA

SEQ ID NO: 283620 - protein, 385 aa, unidentified
MPHTLIAHSTLDYHRTLVLAIELSNKSWVLAAQVPGLPHAKAKQTIEPTSEALMAAIDGYRSRANAAGCFVERVIATYEAGWSGFWLARWLARRDVETHVIQPSSVPVDRRARRAKSDGIDAELLLRTLLAWLRGEPRVCSMVPIPSEADEDARRSIRERSELVAERVGLVNRIGAVLATLGASNYDPLRRDRRQRLEELRTALGDPLPVNAHAKIVRMLDRLELLLEQIAELNRLRDAVLNDDVPDKAGEMIQQLAALRGIGVQSATVLVREAFVRHFANGKALGSYAGLAATPYSSGSSNREQGIGKAGNRRLRTVMVELAWLWQRYQPGSAHVRWYRERAGATGARMRKVMVVALARKLLVALWRFVTQGVVPEGAAMKPVS

SEQ ID NO: 283621 - protein, 348 aa, unidentified
MAMLAEVVELVIGVDTHKQTHTAAVVVATTGAVIAQATVAATPAGYRQLLALADQQPGHRVWAIEGTGGYGAGLTRFLHAHAEQVVELDRPKRAARRHGAKSDPLDATRAAREALGRDQLAQPRAAGHRAALQARLTTRRSAVQAGTDAQRQLHALVVTAPDALRGRLRDLTTRQLVTACGRLRLRAAWDAETTATAASLRALARRIQLLDAEIAEHTRAITTLVRAWRPDLLTPCGVGPIVAAIVLCAWSHPGRCPSDAAFAMLGGAAPIPASSGQTIRVRLNRSGDRHLNQALHLIVLTRLRYDPATRAYATRRRAEGKTNREIRRCLVRYVARQLYRLLEAQPTL

SEQ ID NO: 283622 - protein, 480 aa, unidentified
MAKRSKSAFERLGCNRLNRNQRRELSRRIAAGDPGLSIVNPNAGGIDVGNESHFAAVPSDRDPDPVQEFGCWTADLNRMAKWLVACGIDTVAVQATGVYWMALDDVLTKHGVRVVLVNARNTKNVPGRKSDVQECQWLMKLHTYGLLRDSFRLSKEMESVRTIWRLRDRHVAEAGRAVQHMQKALTEMNIQVANALSDITGVSGMKIITAILDGERDPYRLADLRDKRVKASREEVARSLEGNWRKDVLFELRQALDYYRFIHEQMRECDRQLEVYLGKLPSALEIPVAAENPEASRKRKTKKARENEPRIPHLEAELTRICGVNLCSIDGISIITAQTIIAEVGTDMSAFPSEKNFSSWLGLTPGKDISGGKVVGKRRKVKNRVAAALRMAATTLLRSESYLGAKYRYLRRQLPSKKAAVKAMARHLAVLVYRMFTYGQAWVDRGAAHYHQKRTELDMARLESIARAKGFQLIPMAQAN

SEQ ID NO: 283623 - protein, 378 aa, unidentified
MKKEVIYVGLDVHAQTISIALAESGGGTVRHYGNISNCLNTLERTFAKIRKAHPGCTLKVCYEAGPTGFVIARRLTQLKIDCVVVAPSLIPNRSGDRIKTDRRDAIKLARLHRAGELTAVHVPDACDEAMRDLCRARTDAVQDLRRGRAQLKAFLLRNGYRYSGKSAWTEAHRRYLRELVLPHAAQRIVLEDALRTITTAEQRIQRLEEGMETLLESWAMKPVVKALMGLRGFQIVGAMVMVSELGGAWRFSHPRQLMAYLGLVPSENTSASRRRQGGITKAGNSHARWLMIEAAHHYRLPPKISKELSARQEGLSTEVKDCSWKAQTRLHKRMVTLLARGKQHNKVAVAIARELTGFVWRVFQIMAPKDQPITQPTA

SEQ ID NO: 283624 - protein, 309 aa, unidentified
MKQSVVYIGVDVAKANLDVAWAAASRRFPNDRNGHAALVLWIKQSAAPVQLICEASGGYEQALLESLEQNNLAVTLVQAIRVRQYARAAGILAKTDTIDAKVLAAFGAAMQPKPTPPFSAEQKRLRGYEAQRRHLSKVLLAEQNRLAQVSCAELRSLSRSLISKIKKQIDTLDTGIANLIAQDQVLCVKAQKLTAISGVGARTAALLLAQMPELGQLNRGEAAALAGLAPFNHDSGSIRGKRAIFGGRRALRSGLYMAALSAARYNPILSSFYQRLRAKGKPHKLALTAVMRKLLLALNSSLKPETILA

SEQ ID NO: 283625 - protein, 410 aa, unidentified
METIVERCCGLDVHQATIVACLLVGRASEKPRKQVKTFRAMTQDLLALRDWLLSEGCTHVGMESTGVYWKPVHAVLEGAFQIVVGNAHHIRNVPGRKTDVKDSEWIADLLRHGLIAKSFVPPKPIRELRDLLRYRRKLVESRSAERNRLLKLLETANIKLASVATNVFGVSGMLMLNAILKDDSSPAQMAELAKGRMRDKIPDLKLALEGSVQEHHRFLLRLQLRRLKRTDEDLAELEQRIDERLGPYREQQALLVQIPGIDRILAAVMIAELGTDMTVFHSAKHLAAWAGVCPGNNESAGKRKSDRVRNGNAHLKTALVEAANAASRKKGSYLKDKFFRIKARRGPKRAAIAIAHKILIAAYHMLSTGSAYKDLGEPYLDRVARYRVTHQLVRRLERLGYDVHLIQKVA

SEQ ID NO: 283626 - protein, 338 aa, unidentified
MKISVLGIDLAKQVFQLHGVDEQGQVLCRKKLTRRKLLAFIAQLEPCLIGLEACSSANYWAREMKQFGHDVRLISPQFVKPYVKSNKHDAADAEAICEAVSRPNMRFVPIKGIEQQDIQSLHRARELLIKQRTALCNQTRGLLGEYGLVVSQGVNRLRSTLPEVLEDGENALSSQARELFSELYQQLVWLDARVQVFDRKIGQVFKTNEACQRLGQMEGIGPMIATALYAAVHNAKEFTNARQMAAWLGLIPRQHSSGGKTLLLGISKRGDRYLRTLLIHGARSVIYRVKDKENKRGRWLKQLIERRGVNRAVVALANKMARMAWVILNKGECYQAGN

SEQ ID NO: 283627 - protein, 321 aa, unidentified
MEPVILGIDIAKEKFDVALLSGEKVITDTFSNTTAGFGMLKRWLAKNRVERIHACLEATGTYGEALSEYLHRAGHTVSVVNPARIKGFGQGELSRTKTDKADAQLIARFCRAMRPEPWQPPAPEVKELQSLVRRLEALNSMLEQEKNRLGTADDVIKESIKRVITCLQQERKATRKLIRNHVDRYPDMRGKRDLLESIPGIGPGTSAMILAEFCDVTRFPDAGSMASFCGLTPRHRQSGSSVRGRSMISKTGSSRIRKALFMPALASVRCNPVIAALRARLRASGKHPMAIVCAIMRKLIHIAFGVLKSGRLFEASIAAAA

SEQ ID NO: 283628 - protein, 346 aa, unidentified
MLYAGLDLSRKRLDFHLLDAEGATVDVGASPPDADGLAALSQRLERHGAPIRAAIESMNGARFVHDRLELHGWQVEIADAQKVKGLAPLACKTDRIDAWVLAELARRDLVPAIWLPDPRVRAERERARWRLHLVRHRSSLKQRVHAVLLTHGKPCPVTDLFGVRGRQLLARLELPEPWQGTIEASLRLIDELDREIGDCERELRRLGADHRYVPLLLTVPGISWVLAYTIAAELGDINRFPSPRKLAGYSGLCPRVYQSGESDRRGPLAKQGPRYLRWALVEAATHACTHPAYRDRYQRTKTRLGKQRGAKVAQIDLARRLTEAIWHMLSRGEPFAPKGATDPLAA

SEQ ID NO: 283629 - protein, 391 aa, unidentified
MIFVGIDVAKDKHDCFITNTDGEVLFKSFTITNNLDGLDELYQKIESVMEDVSKAKVGLEATGHYSYNLLGYLLDKGLPTYVINPLHTNLYRKSLSLRQTKTDKVDARTIASMLMSDVNLKSYSDTSYHNEELKSLTRYRFDKVKERAQLKQSISRLVCILFPELEKLVPTLHQNSVYELLYEFPGAKHVANAHLTRLSNLVETASKGHYTKDTAIMFREAARTSIGSNMPAKSLELKHTIKLIRELDSEIEEIETEIKTIMDEINSPILSIPGISYRMGAMIVSEIGDFSQFDSPDKILAFAGMSPSTYQSGQLDNCHSRMEKRGSRYLRYALYNATAYVCLWDPTFKAYLAKKRSEGKHYYVAISHAAKKLIRVIYKLESSGQQYVKAV

SEQ ID NO: 283630 - protein, 455 aa, unidentified
MAKSRVQKRKVVVNALDQINPNAAGIDIGGEEIYVAVPPDRDEESVRCFGVFTEDLERLADWLKACRVDTVAMEATGVYWVPLYEILEKCGIRVFLVNARHLKNVSGRKTDVLDCQWLQQLHTYGLLQASFRPPEQIVAIRSLVRHREMLVQYRSAHVQHMQKALILMNLRLSNVLSDITGVTGMAILRAILAGERDPHKLAEFRDKRCAKSEEEIVKSLQGHYRPEQLFVLKQAVELFDYYAAQIQACDGALETLYCQFDPPENPGTPPPAPRSTARRKNQAHFDLAPALYRMTGVDLTPIDGVDALTIQKVLSEIGTNMSPWPTVKHFTSWLHLCPNNRITGGKVKQTGVQPTKNRATIALRIAATSLKNSDSALGAFFRRIRSRHGTPVAVTATAHKLARVIYFMLKEHKPYHDVGALSYEQAYHQRMVRNLHRQATKLGYRLEPATVMASA

SEQ ID NO: 283631 - protein, 433 aa, unidentified
MHEAEDEPLFAERAAGIDIAKAGIEVTVRVPSETRRGGRQQDTRSFRTTRKDLLALADWLRVWGVAKIGMESTGDYWKPVLFLLESEGFDCVLYHAAQVKALPGRPKTDKPGSAWLAKITERGALPGCFVPPEDIRRLRTCTRYRRHLTQARTAEKNRVEKLLEDAHLKLSSVISDIHGVSGRAMLEAIAAGERNPQTLAQLARGSMRGKIARLAEALDCSFVTEEHAAVLAMMLATIDYYTAQIGELTAKIAVLCQPYEHQIAQLDAVPGTGVITAQDIIAEIGAGMTVFPTAAHLVSWAKWCPQVAQSGGRRKGANASGRGNRYLSAALGEAAVNAGRTQTFPGAKYRRLVKRMPKKKALVATGNSLLAIYYALLSDPAATYTDLGADYYERRASIRRQARNHVRGLERLGYKVTIEPADPAAAATGEPAA

SEQ ID NO: 283632 - protein, 402 aa, unidentified
MKKNTTAKRNQKAVPKRHKNQIRHMAAKQRLTIGLDLGDRNSRYCILDEAGEVVSEGQLPTTKTGFRALFEKMPSSRVALEVGTHSPWCSRHLAGMGHEVIVANPHKVKLITQSTRKNDRIDAEQLARLARVDPKLLSPIRHRGEEAQGDLAVIRARAELVEARTGLINCARGLVKPMGERLKKCDADQVGESLLGGLSDQVGRVVGPLLKSVEGLNEQIAEYDRRIEAVAQRYPEVELLTQVYGVGILIALTFVLTIEDAERFAHSRDVGAYLGLVPKQRDSGDSQPQLGISKSGDRLLRSLLVQGAHCILRKGAPDSDLRAWGMARLPSGDHPGTQPGGGKNAKPQRSGSKRGKRRTIVAVARKLAVLLHQLWVTGEVYDPLYNRKAAMQAGQGKAKVAA

SEQ ID NO: 283633 - protein, 466 aa, unidentified
MKPFYMGIDVSKGYADFMIIDAQKKPVIQSFQLDDTFEGHQALYSIVGRFLAQHPNSMLSAGMESTGGYENNWYNSIVAFQGSLNIQTARLNPLGVKRNSQADLKKNTTDKISAQNIAEYLVAHPEKVTYQKQDQLTGLRKQWGFIQTLTKQRTQFLNQFKGLLYTSNPELLRYCQTETPAWILKLAVKYPSAARLKRAKVKTLSKIPYLPKIKAQQVVIDAKRSVASATDAATEQLVVATAQQIIHLNKTIDGQIRRMIEACTMPEVKLLKTFSGISDKSAIGLIIEIQTVERFKNAKKLASFFGVHPVHKISGDGISGVKMSKQGRKEPRHILYMITLSALKSNPLIKQIYEKLQKNGKHNMAAMGICMHKILRIIYGMLKHNKPFDPRIDIANRKRSAQAKEAAPRKNASRRFQEYDTKAPVSRQQKKKRLERGRSHSVPDTKSGITAPVPETHIITNILSEL

SEQ ID NO: 283634 - protein, 342 aa, unidentified
MMYVGLDVSQKSTAICVVNERGQRQWRGTCPSDPHVLASQLKRRAGADARIGIETGAMTPWLVHGLRQAGLTVDCLDARRVKAALQMRLNKTDQNDAEGLAQVMRTGWYRPVHVKSLDAHRARSLLGARAQLVGMRTRLTNMIRGILKTYGMLPGSGRGLRFDRRVEELIQDDQEVGMVVRPLLETLRHVGEQITTFDKAVLRQVRADPTCRLLMSVPGIGALSSLVYVSTVEDPKRFSRSRAVGAHLGLTPRRYQSGDIDRSGRISRCGDSLARTLMYEAAIVILHRVKRSSQLSEWAQAIAQRAGPGKARIALARKLSVILHSIWRSGEAFRWSAATLPA

SEQ ID NO: 283635 - protein, 375 aa, unidentified
MKNKVRFLGLDVHAETIAVAIAEPDGDVRSLGTIANRAESIRKLVKKLGSVEQLKACYEAGPTGYVLYWQLAELGVACEVIAPTLVPMKAGDRVKTDRRDAERLARSYRSGDLTAVWVPDEGSESLRDLVRAREAAKQDQLRARHRLSKFLLRMGQRPAAGMKAWTAPYMAWVRQVHFTQVAREATMLDYLHEVDHMGERVKRLEQSITEAVKLATPAVQEVVKGLQALRGIAEISAVTIMAELGSITRFDTPRQLMGYSGAVPSENSSGKRKQRGSITKTGNAHLRRIVVEAAWSYRYRPAIGPRLRKRQEGVSEPIKEIAWKAQVRLTKRYARLAAAGKDQRKIVTAVGRELLGFIWAIGIKAEAVSKLQMAA

SEQ ID NO: 283636 - protein, 367 aa, unidentified
MKKVSTASGKATKNFPQPKLTIGLDLGDRSSWYCLLDEVGEVLQEQKLSTTPKAMREVFGTLPRCRIALETGMHSPWVSRVLSELGHEVIVAHARTVRLIGESRKKDDRLDARTLARLARIDPQLLCPVKHRSAKAQADLTVIRARAGLVRARTALVNTARGLAKSYGERLRGCNVRNMNPEKAKGLSAELQRALEPLLAGIESLSERIREYNQRIEQLAQQSYPQVALLKQVKGVGTLIALTFLLTLEDAHRFRKSRDVGCYLGLQPGRRNSGQSEPQMHISKEGDPYLRTLLVQGAQHILGPFGIDCDLRRWGLKLAERGGRNGKKRAIVATARKLAVLLHHLWVSGEVYEPLHNSQQSSLALAA

SEQ ID NO: 283637 - protein, 434 aa, unidentified
MPAAAFRFGETWLGVLMADVMIGIDPHKGSHTAVAIGAGEEPLGELRVDACSSQAEQLQAWAQAWPQRAWAIEGAAGLGNLLAQQLVAAGEQVLDVPPKLAARVRLLQAGDTNKNDPNDALSVAVAALRSKLARPVLADGHAVVLKVWAKRHRDLARLRNQACCRLHAVLCDLVPGGVRREISAGRAARILEQVRPADAVTKARCELAGEFLGDIRRLDAQLRECNKKLAATVRASGTSLTGLFGVGPVIAGTVIGDVRHVFRFPRRDHFASWNGTAPVEVSSGDRRKVYRLSLRGNRRVNHAIHMAAISQIRHKHSDGRAFYEKKLAEGKTHKEALRALKRRISDAIYAALVADARRAASACAKSPGGQPGNHSESRAAGSHPAHRHFGQATPGPATTIRPGANSGRAPIQPNRARRRAGHSPASSKKPRPTT

SEQ ID NO: 283638 - protein, 318 aa, unidentified
MNIIGSDISKDTIDATLHKTNGSIHYIKFKNNDDGLKQFRLWIKGNRIRKVYIGMEATGIYYEKAADMLSSYYTVYVINPLKINDYGKSRFNRTKTDKADSNLIADYIKRHQDTLIPYQIPKNKALQKLINLKNQLQQQQKQIKNRLHSTEEDFIRNIHQDLIDTIQDKMEQVKIAISEQIKKQTDNNHYRNLQTIPSIGKDTASVLYAQLTEKHFKTANQFVSYAGLSPAIIQSGTSVRGRGRLSRYGNRRLKSTLYMPALCAYRFNAFPKLINNLKKAGKPKMVIIVAIMRKLAKPAYYIVKTGQPYDAERHRLNQ

SEQ ID NO: 283639 - protein, 312 aa, unidentified
MTQIICGVDVSSETLDAQVGQDGRYEQFARTAEGIAALAAFCRQNRVELVVMEATGGYEKLPFALLWAEGLPGAIVNPRAVRDFAKAMGRPEKTDRLDAGIIAWYAQVKGIVAQAPASPAQQQLQALVIRLRQLTQAHTVHKNQRRLVGDPAVLALIDEVIALFKRQMREIEQTIAGLFAADPLWHALDQAFRQIKGVADRSVARLMAELPEIGTISNKAIAKLVGVAPIAKDSGKHKGRRPIRGGRAPSRGLLFTIAEIVRRHVPDFAEFHQRLSQAGKAKKVIRIALAHKLLVRLNAKARDARQQLALAA

SEQ ID NO: 283640 - protein, 339 aa, unidentified
MRYYCGIDLHAKQCFLCVIDEEEKILLKKALPNSLELILQLLGAFASKPSVAVESTLNWYWLVDGLQEAGYEVKLAHTLGLHMITGAKVKTDRRDALSLARLLRLGAIPQAYIYPKEKRPIRDLLRTRSRMVSLRANAYGTLRRILMQYGHSLAVIKKFAEEQICRHFDHPAIQASCQLELERVRLYSREIAILEDYILHTVADQPVFDLLQTIPGVGKILALTIYYEVGDIGRFEDPRSFCSYSRVVPGAANSAGVVSRGKGSKQGNPYLKWAFTQAALYAVRFNAGIRKFRQAHLARRRSKSRKIVSLSIVAHKLAIAAYYVIKGQEPFKQELMFGQ

SEQ ID NO: 283641 - protein, 412 aa, unidentified
MKDLLEISCGLDVNKEKIVACILTGPLGKPTRSEIREFSTLIPDMIALRHWIVSKNCHHVAMESTGIYWMPIYEILEDAFSGDITLLVVNARHMKNVPGKKTDMRDSEWISTLLRAGLLNGSFIPEKRIREFRDLNRYRKSVIRDITSQKNRIEKFLQSSGFRLSSFISDIFGASGRNIILHLMEHGQIDKTALDSCLKTKTRNRIDEILMSVNGTLSEHQKAFLRILMTHYDSLKKHLAEIETSLEEDMDPFALQVEQLNSIYGISTTASCAIIAEIGIDMKPFKTAEHICSWAGLCPGNNESAGKRKSTSVTKGNPYIKSMLCEIAWVIAGKRNTYLSAWYWRIKQKKGAKKAIVALARKLLVIIYTMLKQGTLFDESCFETRRKHCEQKQLSRYIRELEKHGYHVEAQS

SEQ ID NO: 283642 - protein, 350 aa, unidentified
MTDRRPTVRLKAMQVMKKIYVGIDISKEKCNLCYRRGLEIVLEEECLNDVKAIKKTFKASFRTLCVSFDEALVCAEYTGRYIYPLTVACQELDLFLWLDDPTRIKNSFGLIRGKNDAIDAARIAEYAYRYDDKAVRYVIAEDAIVSMKNLLSDREFLLVDRKRYQSQLTDQKRYMAPNDFKHKSSRWKKVIKTIDEQIEDIDAEIEALIGANPVLTRQKELLVSIDGIGDRIAINMIAITAGFTRFKDARHFCSFAGLTPYKYESGSSVRSKAKISKRANQTMKALLHLGAVNVATRMKECEYKDYYERKIKEGKHVMCVLNVIRAKLVHRMFSVIRRDQPYTKEYKPTN

SEQ ID NO: 283643 - protein, 410 aa, unidentified
MSRTNDFSVLIGLDWASSKHDVCIQYADGTRELAVVKHSAEAIEQWITELHQQHPGQIAIALELSKGPIVYALQKYSFVTLFPINPTMLCRYRRALSPSGAKDDPTDASIALELLVRYPDKITPLKMADDKIRKLAFLVEERRRLVDEKKRYVNRLINALKQYYPQPLEWFTHRDSQLFVEFITRWPSLDRIKRANPDTIARFLTSRGSFAKLVSPRLEAIKSATPLTYDSVVIESNKLLAITLANQILPIITAIKTFEQEIEAIYHEMPDAALYESLPGVGKCLGPRLLVAFGEDIHRFGSAQEVQKYAGIAPVTERSGKTAWVHWRWGCSKFIRQTFTEWSAKSVLYSYWAQLYYEQQKKKGNSHHQAVRSLAFKWIRILYRCWKTNTPYNETQYLKVLKERNSPLLG

SEQ ID NO: 283644 - protein, 346 aa, unidentified
MNFYTTEHRYYCGVDLHARSMYLCIIDAKGTILLHKNLKTEPAAFLAAIEPYRDGLVVAVECMFTWYWLSDLCSREKIAFVLGHALYMKAIHGGKAKNDRIDSNKLAVLLRGGTFPTAYVYPPKMRSTRDLLRRRMFLTRKRAALITHIKCTFAQYNLPEPEQNVSRVSQREGVAEQLPDPGARRNVQLDLDLLDFYDQTLTKLEQELTVIAKDHDPDSYFRLRTVPGIGRILSLVILYEIHDINRFPSVQDFASYCRLVKPVKESGGKRLGSGGAKIGNVHLKWAFSEAAVLFLRKNEAAKIYRARLVKRHGKAKSLTILAHKIARAVFFILKRRTVFEAETFFA

SEQ ID NO: 283645 - protein, 369 aa, unidentified
MEQVIKVYVGLDVHKDSIAIAVAEAGRSPGRLIGQIAHDVPKLLKALARLGAPDTVHVVYEAGPTGYGLQRALSAKGYRCEVIAPSLIPRRAGDRVKTDRRDCLRLAELSRAGELRAVWIPDRGDEAIRDLSRAREDAVNARTQARHQLKAFLLRHEVRYGGKTAWTKSFYRWLGELNFGDASSQVAFTEYHLAVQAADQRLQRLTKALSASVAGWRFESVVQALQALRGIDVVSAIGLVAEIGDIARFDHPRKLMAYLGLVPSEQSSGDRVRKGSITKTGNAHARRLLTEAAWNYRFTPRIGRAAQARQESLAEPIKSIAWKAQLRLAGRYARLNGRGVHHNKVCVAVARELAGFVWAIAQASGAQPR

SEQ ID NO: 283646 - protein, 298 aa, unidentified
MAESVGVDVAKHTLEWCVGAEGKIQPARNEPRGVAQLVRQLVALDPVRIVVESTGGYERTLVTKLAEAGLPVVVVNPHRVRSFAQGLGILAKTDAIDARLLALFGEKVEPPVRPILQGRARLLADLVARRRQLVSIVVAEKSRRETASAAVRRSIEALLRVLAQQIRELDRRIDAALGEEAESAELAALLQTVPSVGPGVARTLLVDLPELGHLGRREIASLVGVAPFARDSGRMRGLRRIRGGRASVRTVLYLAATNAARFNPVLRALYQRLRQAGQARLRRPGSEAPHHPQRHRPR

SEQ ID NO: 283647 - protein, 353 aa, unidentified
MTSLTDLRDVVDVVIGVDTHVHTHSAAVVDTATGGVLDEITVEATPEGYAELVEFANNHATLRAWAIEGTGGHGAGLSRHLLETSEIVIELDRPKRSARRNGAKSDPLDAIRAAREAMARPRLGTPRSGGERQALSVLLAARRSAINASTEAQQQVFSLVIAAPEPIRLRFRGQKLAAMLNTAANLRVHSSWNVETTSTVVALRTLARRAHAMLMEARELQKAIVAIIRSWRPDLLEEFGVGPIVAATVLCAWSHHGRIHSEAAFAMLAGAAPIPANSGQVTTRYRLNRYGDRHLNNALHTVVQSRIQYQQSTRDYVARRTAEGKTSREIKRCLARYVARDLYRLLESGTTAA

SEQ ID NO: 283648 - protein, 412 aa, unidentified
MEVVYTCCCGLDVHKKSITACVLWAEAKGKSRKEKKRFGTFTHDLLQLADWLQECGVTHVAMESTGVYWKPVWNILAEQFEVLLVNAQHIKAVPGRKTDQKDSEWIADLLQHGLLRGSFVPPRPTRELRDLTRYRVSLAQEINRIANRVQKVLEDANIKLASVATDPLGASGRAILEAMLAGEQNAAQLAELSKGLLRNKIPELMLALEGHVTEHHRFLLQQLYDHLLFTESKRKQIEEEIARRMRPFQAEVVRLCTIPGVDRVTAWGLLAEIGLNMDQFPSAAHLASWACLCPGSFESAGKRLSGKMRKGNVSLRRCLSQAAWAISMMKNNYLSALYRRIAARRGAKRAVMAVAHALLEIAYHLLKRKEDYRELGADHFDRIDVNRIRRSLVRRLERLGHKVTLEPLALTA

SEQ ID NO: 283649 - protein, 388 aa, unidentified
MSQSFDANRSLTALNEDSTLIAVIEMSQATWLIAALVPGLQRQPLKKIDADETALLKLLQRWRDEAGHIGHRIERIAIAYEAGRDGFWLRWLQVRGIEAYVMHPASVAVSREHRRAKTDRLDTELLMRAFLGWLRGEKRHCTMAAIPAVEEEDARRPSRERDSLVAENTRIINRFKAILARFGIRTFKPALRKAVDRLEAVRTPEGMVLPNNTRAELRRLLERLRLVREHIRAIERERLRLLEAAPAEAEDHPPAMVRLLAKVIGIGVETADMLVHEILSRKLRDRRAVARYAGLTGAPDESGKRRREKGLSRTGNGRVRCGMIQLAWRFLRFQKDSALAQWFQARTSDGRSGTRKTMIVALARKLLIALWHLVTTGEVPEGVVLRPA

SEQ ID NO: 283650 - protein, 409 aa, unidentified
MTNTLFVGIDVSKKSNVIRFTDSEGKTLTLFKSPNNHDGANMIIEKLKDTLLYTDFSSVIIGMESTSIYADHLAVFLRNDAFLKKWGVKVHILNAKQVNKFKESYPELPKNDNVDTLVIADYLRFGRIAKEVNLDEKYIALRNLTRARFQAAQNLSREKTRFLDTLFYKFSALDSSKVFSNTFGATSIAVISEFFSVDDINDMPLEELADFIAQKGKNKFADPEQIATELKAAARSSYRLSKTVNDSVNQLLAVRMIGIKSIQQQVKDLDKAIESYMQLFPDILTSIPGIGPVYSAGILAEIADIHRFKNHPALAKYAGITWTRYQSGDFEAANTKLILSGNKYLKYYFLEAANKVRMHDAEFKRYYLTKFKEVPKHQHKRALALTARKLVRLVYSLLYTNRLYISPTK

SEQ ID NO: 283651 - protein, 346 aa, unidentified
MTMLEARRVTGGVDTHLDVHVAAALDPLGGLLGTKSFEVNPVGYRSLLSWLESFGAVGKVGVEGTGSYGAGLARFLRQHGVSLIDVDRPNRAERRRSGKSDPLDAVEAARATLSGRAKSVPKSKDGAVEAIRVLLVAKRSARQARVKAVTQVRHLVITAPDELHRRMKGLSVSALVEEGAKLRPSRSTDPVVAATKAAISSLVHRIQALESELDELAEMINALLVATAPDLLALFGVGPDTAAALLVCAGDNPERLRSEASFAHLCGVAPIPASSGKSIGRYRLDSGGDRQANSALWRIVMVRIAHDPETTAYFERRVKEGRTKREVIRILKRYVAREVYHHLPRG

SEQ ID NO: 283652 - protein, 347 aa, unidentified
MNYCGIDLAGVSSYAFVTDEKGTKLWSGPIATEKVAFERLVKKFAGGGLSIAIEAGNQTAWVHEELVKLGAEVTVVHPTKVKLIAESRRKTDKIDAKILCELLRLNALPHPVHMPGPEARELRGLLVARRQLVSARSKLSNVARGMLRQTGVRLPAGGLSSLAGWKRLLAGGFDQEHLLIIVSAYYDSFRALTKSIRELDRQLAQREKSEPRAQRLKTIPKVGRIASLTFLAAVDDVKRFSSSRKLVGYSGLAPTVRQSGERTEYGAISREGRSELRAVWVQIAHLVARDKTKATQPLRSWFNRVAKKRGKKTALVALARRLLVIAYQLLRTEQDFDVGRLKKKRAA

SEQ ID NO: 283653 - protein, 348 aa, unidentified
MDKITAVGLDLAKQIIQVHGIDAAGHVVLRKAVRRERLLALLAQFPLCVVGMEACSGAHHWARQFKQLGHEPRLMAAEFVRPFRKSLAAKNDANDAEAICTAVGQPNMRFVSIKSVEQQAVLSLHRIRQGLIEERTATINRLRGVLAEFGVVLPQSVPALQRALPTVLADAERLPAVVQRSLQLLLEHLRELELRLAEFDRQIAQHAKSSAPAQRLAALPGIGPLTASAVVATVGNAQDYRNGRQFAAWLGLVPRQYSSGGKCKLGPITRRGDAYLRALLVQGARSTLQAALRRAPARHDRLSAWIVQLAQRVGYHKTLVAIANKHARIIWALLAREQTLDLARTTTH

SEQ ID NO: 283654 - protein, 407 aa, unidentified
MDLLKTVFGIDVSSRKSNVCIMVNGQKVNDYAISNDMVGFNQLLGDLKQVTKPQIIFEATGVYSRRLQAFLDMHELRYVMMNPLEAKRKTKDDLHQNKTDKLDAFYLAKLQSEHPQRLAYVQSKEYQELMANNRIYEQASHDLITNKNRLHKAVQLTFPEIEHLLANPRGKNYWSIALRFPHPDIVLETKEADIIDFLKGLSGIGKKRANDITQSLIRLAKVACPAVKKNSAHVRGLKMAINNILSAEEECQSALQEMAKLAPKRDLEILTSIPGIVENTALRIISELGDIRRFNNPSQLNAFVGVDPQVYESGNLTAHLSISKRGTAIGRKVLYLAINQIQSAKKVGNPCHIADYYEKRKRSSETASHKKAAIASIHKLLRTIFALIKNDQLYSYDVAKHNQRLLS

SEQ ID NO: 283655 - protein, 352 aa, unidentified
MAKVEFNDLMSVGIDIGKDTFHIVGFDHDGQRVLRKQIKRLALVTTFEKLPRCIVGMEACLSAHFVSRTLRKMGFEPRIIPAIYVKPFNKGQKNDYNDAEAIAEAALRPNLNAVSEKSQDQLDLQALHRVRSRLVSRRTATINQIRAFLIEQGITVRKGLRALKNSFETILEERKDEISLRMRKVLIGLYGDWMWMDDRIDTVSKEIEDISRTEENCVNVMTVPGIGPMISTAMVAAVGEGEAFDRGRDFAAWVGLVPRQYSTGGRTILGRITKRGSRYLRMLFVQAAKVILMRPHRWPDFSFGAWLTRASERMHRNKLAIALANKLARMAWSILRHKTAFDAPRDEIMAGV

SEQ ID NO: 283656 - protein, 409 aa, unidentified
MRVIGLDVHRTFAEVVFLQEGVLQSGGRVELTAERLAGFGRSLSPTDEVVLEATGNTAAIVRSLRGYVSKVVIANPLQVRAIAHARVKTDKIDAGILAQLHASGFLPTVWMPDADTEALRRQIARRTQLVRHRTRLKNEMHSVLHAHLIPRCPYADLFGKKGRAWLAQQHLPADELCGLEQRMREFDRHGEDLAVIDRALAQATLEDPRVRRLLTISGVNVTVAISLIAAIGDIGRFRSAQKLVSYFGLNPSVRQSGLTPAHHGRITKLGRSHARGMLVEAAWSASHTPGPLRAFFMRIRARRGMQIAAVAAARKLAIIAWHVLSKDEDYDWVRPALMQRKIRALELQSGRKSEKGGRRGRAYDYNLPVVRAQESVAAEQAERAYERFVANWKTSRPKTRSLHRKIEHQ

SEQ ID NO: 283657 - protein, 368 aa, unidentified
MEVIHPRCAGIDCSKKDAKVCIRIQGQGPRVKTSTVSTWGATTGQILTLREQLVAANVTCVVIESTSDYWKPFYYLLDDDLDVILVNAASVRNLPGRKTDVSDAAWLADLGAHGLVKASFVPPAPVRALRDLTRTRTVITRERTREVQRLEKLLEDAGIKLSAVATDITGVSGRAMLEALISGQRDPAVLAELAQRRLRSKIPALTEALRGRFNDHHAFMTRLFLDRIDAHTADIGRLDERIEEAMQPFRPTRDLLMSIPGFSRIVAEVFIAETGGDMSVFPTAGHLASWAGVSPGSNESAGRVKSTKTRPGNRYLKGVLGNRRALRSPLQEHLLRRQVQAHRHPARPDARHRRHRTRHDHRRPQHAH

SEQ ID NO: 283658 - protein, 414 aa, unidentified
MEQVHDRVAGLDVHRDVVAACVRVAGPRGGVATEKERFQTTTVALERLGGWLADRQVSLVAMEATGVYWKPVYYALESRFEVWLCNAHHVKNVPGRKTDMSDAEWLADVAAHGMIRPSFVPPPPIRELRELTRYRKTQTDARAAEIQRLEKVLQDAGVKLTSVASKVLTQSGRLMVQALIDGQRDPAELANLAKGKLRPKIPELTEALAGHFGAHHAVAARRILDHVDFLNATIAALTEQIDARTEPFQAAKQLLSSVPGFDRLVIDTVIAETGADMSRFPSPGHLAKWAGVCPGNHESAGKRRRVGITPGNNWLRRALIEAARAAARTRGSYFGAQYRQIAKRRGPNKAAVAVAHSLSDLIWHQLTTGECFHDLGDDYFQRRRDPERETRRLVAQLEQLGFHVALTPSRDPAA

SEQ ID NO: 283659 - protein, 351 aa, unidentified
MLIIGVDYHPSDQYIALVDTETGEYGERQLNHREGEAEKFYRELAERKLSVRVGMEATGYSRWFERLLTELGIELWIGDAAEIKTKRVRKQKTDREDARLLLRLLRENNFPRIWVPDPENRDLRQLLWHRHRLVQMRTRIMNQLQALAMNEGQRRKKKLWNEQGRAQLEKLPLAPWASRRRKDLLELLDRMNPTIEELSRGVEQEGRKRPEVRRLMTHPGVGPITALAFVLIIGTPERFPRGKQIGSYVGLIPAEDSSAGHQRLGRITKQGSTLLRFLLVEAAQAAARCDADWRRRYLHLAMRRERNIAKVALARRLAVRLYWMWRNGWEYGQLVKFGSNAGQLGTGHGVN

SEQ ID NO: 283660 - protein, 303 aa, unidentified
MSKDRLDVHLRPSDEAFHVPRDVKGFEALARRFSNRPVALVVLEATGGFESSVAAALAAAGLPLCIVNPRQIRDFARAMGRLAKTDTLDTEVIALFAERIRPPARPLPEPERIHFADLVSRRRQILGMINMETNRRDQAVDGRLIRRLSRHIAFLERELSELDRDIGQAIKASPVWCETETLLKSVPGVGDVTARTLLAQLPELGTIGRHQLAALVGIAPINRDSGLMRGRRSIAGGRTSVRGVLYMAALTAIRRGSSFRPFYERLTQRGRPRKVALVAVMRKLLVTLNAIVRDRTPWRPLTT

SEQ ID NO: 283661 - protein, 338 aa, unidentified
MRLYGGIDLHSNNSYVVVLDADGVVQFRRRFANDLKIILSALSRFRCDLAGIAIESTYNGYWLIDGLQADGHTVRLANPSAIKQYAGAKHSADPEDAEQLATLLRLKALPEGFIYPPADRGIRDLLRKRLRLVQQRTSHILSLETNLARHTGRHPRWSSLRGLEIEELVALGPDTWVQESMATSWAVIGFLEQQIHRIQGKVLREIRPRPVFRALSTVPGIGRVLGPAIVLESGPLERFAGVGNYSSYCRCVPSGRYSNGKRKGPGNAKNGNKYLAWAYMEAANLARRSCPEAERFYQRKLSQTNTVVASKALAHKLARSSFHVMRDGTPFDPKRCFG

SEQ ID NO: 283662 - protein, 345 aa, unidentified
MDHVAIDLGSRESQICVRSSDGQVLKEDRVPTRSLGKYLARRAPSRVVLEACAEAFSVADAALAAGHEAIVVPASLAPSLGVGDRGIKTDVRDARNLSEASCRMSRLPSVHVPTQASRERKSICGVREALVQVRTKLVNTVRGWGRAQGLGTIRSGSVDTFPHRLREHVTERQGEVPAYIKRALISIETLSVQISEADKELEEKAEGDATCRLLMTAPGIGPTASVRFAAVVDEIKRFPGAHRLESYLGLTPGENSSSARTRRTGVTKAGAPKVRWALVQSAWVARRYYKDDPMVVWSFEVEKRRGKRIAVTALARRLAGVLYAMWRDGKEYDGHHATRAPAATL

SEQ ID NO: 283663 - protein, 387 aa, unidentified
MNEHTTHVAMDDSKRTIVLGILRPQATEPELRSIPNEPRHVRRCFERLQREGQVVACYEAGPAGYDLYRQLTALAVPCQVIAPALTPRKPGDRIKTDRRDAAKLVRLFRAGELTPIRVPDEAGEAVRDLVRCREDVQEDLRRWRHRLVKFLARHGRVYRAGRHWTQRHWTWLRGQHFALPALDRTYQEYRWTVEQLLTRRADLDQAIAAVAETEPYRQSVGWLRCFRGIDTLGAMILLVEIGDFQRFQTPRELMAYLGLVPSEASSGERERRGSITKAGNTHARRILVEAGWAYRHPPRLAGSLAQRSQGQPPAIRAQAWRAQQRLHRRYRHLVGHGKRAPVAVVACARELIGFLWAALTQAVPVAQAASRTHPQHGEVSREHVRAS

SEQ ID NO: 283664 - protein, 400 aa, unidentified
MNYFLGIDIAKTNHVASLINNNGDVVIRAIKFTNSNEGFNRLLNTIQSKLGDLSNIEVAMEATGHYWLSLYSALTDNNFNVSVYNPYQIKSYRGAYNNRKQKNDIIDSIIIADYLRVFGSKESKFPEEKLLSLKQLTRFRANIVANVSSLKVQVIGLLDKVFPEYKKLFCDTFGNTSKQLLLNCPTPDNIINISTTKLANLLSKNSKGRFNKDTALHIKEVAKSSFGIKFTTDACSFEIKQLINQIVFLESQIDAVSKEIKELYNKLDSHLLSVPGIGDNLAPIILAEIGDINNFDKPSKLIAFAGTDPSENQSGNKLSSNDKTSKRGSPYLRHAIYTASLVAISNEPELRAYYDKKISEGKHHFVALAGISRKLLTIIYYILKEDRDYIRYDNIKDKLN

SEQ ID NO: 283665 - protein, 354 aa, unidentified
MNQQITTVGTSQPCPALWVGVDVAKRRFEAAVHVPDASRQPATCSFAMTQEAIAQFVGWCQQQMHIHAPGAPLRVLMEATGSYSQQLSAWLVAQCPECQPAIVNPAYIKRFGQSLGLRNKTDKSDARVIAHYGHVRRPAPQAPPSPEMSELRALVRERRCLVETLTAEKNRSGEPCGSGRLCAMRKRRMDLLARQIERLGELMRQTISRSPSLSRDIQLLDSIPGVGFITAVTVLGELGDLRRFADPRQLSAFAGLSPRNYQSGTSVNRPAHICRMGNKAVRAVLHLASRSLIGRSKHQLAHFYEHLVASGKSKLAALAAMSRKMLVLMRAVLIRQSPYCPAPWGCEEVVEKPC

SEQ ID NO: 283666 - protein, 460 aa, unidentified
MSKPILAIGIDPAKRVHRAVGVLFPDEVVFDGELPNALDAIKSLDLRLAELAAAYSAELVYGLEDHRRYGRLLCQVFTERGRDVRVVNPLWTNRQRAFYGQDKDDAIDGRSIAAVVLRRRDQLPLANDFGQLAQAIREAERAVEDLSKKRTELVNRLHLQLSDVYTSVYETYFGKLKSPIALRFFHRFPLPQDLGGQDSVMLSSIILRLANGKVGPHKGKDREKFLQTKAEKILETAASLGRTPRTLALELKAELIRQLCDELLVNHDRVIRLERMLGKQLLPETGQTITTMPGIGTILGATIIGETASITRFRSRAAYAVYNGTAPARHSTGGRERHKARRDCNHRLKRAFWLAARAAVLHDPLAKGYFNQCKSRGLNYNECIKRVARRMSDIVYSLLKSGDAYDRTIVEQAIQKRQEQVANADAAALRKPCPFLTRNTRLPTPRGQLTSGSCGRNVDK

SEQ ID NO: 283667 - protein, 330 aa, unidentified
MKFKNIIGIDTGKNSFDFSFLENGEKKLHGQVENSTKKITAFLLSQKIDFKETLFCMEHTGIYNYHLLDVLQNHGANIWLENPIQIKRSMGLTRGKNDKIDALRISKYAYLHQEKVKLWQPTRLVIENLKLLMGQRSRLNKAKKLIEIPITESKEFITKVQHKILKQNCKSTLAGIKKDLNLVTTQIKEIIETDDTLKELFSYVSSVPNVGLITATAIIVSTNEFKKIETARKFACHAGVAPFEYTSGSSVRGKTRISHMADKELKTVLHLATLSAVSRPGELRDYFVRKVKEGKNKMLVINAIRNKLIHRVFACVRDQRKYIKRDLTIA

SEQ ID NO: 283668 - protein, 473 aa, unidentified
MAVTRTSALNRKQRKELARRLQSADPGLDVMHPNAAGIDVGNSTHYVAVRPDRDPNPIRRFDCFTADLHHLADWLEQCGVTTVAMQSTGVYWIPLYEILDARGLEVYLVNARHTKNLPGRKSDVQESQWLLKLHTYGLLRNSFHPAAAIRVSRTYWRQRADHVRAISTCIQRMQKTLTQMNIQLANVISDLSGWTGMRIVRAILAGERDPQVLATLRHPGIHATRDTIAKSLEGTWQPDLLFVLQQEVTMYDAYQQRIAECDQALEQHLKSFVDKAADTFTEGEQSPATAQTKLRSGPKRRRKAGSHAPQFDLSRELHRISGVDLTRIDGIDVGVAQTLISEVGLDMTRWQDEHHFASWLGLCPDNRITGGKVIRRGTRHVINRAATALRIAATTLLRSQSYLGAQFRRLRGKLGAPKAITAMAHKLAVLVYRMLRWGHEYVDKGMQYYEERHREQQLRLLQKRAAKLGLVVI

SEQ ID NO: 283669 - protein, 349 aa, unidentified
MHARSVVAHALDTITGEILRARLCPDPVEVTRWVKGLPGPAAVIYEAGPTGYGLARVLGSEQIRTVVAAPSKLQRPAGDRVKTDAHDAEHLATLLRLDAFTAVTVPDEATEAARDLVRAREDCRADLMRARHRLSKLLLRHGIVYSGGKAWTGTHQAWLRRQRFDSVLTQAAFDEAYDTVASITARRDRLEQRINVLAGDSQYTTVVRRLGCLRGISTLTGLGLAVEIGDWTRFSGNSIGAYVGLIPSESSSGQSRSQGPITKTGNSHVRRLLVEAAWHHRVRYVPGKTMQDRWDLASPAARARGDLGNRRLHQRWEQFQTRKKRPTVANTAIARELAGWCWSLAVLDP

SEQ ID NO: 283670 - protein, 421 aa, unidentified
MLAGLSVGNMVDDKRIGGSMEADQLWAGADVGKEHHWVCVVDDKGTAVLSRKLTNDEQPIRELIDEIDALGCDVSWTVDLTTVYASLLLTVLADAGKSVRYLTGRAVWQASVTYRGGEAKTDAKDARVIADQSRMRGADLPVLHPDDDLITELRMLTAHRADLVADRTRTINRLRHQLIAVCPALERVAQLTQDRGWVVLLTRYQRPKAIRHSGVSRLTKMLGDAGVRNAATIAAAAVTAAKSQTVRLPGEDVAAGLVADLAGEVVALDDRIKSTDADIEDRFRRHPAAEVITSLPGMGFRLGAEFLAAVGDPTLIGSADQLAAWAGLAPVSRDSGKRTGRLHTPKRYSRRLRRVMYMSALTAIRCDPHSKAYYQRKRDEGKRPIPATLCLARRRTNVLYALIRDNRTWQPESPPITKSAA

SEQ ID NO: 283671 - protein, 363 aa, unidentified
MALLFCGLDVAMDETAICVVDDQGKILLETTCVSDPVAIRDVLKPYLERLRRVGHEAGSLSPWLHPEMLKLGLPAVCLETQHVRAALSAQRNKTDRTDALGIAHIMRTGWFRQAHIKSESCYRLRLLLTQRRNLKAKFLDIENTIRHSLKAFGIKLGGASRGTFDQAVREAVAQDPLTAELMDAMLTARAMLWKQYCRLHDLVVRFVAGNELCRRFMQIPGVGPVTALSFMTAIDDPSRFRRSRDVAAYFGLTSRRWQSGTSIDVQGRISKAGDPDVRRALYEAASALMTRFKRKDKVKTWGQQIAKRSCHRKACVAVARKLAVIMHAMWTDGTFYIGDPAVSAQDMAARTALKDRKLLGAHR

SEQ ID NO: 283672 - protein, 344 aa, unidentified
MKKITTIVIDLAKQVFQVAVYNKHGVLKSNKAMNVKSMMRLVHQHPEAQIITEACGSAHHFARRFIQLGHDAYLIPPHICAKYRTGNKNDKNDTIAIYEAAKNQRTYFVSVRNLIQQDIALLHKLRKGHVDQRTKVANRIRGFAMEYGVSFPLGINKLRQQLPDALENADNELTDIARSSLRGLLDMLLQFDVLEAKVKLQIEQLGKQLKPCKALVKIPGIGWLGATMIYARFGSGEAFKRGRDASASIGIVPSHSGSGGKNRLGSISKRGDTYLRWLIIHGARSVVNNIRDKQDGMSCWIRKQLITKHSNITTVAVANKLIRMAVAILKSGEAYRTPVAQRVS

SEQ ID NO: 283673 - protein, 325 aa, unidentified
MSSHEIVGIDVAARKLVAIGEPAVLAGGYENTPAGRSRLIKALCRSPLPVRVVLEATGIYFLDLAGELAAAGIAVMVVNPRATHHFAEAILQRRKNDPVDAAMLREFGRRMDFVAWQPPRCELFAFRALAREAQALSKAVAAAKNRLHAVTATRLAPDTLIRALEQQITQNQTLIDELIAAALAHSATVPELARLVARTDSAPGFAAKAAVLVVGELAVLPPMTARQWVAQAGLDVREECSGTSLARQPRVSKRGNQRVREALFYPALTAARCCPAATAFVERLVARGKTRLQAIVALMRKLLHGLHAMWRHDEDFDANKLFAQA

SEQ ID NO: 283674 - protein, 350 aa, unidentified
MNYYVGLDVSCKTVSVCILNEKGEVTKEVDLATEPNTIHGFLLGTGLKIEKIGLESGSMTHWLTKGLRECGYEVHPMESRKMAAILATVVNKTDKNDARGIAEALRAGHYKKCVHRSDAAMEMRTALSSRDLLVKQRTQITNSIRGFLKTYGLQFPRGRGLDYVDKITESVKELSEAVRISISSLLACFTAIQKEIKSFDKWLKHQASEMEDAKLLKTVDGVGDITALAFLTEIDEADRFKRSRDVAAYLGLTPSQYSSGETQKQGRISKQGSPYMRFLLIEAATTMLTRCKHWCPIKSWGLKLMQKKGKKKAIVAVARKLAVTMHSMLLSRKTYDRRGRSKRLSEEKAA

SEQ ID NO: 283675 - protein, 341 aa, unidentified
MTIGIDLGDVWSHYCTLSEDGEVVGRGRFRTSPSGVEKWFTDLPPVRIAMEAGTHSIWISEQLQELGHEVIVANVRELRAISHSDRKSDQVDAEKLARYARLDPKILRPIAHRTVAQQEALTLIRARNLIVRLRTAAVNAVRGLAKPCGFRLPASSTLCFAKRCVAVLPPGLAQALGPVLEQIAEMTKKIKHFDRLIKRLTETEYPETQALIQVYGVGQLTALTYVLTLGSKERFQRSRDVGCYLGLRPRRSQSGDRDPQLGITKAGNIYLRSLLVECANHVLGPRGKDSTLRQWGLHLASRGGKQSRNRAIVAVARKLAVLLHRIWITQEPYIPFYAVAA

SEQ ID NO: 283676 - protein, 410 aa, unidentified
MERVIERGCGLDVHKKTVAACLRVPGSHGERVQEVRTFGTTAAELLVLRDWLEAHGVTHVAMESTGVYWKPIFYVLEEAFICVLANAAQIAQVPGRKTDVKDCAWIAQLLEHGLIRGSFVPPAPIRDLRDLTRYRKGIIQERTRQANRLHKVLEDAGIKLASVATDVLGVSGRAMLQALVTGTRDPEVLADLARGNLRKKLPALRQALAGRFRPHHGFLVAQILAHLDYLDEAIDAVSQQLDVVMAPFADEVARLDTIHGVNKRTAEVIIAEIGVDMRVFPTAGHLASWAGLCPGNNESAGKHRSGKTRKGDPWLRAALVEAALAASTRSNRSAFGARYRRIMPHRGHKKAVVAVARAILETAYHLLARQTTYQEPGRDYYERRHAEHVRRRAIQALQRQGYRVTLEPAA

SEQ ID NO: 283677 - protein, 326 aa, unidentified
MSNIQNYAGFDVSKQFFDVCVLSIDGKSTSKQLEYDKQGLSRLTQWLPAGTHCVMEATGPYYLRLACWLHQHGFTVSVVNPLVIRRFSQMRLRRAKTDKTDAKLIAAYAQMETPQSWEPPAQYLVNLQQLDAASEQLQKQCTAWRNQLEAFTASGLMDKPMKKFLTRMITQAEKELLEIQSRIDKIIIEHHQQMLKNLTSIPGLGKKSASVLIMITGGFTRFSDYKKLSAYVGISPRIFESGSSIRGKSRICKLGMSRIRALLYVCAWSAKRCNLACRQLYERLVAKGKSKRLALIAVANKLIKQAFTIAVKNSPYDENIAKNICF

SEQ ID NO: 283678 - protein, 337 aa, unidentified
MNNKFCCGIDVSKKKLDVVLLKEEKFHYKVFENSNEGVILLQEWIKNKLEENAFVHFCMEATNVYHELVAFTLLENKNFKVSVVNPRRVKAFSKVLVNTKNDKTDAKVLAKFCEQQNPRPFTPQSKERRELRDLSRLMDNLVELRIMQKVRLQTFNTEAAARVVKSTIKSIENTIAETEQEIKYYYENYPELKEEYELLNSIPSFGKRVSNVLISEIYKDEYGMYNSKKLTAFFGLEVRETESGSSVWNKPRITKFGNPRVRNMLYMAALVSIRYNLKMSDFYLRLVNKGKPKKLALIAVMRKLLVIACAILNSKNKYDENHISTLKIKKETQKIPA

SEQ ID NO: 283679 - protein, 344 aa, unidentified
MNSLPKSKLDDNISMFVGMDLHKNYLQIAVMNEKGKVLENSRINNSLKLLGKFFDNLNDQKARIVMESSCVWYNIYRYLSEEKRFNVVLSNPIKTRAIASAKIKTDKLDAVKLANLLRGGYIAECYVPNTRIMDLRELVRHRAALVRMRTKLKNKIHSIVLMKGIQISSKHYSFTHLYNEELKALNDYRINGYLHLIESLDSEIKIVSKDIVTQAKEDEMASLLKTIPGIGYYSALLIVSEIGDINRFPDSHHLCSYAGLIPSTHSSGGITYHGSITKRGSKYLRWIMLECVHVHIRTNKNSKISQFYIRLAKSKGKSKAAVATASKLLRVVYCVMKEKRNYQS

SEQ ID NO: 283680 - protein, 347 aa, unidentified
MLHAGLDLSRKKLDICLLSDKGEHLDQLAVPPDVDSLRRLARRVEEVHSGPVCAVVESMTGARLVHDTLEAEGWEVEIADAQKVKGLAPLACKTDKIDSKVLAVLSHRDLVPAIWLPDPRVREERELARFRLHLVKHKSALKNRVHSTLINFGRACPVTDLFGVEGRELLARLEVPEPWRGNVTASVELIDDLERQIEAVNRKLRQSHADHPYIPLLMSVPGIRWVLAFTIAAEIGEIERFSSPAKLAGYTGLCPRVNQSGEKDRRGPLTKHGPTYLRWALLEATMHALRHPAYAERYQRTKRRLGKQRGAKVAQVDIARRLAHAIWHMLSRKEKFAPRGAAFRLAA

SEQ ID NO: 283681 - protein, 358 aa, unidentified
MSNVKSSRLDFTGQSIYIGLDVHKKSWSVSIFSEQFEHKTFTQPPEVDKLVNYLRRTFPGALYHSVYEAGYSGFWIHDRLKEKGIDCTVVNPADVPTKDKERAQKRDRIDCRKLARSLRSGEMEGIYVPSRTKLEDRSLVRTRQGMVRKQTRCKNQIKSMLLFYGIHLSEEVTMSHWSRRFLGWIENIRMERASGDMALRAHLEELKHLRQLIASLNRAILVLARTEEYRVPVALLKTIPGISTLTAMTLLTELYEITRFASLDELSSYVGLIPETHGSGEKEYTGEITQRHHSQLRCLLIEASWVAVRKDPALLMAFHQYCKRMRKTKAIVKIARKLLNRIRYVLKNRMEYVPAVVQ

SEQ ID NO: 283682 - protein, 331 aa, unidentified
MIENYVGIDVSKLSFDVFVRENSAHKQFKNESVGFELFTQWLKKQVGHSLNTVLICFEHTGLYSLPLAMFLETGHIPFAMIPALEIKRSLGITRGKNDLVDSKRIAEFAYRFSDKISTTKLPAADIRKIHSLLTLRDRLMTSMKGYTVSRNEMLRVMQKEDIPKLFSSYESAITSLQDEIGKLEQAIKAIIKGNEQLRSTFELITTIKGIGFIIASFLIVYTYNFTRFVNWRKFACYSGIAPFEYQSGTSVHGKTQVSSIANQQVKRMLHLAAMTAIHFDTELREYYIRRQADGKSKMAIINIIRNKLVARVFAVVKRGTPFVDMKRYAAR

SEQ ID NO: 283683 - protein, 410 aa, unidentified
MNTLYVGIDVSSKNNVIYLMKPDGSKHSNFKVANSLNGSKELVKRIISALNSLELTSLSIGLEATSVYGDNLVYFLREDGSIATYDKQIHVLNPKQVKKFKDSYNDLPKNDYIDSFVIADCLRFGRINKEAYLDDYRYKALQNLTRARYFAVQNLTKEKQRFLNYLFMKYSSMTQEKVFSRKYGTTAFAVYEEFESAEQLAEMDLHDLTEFIKEKGKNRFSDPDAVAKAIQKAARGSYRLPKTINDSVNQVLSISISSMRALEAQIKEFDKAIEEQVKLIPNTLQSIPGIGPVYSAGIIAEVGDINRFKNQASMAKYAGLAWSQYQSGDFEAEHTHFIQSGNRFLKYYLCEGAWSHVCCDTEYKRFYDIKYKEVNRNQHKRALALTARKFARLVYSILKTNQLYKAPVSK

SEQ ID NO: 283684 - protein, 349 aa, unidentified
MGGLAGKEPEMVLHCGVDLHGDNGYYGIVAQDGKRVLGRRLPNDLGMVLGLLEPYRKSLRGGVVVESTFNWYWLVDGLQDHGYRVRLANPAAMEQYSGMKNSDDKSDAFFLAELSRLNIVPEGYIYPAEDRPGRDVLRRRLLLVQQRTAHILSFQSLASRELGGGPTGSQVHEMHPEDVEGFFEDSRLVLMGRTNVEVIRFLTERIRELEKTALKQVALKAEFVKLLTAPGIGRVLALTIMLETGDIRRFRKAGNYTSYCRCVKSKRESNGRSKGENNRKNGNRYLCWAYIEAANFMRRYCPEAKAWYQRKLSRSKRVVAIKALAAKIAKACYFMMRDQVDFDVKKLFG

SEQ ID NO: 283685 - protein, 403 aa, unidentified
MTTFFAGLDWASQTHAVCIIDAQGSVQQHFETDHTAAGLAELRQHLRARGSPPVAIERPSGLIVDTLVEAGFTVIPIHPNVVKATRPRYRSHGAKSDASDAYLLADLLRTDGHRFKPLAPQGDEIRALRALVRGRDDLVATRVQLANQLRSLLESFWPGAAVIFADVDSPIALAFVERYPTPESAARLGPKRLAAFCAQHAYCGRRSAEDLLLRLHQAPAPACGELEADAKGELAKSLARTLSRLVEQIRLLTGRIEHHVASLDDGRIVMSFPRAGRICAAQILAELGSVRERFDSDARLAAEAGVAPVTYQSGKTKAVAFRWACNHRLRAALTCLADNSRHASAWAARVYAQARARGCDHPHSIRILARAWVRVLWRAWTNRKPYDPAQHRAALLAFKTAEG

SEQ ID NO: 283686 - protein, 345 aa, unidentified
MTSNMHEMYVGLDVHKNFIQGCVLDKEGKVILEQKFKNEPHSMDVFLSNVTQDSKVALESCSCWQYVYDYLHDAGYKELVLANPSRVRLIAASRKKTDRHDAKVLADLLRMNMLPESYAPPLETRYERQITRHRLSLVRLRADVKRKINALLLRHGYQHEYSDLFGKAGMEQMYSLDLPMCDRFELDNYLKTIDFLTEKINNTQERVKDFVSYNPQARLLMSIKGIDFYSALMISAEIGDVRRFNSAKKIISYAGLNPSISQSGDKCYVGHISKQGNNNLRWILVECANIAVMHDSRLALFYHKIKKRKNHKVAIIATARKLLTIIYAMLMNNRNYIPQKKCKAS

SEQ ID NO: 283687 - protein, 331 aa, unidentified
MKILDTVGIDMSKLNFDVRIHSTQSYTQFENSNKGFKELLNWTFKNSLFSSENIFFVFEHTGLYSHKLAVYLTEKKVPFALVPGLEIKRSLGLVRGKNDKVDASNIAKYAYRLRDEIKPYELPLEQIQTLKRLLSLRDRIVKQRAGFKASLKEQKLVLLKKENYVLFKSQEKIINYLTKQINIIEEEMMDVIKSDERLDELFKLIISIKGIGKQTALFMIAFTHGFTKFKNWRKFASYCGIAPFPNLSGTSIRGKTKVSNLANKRIKSLLDLCAKTAIQCNPEMKVYYNKRVNEGKNKMSTINIIRNKLLSRIFAVVNRSTPYVDTMKYAA

SEQ ID NO: 283688 - protein, 391 aa, unidentified
MFYIGIDIAKHNHEVSIIDDNGKALGKSFSISNSQKGVDKFNTYLDSFNITSENCVIGMESTGHYWINLFSFLVNLKFNVFVINPIQSDAFRKMYIRKTKNDSKDSYIIAQIMRFGEYSSSNISDENIFALRQLSRYRTSLVDECSSWKRKIISILDQVFPEYSNLFSDTFGVTSKELLSKYPLPENMLELSTEELTNLLNKASKGRLGNEKAQEIKESAKNSFGVSFAKQTFSFQIKQIINQISFIESQLKELDNEISNMLKELNSEITTITGIGDVLGACILSEIGDISRFEKASQLVAFAGLDVAVKQSGEFTGTEMKITKRGSPYLRRAIWLAATVASFKDPALSTYYKSLIARGKKHLTAIGAVSRKMCNIIFSVLKNKKVYTPNI

SEQ ID NO: 283689 - protein, 420 aa, unidentified
MKSASNTLSETPANDVTCGIDWARDDHAVSVVDARDREVARCMVEHTAVGLRELVGFLARRGAGEVAIERPDGPVIDTLLEAGITVVVISPNQVKNLRGRYGSAGNKDDRFDAFVLADTLRTDRARLRPLTLDDAATVTLRRACRARKDLVAHRVGVANQLRAHLRNTFPGAVGLFADIDSGISLAFLTRFDTQDRADWLTPTRLGQWLASVGYSGRTDPTVLHARLLAAPRGATSTDATTQAHVTHALVAVLHTLLAQIKTLTVQISNQLDAHSDQHIFTSLPRSGRVRAARLLAEIGDCRARFPTPESLACLAGAAPSTRQSGKSRSVGFRWACDKQLRDAVTDFAGDTRHANPWAADLYRKAITRGHDHPHAVRILARAWLFVIWHCWQTDTAYDPARHHALQRVLAEQATTQAEAA

SEQ ID NO: 283690 - protein, 392 aa, unidentified
MLRQLQLTAERTVTRAEQTFSLDGRAAIRERPLTASACQGDGVEPSLKEASVEQVTTIGLDIAKHVFQVHGADAAGHALFRRRLTRTRLISFLAAQRPCVVAMEACAGAHYWAREISKLGHHVRLIPPAYVKPFIKRQKSDVADAEAICEAAQRPSMRFVPVKSEEQQANGLVFRARDLLVRQRTQCINALRGHLLEYGYVFPQGVTHVTALVALVEEPQSSLLEGVRTVLKLLVETFTALEGQIAGLDAEINHRSKTDLTARRLMTIPGVGPIIATAVTALVPVPENFSAGRGFAAWLGLTPLQKSTGGKQKLGAVSKRGERTIRRLLIIGASAVVQQASRRGASKGSWLARMLARKPKMLVIMALANKIARIIWALLVKGGVYTAPVVAA

SEQ ID NO: 283691 - protein, 424 aa, unidentified
MGIGGTGIKGGQKMEAAVITAVGIDVSKSKSTVAVRRPGGEIVLRPFEVHHTNSDLKKLTSTLKKLGGDIRIVMEHTSTYWRPIALTLKEAGFFVSVVNAMLIHDFSDNTIRKLKTDRADALKIANYALTFWDTLPPFNNEEETRLLLKMQSRANERITATATALRNVLIALADQTFSGVNIAFAPNTKNANGHEKWVDFFLRYWHKDCVCQYSMEAFTESYRGWCKRKNYKFRTDTAHKIYLLAQEGVATLPKCESTKMLITQACKSLNAVCEAKQSTQLEMQRLAAMLPEYEVVMQMEGAGPVTGPALMAEIGDVRRFKNKKALVAFAGIDAPPFQSGAFESKSRHVSKRGSPHLRRTIFIISNIILTRSNPDNAVYCFMDKKRSEGKHYYVYTVAGSAKFLRVYYARVTEFLRSQPSSDAC

SEQ ID NO: 283692 - protein, 342 aa, unidentified
MSESIYVGLDLGSSRCQQTVLGADGTFRFSRVIPTGEQHLRSAFAKLGADVRVHLEAGELSDWAHSIIKPLVASVTVSHPRDLAWIAKDTNKTDAIDARKLAELLRVNRVHPVYCQTDQRRRTFKQLVAHYEQMSRDQARLKAKIKARLRTCGIIRKDARLFTPEGQAALLAEFADQSVKQMFAQSFAVLNQMLEAQAQAKAAMQIAAEQFPEVRLLQTAPGVGVITACRFVAYVQTPRRFSNKRKLWRYARLGITRRESNGKRLAHPRLDSSGIGSLKDCSRKIFEAARRTKCDNLFKRAFENTLLNTKNAVHARLSTQRKILAVLRAMWLKRQPFRDADS

SEQ ID NO: 283693 - protein, 355 aa, unidentified
MTSTKYIGLDVHKESISIAVLNSAGKVVMECVIETKASTILQFIHGLRGDVHLTFEEGTWAGWLYDLLKPHVTELVVCNPRKNALLKEGSKSDRIDARKLAELLYMSKLSSVYHGEHGLRMLKELSRSYLTITKDLGRVMNRLKALYRGWAIPCAGTQVYAPHYRSEWLAKIHEAGVRRRAELYYQQLDALRLVRQQARKELLAEARKHRATKLLRQIPGIGPLRAAHLVALMQTPHRFRTKRQLWTYSGLGLETHDSAQYRVVEGQLQRSKKPVTLRGLNDNHNHDLKDIFKGAAMRASTAAGPLRDFYEALLAKGRKPTMARLTLARKIAAITLIVWKKEVRFDANYLKQQAA

SEQ ID NO: 283694 - protein, 388 aa, unidentified
MIYVGIDIAKLNHFAAAVSSDGEILIEPFKFTNDYDGFYLLLSKLAPLDQNSIIIGLESTAHYGGNLVRFLISKDFKVCVLNPIQTSFMRKNNVRKTKTDKVDTFVIAKTLMMQDSLRFLTLEDLDYLELKELGRFRLKLVKQRTRLKIQLTSYVDQVFPELQYFFKSGLHQHSVYALLKEAPTPNAIASMHMTHLAHLLEVASHGHFGKDKARDLRVLAQKSVGVNDSSLSIQITHTIEQIELLDSQLFHTELEMANLVTCLHSVIMTIPGIGFVNGGLILGEIGDIHRFSEPKKLLAFAGLDPSVHQSGNFQAKKTRMSKRGSRVLRYALMNAAHNVVKNNSTFKDYYDSKKAERRSHYNALGHCAGKLVRVIWKMLTDNVEFNLE

SEQ ID NO: 283695 - protein, 462 aa, unidentified
MARRKRKNTSSSDALPPQLTTVNLHAAGIDVGAEEHWAAVPPCDDPQPVRRFGANTADLEALADWLWGCDVTTVALESTGVYWIPLFELLETRGFQVLLVDPSKLPRSGRPKTDVHDCQWLQRLHTYGLLSACFRPEEQVVVLRSYLRQRATLLADAARDIQHMQKALTQMNIKLQHVVSDITGVTGLAIIRAILAGERDPMQLARWRDPRCKQDEAAIAAALHGTWRVEHLFVLQQALERYEFQHRQLAACDARIAAHVETFADQSHGAPLPPKRGQRRRHRNRPAFDPREPLYRMTGVDLTRIEGIDETTALIVISEIGLDISKWPSEKHFTSWLGVSPQRRISGGKVLSSRTRPTTNRAAAALRLAAASLHHSQSALGAYFRRMKSRLGTSKAITATAHKLARLLYSMLKHGTAYVAQGLEAYEQQYHERVVKHLSRKARKLGYALVKPGEATVETSLA

SEQ ID NO: 283696 - protein, 343 aa, unidentified
MEQYVGLDVSLEETSLCVVDETGATLWQGKCASTPESIAVVLARRAPEATRIGLESGLLSTWHWHALKALGLPVVCLDARHVKAALSLRLNKTDANDAEGLAQIVRTGWYRQVQVKSLDSHLIRTLLAARAGLVAMHRDIANQIRGALKTFGLVLGKVAAGTFEARVRQLIAGNPLLVEVIEALLKVWRTTGEQLVTLHRRVLRLAQTDETCRRLMTVPGVGAVTAAAFLATVDDPERFRRSSSVGAYFGLTPRSCQSGEIDYTGRISKRGDGLMRSYLFEAANVLLTRVSTWSTLKAWGMRLAKRTGATKAKVALARKLAVILHRLWCDGTSFRWSTQKVSG

SEQ ID NO: 283697 - protein, 344 aa, unidentified
MHKTEAQDQLYGGADLHGNNVFLTLCDQQGKRVMQRRVRSNLKAVTQALEPYEGRVSRLAVESTYNWYWFVDGLRDQGWDVRLANPARMGQYEGLKVTDDASDAGWIAEQLRLGILPESYVYPREVRPIRDVLRRRMLITRQRTQSLLSLQSLFARHGLACPSVYQLKQWTRAEVEALKLDRFTQLQMESLLELVRKQDGLAEWIETAVLKAIQNKAEFERMQQLPGIGAILGMVIVLESGDPGRFASAGDYASYCRTVKSEKRSNQKKKGQNNRKCGNKYLAWAYAEAAVHALIHYPRIAAWYERKKRRSNVPVAMKALAAKLAKAAWHVMGGKDFDEAMLFG

SEQ ID NO: 283698 - protein, 338 aa, unidentified
MLDTTTFIGLDVHARSIKAVSLDVMTGEVRAATFGYDAGAVAGWVRSVDPRARCVYESGVTGFDLQKRLSGLGVDCVVGAVSKMIKPSADRRRKNDRNDAEFLARMLSVGNVVEVWVPDDECEAARDLTRALEDARDDLSRSKQRLSKFLLRHGLVFDERTPTGRRKGNWTRAHWSWIESIRFAERADNDVLAYYVDAVRRAAEEKARLEGLVEAEARKPRWRKRVDSLRCLKGVDTASAADLVFEAGEFSRFRNARSFAAWVGLTPSEHSSGESDRRGAITKAGNKHLRKTLVEAAWHYLTCSGRPKDLAKGQAPDRGARRHAAKGCLLYTSPSPRD

SEQ ID NO: 283699 - protein, 475 aa, unidentified
MGRDSGKQKKENMKALSPEQEAGLKQKAEEISKGLQSYTWRDLETGGKFTHNDKLTFIRDDMLIVGCDIGSERHYARAIDAKGRELSKGAYSFENSAEGFQSAKDWALCLAAQHGKNQIVLGVEPTGHYWFSLAAWMIAKGISVVQVNPYAVKQTKELADNSQAKNDAKDPKLIAELVKNGNYGVPYLPEDVYAELRVLCTLRDQLMEDRVRNMNRLHREMKIVFPEYREAFGKIDGIFTLSVLANAPLPSELVALGEDGVKDIWHAEKLRGGGYKRAKEIVRLAGVSAGLTQGAEARKIAIVSFVGKVMELAAELEEIEAQIALKCREIPRADNILEIHGLGAATVSGILAEMGDIDRFDAAKEIQKLSGLGLVACSSGKHQGQTKISHRGRKRLRYWLFQGALSVVSHNEAFRQIHAYYTTRAENPLKKMQSITVIACKLLRIIFTILKKGVRFDPDKMLSDITRPAPLDAAA

SEQ ID NO: 283700 - protein, 354 aa, unidentified
MSQTLDSKIAVIGIDIGKNSFHIVGQDRRGALVLRQKWSRGQVEARLANLPPCLIGMEACTGAHHLSRKLQALGHDARLMPAKYVRPYSKGEKNDYRDAEAIAEAVQRPTMKFVATKTADQLDLQALHRVRERLVSQRTGIINQIRAFLLERGIAVRQGLHFLRTELPGILAKRTDVLSPRMLRIIEDLSGDWRRLDERIENLSDEIAALARQDKGCERLMTVPGIGPIISSAMVAAIGSGDAFAKGRDFGAWLGLVPKQMSTGDRTILGSISRRGNRYLRTLFVQAAWVVLVKIRPEGWERYGLKSWIEAAKERLHRNVLAIALANKLARIAWAVLHKGRAFECVKTNAPRPA

SEQ ID NO: 283701 - protein, 341 aa, unidentified
MSNANTYIGVDLHKKTCFITIMNGLGKIKKQTEIATDTDKVSKFFKKYNGVNVAVESTMNWIPFYENLESLGCSVVLSNPLQTKAIASARIKNDKVDSKILADLLRTNLLPTAYIQPREIRDLKELVRQRMSYVEWRTRVKNKIHSVLFKNNLKHDFTNLYGQAGMEWIKQLALRDVYQQELDRYLITLNLLDGQIEEISNRIMETAKADYDCKLLMTIPGISYFTALVIKSEIGDISRFANARKLCSYAGLIPSTYASADKVRHGRITKRGSKWLRKSLIDAITSGAKHPSRLCFTYRRLKKSKGTGKAKVATARKLCTVIFAMLSDKQPFREFAPVKQR

SEQ ID NO: 283702 - protein, 331 aa, unidentified
MINKTAPFAGIDVGAEELVLVVRKNATSMKAQKFANTPAERARLVAKLVKLPGVSVCLEATGAYHLELAVALHDAGVRLNVVNPKASHNFAKALMKHSKTDAIDADTLAQYAERMPFTAWVRPSPQAFTLRSFARRINALTRQKAMAKNHLHALSFSPELPPAVWDDVKLAIAQLEKRLAGLSREAQAFIGKHEDLKRVFTLLLGIKGIAQTSAIALMGELLLLPKGLTHKQWVRYAGLDPRAFDSGKSVHKTPRLSKAGNRHIRQALYMPALSAKQHDPYVKAFFQHLIEKGKKPLQALCAVMRKLLHAIHGMLRDNQPFDNTRFYATAA

SEQ ID NO: 283703 - protein, 345 aa, unidentified
MELHTIGIDLGKTVFHLVGLNRRGEVVVRKKFSRRQLLQFTANLQVDLIGMEACGGAHFLGRALCDQGHEVRLMPAQYVKPYVKTNKNDYIDAEAIAEAVARPTMRFVPIKTDEQLDMQSLHRVRERWVMRRTSIVNQIRGLLLERGITLRKGRRYVDAALPGILEDADSRLSGALRGLLTQLKLELDQMAIRIDEADAVLNETAHENEACQRLVAIPGIGPVTATALIAAIGNGAAFRKGREFAAWMGLVPREHSTGGKQKLLGISKHGNSYLRRLFIQGARAVLQQRTKQAPGISAWLAQLAIRAHPNVVAVALANKLARIAWAVLAKEEPYRPQALISLEAA

SEQ ID NO: 283704 - protein, 364 aa, unidentified
MSNNTMRKLTVVRTSPQSLRLEPGEAVHVGVDVHKATYSVALYSDGRGVLTTWVQPARPKLLIERLRPVREAVARVVYEAGPTGFDLARCLRADGYEAQVIAPSKLLAPVGPEAKSDRLDCRRLALLSAKGLLHPVRVPTEQEEADRQVLRLREQLVRKTRSVQAQIKSFLLQHAIAEPAGLGHWSKASIRVLRGLELLPELRFCLDLLLDELAHAREQVKRVTERLKGLAEAERHRAATAVLCSVPGVGPITAATFRLELPEPQRFDDGGQVARMAGLAPQVRQSGETRREGGLLKSGNARLRTALVEAAWRWVAHDESAARRYRGLVANTGSGKKAIVGMARRLGVLLWRLSVRGEPYRAAA

SEQ ID NO: 283705 - protein, 424 aa, unidentified
MKVTYQTCCGVDVHKSFLVATIVKTTGGIEPSYQKKRFSTFNNSILEFKQWLLDNHCHDVCMESTGKYWVPVFNLLEDKINVVIANPKWVKAVKGNKDDTKDSKWIRDLFRLGLVKGSYIPCKKVRILREYTRYRYKLVSCRSSEKNRYQNALTVCNVALDSIVSDIFGKSSTSIIDYLLEQSGTSINHEEIASKLLRSLKSKEDAVIESVEGYQMTDAQKYRMRLVRAHMDYITAEINDVDIMIENMISSNPDFENAVQFLCTIPGVKRDSAITIISETGTDMSQFSSSKRLCCWAGLTPGSNESAGKKKSVRITRAGVYLKPALVQCAHAAVKSDKSPYYKKKYESLVKRRGKKRAIIAIARMILTAIYQMLSTGEQWNPSDLYKIDMPVALVEKQKAKAIKQAKKLLQREGLLPPDEPLAS

SEQ ID NO: 283706 - protein, 344 aa, unidentified
MSEVTTIGLDIAKHVFHAHGADERGGTVFSRRLTRGKLLDFFARHPRCVVALEACGGAHHWARELRAMGHEVRLIPPAYVKPFVKRHKNDAVDAEAICEAAQRPSMRFVAVKSEEQQAAALVFRTRDLAVKQRTQIANAIRGHLAEYGWVAPKGAAHLAMLADLLEDGEIGQTLPEAARPMFAMMIGMLANLDKQIAELDKEITRRAREDEVARRLMTIPGVGPITATAIAAIAPAAETFAKGRDFAAWLGLVPKQASTGGKQKLGAISRMGERTLRRLLIIGASAVVLEASKRGAPAGSWLEGMLARKPRMLVTVALANKMARTVWALLVKREDYRAPVAVAA

SEQ ID NO: 283707 - protein, 422 aa, unidentified
MSYCPVAGIDVSKRFSDMCILSPDNKIFAQEKIYHDETSINRANALLQKAERLFFSKPVIVMESTSHYHLILFQFFSEHGYDVIVVNPLQSNSMKDFSIRKRKTDRVDAFKLAMMYRTKTLRPSQIPQTATRALRQLCRHRAELLNDVSSYKNRLTALLDQTFPGYDKVFSDVGGVTSCAVLARFPTPTILLVEEESELVEVIAAASKSGYGFAKKKAGLLISAAQKAQTLGIHSCADETLIACTIQMLRTLSESVLQIETAIDNLLAQIKEMRNNVSLLQSIPGIGSHSAALLLGEIGDISLFKKPKQLAAYFGLDPTERQSGSFRGTKNKLSKRGSPYARAALHMGVVNSICKRGKDSAANPVLLSYYEKKCKNKPAKVAQAASMHKLVFIIFAVLRDQKPFELKTPEQHAVEQGFVKAA

SEQ ID NO: 283708 - protein, 421 aa, unidentified
MTQPSHDTFAACIGIDWADAKHDLCLQAAGTAKRERFQLEHTPEAIDAWVTTLRTRFNGHPVAVCLELDKGPLVSALRTYDFLVLFPINPLTLARYREAFTPSRAKDDPTDAELQLELLLTHRDKLQPLQPQSPPMRARAQLVEHRRRVVGDKVRITNRLTSTLKNYFPQVLHWFQEKDTRIFCDFLSRWPTLKAAQLARRSTLETFFRDHHVRTADVLATRLHAIKTATPLTTDEGVIAPNTLLVQTLVSQLRVTLDAIEAFDQAIAQRAQHHPDFPLFQALPGAGPVFASRLLVAFGEQRERYASAAARQKYAGIAPVTERSGKKAWVHWRLQCPKFLRQTFVEWTAESMRHSFWAQVSYQQQRDKGNTHQAAVRALAFKWSRILYRCWQERTPYDESTYLQALHRRGSLLIQHRAKAS

SEQ ID NO: 283709 - protein, 404 aa, unidentified
MVKYHIGIDVSKHKHKACIHNLAQDSYSGIFSIEVNRQGFEKLIKTVGKLSINKEDFLIGIEATGSYGDTLSYYLLSRGYKVVGINPYQANQFRKAQGKIAKTDSIDARSLAAQLALENHKALAIPDPVLDNLRELTRFRSDMVRDRTSLVNQLHETLSTLFPEFATVFSQLNSTTSLALLISYPGPEYISRAGEAKIAETLSNASRGRIGKVVAKVLVEAAQSSIGVLQRQPALATKVSILGERLVSLSAAIGRVEKEIADLFRKLPYKPEDFPVGDIPSLATLVSEIEDIHRFSTLKQFLSHFGWCPKSFQTGSYNREHPRMSHAGNRYVRRIIWMLSIVAIKNVPRYRDYFQRRVNEGKSKMHVIVAVARKLLSVLYAIVKKGIPYDPDWEVNRHFAMARH

SEQ ID NO: 283710 - protein, 348 aa, unidentified
MTLVGCDLHSRKLLDTDTGEVLEQELLHEGDAVERFYRGLPRPVTVGIEATGYTLWFHALMQKLEYTLLVGEAAKIRAMVVRKIKTDRRDAQHLLDLLKHDRFPTVWMPDPATRDLRALIAHRVRFVRMRTMVKNGLHAIALNHRVALGPALWTKRGLAQLQALALPPHTAQRCGENLELLTWLTTRIAQLDAQIAAAAAADARAQLLLTHPGVGPLTALITVLVLGPANRFPTSKHVVSYVGLAPAINASADTYHLGKITKQGNALLRWILGQAAPLAARADGELKRSYFTVLHRRGRPKAKVALARKLLVRLSIMLRDQIDYDEFRRRGGARRSQPAWHPVAAPTM

SEQ ID NO: 283711 - protein, 411 aa, unidentified
MKNSLKRYIGLDVHKHYLIALGVDEQLNVVLPARRVELSRLEAWMKKTLSSQDAVALEMTTNTWQLNDELAEYAGSVTVVHPPHVALITRSQVMNDKIAASILARLLAKGLLVGIWVPPQEVRELRGLVAQRRKMTCLATQAKNRLHAVLQRHHLVPPKGNLFQDAQKDWWLGLPLGKLEKVNLQSDLDTLHFAETQRGRLTSMMEEIANQDEDVTRLMHLPGFGVVTTVTVWAAIGDIHRFAEPKYLVGYAGLGARVHDSGKRTRTGRITKAGRRDLRVALVEAAQVAANTHPHWKAELARLEPRLGRNKAIVAIARKLLVIVWYVLSQQATDRFAEPEVVARKYLKFAYKIGKDKRPAGQSAAQFVRQHLDTLHLGTDLVAISWGSKKPIPLPPSALQENQVSDVPNTE

SEQ ID NO: 283712 - protein, 455 aa, unidentified
MYLPDWKWIPIRKGLSLMSNKVIFNLDELFISVGIDVGADFSWMSIALPNQQFVGKPYKILHNSIDSLTTAVSKIKEAEELYSLESRIFLESTGIYHYPLFCYLRDKGFNCSVINPIITKNSTNINIRKVHNDRFDSKKAALVGLKPDLKVSLMPSDLALNCRNLCREYYDLMDNRSAYVNKLQGELRMAFPQYLGIFSKVTINTSLTLLETYTSPSAFLKADKQEIIDIIKSTARFGLTYAQNKYNAIIQAATDANQFGYIIDSNIKRIRLYISFIRKYDEEINSILESLHELVDANEDSDFVKQIHLIETFKGAGFLSAVSIMGEIGDFSAFSKPKQLFAYFGLDPSVKQSGKFEGTKVQMSKRGSAIAKRVIHTLTLQSISISRNREAKNPVLREYYLKKCDSKPKLVAMGAVSHKVCNMIFAILRDNKPFKIIAPQEHIKQYNSAKCDIAA

SEQ ID NO: 283713 - protein, 355 aa, unidentified
MGFLTPLSDKTGRYQVKAGDAQALLDLIERVHARVARQLNRPVEVMSCYEAGYDGFWLHRVLEAHGIHNHVLDPASLQVNRRARRAKTDRIDVDRMLRALIRYLRGEPEACSVAQVPRVEEEDAKRLHRERKRLVVERVQHVNRIKGLCAAQGIYNYAPLRPDRWSQLDKLRTGDGRSLPARLKSEIVRELKRLELVLEMIETVEAERDAIIKDPRSRHLNADKIKMLARLRAIGPEFATSLTGEVFYRKFANRRKLGRYVGLDGSPFRSGSVERDQGISKAGNPVARSMMVELAWTWLRYQPDSALSIWFRERVGNLKGRPRRIAIVAMARKLLVALWRYLETGVIPTGAVLKA

SEQ ID NO: 283714 - protein, 373 aa, unidentified
MSDYSAFVGPDVHKDTIAVAVADAGRTGEVRFWGEIANTPDAVAGMLRKLGGRHPLMHFVYEAGPCGYGLHRQIIATQHHCEVVSPAQTPRKPGDRIKTDRRDAIILARLSRAGKLTSVWVPDTIHEAVRDLIRLRQAMVKDLRAARQRTKSFLLRHGRVFKGTSWKRSHGIWLGNQSFAHPAQQIAFQSYLNAVDQAQARRDEVDVQIRLFAADWSMAPVVEALQALRGAAFITAVTVVCEVGDIRRFAKPRQLMAFLGLVPGERSSGETRRQGGITKAGNVLARAVRIEAAWSCRTPARIGAQMMLRQEGIPQAAKDTGWKAQVRLCGRYRRLMARGRKSALAVTAVARELVGFIWAIAHITEPTGAKGAA

SEQ ID NO: 283715 - protein, 345 aa, unidentified
MKKVIAGMDLHSNNVVIGVMDMDGKRVASRKLPCKLTEVVKFLAPFKKRLEQVAVESTYNWYWLVDGLQALRYPVVLANPAGMTQYSGIKHADDTNDAFFVAELMRLKILPTGHIYDAELRPVRDLLRRRLMLVHQRTALMLSFKSLYTRTTGQEMTLSELKELEIKAAQALYDHPANQLIAGMQIQHIEQLTESIGKIEKVVLSSARELPYYSKLETLPGVGRILGMTMTLEVGEIKRFAEPGNFASYCRTVEAKRTSNSKKKGQNNSKCGNKYLAWAFVEAANFARRYDEQCRKWFDRKAAKTSNIIATKALACKLAKAAWYLMAEGTEYDSKRMFGQPATTK

SEQ ID NO: 283716 - protein, 403 aa, unidentified
MNSVGIDISKGRSTIAVMRPFGEVVISPFEVRHTDSELSELARQLKSLDGETRVVMEATGNYHAPVAKLLHDAGLYVSVVNAKLVHDFGNNELRRVKTDRKDAVKLANYGLDRWLTLPRYIPEEDTRLLLKNCYRQYRQYSKVQTVLKNNLISLLDTVFPNVNRLFSSPIRGDGSEKWVDFVAEFWHCRCVSEKSERAFTSKYLRWCRKHGYNFSEAKAHTIYAEASGHIGVMPKSETTKLLVEQAVAQLRATSTALAALKHEMQTLASQLPEYPAVMDLFGVGPTLGPQLIAEIGDVRRFYSKKALVAYAGLDAPPNDSGDVTGRHKSMSKVGASSLRRTLFLVMSVYLQNAPLDEPVYQFMDKKRAEGKPYRVYMMASANKFLRIYYATVKAYLESLEHTA

SEQ ID NO: 283717 - protein, 385 aa, unidentified
MAQSEDMSKPPTALAQNDTLICVVEMGLKSWLVAGLVPGIERQPLKKLEADESALHRLVLRWKAEAEKAGRPISRITLAFEAGRDGFWLARWLGSRGIEAWVIHPTSIAVSRDHRRPKTDRLDTQMLMRAFLGWLRGEPGHCRMAAIPTLEQEDAKRPTREHETLVGERTRIINRSKSALIRLGIRGFKPGLRKAPERLASLRTPEGVPIPPNTLAEMHRDMARLAVIQSQIAEIAVARLERLEHATDAPHAMIRLLARVIGVGVETAEMLVTEVLSRNLRDRRAVARYAGLTGAPYESGSKRHEKGLAKTGNARVRHGMIQFAWRFLLFQKESALARWYRARTENAKGSRKRMIVALARKLLIVLWRFVTTGEPPEGVALRVAA

SEQ ID NO: 283718 - protein, 341 aa, unidentified
MDIAVLGIDLGKNSCSVVALDSSGKVTLRRRMLRKTIVALTSKLTPCIIAMEACCGAHHLGRVLSAQGHTVRLMSPEYVRPYVKAQKNDDRDAEAIAEAATRPTMRFVALKSEEQLDMQTLHRARDRAVGERTSLMNQLRAVLLERGVIVPQGRAKLRLRVTELLQQSPEQISSRIRLLIEDMLMRWQALDEWIAGFDGEFAAELKRDEAARRLTSIPGIGALNATALVAAIGDAQTFARGRDLAAWLGLVPRQATTGGKPRLLGITKRGSKYLRKMLIQGARAALPTLSRSNTRLGQWLRGLLVRAHSNTVVVALAAKMARTVWALLRYGTTFEPRAIAI

SEQ ID NO: 283719 - protein, 360 aa, unidentified
MAPYWHGCATVGLSEITLEEPFAMQVATIGLDLAKHVFQVHGVDATGKAVLRRRLRRVQVVEFFAALPPCLVGMEACGTAHHWARVIRSLGHEVRLMPPQYVKPYVRRGKNDAADAAAICEAVTRPSMRFVPVKTEEQQAALVMHRTRDLLVRQRTQLANAIRGHLAEFGVIEAQGIWKLGRLRAHLVEEAAVPEVAREVLLLLAGQFDEAERRISEIDARILAWHKASPVSRRLATIPGIGPLIASAIAATVPDAGAFRSGREFAAWLGLVPQQRSSGGKQRLGRISREGDRYVRRLLVVGAQSALIGSKELKASPWVRGLLARCARLKVAVAVANKTARVAWAVMTRDEPYRRAVVPA

SEQ ID NO: 283720 - protein, 341 aa, unidentified
MKNLFIGVDFSKEKVDVAIIFADGLAETASRVFNEFKTTVSGYKQLVKWVEQNSYGIDSSLWLFCGENTGDYSKGLCNFLYGKGYDMWLENAKSIKDASGLRRLKSDRADASMIAEYAMRNYDKAVMYEPLSESLAQLRELFLYRQMVVRHRCSFQVRRGEKRLTMEKSPIKTMISQSGRHIVSELNKEVEKIDKRIAELIKSDEELTEVFTIVTSVPGIGTQNAVCLMVYTDNFSRFNYDSRKIACYYGIAPFGKDSGTSVHSDPRVHYMANRQIKAMLTQAALAAVNFNPIMARYYMRLVERGKKKQVALNNVKNKLVHLVTAMVRNRQLYTPEYKISA

SEQ ID NO: 283721 - protein, 447 aa, unidentified
MKDAAGKILEEGKLRATRPALRQWAGDRTEPWHGAMEATLFSGWIYDTLKPFATELQMGHPAMMKAIGASKKKNDKLDARKTADLVRCNLLPACYVAPTEIRELRRMLRYRNVVVAQAVRMKNKMSGLLMEVGAEYNKQRLHGKKYFTELLGSLEEVPESVKDLLRLSRGALELFETTQKRILDRLQKEPRLVRRLEGLQSIRGVGVVTALSWTLEICDPHRFPSIADAVSYCGLTSALVSSADKQQRGPLSQQRNAHLQTVLIEAAKLAPRWNSQLAAVHEREMNRGNRNPATLAVARKLVAICWQWTKAGNRFRYRHRQRQRQKRRCRPWRKTAPRVHGPLPFPCALDYWERWNSLPYMAALSVRTTIFSAIHRPFLASLDCTTELLFPMCHFHCFEAGRFTQIQSSWTALCCSRKWMSGHADALAEPKMDRFRKIQAPLPCSRR

SEQ ID NO: 283722 - protein, 343 aa, unidentified
MDYFAGLDVSVKDTSICIVDDTGRITREVKVASEPDALLAVLMNASHRFKRIGLEAGPLSQWLFSALAEAGLPVICVETRHMRAVLKAQINKTDRNDARGIAQMMRVGLYRPVHVKTLRSQKLRMLLTHRKLLQSKAIAIENDLRATLRNFGLKVGMVGTARFEARIKELVENVADLVVLVEPLLVVRRVLREQIGALHRRLLAIVRDDEVCRRLMTVPGVGPVVALTYRATVDVPARFRKSKSVGAVFGLTCSRDQSGERDRPGAISRCGDEMMRAMLYEAAQAMLLRSAKWSWLKAWAMQIARRRGMKRAIVALARRLAVILHRIWADGTEFRWTREAAVA

SEQ ID NO: 283723 - protein, 475 aa, unidentified
MNLKGTKKKNQVVTTNIFEQQELLKKAEVIRKNLTASTWHELETNGKFDKNAKLSFISDDMLILGCDIGSETHYLRAIDTRGRELSKSAYPFSNSSEGFQSAKEWAIEIAAKNNKKQIVLGLEPTGHYWFCLATWMIANGISVVQVNPYAVKQTKEVEDNSQLKDDTKDPKLIANLVKDGNFGVPYLPEKVYAELRRLSMFRDQLNEDRIRAINRMHREMKIYFPEYKEALGKVEGTFSLELLKQTPFPEGIQALGEEGIREIWHNAKLRGRGYSRARDIVEYAKGSVGIKDGAEASEMAVKWFVKEIRELDKKLEEIEKLMHEKYQEIPYAKNILEISGIGENTLTGILAEMGDISRFSNAKEIQKLSGLSLVACSSGKHKGETKISHRGRKRLRYWLFQAAKSIVAHAEEYKELHAYYTTRDENPLKKKQSLIVIACKLLRIIFAILTKGVVYDPQKMLKDIRRLEKQEMIAA

SEQ ID NO: 283724 - protein, 428 aa, unidentified
MSQKTSNKKNVNEPEFCAFIAIDWADEKHDISLQVAGKTEKKTRTIEHTPAALNDWVSELRQQFGCGKIAVCLEQSKGALINFLINYDLFVLYPLNPKSLAKFREAFRPSKAKDDPTDTDFILEIITKHRHKLKPWKPDDALIRTLNILAEKRRNAVDRRKMISNQLKSALKAYFPQVFDLISEDLFNNLSCQFLLKWPTLQELQKAKNVTIEKFYHQHHCYGKELINSRIKRIQKAIPLTTDQAILMTSPIEVKMLVHQLQQITDAIDEYNHQLAKLYPQHPYAKIFRSFPGAGPVGSVRLASAFGIDKQRYQSCSDMQIYSGVAPITIKSGNSCWVSARYFCPKYLRQTFTEHAGQSIKYSVWAKAYYTMQSKKGKKHHAIIRALAYKWIRIIFRCWKENKPYDEIIYIKSLQKKKAEILKYIVTA

SEQ ID NO: 283725 - protein, 398 aa, unidentified
MPLHAGLDWGAAGHAVCVLDERGAVRARIECPHTHAGLADLLARPERLGPPPELPIAIERPSGLVVETLVAAGHPVVPIHPNVVKACRPRYRAAGGKSDPGDAYMLADILRTDGHRFAPLTPASDDLKALRALVRGRDDLVAARVGLANQLRALLDGFWPGAAAVFAAADSPIALARYPTPGSAGRLGPKRMRAFMAQHRYCGRRSAEDLLERLRAAPTGLAGDAEADAKGELVRALVRSLASLVAAIAELTSRIEHAVADLPDGRIVMSFPRAGRINAAQILAELGDVRARFQTEDQLAAEAGVSPVTHASGKSRGVVFRFACNRRLRAAVTCWADNSRHACAWAAERYAKARGRGCDHPHAVRILARAWLRVLWRARTDRKPYDPALHGAAVNLAA

SEQ ID NO: 283726 - protein, 417 aa, unidentified
MDSYRIAGIDVHKRMLAVVVADVAAGEGPYEFERREYGTTPDQLEQLRQWLQQTEVRVAVMESTAQYWKPVWRALEGQCELQLAQAQSNRAPRGRKRDFEDAERLVRRLVAGELRLSFVPDRQQRMWRMLTHAKYQATQDRAKTLNQLEAFLEDAGLKLSGFVSTLKGVSSRRILEAVSKGESSPARLAELADPGLKATAAQLEDALRGAATMDPCCRKVLGIFLERLSGAERRIEQLHELTAREMKAHNDAVVRLSEMPGLGVDSAQQIIAELGPEAATFPTAGDLASWIGVCPGANISANVPHGSRSPKGNVAMRRILLVAAEAALKAKGSIFEKTYRRWVTRMKHKEAVWAVAHKMAKIIWKVLHDRVRYEERGLRTNPAAAKRRASRLVAQLKRLGYSVQIMQVKGVGKEAIA

SEQ ID NO: 283727 - protein, 429 aa, unidentified
MKIIYPRVCGIDVHKKFIVAVICISESVEPVYLKKRFSTFHNDLIRFRNWLIQNDCQNVCMESTGKYYIPVYNVLESHISNIVVANPKWVRAVKGEKDDDKDAKWIADLFKFGIVRSSFIPQKDFRILRELTRYKYKLVNMRSSEKNRYQNALTSGNCKLDMVFTDVFGKSASNIIDLILSDNPYTDEDILSKVHRNCKASSDMILDSINGTDLTPVQKARIELVNDHIKQLSSNIQKLDKLIDLMIEPYEDYISFLCQIPGISRNSAITILSEIGVDMNQFTSTRRLTSWAGLTPSSNQSAGKKKSVRISRAGVYLKPCLVEVAHAAVKDKSHPYYANKFNKISKRRGKKRAYIAIARKILVAAYHMLLTGEIWNPADLSEVETPVEQRLKYVKNNLKSDIKQLLDIGLTVEELTLMIQQNANIIATQ

SEQ ID NO: 283728 - protein, 315 aa, unidentified
MDEIIIDKGCGLDVHKETVVACVMGSGIKKEVRTFSTKTNDLLRLKTWLSSLEITHVAMESTGPYWKPVFNVLEDGFTLILANARHIKNVPGRKTDVKDSEWICRLLRSGLLSASFVPPQVIRELRDLTRYRRKLTQALAAEKNRIQKVLEDANVKISSVLSDTFGVSGSQMIEAIMEGKLSEAEIADLAKGKLKSKKEEIREALVGYFHDHHRFMIKASLEHIKHLEKQIEGLDQETKKKLAHYQKEYDLLQTIPGVKEQGAASIIAEIGADMDIFPSEGHLATWAGMSPGNNESAGKKKAERRPTAIRICGQH

SEQ ID NO: 283729 - protein, 361 aa, unidentified
MAKARTLVGLDVHAAKVVAAILDAETGELRFQRLGGESGPVVELCRVLPGPVRATYEAGPTGYGLARGLAAAEVQCLVAAPGKIPRGATDRVKTDRRDAEHLVRLLLAGKLSAVRVPGPAEEAMRDLVRAREDLRVDLMRARHRLSKLLLRHEIRFEGPGKNWTECHLAWLATLEFADLAAQATFDDYRGAVEALLHRRGELERQIEGLIPASAWATEVGRLRCLRGIDTLTAIGLCVEVGDFARFGKAGQLMSYLGLVSSEHSSGESRRLGSITKSGSRHARRLLVEAAWHYRNPPRVGREIERRQQGQPAAAVAVAWSAQRRLHRTHSRMRKRNKRSTVTTVAVARELAGFCWAIAQIE

SEQ ID NO: 283730 - protein, 405 aa, unidentified
MWERGGVYDTDGIGLFLGLDVGKSEHHAHGLTPGGKTVYDKALPNTEPKLRAVFEKLAAKFDTVLVIVDQPANIGALPLAVARDAGCQVAYLPGLAMRRAAQGYEGEAKTDARDAFVIADVARTSPRKLRTLTLAEETEAELAMLVGFDQDLAAESTRTTNRLRGLLTQIHPSLERALGPHIHHPGVLTLLSRYGSPAELAEAGTRRIVKILTPHAPRIAERLAHAIADALAEQTLVVPGTRAAGLVIPCLARQLGETLTQRRTLEDQLNVLLEAHPLSPLLTSMPGIGVRTAATILATIGDAGAFPDADHLASYAGLAPVTKASGTSIRGEHAPRRGNRQLKRAMFLSAFAALSDPESRAYYDKQRRTGKTHTQALIRLARQRVNVLYAMIRDGALYTPRTAKA

SEQ ID NO: 283731 - protein, 443 aa, unidentified
MDQAWPLINPNAAGVDLGSREHWVAVPADRAQQNVRDFGTFTSDLESLADWLKQCGITSVAMEATGVYWIPLFQLLERRGFEVLLVNARHIKNVSGRKSDVLDCQWIQRLHTYGLLGGSFRPADPYCVVRSYLRYRDELVTARSTQTQHMQKALQQMNVQLNQVLSDVNGLSGLTIIEAILKGERNPLQLAALAHRRVKSTPSQIAKALIGDYRAEHLFQLQTAFDLYHTYEAKIATCDEELARELAKLPDRVDVKVKPLPAKTGPKKMDENLRLGLYLKLGVDLTAIEGFGPLVALTVLSEAGPDLGGFKTEKHFTSWLGLCPDNRISGGKVLSCRTRRVVNRLSDVLRLAATTLERSQTALGAYHRRMKAKLGAAEGITATAHKLARILYRLLTHGEAYVRQGMADYEKIHQERKLKSLQKIAKSIGCELIQKHTVAQVVS

SEQ ID NO: 283732 - protein, 358 aa, unidentified
MTHPSVTKASPLFFGLDVGDRVTHLCCVDGERAVVERHRFATTADGVREVFASRPRAKIVLEVGSQSPWMSELLRSFGHDVIVADARRVAQLTRAGRKTDRRDAETLARLLQGMPELLGAVHHRGRQGQADLAVIRARDLLVRTRTSLVQHVRGTLKAAGLRALTCTAEAFNKKARQFVPENLEPALGPILDQLSELETRIRHFDREIERIARERYPAAARLRQVCGVGSLTSLAFVLSVDDPARFKRSRTVGSWIGLCPRVQASGDCDPQLSISKTGCSYLRRLLVQSAHYILGPFGKDGDLRRFGLRLCERGGKAARRRAAVAVARKLAVLLHRLWTTDDPYEPLRNSLRMSAALG

SEQ ID NO: 283733 - protein, 355 aa, unidentified
MTKNTTCETIGCDIGDKTSEICVLRKDGRKVEAMIPTTREGVTKFFKGREAAHVVIEVGAHSRWMSQLIGELGHRVTVADPRRLKMISASNTKTDRRDAELLARLGRADEDLLAPVKHRNNELQADLAVAKARDLLVATRTKIVNHVRGVMKSFGDRLPKCASAAFAQKTPDGVPVLLKAALAPLYEVLEKVDEQIKHYDQVIEQIAERYPDTRVVSQPKGVGTLTALVFILTIGDKDLFQRSRTVGAYMGLRPRKDQSGDGDPQLRITKAGDGFVRRLLVQSANHILGPFGADSDLRRWGLALAERGGKNAKKRAKVAVARKLAVLLHRLWVTGEVYEPVGYHAKQVAARKAAA

SEQ ID NO: 283734 - protein, 317 aa, unidentified
MHIASIGIDLGKTTFHLVALGERNKVLLRKKFSRPQLLAYTANLPASLVGLEACAGAHVLGTALREQGHQVRLIPAQFVKPYRKSNKNDFLDAEAIAEAVTKQNMRFAQIKTQEQLDWQAMHRVRDRLVRRRTALINEIRGFLLERGITFAAQPIHLRKNLPTVIEDAGQNLSPRLRWLLDHMWQEWKQTETEIQAITDEIERISNEDARCRQLRQIPGFGPLVSTATVAAIGNGSAFRRGRDFAAWVGVVPRQYSTGGKQKLYGISKRGNVYLRRMLIHGARSVWFRVKYDTGGFGQWVRRLAQRAPHNKVVSGDR

SEQ ID NO: 283735 - protein, 351 aa, unidentified
MAMVTEVVDAVIGGDTHKDTHTLEMLSPVGATIACLVIDNDKAGFEAAVAWIAEHAPGPRLVVGLEGTRSYGIGLARALTHAGFTVVEVEQPKRQQRRGRGKSDPIDAHLAALRVLRMDAERLPMPRADGDREALRILLVGRRELSDTQTRNKNQLKALLHAGDDVERTLASGHLSDARLSVIIRRRASATETRVQAIRRGEARRLAQTIRDAERELAVNNKQLRQIVESLAPGLLARYGIGPVTAAQAIISWSHVGRCRTEAAFAALAGASPVPASSGKVVRLRLSRGGDRHLNSALHTIAMTRWRGCPRTADYIARRRAEGKGDGEIRRLLKRYIARELFRALNAAAAT

SEQ ID NO: 283736 - protein, 430 aa, unidentified
MSRKKRTHLRGKRGQAFADKIRGVPLDGILCVSIDIHKYFHVVMMHNALGEIVTPTFEIDIFQTGFEQLCRAVDEAIAQTEARVVLTGMEPTSHYFENLARHLRNRPQPVTLINSFAVKENRSQQMMHHEKDDEIDTAAIGDLLRRGEGTPFNPAQGVYLEMQHLDRVRLSKVKIRTMLKNQVIGHLDRIFPGLVIMGETAKARYEPLFATDFWSCQTMQHLIRVCPDPRQLAAMSVPDLIAAFHDHGYAMGPKTARKITAYAQKVLPPDPELIAIRCELLAHDLALLDDVQRHITKLEERLCALLALTPYQFWVRLKGLSAVQVASLAAAIGDPTHYEYAGQVFRRSGLVSGRNDSGTRKRKGKGKHVTKTGDVYLRRSLIGAVATLILHQPILYRYYTELKLSKPAGVARVATARRAIGTTCRVGYPA

SEQ ID NO: 283737 - protein, 350 aa, unidentified
MRFYTGQHGFHCGIDLHAHTMYVCILDAAGEIAFERNLPTTPEAFLEAIAPYREGLVVACECIFTWYWLADLCAKEQIPFVLGHALYMKAIHGGKAKNDRIDAHKIAVLLRGGMLPQAYVYPAGMRETRDLLRRRLHLVRKRGQLLAHLQNLRHTYNRGAFEKRIAYPSNRVGVVAHFAGEPMVQANAALDLSLLDHYDKLLVELERRLVRQAKREAPNGFHLLLSIPGIGKVLAMTIVYEVHDVKRFERVQQFASYARLVKCAKESAGKRKGTGGAKMGNVHLKWAFSEAAVLCVRHSAEAKLLLARLTKRHGKGKALSILAHKIGRAAYYVLLREKPFDPAKFFAHAS

SEQ ID NO: 283738 - protein, 339 aa, unidentified
MRLYTAFDLHSNNSYLGIIDENGKRVYKRKLANDPAVIIESLQPFKADIVGIAVESTYNWYWLVDLLMAEGYKVHLANPAEIQKYTGLKYADDQHDAFWLTEMLRLGILPEGYIYPKEDRPIRDLLRKRGHLVRLRTSLIISLQNIISRNNGIKLKVGDIKVLKTDRVAPLLERNEDLALAGKVSKESIDFLTRQIKAVEAVVEKKLDLREPYDRLQTEPGIGKILGLTIMLETGPISRFAKVGNYVSYCRKVSSKWLSNEKRKGKGNKKSGNKYLAWAFSEAAEIARRYDDNARAYFNRKAQQTNRMVAHNALAHKLARAAYYIMRDGVSFMPEKCFA

SEQ ID NO: 283739 - protein, 372 aa, unidentified
MKTVHTKRTGQAGRPSVGADRCVARVVPSLLPKSSNSCQGYPSPHLSQGRASLEQIKSIKEDCLLEAPLIFVGIDVSKAQLDVAIRPSAQSLSVTNDRAGIKSLIKHLKKLRPQLVVLEATGGLERQVLSALIAGEIPVVMANPRHIRDFAKSIGQLAKTDRIDASVIAHYAEAVRPKPRPLPDEASLELRALSARRRQVVDMIVAEKNRLATASKVVKKRITAHIAYLEQELNDADQDLDRFIEKNAAWKQNQQILCSTPSIGPVSSPTLLVELPELGALDRKKISALVGVAPFPRDSATLKGRRTIWGGRASVRSALFMATVVATRFNPVIRDFYKRLKAKGKPSKVCLVACMHKLLTILNAMIKQNSLV

SEQ ID NO: 283740 - protein, 370 aa, unidentified
MNRLFIGMDVHKEKIVVIGLPEEGSHSVVREEFGGGDLRRLTKRIQALSRSWEVDSCYEAGPSGYGLARIFLEAGIPCRVVAPSLIPRRPGNRVKTDSRDAKELALALRADTLTFVRIPALEEEEARGLIRCREDVARQVRLFKTTVSHWLLNRGQRVPSGTKRWTPAYWKWVRALPLSPMDRTTLDHYLDVVSLLENRRKQVEEQICALAKEDPYRERVKRLIVLRGFSPLAAMRLIAEVIEFKRFRSASSFMKFTGLTPSEHSSGDRTRRGRITKAGNSHLRHVLVEAVQKAHFSANPGRLLLRRWQDVSGPLRRIAVDCLKRLHHKFWALTQRGVPAGKTRVAMARELAGFVWALMTHPEIETPLAV

SEQ ID NO: 283741 - protein, 433 aa, unidentified
MGLIVPTAMHPERDDQPMPYDWFVGIDWGSQQHQVCVLDRNRRLVGERAVDHDGASLAQLAAWLWTLSAGQPQRVSVAIEVPRGAIVEGLVERGFHVFAIHPKQRDRFRDRHSVAGAKDDRRDAFVLADSVRTDRPSFRRLHLDEPQLLLLRELSRAEETLLEEFRRSANRLREQLHRFYPQMLQLCSAADEPWLWDLINLAPTPAHAVLLSAEQVQHVLQAHRIRRVKATEVLACLQARALPVAPGTAEAAQAHCGFLLPCLRVLAEQLQACSQQVGTLLRTMADEPSEGESPSDVAIVQSLPGVGRKITAWLFAEAAQPLAERDYQVLRTHGGVAPVTKQSGKRRQVVMRHGCNPRLRHALYHMARVAMQRDAHFSGVYAALRAKGQRHGQALRNIGDRLLRILMAMLRHRTCYDASWIRREPVGQMGQKM

SEQ ID NO: 283742 - protein, 330 aa, unidentified
MSVFVGVDIAAKTFDLVNRKGGKASKVESFSQSAQGHAKAIKRLQNLKPTLITMEATGIYYFDLAVALVQAGLPVAVINPKSFHHFAKLKLAGSKTDGVDAALLAEYGERIEPSLWTPPDEVRLALRDIGRQINRLTGTRTQAKNRLHALQAKNSTRSLLVEDEQEGIAYLDRRIERLSQAALALIAECETLSRYLTHMCAAKGVGKASALIVLAELCVLPSSLKAPQVSRFAGLDVRLTQSGSSVNRPARLSKAGNAYLRAALYMPAMSAIQHDPRVKAFYDALVSRGKKKIQALCAVMRKYLTGLWACIQTETAFDSAMLFSEEHLKA

SEQ ID NO: 283743 - protein, 427 aa, unidentified
MKDQSGMIVGIDWSADSHTCYDLKADKSFKIPDSVKGYERLLNDYPEAVFVIEEANNRIGDYLLTNKREVYVLPPCRSKEARKYHFSSGAKSDSLDAKAIALTFKEHPSYCLKARYSGVGAKITKLVTMYSIVSKIHSQQCNRLYSVLLRYFPEYLHIMDKQYRSNTSLRILSICPTITEFKKVSNEELRKILNKENYRMTSILRKKLDRIRSEGISWGDTSCEGNLIMFLANQILTLREEQERLREEMGETLENSPYRIILSIPGVKAVIGSYIVKAYLTHDFRSYQEMQKYAGTIPFLFQSGRKSIMLMRKKCDKDLRNMIHIAAFASLKTCGWARNYYKRKRKEGKTYGHALRALGNIILKIAFSMLSKMKEYDETLFLNAKGIKTTQQNNTIIPEAFTNPEYSQDAHPSLAATKDVVENLNVT

SEQ ID NO: 283744 - protein, 361 aa, unidentified
MKKHTQDLIAEAPRGCSQVGMTIGIDLGDVWSHYCTLNEAGEVVDRGRFRTNPSSVDKWFTDLPRVRIAMEAGTHSIWISEQLQELGHEVIVANVRELRAISHSDRKSDQVDAEKLARFARLDPKILRPIAHRTVAQQEALTLIRSRNLIVRLRTAAVNAVRGLAKPCGYRLPASSTLCFAQRCVAVLPPGLSRALGPVLHQIADMTVKIKEYDRAIKQLTETEYRETQALLKVYGVGQLTALTYVLTLGSKERFQRSRDVGCYLGLRPKRSQSGERDPQLGITKAGNVYLRSLLVECANHVLGRHGKDSTLRQWGLSLASRGGKQSRNRAIVAVARKLAVLLHRIWVTQQPYIPFYAKAA

SEQ ID NO: 283745 - protein, 337 aa, unidentified
MKVTLIGIDLAKSIFQVCGVNQAGKPVFNRQVRRAKLMELLLQHPEATIAMEACSGSNYWGRELQNRGYQVMLIPPQHVKPFVKGNKNDRNDAFAITEAARRPNLKCVEPRTLVQTDMIQVHRVLDRMIRQRTALINQTRGFLNEYGVVVAQGKEKLLAAMPDLLEDAENGLTASSRALYQEMYEQWRQANEAIKRLENRLKNQANADEAAQRLMAIKGVAVKISTATIAHAGNGHGYKSGRHFSANLGLVPREYSSGGKQKLGGITKRGNRYLRRLLIQGAWSVIRNADKNNDRLSRWARQLVERRGKHKAVVAVANKMARIMWSMLYHQTEYRAA

SEQ ID NO: 283746 - protein, 386 aa, unidentified
MQKLNDLSRSLTPLKPDRTLIAVIEMSLSSWLVAGIVPGIERQPLKKLEVDESTLLKLLIRWREEAKKSGHSIERIAVAFEAGRDGFWLARWLRARDIEAHIIHASSVAVSREHRRAKTDRLDTELLKRAFLGWLRGERDHCKMVAIPTIKDEDAKRPNRERESLVGEQSRIVNRMKAALVRLGIRGFNPKLKKAVERLDGLRTPEGEPIPPNTLAELRRDMARRRLVSDQIRQIEDTRLERLEQAPSDGPHAMVRLLARVIGVGIETADMLVQEVLSRNMRDRRAIARYAGLTGSPDESGRKRREKGLARSGNARVRRGMIQLAWRFLMFQKDSTLAQWFRARTENARSTRKTMIVALARKLLIGLWRLVREGVVPDGVVLRPVS

SEQ ID NO: 283747 - protein, 415 aa, unidentified
MASLVRWVGRGIGLDVHRGFCVVAICEDGKVRSAGRVPSTPEGLRLLAESLLATDRVALEVTASCWEVARILEPFVGRVIVVSPDDTGIASARAKTDKLDARALASLCWKGELDPVWMPDERCRILRRRLARREQLVHARSRAKNEISAVLARRLIERPPFADLFGVTARRWLAEVDLPVEERESVDAGLRQIAFLDTEIKAVEKLIAQQALAWPEIRRLMTVPGVNLICAATFLGAIGRADRFFTSRKLVAYLGLDPKVRQSGETPARSGRISKRGSASARWALVEAAWSVVKQPGPLRAFYERIRARRGHGKAIVATARKLAVLFWCMLTRGEDYAHQRPALTKKKLRELELTAGAKPRTKAAAGIWSTNRAIRDAERALTLQAEVSYQRMVTDQQAGAPSRKVGASATPERA

SEQ ID NO: 283748 - protein, 336 aa, unidentified
MSYIGVDLHKNNFQVCYINGQQKKFSHYSIHDLEKFKETLNKEDHLAVESTGNTRYFMNQVKEAVGRVVVVNPRQFKVISNSVKKTDKQDAEQLALFLSKDMLPEVRMKDEKRSQLKSLANTRDKLVKLRTALKNKVHNILNAHGIVTPREAFSSNKSLDGLKDYAVNELAHLEIEVIVSQIRSLNEGIKRLDKQIEDAGKDLDGFENITSIKGIGKKSGTILLSIIGDINDFADPGKLASFFGVVPRISNSNENIHQGRITKQGSKLGRTTLVQCTLIAIRYSDYLRSFYERLKLKKGSGKAIIATARKFLDIIYMTLKNKLIFEDFPNFVLKSS

SEQ ID NO: 283749 - protein, 389 aa, unidentified
MKIFVGIDIAKLNHFAAAISSDGEILIEPFKFTNDADGFQLLVSKLESFDKNSIIIGLESTAHYGDNLVRYLVAELYQVCVLNPIKTCQMRKNNIRKTKTDKVDTFVIAKTLMMQDDLRFITFFDLDMMDLKALGRFRQKTIKQRTRLKIQLTTYVDQVFPEIQYFFKSGLHQNAVYALLKEAPSPKEIASMHMTHLANLLKVNSHGHFTKEQAKELRVLAQKSVGANDSAISIQITQTIQQIELLDSQLEKIEAEMTDIMKFNDSVIMTIPGIGYINGGMILGEIGDIHRFSNPNKLLAFAGLDPSVYQSGNFQAKTTRMSKRGSRVLRYALVNAAWNVVRNNATFKAYYDAKRAEGRSHYNALGHCAGKLVRVIWKMLTDEVEFNLE

SEQ ID NO: 283750 - protein, 361 aa, unidentified
MGQVRSWVGLDVHARKVIAVTVDGESGELRSFRLSGRTGEVVEFCMGLPGPTRVAYEAGPTGYGLARALRAAGVGCVVAAPGKIERAAQDRIKTDRRDAERLVRLLMIGGLHAVRVPSSEEEALRDLVRAREDLRGDLMRARQRLGKLLLRHDVRYEETAGAWTAAHRAWLTKIDLGGGAQLTLLDYRGAIDALVLRRDALEARIAELVPGSPWAETVGRLRCLRGIDTLSAVGLCAEVGDFRRFDRPGRLMSYLGLVPSEHSSGEQRRQGAITKSGSRHARRLLVEAAWHYRRSPAKGAGLRRRQEGQPVQIIAISWNAQQRLHRVWRRLDAERGKRRTIVAVAVARELAGFSWALARAD

SEQ ID NO: 283751 - protein, 331 aa, unidentified
MKVKEIIGIDVGKESNEGCIHSSQKFLSFENNNKGFEKFVDWVSKNSGSEEEQLLFAFEHTGLYSFPLAEFLTERNCDFVLLPGLELKRSMGIIRGKNDKIDAKRIAQYTYEKRDSIKPYIMPQEAIVQLKRLLTLRERLVKQCAGYKASLCEYKHFLKKKDNLTLFETQEQMIKYQSKQIEKIDNELSTIIKKSDQLKQMYDLIVSIKGVGPQTALFIISYTHGFTRFKTWRQFASYCGVAPFPYQSGISIRGRTKVNNLANKKIKSLLDLCAKSSIQFNMEMKMYYEKRVKDGKSKMSTINIIRNKILSRIFATVSRGTPYVNTVAYQS

SEQ ID NO: 283752 - protein, 394 aa, unidentified
MAFKIFRKNCCGLDVHKTWIYACMGITDTNGRTEYKQARFSSFTKGLQELADWLAKYDCNDVCMESTGKFWIPVFNILEKTCWVTLAYPKYTKPQKGNKTDHKDAKWICDLYMCDMVNPSFIPPPDIRQLRDLMRYRSKLTNIMTSEKNRALNCLTVSNLKLDDVFSDVFGKSSRSVIRYILEHPGETFQVAPFIDRRCKHPVEEIQAVIDGTISHQQAVKLRECLQHLDELEVHKTNVEKEILCLVQQYPYQLELLQTVPGFSGNIMTAIALISEIGADMSVFPSAKHLVSWAGCCPRNDQSSKKVKSTRISRAGVYLKPLLVQVAIQPFTANADKLSAAGAAEIRCQICDGRFLSMWAALFIFLGCPLPPCQKDLHVHNGRIVILASVAWIF

SEQ ID NO: 283753 - protein, 476 aa, unidentified
MRCRARLGVSTLSLGCSCLRVLCLVGLSGGSCRVLFIGDDWAEDHHDLEIEDQDGHRLARARLPEGLVGITRLHALVAGHAPAVWADPPPEQVAGQVIVGIETDRGPWVTALRAAGYQVFAINPLSAARYRQRHSTSGAKSDAGDAHVLGEIVRLDRDHHRAVAGDSDLADAIKLLARAHQSAVWERTRQVLRMRSTLLEYFPAAVQAFEDLAAPDALALLGRAPDPDRAAKLIRSQLVSALRTGRRHHVEVKADMLLAVLRAPALRQPATLQGAYAAVVTGQVGIIAALNEQLAGLHEVMAAHFGRHPDADIYLSQPGFAVVLAARTLGEFGDDEDRFASSRARKNYSGQSPITRASGKKSVVLARYATNRRLGAALHLQGLRRARRSTWCTGLLRRAPRPRHRPSRSLAATREPTCRHPARLPQDRHRLRREHRLAAPPDHHANRRRLTTFRMGCLSTEAGPGVTGRTGPVLGS

SEQ ID NO: 283754 - protein, 473 aa, unidentified
MGKRSGGSGMTRGDRRRNARRERLRVMLPRDGAVIGIDLAEDKQALAVIDHDVRVIARKTVRVKVFRLGAALDWAVGQARAKGFGQVTVACEPTGPRWLQVQRLCAERGLQLVCIQPLISHIAREQQDFTAHKTDESDCVMIARLAVELHCYVPEELDETWAHLRHLGRRRAQLITAATASAQRIRDFLSAAWPAVPETCARPLESVTWLAALQVVTARCGADPGKLAAMGDQAFTALVRGAVPGWGGQKAHGPISRRVFAALTDTEGVVVSSRRGLLRRVSDELGDLRRTRAQLRAVEADMVAVLDELGLSRLADIPGLTAVGAAAILAETGDPHRYDSSSSLVKHAGMSPSDNASGAFSGQAHISRRGRPSLRLVVWRAVWPMLQFNPVMAAKYQAMTRVTDTAAADAGPQQGTAAAAAARARRAKARVACAASLLRWIYCMVVHDTSWDPAAASGAASRHDTPRTQAEAA

SEQ ID NO: 283755 - protein, 402 aa, unidentified
MNAVGIDVSKGKSMVAIMRPFGEIVSAPFEIKHTASGINSLVELINSVEGESRIVMEHTGRYYEVLAHQLSEANLFVSAINPKLIKDFDNDSLRKVKSDKADSVKIARYALDKWQNLKQYNVMDELRNQLKTMNRQFGFYMKHKTAMKNNLIGILDQTYPGVNTYFDSPARSDGSQKWVDFASTYWHVDCIRKMSLNAFIDHYQYWCKRKKYNFSQSKAEEIYGKAKELVPVLPKDAITKLIIKQAVDQLNSASTTVESLRTLMNETASKLPEYPVVMAMKGVGTSLGPQLMAEIGNVSRFTHKSAITAFAGVDPGVNESGTYEQKSVPTSKRGSADLRKTLFQVMDVLIKTHPQDDPVYQFLDKKRAQGKPYYVYMTAGANKFLRIYYGRVKEYLASLPES

SEQ ID NO: 283756 - protein, 368 aa, unidentified
MVVVVEMGKASWLVRSVVPGVERQPLKKLEPDATALLRLIERWRIEAVRAGQPIRRVALAYEAGRDGFWLARWLIARGIEAHVIHSASVAVSRERKRAKTDRLDTAMLMRVFLGWLRGERGHCGMVAIPTIEEEDARRPSRERESLVNERSRIINRMKSALARLGIRGFKPHLRRAPERLACLLTAEGTSLPANIIEELRRDMARLALVREQISAIEKTRVERLERAPDTGPHAMVRLLSRVIGIGIETADMLVREILSRKLRDRRAVARYAGLTGSPDESGLKSREKGLAKAGNARVRRGLIQLAWRFLMFQKDSALARWYRIRTEGPNGARKTTMIVALARKLLIALWRLVTTGEVPDGVELRPAA

SEQ ID NO: 283757 - protein, 355 aa, unidentified
MSSEKYIGLDVHQATISVAVLEHTGKVVMECILETTAATILEFFAGLRGTLSVTFEEGTSAAWLYDLLRPHVARVVVCNPRKNALLKQGNKSDRIDARKLVELLRGNYLKSVYHGETGVRTLRELARSYLTTTRDLTRVMSRLKALYRSWAIPCGGRDVYYARHRAEWLGKIQHLGVRRRAEHLYQHLDLLKPLRQRTRRELLVESRRYPITRQLRQIPCIGPIRSALLVALIQTPHRFRSKRQLWAYSGLALETRVSAQYCYVQGQLRRSKKLISIRGLNKDHNHDLKGIFKAAAITASARPGPLQDFYQTSLAKGIKPTMARLTLARKIAAITLTLWKKGENFDAEKLKLQAA

SEQ ID NO: 283758 - protein, 343 aa, unidentified
MQIRSVGIDLGKTTFHLVALVDNGKVLLKKKFTQRQLITFTANLQSSLIGLEACSGAHFLGRALREQGHNVKLIPAQFVKPFVKSNKNDFLDAEAIAEAVDRQNMRFVPIKTDDQLDLQALHRVRDRLITRRTSVINQLRAFLLERGLVFAKSPAKLRERMPETLENAEEDLTPRMRNLLALLWNEWKDIEQQVVDLNLEVELIASSDAACLRLRQIPGIGPLVATAIVASIGNGAAFHKGREFAAWMGLVPKQYSTGGKAKLSGISKRGNRYLRKILIHGARAVVLRCKRERVSMGAWMTALEMRAPRNVLIVATANKLARIAWAVLASGQDYRAGQDPVPA

SEQ ID NO: 283759 - protein, 406 aa, unidentified
MAAVMIGVDPHKGSHTAVAIGSAEEPLGELRVRASAAQAGQLVAWATDWPERTWAVEGAGGLGHLLAQQLVAAGERVLDVQPKLGARVRLLTAGDTNKNDPNDARSVAVAALRSAARREVSADDHAAVLKVWSKRHRDLGRTRTQIACRLHAVLCELTPGGISKEITAGQATRVLAAVQPAGAVGAARCELAAEFLDDLRRIDAQMRDTRKRLNAAVRASGTTVTEIFGVGPVIAAIVIGCVVDASRFASRDHFASYNGTAPIEVSSGNRKIHRLSRRGNRRLNHAIHMAAVTQIRHRHSDGRAYYDRKLAEGKTSKEALRSLKRRVSDAIFGRLQADVRQPAATSPEGPGGQPGNDSVASAAGLHPGHRLFGQATPGPGSTLRPATAAKRTVASKRSSTNTRRTS

SEQ ID NO: 283760 - protein, 370 aa, unidentified
MSIRRILAKSIDTNLEYEVIGLDLAKNCVSAVLITTDGEIVGIDRLDYQELEKNAQELSPTTFAMEPCTEMNYLVQRLEGWGHRCLVIGGKNVRDYIESHFSNQKTDLNDAQALAFLTRDTQLRTIKAKDMEQQKYASLTTLREQYIKQYRQSIVSLKGICQAWGLNISKGISGKARLKDLIENHAAFPEELKESLVDMVTHAQTVQRALNKITKTLEVLAKNDKVCQLIQTIPGLGLISCCRLRATIGDIKRFKNPKDFPAYYGLVPRSFATGHNEKKGKITHRGDKTMRSLMVQGAGSVINMANRGKLESKQLTKWILKKQKEKMPWGKLVCAVAAKLLRIVRAVLISRKAYDPKIAGIAKCSLPKGA

SEQ ID NO: 283761 - protein, 345 aa, unidentified
MPIVGGLDIHRKQITFDYLDTATGEVKRGQIAPADRKHVRAWLARFAGRGEVAFAVEGCTGWRYIAEELAAAGLEAYLAEPADTAAARGRKRHAKTDKTDARHLRVLLAEGRLPECWIPPEQILEYRALLETYHDLRAEHTAWLQRIHAVFFHQGAPRLGEGALRTEQDLAALRAAAGAHLSAAGQLQVATALDMLAAVEARLGPLRYQLRDAARHLVGAKVLAARLYGAGPVTALALTCWLGGAGRFSSSRKAVRFTGLDVTVHSSDRKGPPGRLSRQGPPVLRWAVYEAGKTHGRPTAPDHGYYAAVKDRKNGKRAALSEARKIVRQACHILAELGDDALTTT

SEQ ID NO: 283762 - protein, 312 aa, unidentified
MDAIYVGIDVSKDRLDVHVRPREERFAVSRTGAGIAELAERLRPLAPRTVAIEATGGFETVVAAGLAGAGLAVAVVNPAQVRAFAQALGQRAKSDPIDALMIARFAEATQPALRPLPDAMTRRLAALVARRRQIVEMLAAEGQRSRRASERRVSKSIARLYKALEKELVELDADIDDQVRGSPVWLEKQNLLITVPGVGPVIARTLIAEMPELGALDRRQIAALAGLAPFTRQSGQWKGKSFIGGGRKSVRSALFLGAMVAARFNPPLKKFRDKLIASGKPKLLALVAVARKLLTILNAILRNKTPWQPQNA

SEQ ID NO: 283763 - protein, 403 aa, unidentified
MPNIFVGIDVSKDKFDVGIKDERNETVSAGKFYKVNKWGIRKFIANVDDISSELKAKPVFGLEATGIYYLPIYEYLHQVNANVFLLNPLEIKKKDRRMIRKTKTDKLDALFIAESLMLRYLDHHQYKHTGKAAELREYCRIRGRLMGKSVKCKTQASRNLDVLCRGYDRLFTDVFSKSSVAVIKKAIRKTRLFEVSKEDIMDELSNRQTDAWREKKAEAVINVFNGSVLSEDDRDAYITELHMLIQQYDLLQAQIARMDRTIERLVDGLDTRIRTIPGIGPVTCGIIISEIGDISRFKNPQQLVAYAGLDPSIYESGRSKRIGHISKRGSPILREALYHAAFAGVKFNPVLEKYYNRLKGRGKHHKVCVVAVARKLLHIVYSVWKNDRVFYVPENIKKKANTK

SEQ ID NO: 283764 - protein, 338 aa, unidentified
MKISLVGLDIAKSIFHLSAVNQAGKQVKKKVLKRPQLLSFFSQLEPCIIAMEACGSAHHWARQFQALGHQVKLIAPQYVKPFVNGNKNDYNDAQGIAEAAQRPNMRFVPIKSLEQHDIQMVHRLRERLVKNRTALVNQIRGLLAEYGLVINKGVAAVRKELPFILGDAENGITVMARESFFTLHEELKELDEKLQTCEKKIIAINRSHEACQRLDEIIGIGPVTATAIYAAIGHGHDFENGRHFSAWTGLVPKQHSSGGKANLMGISKRGNAYLRTLFIHGARAVLRYAEGKEDSFSRWATSLKERRGSNKACVAVANKLARMAWVVLAKNESYRPAT

SEQ ID NO: 283765 - protein, 354 aa, unidentified
MSAKANTTIPSLTSIGIDIGKDVFHLVGFGEDGQIAFRRKIKRLALAETFRQLPPCIVGMEACLSAHFVSRTLRALGHEPRIIPAIYVKPFVKGQKNDYNDAEAIAEAALRPNLRVVKEKTQDQLDLQACHRVRARLVSRRTATINQIRAFLIEQGITVRTGARSLRNALFEILRNREDEISPRMSNLIVGLYEDWLWLDERIETITRQIEGISRSEVNCQRLMSVPGIGPIISTAMVAAIGKGEAFERGRDFSAWLGLVPRQYSTGGRSVLGRISKRGNRYLRTLFIQAANVILMRPHNWSKFSFGPWLEQATSRLHRNKLATALANKLARIAWSVLRNGRRFDTHRHEVGAI

SEQ ID NO: 283766 - protein, 347 aa, unidentified
MKRIAVDLAKSVYQVAESVRSGQVVQRKRLNREAFRRYIQEQTEPVEWVMEACGTAHYWGRVAQALGHSIKLIHPRYVRPYRRRNKTDRNDCDAMLEAARCKDIYPVPVKTHEQQQVQQLHGLRETWKKSRTQRINLLRGILREAGIEAPVATAAFIRAAHELVERPEVAPLSHQLHIVLAEINLHEQCVAKCEQQLKRWHADDEVVRKLDEVSGIGLLTASALKNAVGKPERFASGRQLSAWLGLTPREFSSGDRRKLGHISRQGNVYVRTLLIHGSRAALLAAQRCQARSPEKLTQLQRWAVETAARIGHNKAAVALANKLVRICWAVWCHERRFSGNWQSLKPA

SEQ ID NO: 283767 - protein, 340 aa, unidentified
MTQYAALIGIDWADSKHDISLIEMATGEQEAAILRHCSKSIDEWATNLRARFGGEQIAVCLEQSRGPLIFALMKYDFLTLYPINPQTLAKYREAFSPSRHKDDVTDAAYLAELLLHHREHLRAWQPDSEQTRTLRYLVEHRRRLVDDRTRISNRLTALLKCYFPQVLGWFPDIRTELVCDFLLRWPSLETLRKVRRATLLKFFRDHNSVRAETLDKRVAAITASQPLVIDRAVINSSAVMCKALVSQMKTTLNAITEFDAEIKAICAVHQDFALFKSLPGAGNIYASRLVVALGSDRERWQSADDVARLSGIAPVMERSGKSCRVRWRYLRSEVPAAKLS

SEQ ID NO: 283768 - protein, 364 aa, unidentified
MMIIGVDYHPSFQTIAFLMEETGECGEQELKHSDGQAEKFYRDLKQRGISVRVGMEATGYSRWFERLLAELGFELWIGDPAEIKAKRVKKQKTDRNDARLLRRLMLENNFPQIWVPSPENRDLRQLLWHRHRLVQMRTRIMNQLQAVAMNEGYRWKKKLFSEQGRAQLEKLALAPWASRRRRELLELLDRMNPTIEELTAAAEQEARKRPEALRLMTHPGVGPLTALAYVLIIGTPSRFHRGKQIGNYVGMIPSEDSSGGKQRLGHISKQGNSLLRFLLVEAAQAAVRNNPDWRRRYMHLAMRRHKSIAKVAMGRRLGVRLYWMWRNGCAYSPSMEFGSYAGQLGTGHGVPYSVVHLIGHPAPS

SEQ ID NO: 283769 - protein, 345 aa, unidentified
MSQQHFVGLDVSVKETAICVVDPQGRVVHRAAVESHPAILSQHLLGLGLTLGRVGLEAGPLSPWLYAGLVEAALPAICVETRHMHAALSARINKTDRNDALGIAQMMRVGLFKPVHVKTPASQQRRLLLTSRKLLQRKVYDIENDLRGQLRNFGLKVGIVGAVGFEQRVRDLVLDLPVIAAVIIPLLAARSALRVQLAKLHKMLLDEVRADPVCRRLMTAPGVGPVVALTYRACVDNPARFSRSKCVGAHYGLTPRLYQSGETARIGRVSKCGDAMMRAALYEAALVLLTGSRRRWSTLKAWGISIAKRRGMQKAVVAVARKLAIVLHRMWRDGTDFRWSPAQAA

SEQ ID NO: 283770 - protein, 365 aa, unidentified
MKEAPVFCERTSVGLDVHARSVVAAAIDGRSGEVFRARLTPSHADVIEWVGKLPGPCAVVYEAGPTGFGLARALSAVGLRCQVAASSKLLRPAGDRVKTDARDALNLARLLRLDEVVPVRIPSAAEEAARDLVRIREAARADLMRARHRLSKLLLRHGIVYYDGKAWTERHDRWLHHQRFDAAPTQSAFEDAYEAVVLATARRARLDEKITALAADSEFSPLTRRLACLRGISTLTGFALAVEIGDWDRFTGASIGAYLGLVPSEYSSGTSRTQGAITKTGNTHVRRLLVEAAWHHRSTYRPGPVLRHRWDQAPAAARARAHAGNQRLHARWVGLNLRRKPAVIANVAVARELAGWCWSLAVLPD

SEQ ID NO: 283771 - protein, 321 aa, unidentified
MLDLAVLGLDVGKFKIAAALLHNGKKRDKVFSNDVDGYAEVLSWLKQHRVSKVHACLESTGGYSEALATVLFDDGHIVSIVNPTRVKAFGKTEMVRTKTDKVDAGLIARFCQLHEPSPWSPLPLKVRQIQALSRRLDSLIDMRAQEQNRLEAPDNVAPVKISLRESIAWLDEQIKEIERQLQQLIKDDPDFRNKRDLLLSIDGIGKRTADRILGEMPNIAEFRNAKAVAAYVGLSPREWQSGTLRGRTRISKMGNSRIRKALYWPAISAMKYNATIRCFAERLLAAGKSSMLVIVAVMRKLICLAYAVVRSGRPFISVQTA

SEQ ID NO: 283772 - protein, 408 aa, unidentified
MIEPQRTVYGGVDTHKDFHVAAVIDEVGRILGTETFPASAAGYRRLERWLERHGQVTKVGVEGTGCYGLGLTRSLTGHGIEVIEVNRPNRQLRRRRGKSDTVDAEAAARAVLNGEATSVPKAADGIVEAIRALRMVFCSTRNTRTRLANQIRDLLVTAPDQLREVLEPLDTDDRVARTARFRCTGDPADPAEATKVALRTIARQHEALTIDLDALRARLDELTAQANPALRHAVGIGPDVASILLVAAGDNPERLTSDAGFAALCGASPVEASSGKHVSHRLNKGGNRNANHALWRIVMVRMTCHQPTKDYVARRRTEGKSQRFIIRCLKRYVARQVHQLLPHPHLATTGREFRDDRRQLGHTQEHVAQELGVDQSRISEIENDRRSAHEIAARYRTWLDTQPATCAA

SEQ ID NO: 283773 - protein, 340 aa, unidentified
MGMNRPAYFIGIDIASETFTASGLTTPEEFVMSGETIPNTPEGFSEFVTKLEEHRITPGNSILVMEATGVYGESLCYFLHEKGYEVAVEPPNAVKKAFRSKRKNDAVDSRQIAEYGYRFFDALRLWKPKADLVEQIRTLLTTREQFTKQCTANQNALRALRRKVVQTPLAIQLLEVHIERLRANIKAIDKAIKALMGQDPTLKEKGQLADKVPGVGLLLTANLMVITCGFSDHVDPKSLAAYIGICPYEYESGTSVKRKSRSDRHGTGRLRKLLYLASLSVRTHNQQFKQYFYRKVAEGKPAKLVLNNIANRLLRIICATVKSGTPFIENYRAVNPVLLK

SEQ ID NO: 283774 - protein, 350 aa, unidentified
MSKQTNAIAISTIGVDTGKNTLHLVGLDRQGMIVLREKLARSRIGTRLANVPSCLIGIEAGMATHYVARELLALGHDVRQVPPAYAKPFRQGHKSDFRDAYAIAEAVQRPSTRCVPVKTDDQLDLQALHRVRSRLVGQRTAVINQIRSFLLERGIAVRQGLRFLRQRLPEILAKRVDVLSPRMIRIVEDLSGDWRRLDERIEHVTEEIEVLAHESESCRQLMTVPGIGPLIASAMVAAIANGAAFAKGRDFAAWLGLVPKQMSTGDRTILGRISKRGNRYLRTLFMQGARVILLRPASWAKHSFGPWLMAGVKRLHHNVLAAALANKLARIAWSVLAQRRNYETRAIVVA

SEQ ID NO: 283775 - protein, 325 aa, unidentified
MFYLGFDVAKAKLDCLLLDTGTGKRKSKSLPNTPAGHAALLAWLAKQQADNVHVIMEPTGVYHEQAALALTDAGVKLSLVNPAQLRQFAQGIGVRTKTDAADSAVLAQYGAAQQPPAWQPPSASVRQLRSLLARRDALAEDLQREHNRAEKATASDTPALVQASLNESIAFLGRELAQLQQAIARHIDDDTDLRGKKELLLSIPGVGERVSDHLTALLAGRTFERAEQLAAYLGLAPVEWQSGTSVRARPRLSKAGPAHLRKLLYLPAVVASRHNPHIKAMYDRLLERGKPKMAAIGAAMRKLAHLCFGVVKTGKPYDPLWASGA

SEQ ID NO: 283776 - protein, 362 aa, unidentified
MNYNQNEKIAQITSQTLIIGVDIAKYKHVARAQDFRGLEVSAPLYFENTNSSFNCFIEWIKNLMGQNKMEKVIVGMEPTGHYWLNLAHFLKEQTIKFVVVNPMHVKKSKELDDNSPTKNDVKDARVIAQLVKDGRYAEPNIPQGVYAELRVARKIRDLLSVDLQAVQGQIHNWIDRYFPEFLTVFKDWEGKAAIQLLKLNLLPHELVNLSEQDILQHLRKAVKRAVGLSKIKELKQVAVDSIGIREGSDMAKLELSTLIDKYELIKEKFEELESNIDKLLEQIPGVEQMLAIKGIGKDTIAGFYSEVGDIGNYTHPRQIIKLAGLNLKENTSGKHKGQTKITKRGRKTLKSTPFSSSNAFSS

SEQ ID NO: 283777 - protein, 331 aa, unidentified
MQNIKRYIGIDISKSSFDACFLSEDGTAVIKHYRYDDADISQFVANVCEDDSCVMEATGTYHLRLATSLYNSEKKVFVVNPLSVSHFSKMRMNRAKTDSKDAATIADYAKTNDGCMVPFVPDAPEYVEVKQLLSLLDLLQKQQTQLRNQEEALKYASVQSKMVKMSIREQKDILARRISKIEKEIGFIIDKHNHDDFVRLQGIPGIGKKTAAVLIATTSDMRKFENSRQVCSYYGLCPRLFVSGSSVHGKSRICKMGMSRIRRLLYMCAWSAIKFNASCRSLYERLVEKGKAKMVALVAVAYKLVKIAFSLIKNQTTYDANFFHKKPCFLT

SEQ ID NO: 283778 - protein, 338 aa, unidentified
MAILYVGIDLAKNVFAVHGVDESGKPALLRPSVSRARLRELIAGLPPCTVAMEACTGAHHWARLFAVHGHTVRLIAPKFVTPYRMSGARGKTDAADAAAICEAVQRPNMRFVPGKSEQQQSQLMVHRARQGYVQARTACINRIRGLLAEFGHVLALKADTVRRQAAGLLEELPGWGNTVIGDLLSELHRLDERITQYDRHIAQIAREDERARHLMQLPGIGTTTATAIVAMIGNGHEFKCGRQFAAWLGLTPGQYSSGGKTRLGRITKAGDGYLRSLLILGGRSVLALAKGKSDAISSWALTLQQRRGYWRAVVAIAAKNARMAWAALSRGENFKMPA

SEQ ID NO: 283779 - protein, 386 aa, unidentified
MSKVWGYSERFWADTMTAMQRAPLVKSWVLDGTNHQEAQDMLYAGLDLSRQKLDVHILDETGRTVDLLAVRPDADALRTLAERIGRYGQPVEAAIESMNGARFVHDTLERFGWDVQIADAAKARGLAPLAAKTDKIDARVLAELARRELVPAIWLPDPSVRAERERARFRLYLVRYRTSLKNRIHATLIAFGQSVPVSDLFGMRGRELLASLPIPEPWATTLRTSLSLVDELEAKIDALEAELRATGAHHRYVPLLMTVPGVGWVLAYTIAAEIGDIGRFAGPKRLTGYTGLCPRVYQSGLSDRRGPLAKTGPKYLRWALIEAATTAARNPHYHDRYERTKRRLGKQRGSKVARVELARELAGAIWYMLTRQEPFRAGGPTSGLVA

SEQ ID NO: 283780 - protein, 335 aa, unidentified
MTAYVGIDLHRRRSVAACLDEEGERLWWRRFENSPLTMAEVVSEAGLAPEVVLEATWGWYWAADVITEAGGRVHLAHPLGIKGFENRRVKNDLADATMLADLLRMGRLPESWIPPASVRELRELVRYRHKLSQLRAGLKGQVHAVLGKEGVIPHLVEMWGPAGHAFLNDTQLGDAYQYRLESLRDLIEVYDTEISQLDARIHRQLGDNVGYRTIQQLNGVGPVHAAAFVAEIGEVSRFTHPKRLCSWAGLTPRLRESDTKTYLGGITKQGSTLVRWSAIEAVSRYHGGAPIRDTYQRVADRRGRNIGRVAAARKLLTLVYYGLRDGEIRCLHEAA

SEQ ID NO: 283781 - protein, 368 aa, unidentified
MTSILYIGMDVHTTNYTLCSYTLETQQSFGRVQVEPDYKQILKYIEKMKEAWGDDIEIVCGYEAGCLGYSLYHSLTDHGVNCIILAPSTMASAPNERKTDMRDAEKIAKCLAYGTYSPVYVPTERDEAVKEYIRMMDAHKANFKRIKQQIIALCYRYGKQYTKQSHWTQAHLAWLKSLRFNSPILQETFEELMIQYYQAAEKLDHYDKRILELSGKEEYAEKVHKLVCFNGVREHTALSAIVEIGDFNRFPSADHFAAYLGLVPGEHSSSTNVRRTGITKKGNSHLRTLLTESAQCYSRGQIGRKSKALKARQEGNDPAVIAYADKANERLKRKFKRIAFTRPHNVAATAVARELACFIWGMMTGHIN

SEQ ID NO: 283782 - protein, 349 aa, unidentified
MKRTTIGLDIAKRVFQAHAVDPESGEVRRTKLQRSEVLRHFAQLRPSLVAVEACGSAQHWAREIRKLGHEVRLISPQFVRPFVKTNKTDAADAQAIWTAAQQPEMRSVAVKTEEQQAVLALHDIRTRLQKSRTAAVNQLHGLMGEFGVELPRGWRTMLPQAATALDSASSPVPALLQPQLHFQLMEIRSLTARITEVEGHISAWMRRREDCERIAAIPGVGLLTATAAVATIGEARTFRSGREFAAFLGLVPRQSGTGGRVRLLGISKRGDRYLRTLLIHGARAVISVRKGKYATDPKTWLDRLLQRRPTNVAAVAQANKTARQIWALLAHGRIYEPRHGVLEAAATPA

SEQ ID NO: 283783 - protein, 445 aa, unidentified
MRVMVKCGAGIDVHKRDVVVNCRRVEGKEVDTETRTFGTTTPELLQMSDWLASWGVTDVAMESTGVYWHPVYNLLEGSYTVVVVNAKHIKHVPGRKTDVKDAEWIAELLSYGLLQASFVPEKRQRDMRDLTRYRTKLVQERAREVNRVQKLLEGANIKLASVATDVLGVSGRLMLEAMIEGDASEKEMAEMAKGRMRSKIPELEKALTGIVSEHHRFILGEQLAHIDFLDGQIANISQEISVRLEKMSQQQLPPAPAAGSGKEEGTEETEEAGTSLTWQTAVELLDTVPGINQRSAEAILAETGIDMGQFPEDKHLTAWAGLAPGNNESGGKRYSGRTRKGNQTLRTTMIQVAHAARRKKGSYASVLYKRLVGRRGKKRAIVAVARSLLVSIYHMLTHQEAYQDLGSDYFQERRKESKVDYLTRQLSKLGYEVQLMPQLDPIPAG

SEQ ID NO: 283784 - protein, 321 aa, unidentified
MSGYLGIDVSRDELVVAREGVAGSKIYGNDERGQSDLLKELTKKGSTPPSLIVLEATGGYERGVVATLGGAGLPVIVVNPRHVRDFAKATGKLAKTDSIDARVLADFGAMVKPELKPLPSEAEEELRDLLTRRQQLMQMLVAEKQRLHQAVGRRSQKLRREVRSHVADLERRLRMTDGDLDDNIRNSPMWQEERDILQSMPGIGKQTSLMILGELKEIGSIGAGQIASLAGLAPMNRDSGKQRGKRRTGGGRVHVRSALYMATLAAIRCNPVIKAYYDRLVAQGKPKMVALVASMRKILVTLNAMIKTKTRWQAQMSPTTA

SEQ ID NO: 283785 - protein, 346 aa, unidentified
MEHYVGLDVSLKLTAICIVDRTGKIEREGVVPSDPEAIAVFVKSHAPHVVRIGLETGATSTWLWTELRELGLPVICIDARHAKAALKMQINKSDRNDAVGIARIMQCGWYKEVRVKDLDSHAVKALLVSRALLVKIKRDLENQIRGLLKNLGLVIGRAKMNVFAVRTAELIDNRPALATAVVPLVKAREAIERQIADLDRKVLLLARKNAQVRQFMTAPGIGPVTALCFLATIDDPTRFKRSRSVGAYLGLTTRRFASGEIDWTGRISKCGDKMLRSYLYEAANVLLTRVAKWSALKAWGVRVAKRCGLRKAKVAVARKLAVILHRMWIDGTEFKWSSKETSNQPA

SEQ ID NO: 283786 - protein, 347 aa, unidentified
MEKIARIGVDTSKHVFQLHGVNSAEQTVLKKKLRRSDMVPFFKALAPTVVALEACGASHHWARLLGSLGHEVKLIAPPLVRPYVKRGKNDAADAEAICEAMSRPTMRFVPVKSSEQQASLMLVGVRQQLVRMRTQLANAIRGYAAEFGLITPRGMCKIEPLLDRVAGDPDIPELARDLFALQAQQYAALQEKLETLEAKLKAWHRANECSRRLAEIPGVGPIGAALLQMKTPAPQLFASGRQFAAWIGLTPRDHSTAGKAKPGAITRAGDEMLRANLVSGATALLRQVRAGQIRSAPRWVVGLLQRKPPKLAAVAMANKIARIAWKLMISGDRYVREAAPAGAPAAA

SEQ ID NO: 283787 - protein, 349 aa, unidentified
MKIIGCDFHPSYQQITVLDSVTGELVEKALSHERKEEVRAFYAGLKGPVRVGIEASGQSQWFERMLAELGQEVWIGDAAKIRASCERKQKTDRRDAELLLRLLEEDRFPRIWVPTAAERDDRQLLLHRHKLVRMRTQVKNQLQAQALNQGVQRKRKLWSEAGRKQLESLPLLPWASRRRAELLQLLDQLEASISELDRAVAEQASARPAARRLMTHPGVGPVTALAFALTMGPAERFQRGKQVASYLGLIPSEHSSGGRQQRLGHISKQGNPFLRGLLVEAAQSAVRYEPEMRRAYQRLAQRKCRALAKVAMARKLAVRLYWMLRLQVNYAQLIQGSHAGQPGTFCGRG

SEQ ID NO: 283788 - protein, 348 aa, unidentified
MAHFVGLDVSVKETSVCVVDDAGKVIWEQKVPTEPADIIALLNSLGVTFGRIGIEAGPLSQWLVNALTAVELPVICVETRHMKALLTAQQINKTDRNDARGIAQMMRVGLFKPVHVKTLAAQEQRMLLTSRKLLQRKLLDVECDLRGTLRNFGLKVGVVSCSRYEVRIRELVESFPRLAAIVGPLLAVRRVMRQQLAVLHKMLLDTVRGDPVCRRLMTAPGVGAVVALTYRATVDQPQRFVHSRAVGAHVGLTPKRYQSGETDYDGRVSKCGDALLRTMLYEAAHSLLTRSGKWSWLKAWGVRVAQRRGIRRAIVAVARRLAVILHRMWVDGSEFRWSKDSTAVPAVA

SEQ ID NO: 283789 - protein, 348 aa, unidentified
MRFYTKQHKYYCGIDLHARSIYICIVDEQGKTVFHRNRKASAEALLKAIEPFREDIVVAVECMFVWYWLADVCAKEKIPFVLGHALYMKAIHGGKSKNDKIDSKKIATLLRGGNIPMAYVYPRKMRSTRDLLRRRNHLMRKRSELLAHIQNTNSQYNLPEFGKKLAYKANREGVAEHFPDPSVSKSIEVDLQLLDFYDQLLNDLELYIVKKAKVDDAYSWYRLRSIPGVGKILGLILLYEIHDIKRFPRVQDFVSYCRLVKCPKESAGKKFGTKNSKIGNAHLKWAFSEAACLFLRGNEQAQHYHARLVSKYGKGKALSILAHKIGRAAYFMLKRKEPFSMKVFFNET

SEQ ID NO: 283790 - protein, 364 aa, unidentified
MNLGPDSRLTSIVKVVRLSSSPFFIENFKDKNMENFYFIGVDVSKKKLDFCVMFEGKVVHEEETANHQNAIMALLHQFEEDYGIAGGQMLVCAEHTGQYTFPLACACKAVECKLWLENPAEIKYSSGVQRGKNDKVDAKRIAIYAKRFQDRVQYYERPTEDIERLKQLESERTLYVTDLAKYKGQMKDQKDYMPRKLYERKMKRLQTLMDDLEKAIQAITYEMDEVIASCPVLCRQRELLMSIDGVGRVVATNMIITTEAFTRFDDPRKFNCYAGVAPFSYSSGSSQHSKARVSHRADKVMKRLLHLAAVAVTHRIGGELKKYYERKVAEGKNKMSVINALRAKIVARMFAVIKRNEKYKPILS

SEQ ID NO: 283791 - protein, 394 aa, unidentified
MKLVGIDVGKNSHHFCVMDKETGEFNVAPSSFSNNKEGFDFLINSLKPYSKKSILIGMEDTGHYHVALLKFLLSNGYTVALINPKTTDLTRKMEGGITKNDKLDTITICDVLDTPERKKQYRITKVDRFDLYEQRQLTRHHHNLKEELNIYCNRLQKSIDLVFPEFNTLFSSKYGIVYMNLLKTFGSAEIIASTDIRTIRKCFEIKGRGGRISLTAEKLKECAKNSIGISSEVETIQIKHLVSQISLIKEQIAEIDKKIEEFSIKNNSPILSIPGISHFSGTSILAELGDIGNYSKPSQIIKFAGVAPYHYESSQYNAQHTAITKKGSKYLRKTLYQIILPVINNNPVLKKYYLLKISQGKGHRCAQGHCIRKLLRIIYHLLETGQSFNPALLR

SEQ ID NO: 283792 - protein, 422 aa, unidentified
MVLKGVPMALKIVYQICCGIDVHKTFVVACIASTNKQGVTTYKRHRFSTFTQGLKELLQWLLDNHCKDVCMESTGKYWIPIYNVLEKDCNIVLAHPKYVKAIRGKKTDKKDAKWIADLFKHDLVAGSFMPPADIRQLRDLMRYRFKLTCFMSSEKNRLQNCLTVSNIQLASVVSDTFGKSSQRILDKILENPDDTSFDIEPLIHGSMKKKLPELELAIDGFITPEQAGKLKVIKKHFEDLESRKAELEKLILALACPYQQELDLILTAPSFKNKFTAIGIISEIGVNMEAFPSAKHLCSWAGLTPTNNESAGKKKSVRVSKAGCYIKPLLVQCANSVVKSEKHPEIRNRYLRLRKRRGHKKAIIAIARMLLTALYNMLKNKEPYNAELYRKSDVLPVNREITIEQAILMAQFQGYKIKSAAE

SEQ ID NO: 283793 - protein, 391 aa, unidentified
MLNDAPLPAQAAIRTDLGAIFVSMELSRRTWLITSLSPGAGEKMSKHSVPASDVPGLLHRFAELKRKAAARSGRDFPIIVIQEAGLDGFWIHRVLQSEGIESHVVDPASILTSRRARRAKTDRIDGETLVRTLMAFKRGEPRVCSMARAPTPQEEDRRRVCRERRILVGERVRHVNRIKGLLFAQGIFGYEPLRKCRRERLEDLRTGDGRPLPVHLKAQIIRELDRLELVLAQLKAVAAERDTLLKTASDEMPAPPAMLVQLKGIGPEIAAVLWSEGLFRRFDNRRQVAAYAGLAPTPWQSGSIDHEQGVSKAGNTRLRTTMVELAWLWLHNQPTSALSLWFHERVQRLGGRMRKTIIVALARKLLVALWRYMTAGVVIEGAVMKPASATI

SEQ ID NO: 283794 - protein, 363 aa, unidentified
MLRAAQTLVTNKEETSRRFYTHQHPFYCGIDLHARTMSLCILDQAGETLLHRHMPATPEALLKAITPYREQIVLAAAWMFPWYWLADRCAAHGIPCVLGHALSRKAMHGGTAKNEKIDAQTIAVLLRGGMLPQASVSPAEMRATRDLLRRRMHLARTRGELLAHVHNTNSQYNLPAIGKKIASKANRAGVAERCADPAVPKSIEVDLALITYDDAWLRDLALTIVKTAKHHDAQTLSLRQTVPGIGTILSLVLLYEMHDIERFPRVQDFASYCRLVTCARESAGTRSGTSGHTIGHAHLQWAFSEAAVLCLRDHPAAQTFLARLEKKHSKGKAFTILAHKVARAVYSMLQRQTAFALHTFLQG

SEQ ID NO: 283795 - protein, 371 aa, unidentified
MANTIICGMDAHDNTLSNRIGVNRGTPETKAVKNTQDGRQKLFNYLRALAEKHEGARIIVAYEASPIGFGIYDECVGVGIECHILAPTKMPKAAKDRKRKYDERDAQRIFEMVRAHVLAGNELPDIWIPDQQARDDRELVRSRLDAGKKLTALKTQVQMLLKRNKAVKPKDVGDSWTKTHRRWLEQVELQPGARIALSSLLRQIVSLEQESRILDKEIEVLSETERYQLPAEALVVQIKGVGLLTAMVYLTEIGDMRRFNNRKEIGSYLGLVPSSNESGEGSERKGHITREGPARVRMVLCQATWVRVAHDEEEAGVYQRIVKKNPKHKKIAIVASMRRLGVLMWHLAKDAQVKAGVYKDEYSKVARFQTA

SEQ ID NO: 283796 - protein, 411 aa, unidentified
MHNRQNYLYVGVDLHKEHHTAVIINCWQEKLGEIQFENKPSAFSKFLLEVETYVSDGLSVVFGLEDVGGYGRALAKYLVDHERVVKEVNPALSFLERKSEVMIKKNDSWDAECVARILVSKFNQLPDAKPHDLFWSIQQLVSRRNALVKAQAALKNQLHIQLNHHYPSYKKFFSEIDGKTTLAFWQQYPSPSCLEGTNIKRLTAFLLDVSNNTCSVKKASDILKLVKEDGQTMKEYQETRDFLVRSIVRDIVFKKQEMKYIERELKQLMNVLDYQLDTMPGIELVTASALIAEIGDVRRFPNANKLARFAGIAPVYFGSGGKGKAHKSKQGNRALHALFYNLAVQQVQVAKGSKMPRNPVFHAYYQKKLKEGKTKGQALVCIMRRLVNIVYGMMKHKTAYELPVVQEKEVV

SEQ ID NO: 283797 - protein, 354 aa, unidentified
MSEKRVPELTNLSVVGVDIGKDVFHLVGFDDGGDRVLRVKIKRLALAQVFGRMPRCIVGMEACLSAHFVSRTLRRLGFEPRIIPAIYVKPFIKGQKNDYNDAEAIAEAALRPNLKTVAEKSQDQLDLQALHRVRSRLVSRRTGTINQIRAFLIEQGIAVRSGLRALKSSLLTILDAREEEISPRMRAILVGLYEDWLWLDERIETVSAEIAEISTTEPNCRNVMSIPGIGPIISTAMVAAIGLGDAFNRGRDFAAWVGLVPRQYSTGGRTVLGRISKRGSRYLRMLFVQAANVIMMRPHRWPDFSFGPWLAQAAERMHRNKLAVALANKLARMAWSVLRHGTRFDERGDAAMAI

SEQ ID NO: 283798 - protein, 342 aa, unidentified
MYYIGLDVHKKTISYCVKDAAGKIHQEGKIGSTRRELDAWIKTLPQPRMMAMEATIFTGWIYDHLLPYAEKVKVAHPLMLRAIAAAKRKNDKIDANKIADCLRCDFLPECYMTSTEIRDRRRTLRYRGLLVKQMVQMKNRISGLLMETGASFNKQRLHKVGYFTELMSGSEEIDCVRPLLKLSRETINRSQKLDYALLSSLERDPLLSERLKRLRTVPGVGPITALTWVLEIGDVARFQSIKNAISYCGLCGAEKRSADKVVRTPISKQRNKHIQQVLVEAAKLAPRYSHELSLIYEKEKQRGNRNRATLAVARKMVAWMVAVERRKQDFVPAEKFGGTVAA

SEQ ID NO: 283799 - protein, 343 aa, unidentified
MNVTTYAVDTAKNVMQLHWVDGHTGEIGRRKLSRARFFEFFAQRPGSHVVMEACGGSHHLARRLGALGHDVELLPARQVRPFVSGNKDDAADARALWLASRHPDIRRVPVKTEQQQAVLSLHRMRAHWSSVRTATLNALRALLYEFGVVLPRGKACGLKTLAERRAEFDAQLPALMQRLVDQHLAALRQMDLEVKRIEAELAAVQAADQNARRLREVPGIGLLGATALSATLGDARAWRRARDFATSTGLTPRHTGTGGKVRMGGISKRGDPYIRTLLVSGARSLLNSPSAPQWARQMLLRRPVNVVVVALANKLARTAWALVAHDGAFDRRWGRPDAVGTTG

SEQ ID NO: 283800 - protein, 369 aa, unidentified
MNHGTTRYVGLDVHKATITVAICEAAQPPTVFGTIANDPTAIGKLVKQLGRAHQLRVAYEAGATGYALYRQLHALGTACDVVAPALIPRPSGPRVKTDRRDALQLARLLRSGDRTPVWVPSPAHEALRHLVRARYDAKADLLRAKNRLTKFLLRQGLTPPPGTRPWSARFAQWLTHLTFEHGPAQVVFADYRTAVRLEQDRVRHLEAALGRSALDAPRAGLIAALQALRGIGLLSAVTIVAETGDLRRFARARGFMGFTGLTSSEHSSGPTQRRGGITRAGNAYLRHVLVQAAHNARHVPHRAAALQQRQAGLPVDLVDLAWRAQHRLHRRYLHLTGRLGRPKAVVALAHELAGFVWAVGQRMPQEPPA

SEQ ID NO: 283801 - protein, 315 aa, unidentified
MTQTNITTAGIDTSKAKLDIAVHGRTERWQVANALPGWRALAANLAKAGVTRIGIEATGGYERGVVEHLRSAGFTVLLLQPLQVKAFAKVHLRRAKNDALDAVLIAACAAALDPPEIAPDPRLTELADYLTFLEQIEEDIRRFKTRLEHIDEPALRRIVDSDIARLKARRAAQIRDIAKRLRAYDDLAKRLKLVLSVPGIGERTALAIVIRMPELGRVSREQAAALAGLAPFDADSGQHRGQRKIAGGRSRLRRSLFAAALPAAFRWNKALIALYARLMANGKVHNAALIACARKLLIYANTVVQRGTPWIEKAA

SEQ ID NO: 283802 - protein, 425 aa, unidentified
MQQSAPEDFGAYIGIDWADQTHFVSLREANSQEVKRYKLEQRPEVLSQWVNELQQRFPGQRVAVALEQTRGALIYALMSYEFFVLFPVNPKALARYREAFNVGGAKDDPTDSDLLLELVTLHRSKLRAWRPDDELTRTITLLVQYRRDLVDMRTALTHRLAALLKLYFPQALQWAGELDTFQACDFLQRWPSLAKVQKTSMAKLRQFYVSHNCRTVAVIEKRLQQIPIAQPLTTDGAVITTSITMVQAIVNQLRPLMVSIKELDKQIAELFAKHEDHELFSSFPGAGEVLAPRLLSALGADRDRFESAEEIQQLSGIAPVTERSGKTCWVHHRFACPKFLRQSFHEFAAQSIGQSPWARTYYKQRRERGNSHQAAVRSLAFRWIRIIYRCWQMRVPYSEQTYQQGLRRRGSPIAKLIPLLVDQAS

SEQ ID NO: 283803 - protein, 421 aa, unidentified
MTHVSHEAFAAFVGIDWADAKHDVCLQPAGSATCECFQLEHTPEAIDAWVTTLRTRFNGQPVAICLELNKGPIVSALRKYDFLVLFPINPLTLARYREAFTPSRAKDDPTDAALQLELLLTHRDKLQPLQPQSPTMRALAQLVEHRRRVVGDKVRITNRLTSTLKNYFPHVLHWFQEKDTAIFCDFLSRWPTLKAVQLARRSTLDTFFRAHHVRYADVIAQRIQAIKAATPLTTDEGVIAPNALLVQALIAQLRVTLQAIADFDTAIAQCAQNHPDFSLFQALPGAGPVFASRLLVAFGEQRARYASAAELQKYAGIAPVTERSGKKAWVHWRLQCPKFLRQTFVEWAAESIRHSFWAQLYYQQQRDKGKAHQAAVRALAFKWIRILYRCWQERTPYDEAVYLQALHHRGSSLIQNLAKAS

SEQ ID NO: 283804 - protein, 337 aa, unidentified
MKYSGIDLHSNNAVVAVIDDQDRVLYCKRLANDLSSIIAVLAPFREELQGVVVESTYNWYWLVDGLMAAGFAVHLANTSAIKQYEGLKYAGDERDAVFLAHIFRLGLLPEGYIYPPEERGLRDLARKRIQLVQQRTLNILSIENILARQLNLRLNAEQVRHLDNAAVTALRLPPHIEYALMANLAVICTLQAQIHAVEVVLHRFAQLRPEFAILKTAPGIGEVLATTIMLETGTITRFASVGQFSSYCRCVDSKRISNGKKKGVGNVKNGNKYLSWAFIEAAAVAMRSCPQARRFYERKKARRLPVVAMKALAHKLARAAFYMLRDGKPFEVTKCFG

SEQ ID NO: 283805 - protein, 340 aa, unidentified
MPQVDDLSRSLVAFDQDASLIVVVEMSEASWLVAGMAPGLDRQPLKKLGPDPDALLRLVERWRDEAVKAGKMIKRIALAFEAGRDGFWLARWLQARGIEVHVIHSTSVAVSREHRRAKTDRLDTAMLRRVFLGWLRSERGHCGMVAIPTLEDEDARRPSRERESLVGERTRIINRMKAILAWLGVRGFNPKLRKAPQRLDDLRTPEDLPLPPNTVDELRRDMARLAMVCEQIKALEQARLANLEQAPGTGPHAMVRLIANVIGVGIETADMLVQEVLSRNLRDRRAVARFAGLTGAPNESGSRRRERGLAKSGNARVRRGLIQLAWRFLRFQKDSALAQW

SEQ ID NO: 283806 - protein, 378 aa, unidentified
MRKVALDLGAKKTTYCEAREGRVVGRATVATVESLVSLLGPKEPPSVVAIEACREAWHVHDVLTSWGNEVVLVDTTRSRRLGIGQHGRKTDRIDAEVLALALERGGIPLAHLLSPHRRELRRWLGVRRALVESRAQMVTTARGIAREHGTPLRRCSTDCFASNVRKWQLDPELFASIEPLLHLVEGIDTQLPIVEGELAKLCATEPVVSLLTTAPGVGPIVAASFVSVVDDAKRFQTAHHVESYLGLVPSEDTTGGKRRLGAISKQGNSYLRALLVQSAWTVLRTADRNDPLRLWAEAVAARRSKRVAVIGLARRLAGVLWAMWRDGTVYDAALLAKTGSRGTHRAAQTLEFQAEALKSAGKKLSMKKFTAREVTPAP

SEQ ID NO: 283807 - protein, 359 aa, unidentified
MLKYALGIDVSKKDIHVCLSVIDAKQQVKVKASSKFANNEQGFKALLVWVNRHKKEPDISLVNVIEATGVYYEACALFLFKAEFDVAVVLPNKAKKYLQALGLRSKNDKIDAAGLARMGAEQCLELWQPIDDFFYNLRAMTRHHQSLQELKTNISNQLHADEHSIYSNKAVIKQLKKLIATIEKQLKETDQSIHDHLYSNDEVAEKLDHIIDIKGLGYMTVATVLAETNGFALFKSASQLVRYSGYDVIENQSGGHRGKTKISKKGNSHIRRAMYMPAFNVVRFEKGNFKTFFERVLERHHQKMKAYVAVQRKLLIMIYTLWKKNEAFNRDARINTSRKEETAPSFALTEGQLNEVAPA

SEQ ID NO: 283808 - protein, 402 aa, unidentified
MNTGVHIDITIGLDVGKTAHHACAMLGSGEIIYDKPLPQDETQLRQVFTDLKQHGSVLLVVDQPNAIGALPIAVARDAGCLVGYLPGLAMRKAADLYPGRSKTDKRDAFIIADTARTMPHTLRSVDRSNEILSALKMLSGFDDDIAKDCTRMINRLRSILTQIYPSFEQTLAGDIITRPLVLDMLVHYGGPTKMKKAGYQRVHTWMSKRAKKDPTKLIDAIFTALKAQTVTVPGTAAAELVVAQLAANIKALINQRKTIAEQVEELLADFPLSEVLMSMPGVGVKTAANILLAVGDCSDFKTAGHLAAYAGIAPVTRRSGTSIRGEFPARSGNKRLKNALFYSAFASIRFHEPSKTYYEKKRAEGKRHNAALMCLARRRCNVIYAMLTRGEYFREIPAQSAA

SEQ ID NO: 283809 - protein, 404 aa, unidentified
MSVVGWDWASQAHDITVLDDAGAVLDRWAFPHTEAGWVMALARLRRRGEPGDLPVIIEKTSGLIVDRLLAAGHPVVPVHPNSFHAARPRWGASGAKSDPGDSYKLADYLRTDGHRLRRLEPADPGLRELQALVRLREDQVRARTAATNQLWAMLGNHWPGPRDLFCSLASGIALAFLTAYPTPQSAARLGEARMAAFLRRNSYRGGKSPALLLARLRAAPQAPVALPAATLAAMVGAHVQQLRSLQAAITGIERLIAERVAAYPRTRLLARLPGAGTINLAQLLAEVGPILDRATSAEQAASETGTAPVTRASGKTTGVYFRWAASTRARKAITAFAHNARMQSPWAAKLYADARARGKRNPHATRIVARAWIRVIWACWHTGTPYDPATHRAARQPSPAEDLT

SEQ ID NO: 283810 - protein, 410 aa, unidentified
MRRCIGLDVHREFAEVAIWEQGVVRSAGRIATTPEALRLFADSLSEQDEVAIEATCNTHAIARLLERHVGRVVVSNPQKTRAIAEAKVKTDKVDARVLAELLAANYLPGVWLADDETQALRRQVARRAHIVRQRTRLKNRVQAILHRNLVPRCPAADLFGLKGRRWLAEQPLPADERQAVEALLRQLDFHGEELKLVDAELARVALASEEVRRLITIPGVDATVALSILAAVGDFDRFSSPQRLVSYLGLNPRVRQSGNQPAAHGRITKQGRAQARGMLVEAAFAAARVPGPLRAFHERVRARRGMQIAIVATARKLAVLCWHLIARGEDYAFERPSLTAKKLRALELRAGKPSRRGRKGSAATYSLREVRRREAALAEQGERAYRQLVANWKSKPPAKTGAGAATGERL

SEQ ID NO: 283811 - protein, 341 aa, unidentified
MDKELYFGVDVSKKTLDLAYYDGEAIDWKNAHIQVSNDDAGFKKIGSWVAKVGKDFATFLFCMEYTGLYNQNFRLWLESKEYIYGMVEPRKMHRFEPDLDDDQRSLDRIKTDELDAFRIAIYCEQNHKKILRNPSKLPSPVYFKLKRLLAERKQNTKQSTLYKQQLHDICAYDTDLSVERKKLLLKNMQENQKAIDKEIDSYMNEDTSIRKNYNLLTSIPGIGRIIALETIVLTENFTAISNPRKYACYIGIAPFKKESGTSVRKKTGVSKKGFSEAKADLSIAVLSAIRNNPSIRDYWIRKRKEKCGGIVLNAVKFKLVLRMFAVIKRGTPYVETDAYKN

SEQ ID NO: 283812 - protein, 322 aa, unidentified
MSLPNPLCVGIDVSKASLDIAASSDIKQFTAGNDSDGFDEIIIELKKLPVSLVLMEATGGLEAAVACSLQAEGFDVAVINPRQARDFARAMGYLAKTDRIDARILAQMAEVIDRHPERGRFIRALPDAERQVLVAMVVRRRQLITMLTAERNRLHPAHPQSRKSINIIIKALEDELGRIDEDMNRHIQSHFKGLAKQLRTIKGVGMITIAALLAEVPELGKLSRREISALVGVAPVNRDSGTFRGRRAICGGRAGVRTVLYMAALVATRHNLVIKEFYSRLLIAGKPKKVALVACMRKLLTILNAMIRKGEEWEPSYHGVTS

SEQ ID NO: 283813 - protein, 337 aa, unidentified
METKFRHFAGIDVSKHKLDVCVIVNSERTEMFYGCFEQSLSGYKDMKKWLTQLTSDKSLGSLLILVENTGLYDDALLDWLYNKNIAVCLENAINIKRSVRDNRSKNDKLDSRNIALYLLQHFHELKLWQKPRDVVSRLKLMLTQRSNLVDGLKRLKALQKEWKQYEWSGVHSTTSYQAGIKGLKADIEAIEKDMWELIKSDVELLRMFTLIISIPAVGKITAMHFICYTNEFKTVKSGKQLSAYCGVVPFEKSSGKSVKWKPKLPHQANKVLKTLLHLCATTAIKMKGAYATYYRRKIEQGKHSLIAINGIRNKLTLTIAAVIRTGEPYSETYIYQS

SEQ ID NO: 283814 - protein, 349 aa, unidentified
MTNENDRTGTAWAGLDVAKGTFDAAMHPPWIPGRPVPLPDLPKASFPRTGEGVAGFLAWLDGTNPPADGVRAVMEATGRYSVELAELLSAARPSLAPAIVDPKSACHFARSLRLRNKTDRSDAAALARLGAERCPEPWRPPTPEYGELQEMGRQRAFLVESLVTARNRLAETEAVPAVARVQKQVVVGLEKALARIEELMRKHVAKRPGLAGAVRRLSTTPGVAFVTATTVLGELGDLARFPTSRSLGAFAGLSPRRFESGTSVHGRTRMCKQGSPRVRQILYMAAIAAVRRPNNRLARSYAAMVEAGKPRMLALGATMRKMLVIMRAMLVNGTDYHDETAPRRQGSVA

SEQ ID NO: 283815 - protein, 400 aa, unidentified
MISVGIDVSKGKSTVCILKPYGEIVSKPFNITHTQKDLSELSSMLFRLNDEVKIVMEATGIYHLPVLTYLQEKGFFVSVVNPYLMKSYRNESLRKAKTDKIDSRIIANYGIDHWFKMKEFQTSGEIYEELKLLGQQYRHYMKLHLLSLAELIHLLDLTMPGIKNLLASWNETNRKDKRSDFVERFWHYDVITSMSEQEFTEEYILWAKEKKYVPSQEKAKVIYTLAQESIPTLPSETSSIKMLVTEAVRVLKEVDATLGLILSRMQEIAKTLPEYSVVREMGGVGNTLAPKLIAEIGDVRRFRNGKALVAFAGIDPPPYESGQFVGCNRKISKRGSASLRKVGYETMRSLKMRSRPEDPVYRYVVKKEAEGKSKKSAKIAGLNKFLRIYYARVTELYKNI

SEQ ID NO: 283816 - protein, 326 aa, unidentified
MNSTDYVAVPLPVLGLDVAKASVQAELRTTGKRVRFGFANNAKGFAQLAGTLRQHNVPKVWAGLEATGPYSHALALWLHGQSHRVSLLNPRRVKQYARSAGNRNKTDLLDAALIADFVCAHQPAAWQPPTLEVAQLQALVRRREELSLMLQAEKNRLEGVAPNVRSSLERIITTLSAEKTRLEKLIIQQIRSQEQLSRDHQLLCTIKGIGSLTAAILLAEMARPGQVERARQAAAHAGLAPRREQSGTSVRRNRGLGKEGNRYLRKALYMPALVAIKYNAPLRHFASRLRAAGKPKMSIVCAVMRKLIHVAFGVLKHQKPFNPSLA

SEQ ID NO: 283817 - protein, 341 aa, unidentified
MSESALIGIDLGKHSFYLHGQDESGREVFRKKFSRPQMMYFFGNLPSCVVVMEACAGAHFVVRQLTSMGHTAKLISPQFVRPFVKGNKNDFVDAEAICEAASRPSMRFVTPKTEAQQTLSVLHRMRESLVHDRTKIANQMHGFLLEFGVSLPKGLAIMRRLASALAERELPVRLTVLLQRLHDHFVYLDEQIKAFDKELAGQLAGDDLGSRLLSLPCVGPITASLLAVEMGDGQRYRCSRDFAASVGLVPRQYSTGGKANLLGISKRGDKHLLQLLVQCARVYMQRLEHQKGALADWVRSLLSRRHFNVVACALANKLARIAWAIAAHHTQYEAGPDALNA

SEQ ID NO: 283818 - protein, 391 aa, unidentified
MICIGIDVAKDKHDCCILDSDGTVRADCFTIPNNMNGFKQLLQTIQGCTKKSDKIKVGLEATGHYSYNILGFLLDNGLPTYVINPLHTNLYRKSLSLRKTKTDRVDARTIATMLLSDVDLKSYTDTAYHNEELKSLTRYRFDKVRERAKLKQSVSRLVTILFPELEKLVPSLHIASVYALLSEYPGAKQISEIHLTKLTNLLATASKGRYGKDKAIQIRDAARTSIGSVMPAKFLELKHTIKLIRELTSEIDEIEVSIQKIMDELNPPILSIPGVGIQSAAMILAEIGDFSNFESPDKILAYAGCSPSTYQSGKLTNCYAHMEKRGSRYLRYALYNATKYVCHWNPVFAEYLAKKRAEGKHYNVALSHATKKLVRLIYALQKSGKAYLVAA

SEQ ID NO: 283819 - protein, 347 aa, unidentified
MPMLEGNIDHVIGVDTHRDAHTAAILDRNGGLLAQLDVPSSQAGYGELLGVVAERASGRRCWALEGTGCYGAGLASFLADHGEWVTEIDRPKRTGRTQAKSDPLDAIRAGREALSREHLATPRQRGQREALRVLQITRAGAVKVAADARRHLKALLVTAPEPLRAGLRGGTWLRQARACAALTAQPGDPVEHRATVRALQVTAERALAAHTEAAQLGKELAILVRVVAPALLAQPGVGPVTAAQVLISWSHPGRLRSEAAFAMLAGAAPIEASSGRVVRHRLNRGGDRQLNRARHTIVLIRERYHQATKTYTMRRIAEGKSEREIRRCLKRTVARQLYRLLERSAAA

SEQ ID NO: 283820 - protein, 397 aa, unidentified
MFYLGIDIAKHKHYASIIDQTGKPITKPFPFQNHKEGGQALLNWMYRYIESPTEIMIGMEATGHYWLAVYSFLLDHGFSVVVLNPIQTNAWRKGTEIRKRKTDAIDATMIADIIRFGRFVEIPLVNEKMFALKQMNRFRNALVSNMSDLKRKALVVLDQTFPEYQSIFSDVFGKTSSQILLEYSSPSDYEQISINDLTQIIEQTSRNRLGKKTANKLMELTSNSFGVTFCKNAFSFQLKMLMEQIRFIEDQIKECEEEMSQLLIDLDTPIMTIPGVGPILGATILSEIGDIHRFDKPSKLVAYAGIDASLSQSGQFESSGTSISKRGSSHLRRALFQAAITAHKHDPVLKAFYEKKRKQGKHYYVCIGAVARKLCYIIYAILKSNKPYEIPPHTTKT

SEQ ID NO: 283821 - protein, 393 aa, unidentified
MQNCLAIDVAKGKSMVSLISSCGEVLIDPYEINHSINDFTNLLNRIKKLKLDNISVIMESTGIYHRPIERFFLENNFKVYTINALYSKMYKRNLRKTKTDKLDCISLAELFFTTDFKQYIKPDDLYLNMNALSRQYFALCDLCTNIKNRYKNLIYLCFPEYEIIFKGETIYSNIALSFIEKYPHANIISNTRIDALQNFFKKNNFRYWKNKANIIKEYALKSYPSVNMNDESVSNLSQLARLINNYQKEIESIKYKLIFLAKKSKYFESINSIFGIGEFTASIIIAELGDINRFNNIKELTAYCGLDPSIKQSGRSIDIHGPISKSGNKYLRKILFVCCLNIVRLSAKCHVQNDIEIYYRKKRNEGKHHYAATIACTTKLLRKILALCKQLDK

SEQ ID NO: 283822 - protein, 381 aa, unidentified
MDLNRRIGPTPDKGEGMRIDIGVDLHKTQFTVHARREEKAGESGQYPTSEDGYREFLGKLGGWRHSGHDIRIGVESTGNTRYFKHRLEEKGYPVVVINTLKFKVINESVKKTDKHDAATIAEFLSKDMLPESRLCSEDSEQLRRLLKVRSTLVRTRVTVKNQIHGLLVSMGMEDTRASLQSKRGRQKILDTLAGAAKGLVVQPLFETIDRLSENVKTIEGEIEKLVSGDKVVELLQTIPGCGPVIACTIRAYTDDIRRFSNHKKYASYAGLAPWVQCSNETEHYGRITKRGPEELRTAFVQLVVGIRRSRQSTSWRLMEHYEAMKTVKGSGKSIIATARKMLKIVWCMLTREEEFNVRLMTDKSLEKKIDSMRTALNEMSA

SEQ ID NO: 283823 - protein, 448 aa, unidentified
MQNRNVKMEVVNPNAAGIDVGSRSHFAAIGQDSGDIKEFGVYNEDLKQLTKWFSDNEIKTVAMESTGTYWQHLYITLQAAGFQVILCNGKFTKNIKGKKTDVKDAQWIQKLHTIGLLTGSFLPDEATEQLRTYCRHRTNLLQQAADTTRKMQKYLRLLNLRLDVVVKDIAGLTGLTIIDAICKGEKSPEKLAGLRHSNCKKSEEEIAKALQSNGRKDYLFGLKQEYQLYVNFQEKMKECDMEIEKLLNEQINSDDEKRQHFIDKKVYKKINKNTPKNLDINLLSYQYFGGVDLLAIEGVSHATALALMSEVGNGIHKFETAKQFASWLRLAPNNKISGGKMLSSRIPKGSNRLKIALRNAANAIGNLKDTALSSFFKRIAFRKGRPAAISATARKLAVIIWNMIVKSIPYKSENDYEFLDQKRKRKVQEMKKLIHKFDIKINDLGLQL

SEQ ID NO: 283824 - protein, 405 aa, unidentified
MEILVDRGCGLDVHKATVVACIMGTGIKKEIRTYTTMTNDLLRLKGWLKDNRITHVAMESTGVYWKPVFNILEDAFEVILVNARHVKNVPGRKTDVKDAEWLCKLLRSGLVRGSFIPPKEVRELRDLTRYKRKLIHTITSEKQRVEKILEDANIKLSSIASDTFGASGKRIIQELMKGKLKAEEMADLSKGRLRNRKDELKEALVGNMEDHHRFMIQAHLSHIAMMEELLSSIEQKIQEQIELHFKEEYELLKTIPPVKDSASVIIAEMGVNMDLFPTDMHLSSWSGMSPGNNESAGKKKPGTTTHGNKHLKTILTEFGWIASKMKGTYLWSKYHSLVGRRGKKKALVAVGHKILIMCYHILKYKVPYKELGPRYLDERRKDRIAKSYIRRLTGLGYAVTVKEAA

SEQ ID NO: 283825 - protein, 341 aa, unidentified
MSEASTIGLDLAKRVFQAHGADASGRVVFRKRLRRDQVLTFFAGLPACVVAMEACSSAHYWARAIGELGHTVRLIPPAYVKPFVKRQKNDTTDAEAICEAAQRPTMRFVSVKSEAAQANAVVFRARDLLVRQRTQTINALRGHLGEYGLVVAKGPSHVAQLIAHVEDPVADLPEAARTVLRVLTASLQFLAERVALLDREIARRAREDKEVRRLTTIPGVGPVIATALAALAPPAGAFRRGRDFAAWVGLTPSQRSSGGKQKLGATSKMGERTLRRLLIIGASSVVRKAIKYGTPSGSWLARMLARKPRMLVIVALANKTARIVWALRATGEIYRAPVVAS

SEQ ID NO: 283826 - protein, 347 aa, unidentified
MKFYTKQHKFYCGIDLHAKSMYVCIMNQDGEIVIHRNIRTNPEVFLKTIAPYREDIVVAVECIFTWYWLADLCAQENIHFVLGHALYMKAIHGGKAKNDKIDAHKIAVLLRGGMMPMAYVYPQGMRSTRDLLRRRMHLTRKRAELLAHVQNTNYQYNLSDIGKKIAYKANREGVAERFPDASVQKSIELDLTLLNHYDQLLPRLEHEISLIAKTHDADSYFRIRSIPGIGRILGLVMLYEIHDINRFPKVQDFVSYCRLVKSAKESAGKRIGTSGKKIGNAHLKWAFSEAAVLFLRRNLRARKYREKLQRKHGKAKSLTILAHKLARAIYYILKRKEVFHMETFFAT

SEQ ID NO: 283827 - protein, 341 aa, unidentified
MNSVTLRIDLGKRWFHVVGCDAAGKVVLREKLGRNQLLQLIAQHPPCLIGIETCCGSQYLTRKFQGFGHDVRLLPAQYVKPFVKSQKNDFNDAQAIAEAVRLPTMRFVPLKSEEQMDVQALHRARERMLQQRLALTNQIRGLLLDRGIEIAQGFYALRTILPALFEKEDSGLTPMMRELGHMLLDMWNRTEATIEQMDDRLKRLARESDLCRRLQTIPGVGVLLSTAIVSAVGNASTFRRARDLAAWVGLVPQQHTTGGKPRLLGITKRGNSYLRRLFVQGARALWVWKDKHPNDPIQHWLIQLAERRHAHIAVCALVNKLVRIAWAVMRSGAEFNLNYRT

SEQ ID NO: 283828 - protein, 421 aa, unidentified
MSTPACAKFAAQIGLDWADTKHDFCLQPGRGGPREFGRFSHQPDEIDAWVQGLQARFGGPIAIALELARGPIVYALQKYDFIVLFPIDPSLLAKYRVAFKPSRAKDDPTDAELALELMLRYPERFHPLHSQSVAMRTLGYLVQQRRMLVDDRKRIVNRLCNALKQYFPQALDWFDHRDTPLFCDFLSRWPTLQQIKRSRVATLERFFHDHNVRRPALVTQRVDGVQRAIPLTEDAAVIQSFQLLATTLVDQLRILLQAIARFDAAIAAVAPTLPDYKLFSVLPGSGPHLAPRLLTAFGEQRERFQNAGQLQRYSGVAPVTQRSGKKSWVHWRWQCPTFVRQTFIEWAAQTINKSFWAGAFYQQQRAKGCPHQVAVRALAFKWIRILYRCWVTRTPYDESRYLKALQLRGSPLLAGLRPKTT

SEQ ID NO: 283829 - protein, 356 aa, unidentified
MNQLTTVGLDLAKDVIAACALDLHGAVVQRRVLKREAFQRWAEQLPVCTVAMEACGSAHHWGRWFAARGHTVRLIAPQFVAAFRKGGKNDAADAEAVAIAARQPTMRFVPIKTIDQQTILAWHCAREGWKEERTALMNRVRGLLTEFGIVIARSSDRFLAELPRLTEDPRLPDAMQGLLLEAREQLASLHARLARCEAQITNHARSNTAAQRVSALLGIGPITSSALAATVPDTTTFKSGRQFGAWLGLTPKQHSSGGKTRLGRISLRGNVYLRTLLIQGARSTLQSALRADLSRASRLQRWIIELYGRRGYHKTLVAIANKHARIVWAILAKDERYDASAWQRHHLAQALPAASS

SEQ ID NO: 283830 - protein, 482 aa, unidentified
MSHNKKQGKTRLPRTQAQLGRRKKQKGMCLADRPCLEPNAAGIDIGAREIFVAVPPDRDECPVRVFDTFTEDLQAMARWLKACGITTVAMESTGVYWIPLYEILEAHGIRPCLTNARHMKNVPGRRTDWHECQWLQYLHSVGLLRAAFRPEAEVCAVRAVIRHRGELVQMAVQHVQHMQKALTQMNLQIQHVISDLTGTTGLAIVDAILAGERDPAVLAQRRDPRIQATAETIQKSLVGNWQPEHLFVLRQSRLLYKTYQQQIADCDQEIEKLVGAFAPRVDPAQKPLPADRKRNRNASKKRNKRGLPANGFDLRTEAYKLFGVDVTQVPGVETSVLPLFSEVGRDLTSRWPTAPHFVSWLNLCPDNDISGGRVLWRGTRKGQNRAGQIFRMAAYSLHRSPTPLGNYLRRMKAKLGPKAATTATAHKIAVIFYTIVTKQVEYDESIWAARDAQRQKRLEHKIRRQARQLGYQLVPMQEKPAA

SEQ ID NO: 283831 - protein, 341 aa, unidentified
MESVIGIDAHKGTLTASAVDELGRELDSITAANDGRGFARIERFALRVGATRVGIECSGSYGLALAQHLAAAGLEVKEVPGQLVKQVRRAAARGKNDVLDALFIARVARREPNLPPPPRQGLSHDLKALVDHRETLLREAVRHRNRAHAMLTQLRPGYWRSVPALTSAKRLEAARRLVEDDSGVRVELLRDALARVGELESSAKSLERQIEALVKASGTSLTDIVGVAAITAARILAEVRDVERVPSQSAFGALTGTAPVPASSGKTDRWRLNRGGNRQLNRAIHTIALTQISHDPRARAYLERKREAGKSRKDAMRCLKRHLARVIYRRLVVDGPVHPLT

SEQ ID NO: 283832 - protein, 374 aa, unidentified
MRDHSEAFVAFDTSKSRNAVAIAEAGRAGEVRFFGEIENSAAATAKLVRKLAGKYARLTFCYEAGPTGYGLYRQIKSLGYECLVVAPSLIPRKPGDRVKTNRRDALSAVKLLRAGELTAVWVPDPRHEAMRDLTRARGAAVEDLRRKRQQVSAFLLRQGRHYSDGKPWTKAHMRWLASQKLEHPEQRIAFEEMLLAVRQAQERIERLEQAIRAAVPDWSLAAMVTALMAMRGIDLVSATALLAEIGDLSRFQTAPELMAYLGLVPSEASTGDTVKHGPITKAGNRRARRMLVECAWSYQHPPRVGKEKQEKVAAAPRAVREIAWKAQCRLSARYRALIRRGKLKTVAVTAVARELAGFIWAIGREVTTADAAAR

SEQ ID NO: 283833 - protein, 314 aa, unidentified
MEAAVVVGIDVSKRTLEVALSSGGGFSVANNEDGISELLARLRQSGAALVVLEASGGYESPAYLALWEAGVPTALINPRDAYHFAQANRQLAKTDQLDARGLCEFGLRMQPEPLPPPEAADEELKALAVRRRQVVKMLAAERTRVQQAPRSVRPSVKRMIRALERELGAVDHQIEQRLRDNPGLAQRCAQLEQVPGLGAVTCAILVSRLPELGRLGPKQVAALVGVAPYDHQSGEWRGRSPIFGGRAEVRSALYMATLSAIRCNPVLRSFYRRLRAAGKPAKVAIIAAMRKLLVILNAMLKTNSPWRPPCAVVT

SEQ ID NO: 283834 - protein, 346 aa, unidentified
MNQIIRIGMDTSKHIFQLHGVDSAERPVLRRKLRRSEVLAFFAKLPPTVIGMEACGAAHYWARELRKLGHEVKLMAPQHVKAYVKRNKNDGRDAEGLCEAMSRPTMQFVPVKTEEQQAALMLAGVRQQLIARRTQLSNAIRGYAAEFGLTTAKGLDKIEPLLTRIALDETVPALARELLAIHGQDYARLQIELKAIEVKLMAWHRANACSRRLAQIPGVGPIGATALVMKTPDPRAFRSGRHFAAWLGLTPKDHSTAGKTRLGKITRAGDEMLRSLLVAGATAVIQQVRRGRGRPSAWLLALLKRKPPKLAAVALANKVARIAWKLMTTGESYDGARMPGAQAFAA

SEQ ID NO: 283835 - protein, 349 aa, unidentified
MEQVSRIGMDTSKHIFQLHGVNAAERPVLRRKLRRRDMIAFFERLSPTRVAIEACGASHHWARLLRGFGHEVQLIAPQLVKPYVKRGKNDAADAEALCEAMSRPTMRFVPVKTAEQQAALMLVGLRDRLVRNRTQLANAIRSYAAEFGLTGATGLAHVPALLRRIQADETLPPLARELFALHAAEYEQVQAKIAAVEVKLLAWHRADERSRRLAQIPGVGPIGATLLTMKTPAPEAFRSGRQFAAWIGLTPKDHSTAGKARLGGITRAGDEALRSVLVVGATALIRRVREGRCRGGTGFVAWILDLLQRKPPKLVAVALANKLARIAWKLMVTGEAYAATRSPVTAATA

SEQ ID NO: 283836 - protein, 338 aa, unidentified
MDWTVAIGVDTHKHVHVAVALDRFGAQLGSREVETTETGYRSLRSWALELGVPAFAVEGCGSYGAGLVRFLELAGAAVWECERPRRQERRRGKSDLIDAALAARRLLTGDGLYLPRGGGRREELRLLLLERRSAIQARTAAFNQLSALVVTAPDQLRRRLGTLSGERLARAAARLRPGADVRNAVLQRLGRRVERLSREVREVDRRLLDILTEIAPALLAECGVGPVCAAQLLVSSGDPKRMASEASFAALAGTSPLDASSGHQRRHRLNRGGDRQLNWALHVIALARIHHHAETAAYYQRLLATGKTAREARRCVKRALARHFYRRLREIPTPALTT

SEQ ID NO: 283837 - protein, 366 aa, unidentified
MYYVGLDVHQKKSSVCMLDDHGRKVKEFTVLGGPDRLVEELARLPRPLAVCFEASTGCGWLMDRIAPLAQRVEVAHPGQVRLIYRAKRKNDRIDAAKLATLLFLDQVPKAYIPDASVRAWRSLVEFRRRTVEKRTRTKNGLRALLRGCGPGGAGLCPGTPPSGGPRKGLWAKKGLAVLRGWPLPTMADRLRRDLLLDELEQYNRQIQQLEVELDRMATEHAGVALLQTIPGVGPRTAEVVLAYIDNPRRFARNKQVGAYFGLVPCQDASADVNRLGHITRQGPATVRKYLVEAAWQGIRRSPSLGAYSRRIGQGKKERRKIALVATAHHLVRVMHGMLRSGEVWRETELEPVSPGAPAQPQELAAR

SEQ ID NO: 283838 - protein, 464 aa, unidentified
MKKNTKSSSIKPAPLSLLNPKCAGIDVGSSELFVCIAKNSSEQEVRSFPTFTSDLRHMIDWLKANGVKSVSMESTGVYWIVPYEMLEEAGFEVLLVNARFFKSVPGRKTDVQDCQWIQQLHSYGLLRGSFRPSQEIVQLRAYVRQRSRLFESASTQVQLMHKALTQMNIKLNNAISDITGVSGRNIIQAILQGERDSKKLANLSVNGCRKNIDKIAKALEGNFRKEHIFALEQAYEAFEFFHKQVHRCEDAIEATLSSMQAEIPSSSSLSSDKNEQEPTLSPPKKRARKTQAARSAYYFDAPKAIKSITISDLTTIPGIDANTAMKILSEIGTDTSQWANAKAFASWLGLCPGNKISGGKVLSSRTKPSDNRVARALRLAAASLYRSKTAIGAFFRRMRARLGAPKAITAAAHKLARILYRMLTTGENYQEAGENYYEQQYQARVIANLTRRAEELGYVLIPVK

SEQ ID NO: 283839 - protein, 355 aa, unidentified
MLYSGIDLHRDNSMITTINGSGTIINQQKLPNDEVSLLDYFFSMGKQHRAVVEATANWYWLSDLLNDHGIDLVLAHAKYLKAISYAKVKTDKVDSQTLANLLRIDMIPAAHQIAPELRGLRDLMRARLKIVSKNTSCQNSIHRLMGKYNLNIPNDRKLHDLSTLNLLNDLPIPAEALLQLELHKEQMRLLHRQINDLEKSLHPKLIPNPDIQRLLWIPGIGKILAFTIYLEIDGIERFPDVKHFHSYCRLVPGADNSNRKIKHKSGNKDGNRYLKMAFTEASVRAVQYFKEIKAFYQSKERRKHKAIAKTLVAQELAKTCYYVLSTKENFNNTFKGITLSRRKSMQWPRLASPGV

SEQ ID NO: 283840 - protein, 332 aa, unidentified
MNKFKHFVGIDISKEYFDAVLFFSPFGSAIHQQFVNDLKGVKSFQKWLKSEKVSLEETLICMEHTGMYGKILSKVLIASNFNLWIEMSFRILRSIGVQRGKNDKIDAERIARYAEKNQEKALLYKAPKKSLEKIRALLALREKMVVFKASLLRNVKEMKIFDLEISKTNNSYQKATVKALDADIKKIEKQLEVYISEDSNLEKIYTQITSVPGVGNITALLLICFTNEFTLFNTPRELACYCGVVPFEYTSGKSVRAKPKVHFMANKKLKKQLHMCALSSITHHSEMRAYFNRKVQEGKNKMLVLNNVRNKIVHRICACVRQNRLYEVKNVA

SEQ ID NO: 283841 - protein, 348 aa, unidentified
MNIVGGFDLHRAQITYDYVDLDTGEVSRGQIQPATRANLRRWLAERFAGRSDVAFALEGCTGWRFVVEELRLAGIEPQLAEPADTATLRGRKARAKTDRSDARLLRDLLREGRLPISWIPPSHVLEVRILGRTYLDLMDERRAWQQRIHAQLFQQGVPPLKGLLTAAGRAALEEADLSPAGRQIVNAAIAAIDGLNELILPLRSQLETIGRRQPGCRALRVHYGIGALTATIIWAELGDPRRFRNSDQAVRFSGLDITVYSSDGRRAPGRLARQGPPELRWALYEAAKSAAHATSPDHAYYTEVRERLGGKRPALSVARKLVRRCYHTLRALGDTAWLPVPDTLTAAA

SEQ ID NO: 283842 - protein, 319 aa, unidentified
MHCIGVDVSKQELVTFDGSKERIFPNTRGLGEFDRFLRRSGNALVVFEPTSTYSRRLETLCRTHRISCCQLNPRVVPHLRQVGKGRSKTDSSDAKLLYRYGIERGHSEAMQLKNDVLAESIQARLACYRVAQKARVAYQNVLEALSQDPATSDRLLAELSAEIDELKTKEKQQLVAAQHLVEQDEEGAQRLDALLSIPGVGPITALTLVALFRKYPDANRNQIVALVGFDPIQFQSGTSVHGKSRISKRGNREVRKRLFEATLSAARYNPCIRTIYRRLKEAGKPDKVARIAAARKLLLIAHAIYESGASFRDPSAKET

SEQ ID NO: 283843 - protein, 372 aa, unidentified
MVANFTFDEYAVQCVGIDISMDKFTACLFTYNTASDLGWWTDVIEFRNNKTGFNQLVRWSRKNANKEYPIRYLMEPTSTFHEPLACHLNAIGGTVFLIFPAKAKEFAKYEGIRSKTDEIDARTLSTIGCTNRKLKPWTPPKPIFRKLKQMCRFNNRMERMRTELTNQQSALKSGANAEASLMNRYEALLNELDKQVENNKKLIKKTVESDSDLKERVARITTIKGVGYLTAVAIIAETDGFSQIGNRRQLASFAGLDVIAYKSGTIDTNHRISKKGSSYIRAALYLPSITASMHNPQMKVLYDRIASKNTKTKMIAITAVMRKLLLLIFTLWKSGEEYDSKRSVSCTDVVTLSLDQMYKDEPGATLKESALV

SEQ ID NO: 283844 - protein, 340 aa, unidentified
MGEVITIGLDLAKSVFQAHGADALGEVVFRKKLRREQLLAFFAGQARCLVAMEACASAHYWAREIAALGHETRLIAPAYVKPFVKRQKNDMADAEAICEAAQRPTMRFVAPKGAEAQAAGVVFRTRDLLVRQRTQLINALRGHLAEFGHIARKGPGHSTRLIELVLDSTTDLPPAARSVLMVVVESLEAMQSKIADLDREIAARAKSDELARRLMTIPGVGPVTATAMVALAPPANTFRRGRDFAAWLGLTPRQHSSGGKERLGRTSKMGERSLRRLLILGASSAARMAARNGARDPWLARMLARKPRMLVTVALANKMARIVWALMAHGGSYRAPAMAA

SEQ ID NO: 283845 - protein, 350 aa, unidentified
MVVVGADVHKRSHTFVAVDAVGKQLGQLTVDATTKGHHKALAWVRKSFPGEVVWAIEDCRHLSTRLERDLLTAGQKVVRVPPKMMAMVRASARTRGKSDPIDALAVARAFLREPDLPVASHDAVSRELKLLVDRRESLVGTRTRTINSLLWRVHELDPARAPKPRSLDLAKHQQALRSWLLGLDGIVAELALDELDDVIALTARIKEFAKRITGLVETAAPTLLAMPGCGALTAAKLVGESAGITRFTDEAKFARHAGVAPIPVWSGNTAGRVRMTRSGNRQLNAALHRIAVTQIRIDGCLGKTYFEKKKAEGMSTAEALRCLKRRLARTVFNHLKTDNKAAPVCQPAAA

SEQ ID NO: 283846 - protein, 335 aa, unidentified
MNYSHYLGIDVSKKKLDLTLLDNEGELTHYLIGNNTESIELLISKLEEKHSGFKLQSTLVCMEHTGTYTLPLRIYLYKEKANVWMEAAIKINNSNQMRRGKTDKKDSQRIAIYASRYQNDVVLWQPKREVIEELTELMNQRERLLSGYSRLATPIKELNEMRVSAGLKEQKSAYECTLKRMLADVKKIEKKMNLLIKSDEQCSRLIELTTSVPGVGIIVALQIIIKSNEFKAISESKKFACYAGVVPFEKSSGIHTGRGRVSHLANKKVKTALHMAAISNIAHNTEIQAYYERKVKEGKNKMSVINAIRNKIVKRIFACVRDNRLYEDSYMHSLA

SEQ ID NO: 283847 - protein, 347 aa, unidentified
MRFYPQQHQFYCGIDLHARTMYLCLLNRDGEILVHRNMKTRPDTFLTAIAPYREDLVVCVECIFTWYWLADLCAREGIPFVLGHALYMKAIHGGKAKNDKIDAHKIAVLLRGGMLPQAYVYPAEMRATRDLLRRRMHLMRKRAELLAHVQNTNSQYHLPEIGKKIAYKANRAGIAERFPDPAVQKSIEVDLALIGYYDPLLTDLELPIVKTAKQHDAQTLYRLQSVPGIGKILSLVLLSEIHDIQRFPRVQDFVAYCRLVKCAKESAGKRYGTSGATIGNAYLKWAFSEAAVLFLRNHPAGQQYLARLEKKHGTGKALTILAQKLARAVYYMLRRDTVFDRDRFLHS

SEQ ID NO: 283848 - protein, 400 aa, unidentified
MISVGIDVSKGKSTVCLLKPYGEIICKPFEVQHTEKDLEELANLLQKLDGEIKIVMEATGIYHLPILTFLLEKGFFISVINPFMMKRFARDNSLRGAKNDRLDSVMIASYGIEKWHKLKKYEVNDGIYPELRFLGRQYHRFMQTHVKHVQELTHLLDHTAPGLKAMFNSWNEHSNRDKLSDFVERFWHFDLITSLSREEFVEQYLLWAKEKKYHQSRSKAEKIYDLASNGIPTLSSRTPSTQMIIQEAINVLRIVNNSLYRILSRMKELAKSLPEYATVRSMGGVGDALAPQLIAEIGDARRLHNGHALVALAGIDQPPYESGKFVGTHRRISKRGSPILRKIGFEVMRVLKSHKEPEDNAVYNYILKKEAEGKNKKLSKIAPPSTSTLMSFKTNLSLPA

SEQ ID NO: 283849 - protein, 402 aa, unidentified
MTSQRLVVAGADTHSQTHHVAVLDAGTGALLGDRQFPATLAGYRAILAFISDFGAVVRFGIEGTNSYGAGLTRHAVAAGVEVREVIRPNRAERRLHGKSDPLDAITAARVVMAGEALPTPKSSDGPIESIRVLHLARDSAVKARANVLRQIAMILVSAPVEQRERPHQLGEKALLNTLRRSRPNHPSHGVEHATAVSLRSLARRHHHLSEEIDDLTDHLRDLVAHAAPALLAAKGVGVVTAAQLLITTGDNPARITSKAAFAALTGVAPIPASSGKTTRHRLNRGGDRRANNAIHTIALVRMSMDPRTKTYITKKRGEGKTKLEAIRCLKRHLANELFTLITNPPEVPDISDLRPARQARGLSLQTVADHFGVWPMHISTIERGKRHDDDLANRYRQWLNAA

SEQ ID NO: 283850 - protein, 350 aa, unidentified
MDIVGAFDVHRKQITFDYIEVESGELHRGKIQPANRQSLREWLESFVERFPGKQTAIAVEASTGWRYVVEELGRVGVEPHLAEPAQTKSLQGRKKRAKTDRLDAGHLRDLMVIERLPESWIPPDHIQEIRTLMRLRHSLIEERTTHKQRIHAQLFHNGYPQQKNLDSMEGRAHLEEMELPGAARQVVDLSLAMIEHINEELKPIEKLLRDYARSQAGCQALMEHYGVGEFTSVALLSELGDTRRFSSSKQAVRYAGLDITVHSSDEKRAAGKLSRQGPPVLRWAAFEVAKRAWRKGSPDHDYYLKNKERIGANRAALSIARKLLRRAHHTLRELGEEAISEPVVLASNSA

SEQ ID NO: 283851 - protein, 403 aa, unidentified
MKHVIAFDISMGKSYMVIYNAHKQCIFEQELKHSKPAFEELQEKILKLTNGTGEPPAIVFEATGIYSRQLERFMQNNQYSYCLLNPLEAKLQCDSLRIHKTDRSDAHRLALTHFTVTRRVSHKIDNVYLQLRSLSRFYSELDGELSILRGRMHKVIQLTFPELEKMFTSKSDLFLNFVQLFPHPDYVVPLSKTVIKNRIRANTNKKISTTLAEKKALQILGLAKHSYPAVSQDDVLCDQLKAYAKRYQELLHQKQCCINKMVDMVEQRPEYRIILSIPGIGPNTAVRLMAEIGDVKRFENNKQLNAYAGIDIRRFQSGKTFYKDKINKRGNKHLRKLLYIIIQNMIKIRRYGRNHLVKYYDKLKTQPHNKCHKVASIACVNKLLKLLLHLITHNIHYDYRLTA

SEQ ID NO: 283852 - protein, 433 aa, unidentified
MKVLYERVAGIDVHKDMIKVAIRSPGDKPWTRKTEILEYRTFYGVLQQMARELRKRGVTHVVMEASGVYTEPVYYALCEQDFIQVAVINPAHAKALRGHKTDAKDCARLAELFECGLLRGSYIPAPELKEVRDLTRYRMKTVQARTSEIQRLGKALESAGIKLGSVASSITGTSSTAMIEALIDGERRGPVLADLAIGRMRTAGKLADLSMALAGRFTEHHALLCRLHLDRIAGFDDAADGLDKQIAGKAARWQRETGLLTSVPGFGDVVAQAWLGEIGPAPHRHFSSHEKLASWVTLCPGNNISARKRKHGRTGDAGTYIKPMLVQAAWSAIRVRGRLQARYSRLVRRFGGDKNPAAKKKAITAIAHTLLKIAYQVLKSGTPYQDLGADFYTRRESPEQKQAWLQRQLQRLHPGCTITITISPPEAALPPAA

SEQ ID NO: 283853 - protein, 337 aa, unidentified
MDHYAGIDVSLESASVCVVDAKGKIVRECKVASEPEALVGCFCALGLPLSGIGLEAGPLSQWLCAGMRKAGFAVELLETRHVHAAFQVMPVKTDRKDARGIAELMRLGWVRPVHCKSVGAQEMRALLNARKLVQTKLKDVEMSLRGMLRGFGLKVGRTTEKQFADRIRELVAGSEPLEFVAGSLLAAHAVLLCELNRFDKRLRAQARDNPAVRLLMTAPGIGPLVGLTYAAAVDDPRRFKSSKTVGAHFGITPRKYQSGETDYSGAISKIGDGAVRTALFEAAHVIMTRPIKGGWLKSWALKLAKRVGQKRAKVALARKLAVILHRMWTDGTAFRFA

SEQ ID NO: 283854 - protein, 426 aa, unidentified
MNTTTTDFVATIGLDWADQKHDLWIRPAGGSKSEHLRLEQTPEALHEWVAKARKRFGERRIAIAVETSRGPVISALMAYDFIVLFPVNPKCLKDYRGAFAVSGAKTDRTDAELLEEFVRLHRDKLRALEPDTELTRKLAGLVENRRRLVDERTRLVNQTHATLKTYYPLAETLLDGQMNTTMAADFLARWPDLESLQKAKPEAVRAFFYKHNSRAAKKTEQRLASISKAKALTTDMAIIVPARHLILAFAGMLRPLHQAVVRLDKEIQQAMDQHPEAAIFRSFPGAGPALAPRLLVAFGTNRDRFQKSQDVAEFYGIAPVVVQSGNSKTVHVRYRCPKFGRQTFHENAGCALKKEAWAKCYYEQQKERNKGKHHQACRALAYKLVRIYFACWKHRKAYEPNRYLKALQDHASPLHRKLQKLTDTPL

SEQ ID NO: 283855 - protein, 451 aa, unidentified
MARKRKQESKGKQAVLPVMRPDAAGIDIGATEIFVAVPADRAEENVRSFPTFTQDLYRLADWLQECGIKAVAMESTGVYWIPLFQILEERGLEVCLVNARHVKNVPGRRTDVCDCQWLQFLHSVGLLRASYRPEQEVCAVRSLLRHRESLIQMAATHVHHMQKALDQMNLQLHHVISDITGQTGLAIVDAILAGERDPQVLAKLRHERIKASEAVIAKSLVGDYRAEHLFTLRQSLVAYRGYQKLIADCEAEIRRCLEEFQPPPENPGEEAVPTSSSRALPASGLRSELKRVFGIDLTRIPGIHVGIAQVLFGEIGPDFRKFRSASAFASWMGLCPDNEISGGKVLWVGTRKVNCRAATALRMAAQSLHHSKTALGDFYRRMRAKLGAPKAITAAAHKLARIIFHLVTTRQEFDDTRFAADQLRHQKRQELKLRARAKAMGFELVPLPQAG

SEQ ID NO: 283856 - protein, 520 aa, unidentified
MDVVYTRCAAMDVHKKTINVCIRIGYGAKLQIFTSVYGTFTADLERMREFLREHKVHRVIMESTGVYWIPVWNVLERGSWKFDLVLVNPQHVRALQGEKTDVKDCRRLAELGQHDLLRSSFIPSPAIRELRDLTRRRSQLQQDRNRVVNRIGRLLETVNLKLGSVASDIVGKTGWLILSAIAQGETDPDRLAEQAQGSLQGKKAELAEALRGYASEHFRWQLGELLEDVSRLDGKVNEIDSRLRQQMEPHQDLIRRLCTIPGVKEIAAWTLIAELGADMSQFPTAAHAASWAGLCPGNCESAGKRQSGRTRKGDQYLRRMLIQNGWAVSRKKDCFLTALFLRIASRRGVTRAAMAVAHRVLVIAYYVIRDGSEYHELGGDHYDRKNPERTARRLTQRLEHIGYQVTLTPTTRATLAPASKPIRNGTTRWGKPSHQGGRTQLRIPGPIAMPEVCGKCAARNMPCIHDPSERKSATVRATQTPGKRPPGRPCKCVERGLVCKHQPTPKIQPETISAPAPSST

SEQ ID NO: 283857 - protein, 371 aa, unidentified
MADCREAFVGIDVAKLKNAIAVAESGREGEVRYFGEVDASYASMRRIIQRIAAKFDRVHFCYEAGPTGYGLHRLIQSLGHECMVVAPSLIPRKPGDRVKTNRRDALALARLLRAGELTAVWVPDEGHEAMRDLVRARAAAVETLRVHRQQISAFMLKHGRIYPRKKGWTMRYLCWLQEQQFDHPAHQIALQEMVEAVRVSKERVERLEKVIEEFVPNWSLAPVVRALQTLRGVDLIVAVTFATEVGDVSRFESPRQLMGYLGLVPGERSTGETVRRGAITKAGNGRVRHMLVESAWTYRHPPKVGARKLYRLEQAPPKVREIAWKAQSRLTARYRMLTGRGKRTTVVCTAIARELTGFMWAVAREAQAIRL

SEQ ID NO: 283858 - protein, 343 aa, unidentified
MAYFAGLDVSVKETSVCIVDDAGRIVREARVASEPEALLQVLTNTIYRFKRIGLEAGPLSQWLYSVLAEAGLPVICVETRHMRAMLKAQINKTDRNDARGIAQMMRVGLYRPVHVKTLRSQKLRVLLTHRKLLQSKTIAIENDLRATLRNFGLKVGMIGAVKYETRIRELVENLPDLAVLVEPLLTVRRVLREQLGILHRRVLAVVRDDDVCRRLMTIPGVGPVVALTFRATVDVPARFRNSKAVGAVFGLTPAKYQSGENDRTGAISRCGDDMMRMMLYEAAQSMLVRSTKWSWLKAWAMKVARHRGMKKAIVALARRLAVIMHRVWVDGTEFRWTREVAAA

SEQ ID NO: 283859 - protein, 418 aa, unidentified
MSPLPEQRFTAYVGIDWADTKHDICVQAAGDTRRESGCIQHRVAAIDEWANGLRRRFGGPIAVALELAKGPIVAALQKYDFLVLFPINPATLAKYREAFQPSGAKDDPGDAELALDLLLHHPERFGPLRPQSTAMRSLMSLVERRRELVGDQTRLTNRLGDTLKQYYPQALEWFDDRGTVLFCDFLERWPTLRAVRLARTRTLQAFFGAHHCRSTRLISERIGSIREATALTDDPAIIGPCRLHVLALVAQLRTVLAAITQFDREIAAVARTLPDYALFGKLPGAGAQLGPRLLAAFGEQRERFSSAEELQQYAGIAPVTERSGKKSWVHWRLQCPKFLRQTFVEWAAQTINRSFWAGAYYRQQRAKGSSHHIAVRALAFKWIRILYRCWQTRTPYNETTYLNVLRKRGSLLARKFGT

SEQ ID NO: 283860 - protein, 386 aa, unidentified
MQKLNDLSRSLAVLEPDVTLIAVIEMSLSSWLVAGIVPGVERQPLKKLAVDESALLKLLHRWREEAEKAGRRIKRIVVAFEAGRDGFWLARWLKACGIEAYVIHASSIAVSREHRRAKTDRLDTELLKRAVLGWLRGERDHCKMVAISTIKDEDAKRPNRERDSLVGERSRIVNRMKAALVRLGIRGFNPKLKRAAERLDGLRTPEGEPIPPNTMAELRRDMERRRLVNNQIRQIEEARLERLEQTPSDGPHAMVRLLARVIGVGIETADMLVHEVLTRNMRDRRAVARYGGLTGSPDESGRRRREKGLARSGNARVRRGMIQLAWRFLLHQKNSALAQWYRARTENARGTRKPMIVALARKLLIALWRLVRQGVVPDGVVLRLAQ

SEQ ID NO: 283861 - protein, 471 aa, unidentified
MKKKMISLEVVNPNAAGIDVGSRSHWAAVGQNAQDVKEFGVYSEDHLALCSWLQRHKVETVAMESTGTYWQNLFSSLTAFGFDVILVNGGQTRNIKGKKTDIKDCQWIQKLHTLGLLSGSFLPDSTTDIIRTYSRHRQNILKQSARTVLKMSKYLRLMNMRLDVVVSDIVGLTGTKIISAFIGGEKSGRKLAGYRHYNCRKSEGEIAKALQYNGRDDYFFALKQEWETYLHLQRQIIEIDRQIKKHLEEVIDNDDDKKQHIADKKPHKRKNKNTIRDLDMAQISYQYFEGVDLMAIEGVNDATIMAIISEIGLEGIKKFGSSKQFTSWLRLAPNNKISGGKVLSHHLPKGSNRLKIAFRLAANAIGNLKEGHLADFFRRMNYKKGRATAISATARKLAVIIWNMITKGVPYDPPTEYLFLDQKRKLKLVNRIKRNIAKFELKPEDVGFDKPLIINTLNLTLVGIKENPIKQ

SEQ ID NO: 283862 - protein, 357 aa, unidentified
MSSNMKKYIGLDVHKEATSIAVLNGAGKLVMESIIETKAATLLEFLHGLRGELHVTLEEGTWAAWLYDVLKPHVAEILVCNPRRNALLKEGSKSDKVDARKLAELLRAGLLRAVYHGENGLRTLRELARSYLTISKDQARVMSRLKALYRSWGIPCSGRQVYTPRHREQWLSRIVQPGVRRRAELFYQQMDGLSVVRHAVRGELLAESRKHQAVKILRQIPLIGPLRAALLLALMQTPHRFRSKRQLWTYSGLGVETHDSAQHRYVDGQLQRSKKPQQIRGLNQNHNHEMKKIFKSTAMSASRCAGPLQDFYAGLLSKGMKPDMARLTLARKIAAITLTLWKKGERFDAEHLKSQAA

SEQ ID NO: 283863 - protein, 343 aa, unidentified
MQTMTTIGLDIAKSVFQVHGVDAGGQVIVRRQLKRRYVLTFFQKLSPCLVGIEACGSAHHWSRELQALGHTVRLMPPAYVKPYVKRQKNDATDAEAICEAVTRVNMRFVPTKTAEQQSGLVLHRARHLFVRQQTSVINAIRAHLAEFGIVAPVGRHGVEELLNVVTDPNDKRVPDIARACLSALGDQLQSIKQQILEFDRLIRAWHRSNEMSMKLEAAPGVGPVLATALVAAVADPKSFRSGRNFSAWIGMVPKQHSSGGKNRLGNISKQGDRYLRGLFVAGALSVIRYAKVHGTKHRPWLTALLARRPTKVAAIALANKIARMVWAMMATGERYKEPVALAR

SEQ ID NO: 283864 - protein, 442 aa, unidentified
MEHLRLIKENVAAIDVGSEKMHVSVGGNTPRVFGTMTVDVNGLVEWLKSQGVKSVAMEATGVYWMYAYGQLEEAGLEVVVVNGRYVKNLPGRKSDMSDAQWLATAHAHGMLRGGFVPPSEIRRLQDYLRLRQDQITMAASHVQHMQKALERMNIKFHDVISSITGVSGLKVVRAILKGERDPQRLLDLCDVQIQKKKANRVRESLRGIWRKEHLFALKQALEAWDFYQTQIEECDKQIQEVLAQLSGAIEESGDPRPGKPGGINGPHFKGFHQMLVKLCGGQDLTKLPGMGDYSLLLILGEVGLDLTKWPTEKHFTAWLGLAPGVRSSGKRRRREARHPNHAGRLFCNLGRSLAQSVDKGFGGFYRRLKSRRGGLVANKALARKIAVMFWRMMVHGKDYVEYGLKKYTERAAQSEQSLLRKLARKHGMTLVPETNNLQTVHG

SEQ ID NO: 283865 - protein, 467 aa, unidentified
MFAPGRRPGRPAKTRPPFVVLDPHAAGIDVGATVHWVAVPPGADAEPVRSFGTCTADLEELADWLQACGVTSVALESTGIYWIPLFEMLESRGLVVRLVDARQTRGLPGRPKDDVRDCQWIQRLHSCGLLRGAFRPDDQVVVLRSYLRQRQMLITCASDHIRHLQKALEQLNVKLPEVVADITGVTGMSIIKAILAGERDPARLAKLRDQRCKQDEQAIARALYGNWRAEHLFCLRQALELYEFYQQQLAACDRQIDAQLQTFADQSAGAPMPPRPAGKRKMRRRYKGNVPGFDARARLYRMSGVDLTQIEGVEEGTALVLLCEIGLDMNRWPTEKHFCSWLGLCPQHKISGGRVLSRKVRPGVNRAAQALRLAARSLEHSLSALGAYFRRLKARLGAPKAITAAAHKLARLVYSLLKHGQAYLAKSLEEYEREHHERQLRNLRRKAHELGYKLVQPGQVATAPMPA

SEQ ID NO: 283866 - protein, 416 aa, unidentified
MNAVGIDVSSRKSTVAVLRPLGEVVCLPFDVTHDIAGLASLVEKLKALDGETRVVMEHTGRYYEAVEKALHEAGLFVCAVNPLLIKEYGANSLRRVKTDKADAVKIARYALDNWADLRDFTPMDAIRYDLKTLNRQFQLASKQRTASANNLIALLEQSFPGIRKCFDSPVRSDGTQKWVDFAHSFWHVDCVRKQPFPAFCERYRKWCKLHAYFFKLSNAEEVYALAKRAVVLTPKSKVVKVLVQEAANQLSSISRSVEVYRAEMDRLAAMLPEYPVVMAMYGVGKSYGPQLMAEIGDVRRFERKQALVAFAGIDPMPNQSGDKNVRSNKSSKRGSPYLRKTLFNVIRTYLQCAPQDEPVFQFLNRKRAEGKPFYVYMLAAANKFLRRYYAKLRDYFASLDTLQPVAPIPTILKAAL

SEQ ID NO: 283867 - protein, 337 aa, unidentified
MQVYGIDLSKERFDVNFLDANGKEKHRTVKNGLSAISGFLSTVPTGSVLCAENTGTYGDLLVFLCNRCGVSIALVPGYTVKHSLGLVKGKSDPIDAARLREYGERFFDKLSFKAYQSENMSELRQLFALRSQLVKARKELITGAHAREQMPMQSVKANLILKASLSSLDEQIGEAEKEISLIIMDDAEMAENYTLSISVFGVGPVIATNMIIKTGNFKAIDTARKAASYAGVCPFPNTSGNMVGKSKTSPFADKELKSLLYMGAKAAVKHNKEYRLYYQKKQQEGKPHYLIMNNVMNKLLRTIYSVVKNKTPYSRDYICLDPREINKNVNGSEKKVA

SEQ ID NO: 283868 - protein, 455 aa, unidentified
MQVIFERCAGLDVHKKTVVACRVRATAAGQAVREKRTFGTTTAELLQMLDWLVEWDCTHVAMESTGEFWKPVYNVLEGNLEVWLVNAQHAKAVPGRKTDVGDAEWLSDLMRHGLVRPSFIPPRPQRDLRDLTRTRCSLVRERASVVNRVQKVLEGANIKLSSVASDVLGLSGRAMLEALVAGQADPALLANLARGKLRSKLPQLEQALVGRVREHHRFLLAHHLAHIDFLDEQIDSFSQEIHARLETALPPLPPADSPTPPTPPTTPSTDAPDAPPSAASSAPAPLPPLTWSQAVTLVDTSPGFDVRSAQNILAEIGIDMKRFFDADHLASWAGVAPGNNESGGKHRSGRTPPGDRPVRRILLQAAWTAARTKGSYLSALYHRLALRRGKKRAILAVAHSLIVSLYHMLTRQKPYRDLGANYFDERKRESVTNNLVRRLEKLGYQVKLETKPAAT

SEQ ID NO: 283869 - protein, 407 aa, unidentified
MEVLYPRCAGLDVHARSVTACVRIARDATITYDQYIASTTTSGLLALDAWLTAHGCTHVAMEATGVYWRPVWHVLEDHFTLVLANAMHIRNVPGRKSDANDARWIADLLAHGLIRSSFIPPAPIQALRDLTRTRRQLGREVARHIQRVQKTLEDTNIKLTRVLTDIMGMIGRAILAAIIAGETDPDRLAALTRGRLKASRAELREALHGRVTEHHRFVIQLHLTQIDGLEGAIAAIDARIGDALGPVHAAVRLLATMPGLSETTARSLVAEIGTDMTRFPSPGHLVSWAGLCPRQDQSAGTTRSTRTRQSAPWLKPMLVNAAWSATRKTDSYLRAQFLRLKSRRGPKKAILAAASSMLTAAYIMLRDGVEYHDLGPHHFEQRDKERMTKRLLERLRILGVTVQVTAA

SEQ ID NO: 283870 - protein, 484 aa, unidentified
MAKQKESIQERLRKGRLNRKQRRELNRHLAAADPGLTIVNPNAGGIDVGNESHFAAVPSNRDAQPVQEFGCCTQELIRMAKWLVSCGIDTVAVQATGVYWIGLYDILTSHNLRVVLVNARHTQNVPGRKTDVLECQWLMKLHTYGLLRDSFHLAKELEGIRTMWRLRGRHVAEAGRAVQHMQKALTTMNIQLANALSDITGVSGMRIVTAILNGERDPYRLADLRDKRVRASREEVARSLEGTWRDDLLFELAQALNQYRFIHEQMEQCDRQLAVYLSQIPSAPVAAPASVEPAPSKPKKPKTSGKARGNQPVILNLEAELTRICGVNLCSIDGISVITAQTIVAEIGTNMSAFPTEGHFTSWLGLTPNLDISGGKVVRRGKRKTQNRVAQALRMSATALLNSDSYLGAKYRHLRRQLPANKSAVKAMARILAVLVYRMFTRGKAWVDRGAVFHEQRRTELDLARLQSTARARGFKLIPISQAS

SEQ ID NO: 283871 - protein, 389 aa, unidentified
MGGFQQIGPFVPRNYDVFAGLDVDKTSIAATFADHEGTMKSMHIPYDADNLLNYAARKFAGKRVVFAYEAGPTGYGLHDRLTAKGYPCLVVAPCMVPTAPGHHVKTNRLDSQKIAESLRGGQLRSIHVPTTSYRDLRHLIQLRDTCVRQATSTKCRIKALLLFEGIPFPKAEGAMGQWSKAVVSELKALGCPGTVRFKLDQLIATLEFSQKQVLTATREIRRFCTQDVEIYRNILFLTTIPGIGWITGTHLLARIGDWREMGNVRQLGAYLGLTQRENSTGLDVNRGSITRAGDGRLRNKLIQCAWVAIRTDMELAEFYRRIYQRHPKATASKKAIVAVARKMTMRIHAVLRQQRPYETRTISSAPSSQEETSAPGDASTECRNQEGYS

SEQ ID NO: 283872 - protein, 392 aa, unidentified
MFDTFIGIDVSKDKFNFAIIDENLKPIQDGSLSMDLNGFQQLLNIIKKFNNPIVALESTGPYHINILSFLSANSIKTAIINPSLIKRFSSSISLRNTKTDVIDALVIAKFIAKNKENAHHFTQYNINDITALAKLREHISQEIAKIKTSLKQHLSVVFPEFLIEFNPFSDTALHILKLFPTTELIRKAGVDKIKQSLQNMDSKHKAHIDPKHLYDMALNSIGQSSNIWANIVRHDIEMLSFLNQKLDNITNDFIDKINQFKKEDMEILSSIKGISNITSAHFLSEIKDISRFQNSNKLSAYAGIDPSIKQSGSSINSKGKISKKGVKSLRRTIYLMSMGIMKFNHYFRNYYLKKRKQGMPHRKAMIALCNKLLRVIFALLTKKQHFIEPTTP

SEQ ID NO: 283873 - protein, 332 aa, unidentified
MQFVGIDVSAQSLVVHLQPSKGGCQRLTYSNTWEGHQKLCQHLISSGVPTRVALEATGLYSLDLALALAQQPKMELMVVNPRSLRDFARAGLRRSKTDAVDAQVLLEYSQRMRFQPWQPPAPEALELRAIGRRIADLTDLVTQEKNRLHAARFAPSLGTVVCQDLEAHLQHLEERLEALEKEACRLIQRHGHLQQDFQLLVSTPGIATKSAIHLLGELSVLPKDMGPRQWVAHAGIDPRSFDSGSSVHKPAQMSRCGNVHLRRFLYMPALVAVRCDPNVRAFYEQLLARGKKPLQALVAVMRKLLHCLHGMLRHRSPFEGARFRALETPLTS

SEQ ID NO: 283874 - protein, 346 aa, unidentified
MILIGCDFHPSWQQVCWLNMADGETNNQKLVHASGDAEKFYRRLAVPVRVGIEATGNCQWFLELLGKLGHEVWVGDAAKIRACDPRQQKHDPRDARLLLQLLVENRFPRIWTPSSEEKDLRQLLLHRYKLVRMRVQVKNELQHLAMNKGITKGRRLWSAAGEKVLCELPLAPWASRRREDLFKLRSMLNEQVAALDEAVKHVAEENDRARLLMTQPGVGPITSMAFVLTMGDVSRFPRGKQVASYLGLIPREYSSGGHQRFGSISKQGNRFMRMLLVEAAQCVVRYDEGFRNEYLHRCHTKPRGVAKVAAARKLAVRLYWMLRTNTAYPEIARVGSSPRVPLAGAS

SEQ ID NO: 283875 - protein, 350 aa, unidentified
MHARSVRGCGIDRETGELFEVAMRPEPGVVVGWLAGLPGPVTAVYEAGPTGYGLARAVAAAGIECQVAAPSKLLPVPGGRVKTDRRDARHLAELVAAGLVTAVRVPTPAEEAARDLVRARDDARGDLMRARHRLGKLLLRRGMVFDAKAWTRAHAAWLSGLRFDDPAATMAFDNDWAVVQQTTARRDQLDKQILALIPGSCWEPAVTALGCLRGISDLTGFGLAVEIGDWARFTGSSIGAFVGLTPSEHSSGASRRQGGVTKTGNKYARRLLVEAAWHHRSAYQPVRAATLQKRWAKATPALIARADQANRRLHAQWVKYDQRGKKPAVANAAIARELAGFCWSLAMMAP

SEQ ID NO: 283876 - protein, 357 aa, unidentified
MESQEVKYVGVDCGKKSIEVVRINSENSLERRQFSTTESGINNLLQWLTLNDIVGLEAGSQSFRIAKSILNKGVQVIVLNPGNLATIYQSLKKTDKEDSLKIARLIQRHPIEELPTVPIPNDEEEDNRRLCSEHENWTKQLTQGKNRLHSLFTQAGLTQITKKHLRTKANREISVALLPSRYQKEAERILKVLDLVEQNLKLIEKEIQEALKKNKAYVQTIMSMPVIGMITSLAIMSYMGDCKRFSSAKQAAYYAGLVPRVDISGDTVRYGRIINRGCHSIRRVIVQAAWSLVRCQHGGKVKEFYQRLYLKKGAKKSIIATSRKMIEVLYVMIRTGKLFDSMPENILNRKLTQYGLM

SEQ ID NO: 283877 - protein, 460 aa, unidentified
MNRNRSKSRVDRTMPMVHPNAAAIDIGATMHMAAVRADRAPEPVRSFGTFTADLHRLVDWFTECGVETVVMESTSVYWIPIFELLDARGFAVFLVNARDAKHVPGRKTDVSDAQWLQRLHSFGLLRASFRPKGQIAELRAYVRQRERLLEYAASHIQHMQKALTEMNLQLHHVVADITGATGLRIIRAILAGERDPEALAGLRHYSCHSSAETIAKALTGSYRTEHLFALEQALSLYDAYHEKASACDVRIESVLKELIIHRGHDHGSAPPVSRRRNRTDQANALAFDVRAALFGLLGKDVTTIDGLGPYLSLKLIAECGDDLTSWPSAKHFTSWLGLAPSNKVSGGKMLSSRTRRSGGRAAGLLRLAAVTVGRTDTALGAFYRRLSSRIGKAKAVTATARKIAVLFYNAVRHGMDYVDPGASSYETRYRTRVINNLHRRAKTFGFVLQPLEPKAGATVS

SEQ ID NO: 283878 - protein, 336 aa, unidentified
MREITTLAIDLAKRVFQLHGVDARGVCVLRKQLQRAQLLSFLTQLPVCLVAMEACGGAHHWGRRIAALGHRVKLIAPQYVKPFVRGDKTDRNDAQGICEAALRPGMPEVAVKSEQQQAMLTVHRLRELIDKQRKQLANQLRSLLAEFGEVMACGIPTLRRELPQRLERVPELMRGVLQEGYERLVELQRQSQQHTRRIEQLAQDDPLCQRLMRERGIGPICASAYVASIGDPSRYRNGRQVSASLGIVPRKQGTGGKAVLLGISKRGDRYLRTLLIHGARAVIRHIAGKTDPLSCWLQRLIARSSVNCAAVALANKTARRLWAIWRAEQSPSLASV

SEQ ID NO: 283879 - protein, 371 aa, unidentified
MNAVGIDVSKGKSMVTILRPFGEIVSSPFEIKHTSSDIHSLIKLIHSIEGESRVVMEHTGRYYEALAHQLSAADLFVSAVNPKLVKDFNNDSLRKIKSDKADSVKIARYALDKWQSLEPYSITDELRAQLKVMNRQFHFYVKQKTAMKNNLIGLIDQTYPNANTYFNSPTRSDGSQKWVDFVSTYWHVDCIRKMSLNAFVEHYQNWCKRKKYAFNKSKAEEIYTKTKELVPVFPKNEITKHIIRQAIDQLNSTSVTVETIRTLMNETASKLPEYSIVMQFKGIGPSLGPQLMAEIGDVTRFTHKGALTAFAGVDPGVNESGSYAQKSVPTSKRGSSNLRKTLFQVMDVLIKTMPQDDPVYHAPRVSLTMFI

SEQ ID NO: 283880 - protein, 425 aa, unidentified
MNYKQNEKINQVKESTLVVGIDIGSTTQYARAFDWRGIELGKVFTFSNSREGFEAFKAWMQRLQDKYRKSDVIVGIEPTGHYWFDLGAYLEDEGILLVMVNPYAVKQTKELDDNSQSKNDRKDPKVIAKLVTEGRYSAPYTPDGVYADLRIMVANRKRLIREMTQIKNRFARWFAIYFPEYTDVFGDYEAQSSMLLLKKVCTPEAIVELGAEKINQIWRDAKLRAVGMKRATTLCETAKRSIGLKKGSSAAQYEMKLLLEDYEYKKAQLDAVMEEIEKLCRKIPESEQMLAIKGIGVITVAGFLAEVGDVRRFESPRQIQKLAGLSLRENSSGKHKGQTTISKRGRSKLRAVLFNAAIPLIAKNPEFKSLHEYYTTRANNPLKKKQSVIAISCKLIRVFYAILAKGVTYDAQKLISDIHRQPQVA

SEQ ID NO: 283881 - protein, 413 aa, unidentified
MDILHICCAGLDVHKKTVVATLIISQERGQPLKATKTFGTMTDDLLRLSDWLMAFGVTHAAMESTGEYWKPVYNILEDNFEVWLVNAQHIKAVPGRKTDVKDSEWIAELLRYGLIRASFVPPKGQRELRELTRMRSTFVKERATLVNRLQKVLESANIKLASVTSDVNGVSGKAILQAVIAGRSTPEEMAELAQGRLREKRELLSRSLHGFVKTHHRFVLSELLLQIDGLDDTIARFDQQIREYCRPFEEAVVLLDTIPGVARKTAEVIVSEIGVNMSRFPTANHLASWAGVAPGNNESAGKRLSGKTTKGNQALASALTQAAHAASRVKNTYLSAQFHRLAGRRGKKKAIIAVAHSILIIAYHMIKNKEPYHELGSDFFDRHNAQATARRMVRRLEQLGYNVSLEARTPIAA

SEQ ID NO: 283882 - protein, 342 aa, unidentified
MKQYVGLDVSQRETAVCVVNETGQVIFEGKAKSNPGVLTDLLSKHAPHAERIGFETGAMASWLWHELRRVELPVVCIDARHAHAALSVRMNKSDQNDARGLAELVRVGWYREVKVKSEESQKIRAILVARSRLVSMRRDIENQVRSLIKECGLLFPRAIGQQFRNQVSKLLGVDHLLLSVISPLLSIHENVCQQQGKFDNEVRRLAKLDETTRRLMTVPGVGVVTALTFRHTIDDPSRFRSASTVGAYLGLTPRRSQSGETDTNGKISRWGDRLLRTYLFEAATVLLYRTKKWSSLKAWGMKLAKRIGMKKAKVAIARKIAVILHCIWVDGTSFDWGQPKPI

SEQ ID NO: 283883 - protein, 242 aa, unidentified
MEEVRRFVGIDVAKAALDLFIGSAGVGFSVANDEVGIQQLLRQLTPADFVILEATGGVETAVASALAAAGIAVAIVNPRQVRDFARATGRLAKTDRLDAEVLARFGEAVRPEARPLADQQAQALEALVTRRRQLVEMLTAEKNRRARAAKVLHRSIDEHIRWLEKRLSGLDDELGELIRNTPLWHERDELLRSVPGVGKVLSSTLLAQLPELGMLNRKQIAALAGLAPFNRDSGNMRGSRCI

SEQ ID NO: 283884 - protein, 352 aa, unidentified
MEKYIGLDVHSTSCTAVVVDARGKQLSTHVIETNGQALINFIKTQAGRIHLCMEEGTQSGWLAEILSPHVFKLAVVGISASRGPKNDALDAFGLAEKMRTNALGVTVYKRVGAFGKLRPLVKTHAMVVQDVVRVKSRLKALFRSRGVRLVGKEIYQPSKRDAYLEELPAGTRDAALILFSQYDALSEVKDRAESEMVQESHRHPITKILETAPGLGPIRVAQLVSIVVTPERFRTRQQFWSYCGFGLVMRSSADWVQTPQGKWTRANVQQTRGLNFNHNHMLKNLFKGAATSVVTQMAEHPLRRDYNRLLDGGTKPNLAKLTIARKLAALTLAMWKKKEVYDSAKSSPPPKS

SEQ ID NO: 283885 - protein, 391 aa, unidentified
MIYAGIDVAKDKHDCFITNSVGEVLFKSFTIPNNREGFETLFQKIQSVSDDLTKVKVGLEATGHYSYNLLRFLLDKGLPTYVINPLHTNLYRKSLSLRKTKTDKVDAHTIASMIMSDVNLKSYSDTSYHNEELKSLTRYRFDKVKARAKLKSSVSRLVCILFPELEKLVPTLHMVSVYSLLSEFPSAHAIASAHLTRLTNLLSESSRGRYGKDTAICFRDAARSSIGSHIPAKSLELKHTIRLILELTSEIDEIEAEIKTIMDEINSPILTIPGISYKMGAMIIAEIGDFSRFDSPDKILAYAGMSPSIYQSGQLDNCYAHMEKRGSRYLRYALYNATKYVCHWDESFGTYLAKKRAEGKHYNVALSHATKKLVRTIYAMEKSGQAYTNAA

SEQ ID NO: 283886 - protein, 342 aa, unidentified
MNNTTIGLDIAKNVFQVHGVDAKGNVVLLKVLKRWQVLEFFANRAPSLIGMEACAGAHYWARELRNQGHEVRLMSPQFVKPYVKGNKNDANDAEAICEAVGRPNMRFVPVKSAEQQDLLALHRVRSGLVKERTAQANRLRGLLGEYGIVIGKGLAQLRKRLPEILENAENDLSDLVRALFADLHGRILALDQQVAAYGDKLKTLNQMSAVCRKISQVPGVGPITATAMAASLGDGQAFQTGRQVSAWLGLVPAQDSSGGKPKLLGISKRGDTYMRTLLIHGARAVVRAAAKKHDAQSRWINALVQRRNANIAAVALANKNTRVIWALLRRGEDYRAPVCANA

SEQ ID NO: 283887 - protein, 410 aa, unidentified
MEVLYPRCAGLDVHKATVVAAVRLAAGGKVVREVRTFATTTAGLLELAEWLAENGCTHVAMEATGVYWRPVWHVLAEGGFALVLANAAQVKNVPGRKTDVGDAAWLAELLAHGLVRASFVPDGPTQELRSLLRTRKQLVRERAGHVLRLQKTLEDANIKLDGVVADLLGRSGRAMLEALAAGESDPEKLAALAHPRLAATPERLKEALRGRVTGHHRFLLRLHLDQVDALDAAVARVDREVEAHLAPFRAAVELLASIPGVGALAARVIVAEVGLDMGRFPTAGHLVSWAGLCPGNDESAGKRRSTRLRKGAPWLKTTLVQCAWAASRKKASYLQAQYHRLRGRRGAKKAVCAVAASILTAAYHMLKDGTAYRDLGPDHFDRRAKEVQARRLVRRLADLGYAVELAPASA

SEQ ID NO: 283888 - protein, 317 aa, unidentified
MTQTSMTTAGIDTSKGKLDIALHGRAEQWQVANTLPGWRILTNKLTKAGVSRIGIEATGGYECGVVQHLRAAGFTVQVLQPVQVKAFGRMHLRRAKNDALDAVMIAACTAALDQVRDAPDPRLAELAEQLTFLEQIEEDIKRFKTRLEHTGEPRLRRMVLGEIARMTSRRLTQLRYIAKQLRAHRDLAARLDLVLSIPGIGERTALAILIRMPELGRISREEAAALAGLAPFDNDSGQQKGQRRIAGGRARLRRSLYAAALPAAFRWNRALIALYQRLTAAGKAHNAALIACARKLLIYANTVVQRGTPWTERPLGV

SEQ ID NO: 283889 - protein, 314 aa, unidentified
MNIIGPDISKDTIDATLHKTNGSIHYIKFKNNDDGLKQFRLWIKGNRIRKVYIGMEATGIYYEKAADMLSSYYTVYVINPLKINDYGKSRFNRTKTDKADSNLIADYIKRHQDTLIPYQIPKNKALQKLINLKNQLQQQQKQIKNRLHSTEEDFIRNIHQDLIDTIQDKMEQVKIAISEQIKKQTDNNHYRNLQTIPSIGKDTASVLYAQLTEKHFKTANQFVSYAGLSPAIIQSGTSVRGRGRLSRYGNRRLKSTLYMPALCAYRFNAFPKLINNLKKAGKPKMVIIVAIMRKLAKPAYYIVKTGQPYDAERH

SEQ ID NO: 283890 - protein, 338 aa, unidentified
MGTYAGIDLHSSNNYIGIMDQDYKRLFGRRQPNDLNNVLKVLEPFKADLKGVIVESTYNWYWLVDGLQEHGYTVHLANPSAIKQYEGIKHTDDKWDSFWLAHMKHLNILPEGYIYPKEQRSVRDLLRRRLFFVRHRTANILSLQSTITRNLGIKISNNDIKKLKLDDANNLFDSSNLVFMAQNNISAIKHLGKIIKGIEKQVKSQVQLRKEFVMLVTIPGIGTILGLTIMLEVGDIDRFSKVGNYSSYCRCVSSKRLSNGKKKGENNKKNGNKYLAWAYVEAAHFATRYIPKAQKFYQQKMAKANGAVATKALANKLARASYFIMRDQVPFDEDMLFK

SEQ ID NO: 283891 - protein, 315 aa, unidentified
MHDVPCFIGLDVAKAQLDIAIRPSGERWAVPHDAGDIMTLVERLQALHPALIVLEATGGWERAVTSALATAGLPVVVVNPRQVRDLARATGQLAKTDALDARALAHFADVIRPTPRPLPDAQRQELRALLGRRQQLVVMRTAEQNRLTGPSTRLITDIEAHITWLNASLATLDNDLEILLRASPVWRANDDLLQSAPGIGPVCARTLLLELPELGTLNRQQIAALVGVAPLNCDSGTLRGRRTIWGGRAHVRTVLYMGTLVATRYNPRIKAFSQRLLAAGKLKKVALTACMHKFLTILNAMLKHRTPWQTQEIQG

SEQ ID NO: 283892 - protein, 414 aa, unidentified
MGLPRWVGRAIGLDVHRDFCVVAICEDGVVRSAGRVPSTPEGLLTLAESLLPTDRVALEVTGSCWEVARLLEPHVERVIVVSPDDTGITSARAKTDKLDARTLASLLWKGELEAVWMPDDRCRVLRRRLARREQLVHSRTRAKNEIHAVLQRRLQGKPPCSDLFGVKGRQWLAGLELPPEERESVDAGVRHVEFLDWEIAEVERLIAKQALAWPEIRRLMSVPGVNLVCAASFIAAVGSPNRFLTSRKLVAYLGLDPKVRQSGEAPTRSGRISKRGSASARWALVEAAWTAVQQPGPLHAFYERTRGRRGHGKAIVATARKLAVLFWCMLTRDEDYAHQQPSLTNKKLRRLEITAGAPKYAKTARGTWNTNVAMRQAERQLAEQAEASYKRMVKDWQAGAPTRKAGASATPERA

SEQ ID NO: 283893 - protein, 428 aa, unidentified
MNEVDSIRIKEFRQLKKEVRGSKDYLIVGIDVAKDKHNAFFGTATGKTLFKRLVFENTSEGFKRLLIQTDATKIQHNLKKTVFGLEPTANYHKPLGEFLIKGDHMVVLVSGVAVKRNRELLDGRWDKHDTKDSANVADLISQGKCLFYEYPSMALRDLRNLLSLKKRLKKQEHGLKVRIRNHLLATYFPELDRYYRQSDSQGLAIVRWCLDPSVIAGLKYDEFVRLVAPRTRTIGQRRRLKAIWKKAADSIGCDASESLEFEAKVMVEGLKHVQEAISEVNDKIEDICCEFPEYSYLPTIPGFGPDVSSKVLGAIGNPFRFRTGKQVLKMAGLDLSAERSGKRSDAATPVLSKKGKAELRYALYQAAHIASTRNQYFIMYFTNKLRGREREKGIKTKMRVKLAAKLLIVAWTLMKKEESFNPDYLNRA

SEQ ID NO: 283894 - protein, 359 aa, unidentified
MQTQRNELNFEGQNIFVGIDVHLKSWTVSIFTEKLHHKTFTQPPKAELLSEYLKLNFPNGSYFSTYEAGFCGFWAHFKLKELGIQNIVVNPVDVPTTQKEQMRKSDAIDSNKLGRSLRSNELKGIYIPQAETLEDRTLIRVRFAIVRDMVRLKQRIKALLNLYGIEYPNELKNTNTHWSKRFINWLKTIQLQYSTGTDALNILIIAAEQHRLILLDATKKIRTLSKSEHYSKNIELITSVPGVGIITGMMLLAEIEDINRFNNSDKLAGLIGVVPNCHSSGENEKKGEMTSRGQYFMRKGLIESSWVAACKDPALSLSYNTYCKRMEPNKAITKIARKLVNRIYSVLKNQKRYEMGIII

SEQ ID NO: 283895 - protein, 384 aa, unidentified
MKKNSSRSVEMKATAYERNTGVRNAAGRTVIQPSDYLAVVGLDVGDRKTHYCILDLDGDLVVEGEVATREASLRVQFAGKGRMRIALEAGAHSPWISRLLVELGHDVIVANPRNVRMISRSDSKNDPADARLLARLAHVGPELLSPIQTRSQQTQVDLALVRARDVAVQSRTKLINTVRGIVKSTGHRVPKSSTLTFARKAKDACPEALQPALLPLLRVIEELTREIELYEKLVVHKAEAEYPETKAIRTIHGVGHLTSLALVLLLNNDRSRFRKSRDVGCYIGLRPKQRESGLRAPQLGITKAGDPLLRRLATQSAQYILGPFGKDSALRRWGLSLALRGGKNAKKRAVIAVARKLVILMHRIWITQEVYEPLRGVTLKSTAA

SEQ ID NO: 283896 - protein, 432 aa, unidentified
MGTYAGVDWASEKHDVLVADAAGERLLSTTFAHDEQGLRSLCRQLVRLEVELVAIERPDGLLVERLLDAGLRVLALHPNQVAAARARFRVSGGKSDRFDAFVLCELARTDHHRFRVLEPDSDATKALRALTRAREDLVGTRTALSNQLRAELERFWPGPLGLFTDLTSRISLAFLERYPSPADTHGLGEARLQAFLARERYTGRQKPAQLMAKLRRAAHGPIGELELSTRRQIVLSLVATLKTLNVQIKQLERQLATAVREHPDGAIFLSLFKKPDSVVCAAELLAEIGDCRARYPSRDALAADAGQAAVAKESGKRKAATFRWACNKRLRQAFHTLADSTRHWHPWAQDLYAAARARGHDHPRALRTLGRAWCRIIWRCWQDRVPYDPARHRALQRHITVTIPTPSGPRPDIAATQRIAGAAVTNDRARSA

SEQ ID NO: 283897 - protein, 427 aa, unidentified
MAKKKMDSEPEFAAFVGIDWADRKHVWCLQAADSRKRETGELEQKVEAVEAWVAELCRRFGHRPIAVAVEQVKGALVFLLNKYECLHIFPVPSTMTARMREALYPSGAKDDPRDADLLLDILEQHRDKLHRLSPDDEATRRVQNLVEERRKLTAERTAQSNRLTSYLKIYFPQMVEWFEKLDMPLVCDLLQRWPTLEELKKVSPEELRTFFRQHHCHRGLRERRILAIGGATPAGGDRAVIEAKSAVVKVIVQLIRSLLDGIAELDRKIEEVAAEHPDFFIFDSLPGAGAVMAPRLLAAFGSQRDRYHNADELQTYSGIAPVTERSGKRKWVHFRWACPKFLRQSFHEWAGHSIAQSVWARAYYQQQRGRGSDHHAAVRALAFKWIRILFRCWKERVAYDENKYLAALAKRGSPLGKLAVAGMGTSL

SEQ ID NO: 283898 - protein, 347 aa, unidentified
MSPDGMRSNKRERRSSHGMSALVCGLDVHKDSTYATILTPEGKIVNQLKMSNEKVLSYLSRFNVCKIAMESSNQVAALYRKLENKGYTVIVSHPRKTRYIAEAKIKSDRVDSKVIAELTRLDALPLAYMPEKEIAKLREQVRRRAFLVRERVKLRVKVKSILTYEGIKWPLDHGLFTEKGVEWLHLLNLEPVESYLRVLGPLNDEIKLVSSQLKGIADDDEDMKLLMTIPGVGYYSALLVKSEIGDVNRFAFGDRLCSYAGLVPSTYASGSVVRHGHITKEGSRWLRWAMIEAAQVHVYRYDTAITRAYHRIAEKKGKQVAVTAAARRLLLCCYSVLKNKQPFYDQA

SEQ ID NO: 283899 - protein, 338 aa, unidentified
MDRQYVGIDFHRRRSVIVRLDGNGERLGLHRIVNDPGELMAVMALCGEGPEVVIEATYGWYWAVQLLQDLGARVHLANPNALNWGDRRVKNDELDAHDLADMLRLNRLGEAWIAPPAMRELRELVRYRAKLVQLRTGLKAQVHAVMAKEGVLPKHTDMFCIGGNRQLDAMELGAPFAHRVRSLRELIAVYDREIVQLERDIHQHLKHDRGYQAIQAINGVGKISAAVLVAEIGDVTRFPTPQHLSSWCGLTPKHRESDLKTRRGRISKQGSRLVRATLIEGISRYHGGSILDAQYRKLAKRRGRNKARIALARKVLTLVYYGLRDGEIRCLAPAETAA

SEQ ID NO: 283900 - protein, 321 aa, unidentified
MADKVFVGVDVSKDGLDLACAKLGTGKIEGHWRIANTPEATAAWLADFGAGWIDTVAFEPTGGFERTLRAGLKAAGVPYVRVHPNEVVAFRGLRGIRAKTDRIDAGLLALFAANELAHRGIARMVDTDEALRELITRRRQLCDILHAERCRRAMVAQPSVRASYDAIIGTLEQSLQTVEQALAEHIANDPALAQTARNLRSVTGVGPITVYTLLGELPELGRLNGKQIAALVGLAPNSRQSGKQTWRAKTGHGRAGVRRVLFNAARSAIRHNPIMRAFYQRLVTENQRKGKVALVAVMRKIIVTLNAIARDQKPWNHARQA

SEQ ID NO: 283901 - protein, 338 aa, unidentified
MTLYAGIDLHSNNSVVVIQDNEGKRIKRQRLPNHLQTILDVLAPYRDALVGVVVESTYNWYWLVDGLLDEAYPVHLANTSAIQQYQGLKYTDDESDADWLATMLRLGVLPEGYIYPREERGVRDLVRKRGQLVRHRTAHLLSIENLILRNTGARITANDARALTRDKVDGLGLDEVLAMAVKANVSVMLCLQEEIERLEQAILSRVRLREAFKGLLTVNGIGEILALTIMLETGDIGRFKSVGNYVSYCRCVRSVRLSNRKKKGKGNAKNGNKYLSWAFVEAAHYAIRWNPQIKRFYERKLAKTKRVVAIKAVAHKLARACYHIIKDGGKFDVGKAFG

SEQ ID NO: 283902 - protein, 324 aa, unidentified
MRIIGCDLHARQQTLAMLDTETGEVVNRTLQHEGKEVREFYSQLPHPVLVGIEAIGPMQWFLDLLQELGIECQVGDATKIRAAEPRKQKHDRRDAELILKLLVEKRFPAIWMPSKELLDLRALLLHRHQWVRLRTQIQNALQAIALANGLRRGPGLWSYDGQAKIAFLPLPPHTSYRRSALQAEYRDMEEEIENLTAQVAEQAEHRSGAQLLLTHPGVGPVTALATDVFLGDPQRFADGKALASYVGLIPQERSSGRRRRLGKITKQGNPLLRFLWNEAGAHAARRDPELKRFYRRKLVQKGMGKAKIAAARKLGIRRWIMMRD

SEQ ID NO: 283903 - protein, 373 aa, unidentified
MPKYSTAFGMDVHLRSTTVCALDADTGEAVTRRFPGNPWGEIAGWMDGFPGPSLAAYESGYLGFAPQRELAGLGVECVVAAVSKIPRSAADSASKNDRNDAARMAKAILAHDISPAWVPSPEVEGIRDLAGAYDGATARLATAKQRLLAFLARRGFVYGGTTPAGNPRKYWTYDFLRWLDKVRPEDDGGVRALAALRNEVEAAAEARADLLSEYRAAVDASPIAAEVAALQSIKGCAFALAAAFSAEVGDFTRFRSGRQVTAYFGLAPSQRSSGDSVRLGGISGAGNALARKLAVEGSWCYAAARHQPKLMPRDTGVPLEIRMHGRKGSERLLRRREEMLARGMPAAKANAATAAELVRWLWALGMMCREGAE

SEQ ID NO: 283904 - protein, 403 aa, unidentified
MEGPLISLDVSKGKSNYRFFENGTDRKGKKGVIRHDIQGFDSIRDEAEKMEKRLRIKPSVILESTGVYSDVVEKYFTDKGFDVYVISPLLSASMRKEGVRPAKNDSLDTLSIAKVFYSKDDLRKCSENDKKAERLREMSYELDMMNRRIRPMKCQFLRLLDKVWPCLDEVSDYSSRFMLDFIIAFGHPENIKTVKGVLSVIRKSEMGTAGRKDKIAQDLFDYCHTHLSAVSKDSSYVELLKRMAIELKAMAKKKSELIDRMAEEARNKDEFARLLTIPAVAKTTALKIMARVGDISRFRNAEALVAYCGLDPRVYQSGKMTGEHRTITKKGDCILRSTLFLAVKLMVMLYPDTKVARFVAAKAKNGLSYKQAVVAGSAKLARIIYSMLTHHENYVEFNADIVA

SEQ ID NO: 283905 - protein, 388 aa, unidentified
MIYVGIDIAKLNHFAAAISSDGEILIEPFKFSNDYDGFYLLLSHLAPLDQNSIIIGLESTAHYGDNLVRFLISKGFKVCVLNPIQTSFMRKNNVRKTKTDKVDTFVIAKTLMMQDSLRFMALEDLDYIELKELGRFRQKLVKQRTRLKIQLTSYVDQAFPELQYFFKSGLHQNSVYAVLKEAPTPNAIASMHLTHLAHTLEVASHGHFGKDKARELRVLAQKSVGVNDSSLSIQITHTIEQIELLDSQLFSTELEMANLVTCLHSVIMTIPGIGVVNGGMILGEIGDIHRFSNPKKLLAFAGLDPTVYQSGNFQAHRTRMSKRGSKVLRYALMNAAHNVVKNNATFKAYYDAKRAEGRTHYNALGHCAGKLVRVIWKMLTDEVAFNLE

SEQ ID NO: 283906 - protein, 345 aa, unidentified
MSIVGGLDIHRKQITFDYLDTVTGQVRRGQVSPADREHLRAWLARFAGCEDAAFAVEGCTGWRYVVEELAAAGVTAHLAEPADTAFARGRKRHAKTDKTDCRHLRMLLAEGRLPECWIPPGHILECRALLETYHDLRAEHTAWVQRIHAVLFHQGAPALGEGTLRTEQGLAALRSAAAGCLSPTGQLQVATALEVTAALETRLHAVRHQLLDAARHLTGAKVLAARLYGVGPVTALAMTCWLAGEGRFSSSRKAVRFAGLDVTVHSSDRKGPPGRLSRQGPPVLRWALYEAGKTHARSSAPDHGYYAQVKDRCNGKRAALSEARKILRQACHILTELGDDALSAA

SEQ ID NO: 283907 - protein, 320 aa, unidentified
MMAQNDQIVVGIDVAKDKVDACIRSLSQRHTFPNTAQGHRKMIAWLHKHKVNKAVMEASGGYERDWARVLRLAGIGVRIVDPKRVRSFALSAGRLPKNDTIDAEMIAWFAETFSAAPGQPHDAAREELRALVKARKHLLDLQTRLKSQNEHAAPEAVQKAHARILKSLATEIARLEAAISAKVKATPNFAERAEIIESVPGFAETTSANLIAGMPELGQVSDEIAAALIGLAPYDDDSGKRRGERHIKGGRRWVRNAIYMPCLGAATQNNPVLKVFYQRLIAKGKEPKVALVACMRKLIIIPNTMIARRQKWDPSRYALS

SEQ ID NO: 283908 - protein, 433 aa, unidentified
MPTTHPYDLVIGLDRSDRKADLHLIDTRTGNVQKQTVATSPEALHDWLVQLRRDHSQARVAICLEQPAANLIVFLETYSWITLYPINPISLQKFREAFVTSRAKDDGKDAQYLAELLLSHPDKLKPWQPDDSQTRQLQQLVLHRRAVVDQRTGLTNRLKALLKQYFPQALDLCGEDLWRPLATAFLLKWPTLQSLKKARKESLKQFYYLQGSRSQTLIEQRLERIDKAVPLSDELALLQSYTLRVQLLCKELQLLLKTLQQFDQQIAKVFQQHTDRPIFEAFPGAGPVLAPRLLASMGSERERFAQPENLQSFSGLAPVTKQSGGKCSIHRRYLCPKFLKQSFHEYAKESILHSRWAAAYYGQQPNKGCGHHTAVRALAYKWQRIIWKCWQTRTIYKEAIYEAALKKNKSPLIGLLDQIELGKSPVKSRAKKS

SEQ ID NO: 283909 - protein, 408 aa, unidentified
MTQNDPQPKRFIGLDVHKHYLIAIGVDEDLNQVLDPQRVALSRLEKWMAKTLRKDDAVALEMTTNTWQLHDDLLPHVGSVTVVHPPHVALITRAQVMTDKIAASILARLHAKGLLVGIWVPPKEVQELRALIAHRNKMTRLATQAKNRLHAILHRGHIQPPEGNLFHEDHRSWWLGLELSPARQTSLLCDLDTLDFANQQVERIEITLKALAAEDQRVPRLVQLPGIGLINALTILGAIGDIARFPSPKKLVGYAGLGGRVHDSGQTRRRGRITKAGRRDLRTAMVQAAQTAVNTHPHWKAELERLKPRLGRNKAIVAIARKLLVSVWYVLTKEVPDHFAEPELVARKLLQYAYVLGKANRPTSQTTAQYVRYHLDRLGLGADLTEILWGTKKRPLPLPSSSLPENSK

SEQ ID NO: 283910 - protein, 452 aa, unidentified
MKVMYEHVAGIDVHKDMIKVAIRSPGEKPWTRKTEILEYRTFYGVLQQMAADLRKRGVTHVVMEASGVYAEPVYYALAEQDFTEIAVINPAHARALKGHKTDAKDCARLAELFECGLLRGSYIPSAEQKEVRDLTRYRMKTVQARTSEIQRLGKALESAGIKLGSVASSITGTGATAMIEALIDGERRGGVLADLAIGRMRSAGKLADLSMALAGRFTAHHALLCRLHLDRIAVFDDAVDGLDGRIAAGTARWPREAGLLKSVPGFGDVVTGAWLGEIGPAPHQWFSRHEKLASWVTLCPGNNISAKKRKHGRTGDAGTYIKPLLIQAAWSAIRVRGRLQARYNRLVRRFGGDKNPAAKKKAITAIAHTLLKIAYQVLKSGTPYQDLGADFYTRRNSPEERQKYLERQLQKLHPGCTITITISPPEAALTPGAYRTPISFSMGAAADSAPRP

SEQ ID NO: 283911 - protein, 396 aa, unidentified
MISVGIDVSKGKSTVCILKPYGEIVSKPFNITHTQKDLSELSSMLFRLNDEVKIVMEATGIYHLPVLTYLQEKGFFVSVINPYLMKSYRNESLRKAKTDKIDSRIIANYGIDHWFKMKEFQTSGEIYEELKLLGQQYRHYMKLHLLSLAELTHLLDLTMPGIKNLLASWNETNRKDKRSDFVERFWHYDVITSMSEQEFTEEYILWAKEKKYVPSQEKAKVIYTLAQESIPTLPSETSSIKMLVTEAVRVLKEVDATLGLILSRMQEIAKTLPEYSVVREMGGVGNTLAPKLIAEIGDVRRFRNGKALVAFAGIDPPPYESGQFVGCNRKISKRGSASLRKVGYETMRSLKMHSRPEDPVYRYVVKKESEGKSKKNIEISRKIYRACLKNHFCNTF

SEQ ID NO: 283912 - protein, 445 aa, unidentified
MEGLPSIRPLVAGIDLGSERHWVCAPTADGRAREVADFGATTPELRRMAEWLRQRPVESVAMESTGVYWIAPQEVLEAEGFETLLVDTRQLARVPGRDRKSDPTDCEWIQRVHSCGLLRGCFRPPEEVCLLRTLVRDKVNLVAESGDWVGRMQKSLDQMDVRVHRAVSDIDGVTGMAILRAIAEGERDARTLAKLRDPRCRKSEEEIAEQLSGHWREDHLFSLQQALKMYEAIQQRIAEYDQEILRKLAAMQRQDLRDQPPPPVKNPQKAKAIKKRGEEEMREALYRISGVDLTGIDAIGVETVQVVLSEYGPDLSRFATEKEFVSHLTLAPRRPTSGGKPVRKKRPHTASTRVASALRMAALSLRNSATALGAYYRRIARRIGGDVAVFATARKLSVLIYRLLRWGQPYVDEGAEAFEKRYQAIRIAALKAKANQLGFELLQRA

SEQ ID NO: 283913 - protein, 348 aa, unidentified
MESVAGLDVGVKKSALCVVTRDASSTRLLRRHRTATDPSSIGSWLASQGVVRVGLEAGAQSSWLAHELEHRGFEVTVMEARRQRAFGAYSKVKTDERDARLIGEALATGLYTRVHVRSVWSQEVRALLGARLQLKRQVQQSRQFVRGHLRAVGVELGQVTGKKWLVAAQAAVAARGGVLGLSLTAMLEACCALGEQVSVLDREIRRLVRQDAPCRRMMTAPGVGLLSALALRASLDDAGRFARSAEVGPYLGLTPSRWQTGKTDRRGAITKQGDSLVRAYLYEAATSLLERQKRDCPLRRWGLAQQDRLGKRRTRVAVARKLAVLMHKLWRSGETFDWNRGMGAITIN

SEQ ID NO: 283914 - protein, 426 aa, unidentified
MRSFALDVHQSFCEVAICEQGEVRSAGRVKSERAALELFAESLDPTDQVVMEATGPAMEIARIIEPHVARVVVANAQDVRAISHARVKSDRFDARTLARLLDAGMLGAVWVPDEATQELRRRVARRAALVRQRTRAKNEVHAVLARCLLGRSPVSDLFGKGGRAWLARQDLPAAEVETVAGCLRQIDFLGEEIEAIDARLCEWVSASPEAKRLMTIPGVGVGAAAALMAAIGDISRFSSPRKLVAYLGLDAKVRQSGESAAQHGQISKRGNAQARAVLVEAAWIAVRSPGPLRAFSERLRARKHAGVAAVAVARKLACLCWQLLSKEEDYAFGRPSLVRAKLRRAELRAGGAKLPQRHGGRRISATPKEREAERELVERAEAAYRRLVDDWHSTGAKGAGATDGRASSGPSTGQAARRTTAQRPAL

SEQ ID NO: 283915 - protein, 300 aa, unidentified
MEHYAGLDVSLKEISVCVVDKDGKTVARGACPADPEGVAGWLRVRSLTPHRIVHESGMLSIWLQRGLARLGLPATCIDARKAHKALSARLNKSDAADAEGLAQLARTGWFTPVHIRSEDADRLRSLVSARERLIRLRKDLEGHIRGVLKTFGIRMTGIGLGRQRQGFRDQLAAAGETDPVLRVIADGFIAAHATLCEAADDLNKAVKRRAKTHPVARRLMTIPGVGPVNALSFIALVDDPNRFSRTSDVGAFLGLTPKRHQSGEVDWSGRVSKVTARFRPPCNLRAVLVSNSKEAIRRAG

SEQ ID NO: 283916 - protein, 308 aa, unidentified
MFVGIDVAKDHLDVHVLPSGAAWSVGNDEAGHHDLIAKLLELKPELIVLEATGGYQTPVVVELALHALAVAVVNPRQVRDYAKALGQLAKTDKIDAAILASFAEKVRPEPRPVPDAQQVELHAMVNRRRQLIDMRTAEKNRLDTSHVARVRKDLQKTISWLNRRIKDVDDDIDKLIRNTPVWREREELLSSPKGVGKTTARTLLTSLPELGTLNRRKIAALVGLAPFNNDSGTSRGKRSIRGGRGDVRAVLYMATVSATRWNPQIRPMYLRLIEAGKAPKVALIACARKLLTILNAMLRTNTAWKLEA

SEQ ID NO: 283917 - protein, 315 aa, unidentified
MTKHFPTVNVGVDVGKSQLDLYLLERGRAMTIPNEEPDISNLIRALRRFRIERIVVEATGRLEQPFVRAALAARLPVIVVSPLKIRRFAEVIGQLAKTDAIDARLIAQFAATVKPAARPASEANARALKDLVVRRRQLTSLRTMEKNRRQVMPPELKSSIDRIIVMLNRELKLLEQLINNAVDQHATSRHKRELLTSMPGIGNTVAATLIGDLPELGSLDRREIASLTGVAPFNRDSGTLRGKRRIRGGRAQSRTALFLSAMVATRFNPDIKRFYERLLSTGKHKKVALIACIRKIVTALNAMLRDNVPWRSAIA

SEQ ID NO: 283918 - protein, 378 aa, unidentified
MNNCTRYLGLDVHAETITAVIAEGRGQIRSLGKFPNRPEPVRKLIEKLGGGKNLKVCYEAGPTGYALYWQLTKLGVDCEVIAPSLIPKKAGDKVKTDRRDAEKLAQSYQSGDLTPVWVPTPEHEALRDLVRQRAAAKADESRAKHRLVKHLLRRGLREPDESRAWTHPWWRWVQSLSFEHEAQQVAFADCIAEVLHMGERLARLDKAIDRLVESAPEHMRAVIEALQALRGVAKLTAVTIVTEVGTFKRFRRPTEMMGYTGFVPSEYSSGGRECKGRLTRTGNAHLRHVLGESAWNARHRPWLNLRMKKILPTLPDGVAEIAWKAQERLHRKFTKMTCCRKPAGKVAAAVARELVGFIWAIGTLVESRLDGNNKARPA

SEQ ID NO: 283919 - protein, 371 aa, unidentified
MADYREAFVGIDVAKLRNAIAIADAGREGEVRFFGEVDASDTSMRRVIQRIAAKFDRVHFCYEAGPTGYGLYRLILSLGHECMVVAPSLIPRKPGDRVKTNRRDALALARLLRAGELTAVWVPDEGHEAMRDLVRARAAAVETLRVHRQHVSAFILKHGRIYPRKKSWTMRYLRWLQEQPFDHPAHQIALQEMVEAVRVSKERVERLEGVIEEFVPTWSLAPIVRALQTLRGVDLIVAVTFAVEVGDVQRFESPRQLMGYLGLVPGERSTGETVRRGGITKAGNGRVRHMLVESAWTYRHPPRVGAKKLYRLEQAPPKVREIAWKAQTRLTARYRMLSGRGKRTTVVCTAIARELAGFMWAVAGEAEAIKS

SEQ ID NO: 283920 - protein, 298 aa, unidentified
MGSYQNDLVIGIDLGDKQGQVCMLNLSTGELAEDRVTMTPKAIRRSFGAVEARLVAIEVGTHSRWVSHTLEELGVTVVVANPHRLQLISKSDSKNDRTDAELLARLASVDPKLLAPMHHRSDQAQADLTMLKTRDNLIKTRTAMVNPVRGMAKSFGFRLRKCGAASFPCHVFEDIPVVLMPAVSPLLEAIESQTRLVKDLDRQVTRQCEERYPETRHLLQVYGVGPLTALAFILVIEDPHRFEKSRSVGAFLGLRPRQSNSGRNQKPLRITKAGDSFLRSPLVQCAQYILGPSGKTVI

SEQ ID NO: 283921 - protein, 394 aa, unidentified
MKLVGIDVGKNSHHFCVMDKETGEFNVTPSSFSNNKEGFDFLINSLKTYSKKSILIGMEDTGHYHVALLKFLLSNGYTVALINPKTTDLTRKMEGGITKNDKLDTITICDVLDTPERKKQYRITKVDRFDLYEQRQLTRHHHNLKEELNVYCNRLQKSIDLVFPEFNTLFSSKYSIVYMNLLKTFGSAEAIASTDIRTIRKCFEIKGRGNRISLTPEKLKECAKNSIGISSEVETIQIRHLVSQITLIKEQIAEIDKKIEESSITNNSPILSIPGISHFSGTSILAELGDIGNYSKPSQIIKFAGVAPYHYESSQYNAQHTGITKKGSKYLRKTLYQIILTVINNNPVFKKYYLLKISQGKGHRCAQGHCIRKLLRIIYHLLETGQSFDPALLR

SEQ ID NO: 283922 - protein, 486 aa, unidentified
MNSIVLTANVQPNLDVNYIGMDVHSDNVVVCVRRNTINSSGQLVGKTIKTKKVVIKNSQEPLVELLSKYADGQQHIMTAESTFNWYWLADIAEDHGWNFRLADPCTVSQANIKAANDETDAEYLADRLRTGSLKSTSVLPRQLRGVRDLMRHRLHVMQEVSDKKVRLSNLYHNHCAHPMHGKLLAALQDAYDEINIDAVLESGICNNGSELIIGDLLTGLREAETRLAKIEAAVYARIDEIDSYKAERMLLKTSIKGCGDVLSAIIVTEIGDISRFRTMGDFVSYCRLAPTSKLSNGKSKGQGNAKNGNAYLSWALTELATLMARFNEPIRRYLERKQEKTGLRVVAVRALAAKLARCVYQVLRKKESFDLGLAFGSKPTHGQMTAAAEAAQTPPEPALPPVPAVAGEHHCPAEESDAPIVVKEPVPVKSKRSTRKKAVSAASSEPAVAAEGRQTARKADRVKARCALTTTPPSCAGTSCVKSRRE

SEQ ID NO: 283923 - protein, 466 aa, unidentified
MGKVKLGHRSKVFREAFGDDFNPTSLAIVAIEVAKNKSMAAVFDYFGEQLHHSFFFTPDFRGVEEVCKVATASAAKAGKTQLVYGLEHTGHYHEHIAAALRERGCVLMPLNSLTTRRERDSMLDYNKTDDLDLHTITAAISAGKSVADRYPVGRETKLRFITRTRRGMVRDRARAFIALHTLLDHYWPYLQGVPEIVNGKPVLHRIFWKPWSEQAFEFLRHVKTPGQALSLGESGLEQLSREKRLRLGKRRIALILQAAKLAPKIEESLLGLYVVHLEEILDTISYLNKRIGELERRSQAILADSRGVLLLTIPQVGPVTAAEYMAEIGFQISNLTSASAIVKLGGTNPVLKQSGDHRGLITKISRQGIVHLRCLTYMLGKNLLEGRGNPYFKAFGQRLKLLPKQKRIAVGNKAHHIAFAMLKKGEIFAPKTWQGPPLADNPLKKLLPEFRDTASQQLKNLGIDRY

SEQ ID NO: 283924 - protein, 326 aa, unidentified
MQGKVPSQRSAAAPVYIGIDVCKARLDVYIHPLGESLAVPNDAGGLKRLKKILARYDVVLVVMEATGKFHRLAHRNLHDSGFKVAIVNPLRSRRFAEAIGTLAKTDRVDARMLALMGESLKPEALEPSPELMETLQELARGRESAVDQKTAIVNQIQTSNSKVLVRELKRQLRAVETAIENLEAELQRQIDADPVLARRFEILTSIPGIGLVAAVALIVELSEIGRLSSKQAAMIVGLAPIACDSGQKTGRREIRGGRKHLRTALYMPANSAKQHNPDLKIFHDRLIKAGKLAKVAITAVMRKLLVLANTLVREDRLWQPRAVIAK

SEQ ID NO: 283925 - protein, 319 aa, unidentified
MRTRQVTVIETICGTDVSKAWLDGWTVSGGHLRFANDPAGVANLGEWAVAHGTALVVMEATGGVEQFAFLALWRRGMPCALTNPQRVRKFAEALGKLEKTDRIDAEVIARHADALRVNPTRPKSDKQQHLDALSTRLQQVTSDLTVRKMRLHSTRDPVALEESLCEVIALLKKQTKDLAHRIAELVNDDPLWSALDQTFRQIKGVADRTVAVLLAELPEIGVLSNKAVTKLTGLAPIANDSGKRQGRRPIRGGRATVRNILFLVADIAREYDKSLTEFRQRLLDQGKPKMVVRIALARKLLVRLNAMARETRQSLAANA

SEQ ID NO: 283926 - protein, 420 aa, unidentified
MLTFAQSREGFRALVDRIQAYVPLTQVYVLLEVTGHYHQALLQYLHELDIPVYLMHVQKRQAGLLKSDKRDALGLANHLYNALEKGVQTADPLLAVRRLAPPTEAAAQLQGLVQHRQELTAEQTQRKNKLTAICDELFPEFVQICKDPNLPWALALRQAFPTPAAVATASLNALAAARTGNHPSAAKLAELQRLAQQRIGTHDVARVRGLSFEQQQLIVALVVIHQHLEALEAEIAQVIAYSREGQILTSIPGIGPTQAATILATIGNIANFDRPAQLKAYCGWAPTLTQSGKTLDHARLTPRGARLLKQTRYLVVWQTLRWPDNEFARLYTHLVPRKCSYAERTRQFRGRGKVVGRIAGQLITVMFTLLKRDQQRLASSSGLMPDPEWYDPEVHRRHRAGQYAPPARTKLGNVVQLPSP

SEQ ID NO: 283927 - protein, 396 aa, unidentified
MDAALLWSEEGEMPAKRKVVDPLEPERHRCARVEMSSNHSRDRGSAMNITTYALDLAKQVFQVHWVELDTGEIRRKALLRAEVNAFFAQRPPGVVAMEACGSAHHWGRVLRGLGHEVRLVAAQFVRPFVKTNKTDAADAEAIWEASQRPGMRYVALKSEEQQAVLSLHRMRQQCIKVRTMQAHQVRGLLYEFGAVVPKGWRALLAQAVPLLADETRCGVPELVRRQLLTQLEGLRALTRRVTELERQIGSWQRGERECQRIAAVPGVGKLTATAVIATVGDARAYRSGREFAAWLGIVPRQSGTGGRIKLLGISKRGDPYLRTLLIHGARTVLNHQSRADRQLDPWLKGLISRRPKNVVIVALANKMARTIWALLAHGREFDRCWSRAWMPAPALS

SEQ ID NO: 283928 - protein, 297 aa, unidentified
MLRVRGVDVGTTDLVAAVWTDGQEQAPGTFPHTPAGFAALATAVGDRPDRMIFAPTGGDALALADWAVARGWVVCRPNPRHVRDWTRRQGRRAKTDRHDALLLARSGAKHDLPAWTALPSAVAELERLLRRRDDLEQVLRQERNRQQQLTNRPGIATAVPPSLKQVIEALEDALREVEQAIAAHQRQHADLDAAIQRVRTVPGIGARTCLWVVVVLYRWQTLTNGKGETKGLTAYVGLDPTVYESGTSVRGPRTISRIGMAQVRRLLFLGALGGVRGKGDNSDNTRQHVRSRTHMAI

SEQ ID NO: 283929 - protein, 341 aa, unidentified
MSIITVGIDLAKNVFAVHGVDERGKAVLVKPKVARDQLPPLIAQLPPCLIGMEACSGAHHWARLFRQHGHTVKLMAPKFVTPYRMGGKRGKNDAADAAAICEAVTRPNMRFVPIKEEHQQIILCLHRTRQGFVAERTALYNRVRGLIAEFGIVLPQKVTHLRQGIGACLEDLPGYANQCIGDLLAHADQLDQRIDGYDRIIAQAARDDARSQRLMHLPGIGPITASALLASLGGGHDFANGRQVAAWMGLTPGQYSSGGKARLGRITKAGDPYLRSLLVLGARAVLNSLGEKQDRFSRWARTLAERRGYWRAVVAIAAKNARLAWAVLHYGEDFRLMPSTA

SEQ ID NO: 283930 - protein, 351 aa, unidentified
MFFAGLDVHTRYVVLVVINRMGERVLGPTRVRVDQPERLLTLLAPYRQLDAVMETSSSWPWLHELLSGAGIRFVLAHARRLRAIAESNYKRDDIDAELLARMRLAGLIPEVYPTPPSQREWATLLRHRTSLVAQRTACVNRIHAQLHMRGWSIERGRLLTRAGRQWLRTTAWPHLTREQRVLVRTHLRLIAGLRPFIRALDRRIAQVAATIPQARLLMTIAGIGPQRALMLCAEALPIERFRTPGHLASYAGLVPRSRQSGVGRIRHGTIPPGANRWLRGALVRAVVSHVQHAPDSWLTHYYLTQKMRVGWPTARVAAARKLARAIHAMLRTNTPWINDPARGELQETHAA

SEQ ID NO: 283931 - protein, 400 aa, unidentified
MLSIGIDVSKGKSTVCGMKPGGEIVYAPFEVQQTREGMSELVSLLRSSGEEVRAVLESTGSYHCPVVAALLENGIFVSVVNSLRMKRFCSQSIRKVKTDRIDAMQIALYGLAYWQELQPTRLPEDTYRELQLLARQYYQMTSLLIKAKVDFNAICDQVLPGMQELMSDHAGRHKLSDFVLRYCHTTHILEMGETRFRKDYCKWAEKKGYRNCERMAVLIFATAQNGIPVLPNAPSTQIVITEAIRVLHTVEASRDAILTQMQALAKTLPEYSLVREMPCIGDTLAPRLIAEIGDVRRFHSKRALIAYAGIDAPPYQSGKFCANNRHISKRGNRYLRKTGYEVMQSYVMHKPANDPIFTFIEKKRGEGKSGKLAMVAGLNKFLRVYYGKVTELYRSLPAIE

SEQ ID NO: 283932 - protein, 501 aa, unidentified
MKTKRRKAKLQAGIRSISVTSNEAEQKLEIMRPDAAGIDCGAQEHYVAVPVDRVSAGQPTVRSFSAFTEGLDAAVDWLKECRVTTVAMESTGVYWIPLHQKLEAAGIEVYLVNARHVRCVPGRKTDVKDSQWLRQLHRFGLLNASFRPEDITCRLRSLHRHRDNLVSSSASEIQHMQKALQQMNLHLHHVVSDITGLTGLRIIDAILSGQRDPQELIKLRDKRVSKSTPQQMQAALVGDYRAEHLFVLSQSLQAYRFHQARIEECDRQTEPLLEKLAQQVEAASARLKPLKGAPQEERLPVPRNELKTGTSASGQPNKAKRKHKPIANEPKIELAGLLERICGIDLTQVVGLNVLSVLLIVSEIGIDMSKWRSAKAFCSWLGLCPGNKISGGKVLDSRTRQVVNRVADALRLAAQSAGRTETCLGIFYRRKQAHLGAPKATTATARKLACLIYHLLKYKQPYQKLDPAIYQLRLQKSALRKLQNQAITLGYKLIPTANVPA

SEQ ID NO: 283933 - protein, 403 aa, unidentified
MRSVLSIDVANGKSEVLLITEYGEVLIEPYEVKHCLNEFNQLKERIDSYNLDDLTIFMESTSTYHLPIQRFFTTNNFKVQVINPILGKNNTRNLRKTKTDIEDCYNLADLFFKNTVKIYTKEINTIYSNMIELSRQEKHLTENIVRSKNRFKQIIANAFPEYIKCFSSSNIYGETSLNFIREFPHADIIKAKRIDALANNIYKSSKGYLPYPRCLNKAKKIKELASNSYPGIDINSCEVKNLINIIDIIIYNSNKLNEVKQDIVNLAKQTPYFNIINSIYGIGETSTAQIIAELGDINRFENIKQLNAFCGLDPTIIQSGKSINYNGPISKRGNRNARKILFITCCSIIRSSVLHNIDTDILFYYRKKQAENKHFKECITACSTKLLRIIFAMCKNNSLYVQK

SEQ ID NO: 283934 - protein, 430 aa, unidentified
MMEEVDDAELVVERIAALDLGKAGLEACVRVPSPHRPGRRMQELRGYGTTTAQLLEMVAWLRQWGVQRAVMESTSTYWKGVYYLLEAEGFECWLVNAREVKNVPGRAKTDRADAIWLAKVAERGMCRPSLVHPAEIRRLRDLTRYRRALVQDRTREQQRIEKLLEDAQIKISSVLSELHGVTARAMMDALIAGQRDPRALAQLAKGRARKKTAQLEEALRGFFTDHHAAILRMMLDNTDRISAQIAALDARIEKEIGPFSGQVARLAEIPGVDAVAAAELIAEIGVDMTRFPSDAHLVSWAKFCPQTHESAGKSKSKGRGRGNPWLAGTLGRIAFANSRADTFLGARYRRLARRRGKQKAIVATGNSVLTVVYYLLSDPMATFCDLGPGYYESRINVHRRARDLVTQLQALTGQHIVIRDGKAVITDAAA

SEQ ID NO: 283935 - protein, 349 aa, unidentified
MLIIGCDFHSRFQQIAMVDTETGELIERRLEHGNGEAKKFYAELQKPGRVGMEATGYAQWFERMLAKLGHELWVGDAAEIRAAMVRKQKTDSRDAVHILDLLLTNRFPRIWIPSPEERDVRQLLRHRHKLVGLRTSLRNQLQALAMGQGVCRKKKLWASRGRAELEALGLDPWARRRRQELLEILDRVDPSLAELDRAVAQEAEHRPAARYLMQQPGVGPVTALMFVLTIGPIERFQRSKQVVSYLGLNPRESSSGGRQRLGAISKQGNSLARFLLVEAAQTASHYDEDLRRDYQRLKFRRGSAVAKVAIARKLAVRLYWKLREYSSPAPSTRTQGSPETPVVGASLSS

SEQ ID NO: 283936 - protein, 345 aa, unidentified
MEHFAGLDVSVKETSVCIVDDTGKIVREVKVASEPDALLAVLTNPAYRFKRIGLEAGPLSQWLFSALAEAGLPAICVETRHMRAALKAQINKTDRNDARGIAQMMRAGLYRPVHVKTLRSQKLRMLLTHRKLLQSKAIAIENDLRATLRNFGLKVGGVGTVKFEARIKELVEKAPDLMMLVEPLLVVRRALREQIGILHRRLLAIVRDDDVCRRLMTVPGVGPVVALTYRATVDVPVRFRNSKAVGAVFGLTPSKYQSGEINRTGAISKCGDEMMRAMLYEAAHILLVRSAKWSWLKVWAMQIARRRGMKKAIVALARRLAVIMHRIWVDGTEFRWTREQPTAAA

SEQ ID NO: 283937 - protein, 345 aa, unidentified
MQSMYYIGLDVHKKTISYCVKDGSGRIHAEGAIPATRLDLDIWMKRLPQPWTVAMEATIFTAWIYDHLQPHAAAVKVAHPLMLRAIAAAKKKNDRIDANKIADCLRCDFLPECYMASTEIRERRRTLRYRNLLVRQAVQMKNKIAVLLMEAGVSYNKQKLHKVRYFRELLATNQDIDDGLRALLRLCRETVVRLGKTESALVRSLQRDSLLIERVERLMTIPAVGPITALTWALEVGDVQRFSSIKKAISYCGLCGAEQSSANIIKRTPLSKQRNKHLQTMLIEAAKMAPRNSPDLAMLYDREKQKGNANRATLAVARKLVAYLVAVDRRQKDFLIVERENRTAA

SEQ ID NO: 283938 - protein, 415 aa, unidentified
MQTLYPRVAGLDVHKNTIVACARHVDAHGKVKEEVSTFGTMTDDLLSLSDWLAARNVTHVAMESTGVLWKPVWNVLEGAAWELLLVNANELKQVPGRKSDVKDAQWIAQLLACGLLRSSFVPPPPQRELRDLTRQRAQLAGEHTRCVNRVHKMLQDANIKLSSVATDVLGVSGREMLTALVAGKDDPEELAELARGKLRGKIPELKRALRGQVTRHHQFLLEQLLDHLAHLEHQMALFSERIAEALRPFVDEATFNRLDAIPGVNRETIENVVAEIGVDMKQFASAGHLCSWAGVCPGNEQSAGKRKRSRTTKGDVWLRRALSQAAWAAARKKDSYLQAQYRRLAGRRGRKRAVVAVGHTLLEIFYHLLKNPTLEYHDLGGNYFDMLDPQRLCRHLVRRLESLGYQVTLTAQPAA

SEQ ID NO: 283939 - protein, 347 aa, unidentified
MKFYTQQHQHYCGIDLHTKKMYVCILNQQGETVYHRNINTDPDTFLKIIQPFRKDIVVGVECMFTWYWLADLCMEEGIDFVLGHALYMKSIHGGKAKNDQIDSRKIAALLRGGMFPPAYVYPKEMRAVRDLLRRRNHFVRKRAELLAHIINTGSQYNLQEPFGRIRRKNHREGLLEKFDNEDVRKSIAADVTMLDAYDGVIATMEYEIQKSAKHHDPVSYALLRTLPGIGEILGLVMLYEIGDIQRFPRVQDFASYCRLVKCARESNGKVYGSSGKKIGNAHLKWAFSEAAKLFTRWNQPAKRYKQKLMKKHNKGKALSIMAHKIGRAVYFMLKNKVPFNQRKLLGY

SEQ ID NO: 283940 - protein, 356 aa, unidentified
MRYFAGVDTHKDSHTIVFLNAAGESVEQHVIATTPTGFLEAISAARTLGDVVWGLEGTGSYGRSFAEALCANGYDVFEVPGSFTKRYRKFGSRPGKSDPLDAQAIAQVVMRESGRLRAFEASDQEEAIRLHYDRRNRFVRQRTEAVNRLRAVGMRLNFGSLPKNLVTEKSLLTITRYAKIVDPSGYTTIALLDEVQDAVREIRDMNAKIKTVEHYLRPFVTHLAPELLAIHGISLVVAAGLIGHTGNLEHYRDAAAFAMRTGTAPIPCSSGRTSALRVNTGGDRQLNRCLHTIAMIQAHKADHPGKIYYDRKRAEGKNNLAALRSLKRQLATVVYYRLRSAYGRMHPQVEIYHVAA

SEQ ID NO: 283941 - protein, 356 aa, unidentified
MLNDAKYIGLDVHQATISVVVLDGTGHLVMESVIETKAATILQLLHGLSGSLQVTFEEGTCAAWLHDLLRPHVAKVVVCDPRKNALLRAGNKNDRIDARKLADLLRSGLLSAVYHGENGVRTLKELARSYLTLTRDTTRVMNRLKALYRSWAIPCAGQKVYAPRYRNQWLAKITEGGVRRRAEFSYQQLDALRALRQHVRRDLLTESRKHSAMNLLRQIPSIGPIRAALLIALMQTPHRFRTKRQLWAYSGLALKTSTSGEYRFVEGQLKRSKKFLAIRGLNANHNHDLKNIFKGAATRAAAVPGPFQEFHAALVAKGMKPTMARLTLARKIAAITLIVWKKGVGFDAEHLKQQAA

SEQ ID NO: 283942 - protein, 338 aa, unidentified
MSIVHVGVDLAKNVFAVHGVDESGKAALVRPSVSRAKLSDLIAGLPPCTVAMEACSGAHHWARLFAAYGHTVRLIAPKFVTPYRMSGARGKTDAADAAAICEAVQRPAMRFVPLKSEQQQSQLMVHRARQGYVQARTACVNRIRGLLAEFGHVLPLKADTVRRQAAGVLEELPGWGNTVVGDLLSELHRLDERIAQYDRHVAQIAREDERARRLMQLPGIGATTATAMVAMIGNGHEFKCGRQLAAWLGLTPGQYSSGGKTRLGRITKNGDGYLRSLLILGARSVLALAKGRSDAISSWALALQQRRGYWKAVVAIAAKNARMAWAVLRRGENFKMPA

SEQ ID NO: 283943 - protein, 358 aa, unidentified
MDIRRIQDFVVKGKEIFVGLEDSKKTWKLAVRCDRMVVRQASMEARYPVLLSYLRNNFPECTINLIYEAGFKGFTLHDRLMEDGITCAVIPPHLVTEPKVNRVKTDKRDAGRLALILENGDMPSLCCVPDRERREDRQVSRTLIAVVRDIIRTRNRIHKLLDFHGIGVPFEMKAKWGEKEFGILRELPMSAPLRASLDVLLDLLEHLWRHRETLTAYLKGLCDKERYRKAFAIAESLPGIGWKTAIRFVLEFGEDFSRFTSGKKIAAFAGLTSREHSTGETERKGKITGLGQGFIRSTLIENSWAAIRKDQALLAKFTRVWRNSGSKKKAIVAVARTLVIRLRACMVSGTPYATGIVR

SEQ ID NO: 283944 - protein, 412 aa, unidentified
MRRVIGIDVHRTFGEVVIWEDGRLRHAGRVDMTRTAREGFGKSLLASDEVVIEATANSMAVSRVLAPFVARVIIANPLQVKAIAQAHVKTDKIDAGTLASLQAAGYLPQIWTPDAVTERKRRLAARRYQVVRHRTQIKNEVHSILHAHLIPKCPHADLFSARGRAWLARQPLPDDEGAAVGRHVRELDRLAEDLTVLDREIAQAAIDDPAVRRLITITGVNLTVATGIVAAIGDISRFNSPQKLVSYFGLNPRVRQSGLGAAHHGRISKIGRSHARAMLVEAAWAAAKAPGPLHAFFVRVRARRGHQITAVAVARKLTVLCWHLLTKGEDYLWARPALVANKTRTIELQAGHPQQKGSRRGPAYAYNVKALRDQEMLVAAQAERSYERFVAQWEPRRPKDAARGRLKSAGPK

SEQ ID NO: 283945 - protein, 360 aa, unidentified
MFSERTSVGLDVHARSVAAAAIDGVTGELVQARLTPSHGHILSWLADLPGPVAVAYEAGPTGFGLARALDAAGVRCVVAAPSKLQRPAGDRVKTDARDAVHLARLLRLDEVVAVGVPTATIEAARDLVRAREDCRGDLMRARHRLSKLLLRQGIVYSGGQAWTGAHDAWLRRQSFDASATRAAFESDYEAVLMVKARRDRLDAAITAMAAESEFTPIVHRLGCLRGVSTLTAFALAVEIGDWHRFTGNTIGSFVGLVPSEHSSGGSRVQGAVTKTGNGHARRLLVEAAWHHRARYIAGKTMRDRWELAPPAARVRGDEGNRRLHHRWVVFNERRKRHTVANVAIARELAGWCWSLAVMDD

SEQ ID NO: 283946 - protein, 402 aa, unidentified
MNSVGIDISKGRSTVAVMRSFGEVVISPFEVRHTDSELSELARQLKSLNGETRVVMEATGNYHAPVAKLLHDAGLYVSVVNAKLVHGYGNNNLRRIKTDRKDAVKLANYGLDRWLTLSRYIPEEDTRLLLKNCYRQYRQYSKVQTVLKNNLISLLDTVFPNVNRLFSSPARADGSEKWVDFVAEFWHCECVCERSEKAFVSKYQRWCRKHGYNFSEGKAHDIYTEAGGHIGVMPKSETTKLLVEQAVSQLKATSAALAALKQEMLSLTSQLPEYPIVMKMFGVGPTLGPQLIAEIGDVRRFYSKKALVAYAGLDAPPNDSGDVSGRHKSMSKIGASSLRRTLFLVMTVYLQNKPLDEPVYQFMDRKRAEGKPYRVYMMASANKFLRIYYATVKAYLELLERT

SEQ ID NO: 283947 - protein, 339 aa, unidentified
MFMIGIDPHKGSHTAAAVDRDETVIDTLRVDADCHQRAVLLAWAARFEPRTWAVEGATGMGALLAQQLVAAGEHVVDVPPKLSSRVRLLERGRIDKTDPNDARSAAIVGWRTPALNVVGGLDEHRVVLRLLADRDHQVTANRTRTICRLHALLCLLIEGGTGRALTAMKANELLATVHIDGPVTLERVAAARQLLDEIQTFDTARVEVRKHTKEIVGASATTVTEIHGIGPLTAAIIIGRVGDVSRFPTAGHFARHNGTAPIEASSGPTKRHRLNPRGDRQLNHAMHMAAVTQVGHDTPGRVYYLRKQAEGKTRKEAMRALKRRISDAVYQRLVADTRN

SEQ ID NO: 283948 - protein, 343 aa, unidentified
MKLHVVGIDLGKTVFHLVGLDSTGKAVIRKKCSRTQLLAFTANLQVQLIGMESCSGSHFLGRALREQGHEVRLMPAQYVKPYVQTNKSDFLDAEAIAEAVQRPRMRFVPIKTEEQLDLQALHRVRERWVMRRTAVVNQIRSLLLERGLTLPKGRSYVDRQLPRILEDGELRLSGSFRVLLAQLKLELDQLTARIEEMDRVIQKTAKENEACQRLTEIPGVGPVTATALVAAVGNASAFQKGRNLAAWMGIVPREYSTGGKQKLLGISKRGNKYLRTLFIQGACSVVQQRHKQAPGLSHWLEQLLGRTHQNVVIVALANKLVRMAWAVLCKNQRYRAPVLAVTT

SEQ ID NO: 283949 - protein, 343 aa, unidentified
MYIGLDVHKKLSYYSMVDGEGTEVKKGRFPTTCEGLDEFANELPEGAKVAIEASTSGIFAYEYLDEGGIEVHLAHPVYVKPFAKKHVKTDRVDARVLAQLLRMDYLPESYVPGKEIRDQRVMIRHHASLVRLRTSIKNRVHALLAIEGIQTSEFSDLFGKRGLEFLKGVKLRQVRREALDNYLEVLKALEERIEEMEAILKERAKITDEAKWLMSIPGIGYHNALLILSELGEIERFSNPRSMVSYSGLAPKVEQSGDYTRYGHINKHSNGFLRWAFIQSARAAVRSSKPNRFQRIYNKIKARRGEKVAIVATARHLAESVYWVLTRKEYYKENRAIRASSFS

SEQ ID NO: 283950 - protein, 368 aa, unidentified
MGRYVGLDVHSKHSVYAIQDDSGRLVGEGSVPTTTEGLQLLRARYELPDATRVALESGTMAFFVARRLTRLGFAPLVVDAHEVRQKALRPNQKSDRRDALELCEGLRRDVYRTTVHVPPEAIERLRETLGRRRHFVRLKTMEVNAVKRLLRATGLPVSTRCLSTPTAWERLLKALEVEPGLQAFCASHRAVWLCAHEQVATLDASLRAQGHAFEAELARLQTVPGVGPIVATTMLAALSDVSRFPSAKHVASYAGLVASTYDSGESVRHGHITRRGSSELRAMLCEAAHHAGRPSSPFHPYFTSLCARRGHKMAVVAVAHRLCRIMFTMLRKGEDFDINKLGIERGRFEHKIVRHYRRKVAVATKASR

SEQ ID NO: 283951 - protein, 422 aa, unidentified
MHEERRWFVGIDWASQEHVVTLCDAQGNKIGEREFVHGGTGLSDMIAWLLKASGGAPGEIHVAIETPHGPIVEALLERGFNVYSINPKQLDRFRDRFTVSEAKDDSLDAYVLADSLRTDMHLFRKLIVSEPLIVELREWSRIDEELKAERVRLANRLRNQLWRYYPQMLELADDLSGEWVLDLWEAAQTPEKAARVREATVARILKSHRIRRFDAAHVISELRKPALSVAQGTTEAATAHIRLVVAQLRLLNRQLADAGLQLDRLCKKLAEPIAGDEGENVPGQRQEHRDVTILDSLPGVGRTVLVAMLAEAPDALQRRDYHALRNLCGSAPVTRRSGKSCLVMRRRACNRRLRNAAFYWAQTASQCDPTSRAKYKALRARGHGHARALRSVVDRLLYVACAMLENRTLFDPSFAEKKAAAA

SEQ ID NO: 283952 - protein, 415 aa, unidentified
MADPATSVVLDPSSFSYVVGIDLGSEACCFTVLTPQKQVVIKPRGFANAASGFHQLQAQLARLERDPSRIVVGLEATSRYGENLFHFLQQQGYHLCLLHPRQTHEFAKQRGLRAKTDRLDAATIARVLLSGEARVGYVPTQHIASYRELVRLHTRLSDEIARDKNEIQGLLVVLFPEFTQVFADPCRMTATAVLQAYPSARTIRAAGVDAIAAILHATAPHNYGRETAQRLVDVAHQSVSSGLAVEARELSLQIWCEQLRSTQVHLEQIDAQIERLLSDDPEAKRLQAIPEFGQQTVAVLLAELGEVARFQRLDQVVAYAGMDIEIKQSGKWQGKAKLSKRGSGLVRRMLYMAAMRCTWLPGSAFGSYYHRLLARGVGEMTALMAVMRKMLLVAASLLRTGEEYDPTRVAPGPAG

SEQ ID NO: 283953 - protein, 347 aa, unidentified
MKFYNQQHKYYCGIDLHARKMFVCVLDQKGKTMVHENINTDTDLFIQIISPYLGDIVVGVECVFCWYWVSDLCAKHQIPFVLGHALYMKAIHGGKTKNDKIDSYKIALLLKGGNFPTAYSYPAEWRATRDLLRRRMYLMRRCGELVAHIQNTKTQYNLPGFTKRLARKYNHDGVAEKFENPEVRKSVEVDLAAIASLNQILNQLEWHIEKTAEQHDYHTLYLLRSMPGVGLILALVFLYEIQDIKRFPSVQDFSSYARLIKPVKTSDGKWAGKSNGKIGNHHLKWACNEAAILMLRESEKAKQYVAKLERKYNKGKALGIFTHKIGRAVYFILKNKEAFNMDRFFSQ

SEQ ID NO: 283954 - protein, 429 aa, unidentified
MAGAATRRAHLTPVPPLARESLYVGVDIGKQSHVAGFISTTLLERHTHFEGCPALAFANGREGFTTLLDRIRAYVPPQQAFVLLEKTGHYHLALLGFLQEQGLSVHVMHVQRRPAGLLKSDKRDALALGNHLYNQLEKGVQLAERSQLVRQALPPTPAAIELKALMGHRFELLHDSTRRRNKLTAIADQLFPELTTVLRDPNAPSALALRLRFPTPRDLARASQADLLGVRSGGQPRVDKLERLREIAASSIGVTDLAHQRALIFEQETLIAELELIRRHLARIEEEMVHVLANSREGRILRAIPGVGPLTAAAALAAIGNIGNFPTAGALKAYFGWAPQVAQSGTTLDHAGITRKGNRVTKQILYMAAVAAVHEDGSPWQALYERLVPLKCVRDGRTGQWRGKRVVLGRVAGQMTRMMYEVSPIARTN

SEQ ID NO: 283955 - protein, 352 aa, unidentified
MPLSRKIWAGLDLGDQYTSICVIDDAGTILQQSQCPTRVECVHAELRWLRRRRFARIGLEASTSFSLARGLQSRGYSVDIFETRQLSKFLAIRRNKTDSNDARGIAEAGRLGGAVLSKVFLKSIECQALQSRLTLRSQLIRQRVAMQNMLCRQIRQYGGNLKPAKKALQLRSEAEREMRRVFGKVSTPLTSELRYLLQRCGELMIYQDKLDRELARLARTNAICRSFMEIPGIGTICALTFYCAVGEPNRFRRVADVGPYFGLTPKVSQSGQSVRPGRISRMGNSAVRSLLSRASLVIMRSNARQSGLRDWALRIEKRRGRARARVALARKLAVIMVAMWKSQEEFRPECTG

SEQ ID NO: 283956 - protein, 419 aa, unidentified
MKAFVGIDWGRQDLWVAVVDQDENTLGAKRFDNTMRGAKEMIEWILKVSSCEKEEIAIGIETKSLSVVDVLLEEDFEVFTISPFCMEKFRGMYSPSRSKSDKQDAVVLARTIRRDPKAFRKVVKEDEKIARLREWTRRLCDIKEEQVRLMNRIQDFLARYFPNFLRIAPSFDSKWVWELWEICKSPREAKKLKRETVEKILKWHKVRSVTVEQVISELSEEGLIQSKDFEKDYKALVEMDFERLVQAFEQAKVCERHIDRITQEIERWERKEENRKVTTVESISSLPGAGRVVTAIILAEAYSLVRNAKYRELRIYSGAAPVTRQSGSSRFVMMRRSCNRYLRYALYHLARGAMVNSVHWRRLYAEERRRGKRHGTALRKIGDKLLCILARLLIDQSLYDEEVVKKNAEKKLALTERRP

SEQ ID NO: 283957 - protein, 386 aa, unidentified
MRPTLLCNGESVACAGSFDPRMAFGQSVAQPEPRTPCAPNSNRCLSVGYHRQLVYVRMSPNTITTMQTIPVTVYAGVDVAKATLQLHLQGRQAEFSNQAAGLVQLCQQLKTIPHIHVVCEATGGYERLLVQAMHQAQIPVSVTNPAQVRAAAQAQGQRAKTDRIDAALLTDYGQRYQPKPTSPTTASQDQLVALTQWLMQLVQAQALAKTQAEHHQAAFVCGRHTKLMAHYQSQIVAVEKQIRALLAQDAQLQQRVDCLDEIKGVGARTAWLVLAHMPELGQINRQEVAALAGLAPWTRESGTMKGMRCIGGGRPEVRLALYMAALSAARCNSVLKPFYQRLRAKEKPAKVALTAVMRRLLVYMNHQLKALQATQTDTKLQNSKIP

SEQ ID NO: 283958 - protein, 367 aa, unidentified
MKKVSTAARKQSRNISGQRLTIGLDLGDRNSWYCVLDEVGQIQLEQRVRTTAKALREVFSQLPRSRIALEIGTHSPWISRLLSQLGHEVIVANARKVRLIGESRKKDDRLDAQTLARLARIDRQLLYPVKHRSAQAQADLMMIRARAGLVRARTGLVNTARGLAKSYGERLRGCNVRDMDPEKAEGLSPELQRALEPLLGAIEELSERIVEYNDRIEALAATSYPQVALLKQIKGVGTLIGLTFLLTLEDPHRFAKSRDVGGYLGLQPGRRNSGESEPQLHISKEGDPYLRTLLVQGAQHILGPFGIDCDLRRWGLKLAQRGGRNGKKRAIVATARKLAVLLHHLWVSGEVYEPLHNSSRTTVAAAA

SEQ ID NO: 283959 - protein, 412 aa, unidentified
MQVVNARCAGLDVHKKEVVGCIWITDEQGRATKEVKTFGTMTADILALSDWLKAHQVRQAAMESTGVYWKSIYNLLEGDFELLVVNAQHIKAVPGRKTDVKDAEWIGDLLRHGLLRGSFIPPRPQRELRELVRHRSNLVGNRARAVNELHKILESTNIKLGNVASDLTGVSATAMLKALVDGQTNPVVLAELAKGRLRQKKVQLQQALQGTLRPHHQLMISQLLTDLDFFEEQIAEVSQAIEERVRDHQEVIDRLDEIPGVNQRVGEVIVAEIGTDMSRFPTEAHLASWAGLCPGNNESAGKRKSSRVRQGNRWLKSTVVEAAQAAVHTKDTYLSALYHRLVPRRGHKRAILAVARTMVGIAYHMIQRGTRYTDLGADYFEKRNPLQVLDRLVKRIHKLGYEVSLTPTTQVA

SEQ ID NO: 283960 - protein, 376 aa, unidentified
MKKVRFIGLDVHADSIAVAVAEPGGEVRSLGIIPNRPESIRKLMKKLGPVGSLRVCYEAGPTGYVIYWQLTALGVSCEVVAPTLVPTKAGDRVKTDRRDAEKLARSYRAGDLTAVWVPDAAHEALRDLVRAREAAKKDQLRARHRLGKFLLRHGRRPSTGMTAWTQRHLTWIRQIQFEHPAQEATRLDYLHEVDHAVGRIERLERAIDEAVKTAPAHMRAVIEALQALRGIALVSAVTIVAEVGELSRFERAPQLMGYSGMGAREDSSGPRTRRGGITKTGNAHLRRIAIEAAWAYRHRPAVGGALRKRQATVSEAVKAIGWKAQLRLHARYRKLLGRGKCQQQVVTAVGRELLGFIWAIGVTVERQRKTSSSIAA

SEQ ID NO: 283961 - protein, 423 aa, unidentified
MIPAIIERCAGIDVGKTFLTVCLMTGPADGEPKLETRKFGTFHADLEALRQWLSEERCTHAAMESTGSYWKPVFNILESSVTVFLVNGQDVKGRKGHKTDWNDCRWLAHLLRHGLIRPSFIPPRPVRELRDLTRRRKQVLSNAASERNRVQKVLEQANVKIGSVLTDVFGVSGQLILEALLEGKATIAEMADLARHTARRKIPEIIRSLEGNRLDDHCRLLIQLSLEHLAFLEEQLVRIDAEISARVQQPDFRQAFELLQTVPGIKQDAAASILAEIGPDMTQFPSESHLSSWGGVCPGNNCTGGKAKPAKIPRGNRWLRTTLVECAWAASKKKDCFLKDRFWRLAARGRKRALVATAHTILVLIYRTLSTGKAYQERGAVEVNEQKRKRLIRHHVRRLGRLGIAVSSLRLAAPADSASGATA

SEQ ID NO: 283962 - protein, 380 aa, unidentified
MEVVCARCCGLDIHKKNLVACLSLPGPRGAASTTVRTFGTMTADILALSDWLVEAGCTQVAMESTGVYWKPIYNLLEGVFTLLLVNPRHMKAVPGRKTDVTDAEWIASLLRHGLLTGSYVPERVQRELRELTRYRTTLVRERTAEANRLQKTLEGANIKLASVATDILGKSGREMLAALVAGATDAAAMAQSARGRMREKLPALAQALVGQFGAHQRFMVAQQLAHVDFLDATIAEVSAEIERRLQSVDDLVARLDTIPGIGRYVAEALIAEIGTDMSRFPSAGHLASWAGMCPGSHESAGKQHGGKTRKGNAWLRAQLVQAAHAAARKKGTYLEAQYRRLAARRGKSRAAVAVGHSILVIIYHIVRDGTVYEDLGVAPH

SEQ ID NO: 283963 - protein, 356 aa, unidentified
MSRDIKYIGMDVHKEATVIAVLNGSGKLVMESIVETKASSILQFIHGLRGELHVTWEEGTWAAWLYDLLQPQVTQVLVCDPRRNALLKEGNKSDKIDARKLADLLRTGMLRPVYHGEHGLRTLRELGRSYRTISQDLNRVMNRIKALYRGWSIPCAGTQVYAPRYREQWLQKIEHAGVRRRAELLYQQLDGLQTLRRTLRPELLAESRKHKASKLLRQIPCIGPIRAARLLALMQTPHRFRSKRQLWTYSGLGIETRDSAQYRYVHGQLQRTKKPQQIRGLNQNHNHEMKEIFKGAATRASCGVGPLRDFYVALLDKGMKPEMARLTLARKIAAIALTLWKKEERFDAEQLKPQAA

SEQ ID NO: 283964 - protein, 338 aa, unidentified
MKLYGGIDLHSNNSVVALLDEQDQVMYHKRLGNDAQGILAALAPYQEAIEGLVVESTYNWYWLVDALMDAGYRVHLANTAAIVQYSGLKYSDDDSDARWLGKLLRLGLLAEGFIYPREERAVRDLLRRRSRLVQQHTANLVAVQNLMARNRGRSLSANAVRRLTPETVEQLLPDANLALAVQSTLLAMRGQEAAIDLLERQARAQVQWRPAYRHLLSVSGIGQVLGLIIMLETGPVRRFAKVGNYGSYARCVGSERLSNGKRKGRGNTKNGNKYLAWAYIEAANFAVRFNPTIKRYYQRKRAKTNGIVAIKTVAHELARACYYILRDGTDFEVARAFS

SEQ ID NO: 283965 - protein, 379 aa, unidentified
MTTTDAATEARETVYVAIELSKKTWVLGIAHPDRDRPSIHRVSGGNIAELVSRLRVAARNNRRILVCYEAGYDGFWLARALAKMGIECRVLDPASIQVNRRARRVKTDRIDVLALLRALIATDRGERHVCAIVRVPSVEEEDARRSHRERQRLVRERTGHINRIKGLLFAQGIRDIKPKLRRSRIDFAALETAEGHPLPDRLRRELEREYARLSLIATQLREVEKERDTADAQDPVVEQKRQLLVALHGVGATSAAILAREVFARSFASRRQLGSYLGLTPSAYDSGSTTRCQGISKAGNSWARRILIEVAWLWQKYQPASPLSHWYIQRTAGQSSRIRRIMLIALARKLAISLWRYVETGLVPEGVAIARAEPRCAPA

SEQ ID NO: 283966 - protein, 414 aa, unidentified
MSGSSFPMPAPAPLAYVVGIDIGMESCMMCGLTMEKRQVIKPSPFVNTAEGFTSLFERLERLGAAPDQILVGLEATSRYGENLYHVLLKRGYRVCLLHPAQMHAFAQQRGLRAKTDQVDATTIARALLSGEARFGYVPTEQVAIYRELVRLQQQLSEDVVRYKNEIHALLVVLFPEFTQVFADPTRPTALAFLKRYPSAQAVAQAEVSVLSQVLHQLSPKHYGRQTAERLLDVAKKSISSGVAISARSTSLRILCDQLEHTQANLKQLHQEIETLLDQDPKAKGVLLIPEFGVMTVAVLRAELGDLDRFARMDQVVAYVGMDLQVKQSGKWIGQTKLSKRGSGRVRRILYLAALRSIWLPNSPFGAYYHRLVERGMKKGMAVVAVMRKLLIVAAHLILTEEMYEPGKVAALSVR

SEQ ID NO: 283967 - protein, 340 aa, unidentified
MEGLYAGSDLHGNSNFLGIIDAQGKRVFKRKMPNELGLIRQTLGPFRGELVGIAVESTYNWYWLVDGLMEEGYRVHLANPSAIQQYSGLKHSDDRHDAFWLAEMLRLGILPEGYIYPKEERPVRDLLRKRGHLVRLRTSILVSLQNIISRNCGRKISVNDVKRLGEDRVTPYLEGQEDLALAGRVSKDTVDFLSDQIHEIEKAVLKRVRLKKGYQLLLTIPGVGKILALVIMLETGPISRFATVGDYGSYCRKVPSQWTTNGKWKGSGNTKSGNRYLAWAYAEASDFARRYYPESRAYYQRKMQKTNAAVAHSALAHKLARAAYYVMRDQVPFRMEKLFG

SEQ ID NO: 283968 - protein, 351 aa, unidentified
MLIIGVDYHPSFQQISFLDQETGECGDRELNHSEGEAERFYKELKERGVSVRVGLEATGYSRWFERLLTELGFEVWIGDAAEIKRQRGRKQKTDREDGRLLLRLLLENRFPRIWVPSPENRDLRQLLWHRHRLVQMRTRIMNQLQAVAMNEGYRWKKKLFSEKGRALLEKLPLAPWASRRRKELLELLEQLDPKIVELTAALEQEAQKRPEVVLLRTHPGVGPITGLAYFLVIGTPDRFPSGKKLGSYTGLIPSEDSSAGKQRLGHISKQGNSLLRYLLGEAAQAAARCNPDWRRRYVHLMMRREKRIAKVAMARKLAVRLYWMWRNHWQYSQLVAFGSNAGKLGTGHGVK

SEQ ID NO: 283969 - protein, 415 aa, unidentified
MEQIFMIKENYMYVGIDLHKETHTAVIIDCYNQKLGEITFPNRPADFPKLVTKVKKCNTDGKEVVYGLENAYGYGRALAVWLIDKGYFVKDVNTAISHRQAKHRGAMYRKSDSDDAKAIALATLNMLDKLPDACPNDAYWSLGQLVHRRDNIMKQRTRLVNQLHEQLCIAYPSYKQFFNDISRPTALYFWEHYPSRKYLKGKSVEDLRAELVPVSHNKCSTRTCEKILDAIAGDKVKNNAYQDARDMATLSIVSDLQHYDSQLAEVDKMLEQMYKMLGCTLTTIPGVNVITAVKILAEIGDIKRFSNANKLAQFAGIAPLHLSSSGKGKDVATKQGNRRLQATIYFLAIQMVQVSSKGTPRNSVVRAYYEKRKAEGKTSQQALICISRRLISIIYGMLKHGTEYRMPVVESAGEK

SEQ ID NO: 283970 - protein, 395 aa, unidentified
MSAEGEAIRSNDYRKDTTVKAPSTRPAAVLGLDVGKSSHWACLIDRDGEVLASAPVRNREAELDALFASAPAGTLVVVDQFRNIGSLAVRRARAAGLVVAHLPGLAASRAAGLFAGEAKTDERDAAVIARTALGVPDSLSGVPGRGEALEAARALSSQRDHVVACATRDKNRLRAVLLESCPALEAAVDLSDRRWLELLAGFGGAWGIARSGAEDPRAEAAGEAAAASTAPPPALVEAENRQVRFLAARISEALDEAGALEAETAALLEGDETYACLLTVPGIGPRTAAQLAVSVDIGRFPDHDHLASYCGIAPRVRSSGTSVRSVRASRRGDARLKSLLIFSCNSLVRSSGRYGEYYRACRARGMGHGRALKAVARKRLRAIYAVMRDRVPYRE

SEQ ID NO: 283971 - protein, 423 aa, unidentified
MPGTVNTMEMEREVVCGADIHKQFLLATILTKDGQKFQDRFDSNFEGLLNFRQWLLDHDCQRLAVESTANYWQPIYFVVGKDVEFVLANAYQIKHILGRKTDVLDSEWIAELCLKDLISPSRIFSEDDRDLRSMTRTRENYVKMRSQIKNRIHQELESACIKLSSVLSDIFGKSGIHIIRGILNGLSIDDILDRIPSKKLKAKRGEIQDAIQANISPVQIDLISLLLDSVDFLNREIESIDKQIQSLISTRQEDLKIAMSIPGMGFTSASTILAEIGNLKDFNNGEKLAAYCGLVPSVYQSAGKLITGHITKHGSPHVRRMLIEVAHAISRTKADSKLKRFYFRIKSRHGAKVAVVALARKVLCILHHLIVNREMFEDGISSKSKREKTGRSSSSTEMIIEDAIQILVRAGYLVQKRSEKEGG

SEQ ID NO: 283972 - protein, 340 aa, unidentified
MEIAVLGIDLGKNSCSIVGFDDGGAVVLRRRMHREGVIKLAGKLRPCVVAMEACCGAHHLGRVLRAQGHEVRLMSPEYVRPYVKSQKNDDRDAEAIAEAATRPTMRFVELKSEEQLDMQTLHRARDRLVGERTALINQLRAVLLERGITVAQGRRKLERHLAGLDAQGGLSQRMRVLIEDMRLQWCELDRRIAELDKELTKWVRNEEVARRLMTIPGIGVLNATALIAAIGQGESFARGRDLAAWLGLVPRQLTTGGRPRLVGISKRGNKYLRKLLIHGARAALPTLLESPTSLGAWLRGLMTRMHKNAVVVALANKLARLAWAVLRHGETFRFAVSAAA

SEQ ID NO: 283973 - protein, 310 aa, unidentified
MGAINAAIEVGKEKLDVALGSAGEQFTEANEPRAVARLCQRLAAAGCERVLIEGGSYQNLLVAALRAAELPVVIVNPRRVRQFARSIGQLAKTDALDARVLALYGERLQPPVRELPNEQTRALRDLWVRREQLIEMLVMEENRLEHARKALHRGLRAHIDYLRKQIRQADDDLDRTVRNSPLWDKYELLSGVPGVGPVLSVALLADLPELGRLNRREIAALAGVAPFNHDSGTLHGQRKIQGGRPRLRRVLYAATIAAARCNPVLKAFHQRLRAAGKPPKVARVAVMRKLLTILNLMLKTKTAWRPPCPA

SEQ ID NO: 283974 - protein, 449 aa, unidentified
MMEPQEIEDEGHERIVERVAAIDVAKASGMVCVRVPHESRPGRRVSRVWEVAATTGAVTGLGDHLACQGIEKVTVESTSDYWRIWFYLLEAAGLEVQLVNAREARNMPGRPKTDKLDSVWLAKCTERGVLRPSFVPPAGIRMLRDYTRLRTDLTQERTRHWSRLEKLLEDALIKVSAVASTMNTKSVRDMIEALIAGERSPRALADLARGRMRAKRAALIEALTGRFDDHHAELARMLLNQIDALSAQIGTLTGRIEGLIGAMPAARGVNADGTTGPGAGTGPGAAVLPALARLDEIPGISLAGAQGILAEIGLDMTRFLTAGHLVSWAKLSPRTIQSGAKNHSGKTGKGNPYLKGILGEAAAAAARTDTFLGERYRRLVKRIGKLKALVAVARSILVIIWHLLSDPAAQFCELGSAYHASRTSTQRKARGHIRQLEALGYTVTLTQAA

SEQ ID NO: 283975 - protein, 427 aa, unidentified
MAVVMIGIDPHKASHTAVAINAAEQSLGQLRVRASAVQAERLLGWAQPWPERAWAVEGAGGIGHLLAQQLLSAGERVLDVPPKLAARVRLLATGDINKNDPNDARSVAVAALRSAEVREVRQDDHAAVLKVWSKRHQDLAQARTQVACRLHQVLCELIPGGVPGQITAGQAGRILAAITPAGAVAAARRELAAELTEDLRGVDTRIRETRKKTAAAVRAAGTSLTGLFGVGPVIAAAVIGDVRHVSRFPNRDHFAAYNGTAPIEVSSGGRKIWRLSRRGNRRLNHAIHMAAVTQIRYRHSPGRAYYDKKLAEGKTGKEALRCLKRQISDAIFACLQADARRAAAAPEKSPGGQPGNHSASRAAGSNPEHRRFGQATPGPATHPTTPTAPFPAPLPTRASGRPGQEPGAARPRSGARRASLRRPPGSR

SEQ ID NO: 283976 - protein, 341 aa, unidentified
MKNLFIGVDFSKEKVDVAIIFADGLTETAPRVFNEFKTTVSGYKQLVKWVEKNSYGIDPSLWLFCGENTGDYSKGLCNFLYGKGYDMWLENAKSIKDASGLRRLKSDRADASMIAEYAMRNHDKAVMYEPLSESLAQLRELFLYRQMVVRHRCSFQVRRGEKKLTMEKSPIKTMISQSGRHILSELNKEVEKIDKRIAELIKSDEELTEVFTIVTSVPGIGTQNAVCLMVYTDNFRRFNYDSRKIACYYGLAPFGKDSGTSVHSDPHVHYMANRQIKAMLTQAALAAVKFNPVMARYYMRLVERGKKKQVALNNVKNKLVHLVTAMVRNRQTFTPDYKISA

SEQ ID NO: 283977 - protein, 358 aa, unidentified
MEAQGKKIDFTGQNIYAGFDAHLKSWKVTVMAEDIVYKTFTQPPNPEVLYNYLKNNFPGGTYHSAYEAGFCGYWIHDKLVSFGIKSIVVNPADIPTTDKERVQKEDKRDSRKIARSLSNGTLMPIFVPSIKTQRDRSLLRTRAMLVKDLARYKNRIKSFLYFYGISIDNSFSNPQSHWSNRFMNWLESIEIDGESGKEALQVLISECKNLRTSILEVTKLIRQLSLTTAYQEKVRILKSVPGIGLLTAMTILTELESIDRFNNLDKMCGYIGLVPSTKSSGEKERTGDITPRGHNVLRTAIIESSWTAIRNDPSLMKSYLSYTNRMESNKAIIKIAKKLLNRIRFVLNNNKLYVCSTI

SEQ ID NO: 283978 - protein, 370 aa, unidentified
MSVRRILAKTIDTDLEYEAIGIDLAKNCVSAALLTTDGEVVCIDRLDYSELEKSAQVLTPTTFAMEPCTEMNYLVQKLEAWGHRCLVIGGKNVQNYVENHYSGQKTDLNDAQALAFLAQDTQLRTIKAKDMEQQKYASLTTLREQYIKQYRQTIVSLKGICQAWGLNISKGISGKARLKDLIENHAAFPEELKESLVDMVTHAQTAQKALNKITKTLEELAKNDKLCQLIQTIPGLGPICSCRLRATIGDIKRFKNPKDFPAYYGLVPRSIATGHNEKKGRITHRGDKTMRSLMVQGAGSVINMATRGKLKSKQLTKWILKKQKEKMPWGKLVCAVAAKLLRIVRAVLISSKPYNSKIAGVAKCSLPKGA

SEQ ID NO: 283979 - protein, 350 aa, unidentified
MNEITILGIDLAKNTFQLIGVDKHHKVVMKRRCQRDKLVEIVTKLPSCTILMESCGTSNYWGRRFQEMGHSPKLISPQHVTPYVANHKNDYKDTEAIIEVGTRPRTKFVQIKTIEQQDIQSIHRVRERLVSNRICLSNQIRGLLLEYGIVIAKGFSHLTNKLVELLNEGSDLISESIRELLVDIYDEFKLLSERISKYDKKIESISNEQEYCKLLKTLPGIGPITSTALYASMGNGSQFKNGREMAAQIGLVPKQHSSGDRQVLLGITKKGNRDLKQLLIHGARAVVATAGKKEDKRSHWINKLATKKHFNVVATALANRTARMAWAILQTSKPYDVNFSGAKTNEGSAG

SEQ ID NO: 283980 - protein, 357 aa, unidentified
METAYDGRQIVGMDLHRRRSVLVRMTQDGRRLGTAKFTNSPAELRAQIARAGKSPQVVLEATYGWYWAADTLAAAGAEVHLAHPLGVKAFTYRRVKNDERDAADLADLLRMGRLPEAWIAPAEVRELRELTRYRQKLVHLRTSCKDQVHGVLAKLGVEVTCTDIFGRAGSAWLDGLGLPQPYAGKVTSLRHLAGELSTEITMLSDVIADLLAGNRGYQVIQQLPGIGPVLAAVITAEIGDVTRFKNAGQLCSWAGLTPRHRESDTKVARGHVTKQGSRLLRWALTEAIQRIPRDSVIGAVKDGIIARRGKEAKNIAKVAAARRLLTLVYYGMRDGQIRCLSRPPGNSPPVTSQARAA

SEQ ID NO: 283981 - protein, 344 aa, unidentified
MDHFAGLDVSVKETSVCIVDDTGKIVREVKVASEPDALLAVLTNPAYHFKRIGLEAGPLSQWLYSALAESGLPVICVETRHMQAVLKAQINKTDRNDARGIAQMMRVGLYRPVHVKTLRSQKLRMLLTHRKLLQSKAIAIENDLRATLRNFGLKVGMVGTVKFEARIKELVENLPDLAVLVDPLLIVRRALREQIVILHRRLLTIVRDDEVCRRLMTTPGVGPVVALTYRATVDVPARFRKSKAVGAVFGLTCSKYQSGEVDRNGSISRCGDEMMRVMLYEAAQSMLRSKKWSWLKAWAMQIARRRGMKKAIVALARRLAVIMHRIWVDGTEFRWTREQTAAAA

SEQ ID NO: 283982 - protein, 341 aa, unidentified
MKNLFIGIDFSKEKVDVAIISAEGLVETSVRVFNEFKNSVSGYKQLVKWVDKNANGIDPSMWLFCGENTGDYSKPLCNHLYGRGFDMWLENSKCIKDASGIRRLKSDRADAAMIAEYAMRNHDKAIIYEPLSESLTQLREYYLYRQMVIRHRCSFEVRRGEKRLMMEKSAAKTVIAQSGKHIVSELNKEIAKIDRKIASLIESSDELSEVYRIVTSVPGIGTQNAVCLMVYTDNFRKFNYDARSIACYYGIAPFGQDSGTSVHVDPHVHYMANRHIKAMLTQAALAAVRFNPIIAQYYQRLIGRGKKMPVAMNNVKNKLLHIVTSMVKNKQVYKPEYRLSA

SEQ ID NO: 283983 - protein, 344 aa, unidentified
MDHFAGLDVSVKETSICIVDDSGKIVREVKVASEPEALLAVLKNSAYRFKRIGLEAGPLSQWLFSALAEAGLPVICVETRHMQAVLKAQINKTDRNDARGIAQMMRVGLYRPVHVKTLRSQKLRMLLTHRKLLQSKAIAIENDLRATLRNFGLKVGMVGNVKFEARIKELVENQPDLAILVEPLLIVRRVLREQIVILHRRLLAIVREDEVCRRLMTVPGVGPVVALTYRATVDVPARFRKSKAVGAVFGLTCSKYQSGEVDWSGKISRCGDEMMRVMLYEAALSMLHSKKWSWLKAWAMQIARRRGMKKAIVALARRLAVIMHRIWVDGTEFRWTREQATAAA

SEQ ID NO: 283984 - protein, 366 aa, unidentified
MKKNSTVATKRKQNFSEKKLTIGMDLGDRFTYYCVLDEAGEVMVEQKLATTKPAMKQVFGRIPRNRVALETGAHSPWVSRLLTQLGHEVIVAHARNVRLIGESSRKDDRLDARMLARLARLDPRLLSPVQHRSAEAQAHLTVIRARAALVGARTALVNAARGLAKSYGERLRKCGTQQVNKDLAAGFSAELRTALEPLLAEVESLNQRIAEYDRRIEQIATQVHPEVALLKQVKGVGTLIALTYVLTVADPHRFRRSRDVGCYLGLRPGRRNSGSGQPQLHISKEGDRYLRTLMVQGAHYILGPFGQDSDLRRWGLKLSERGGSNAKKRAVVAVARKLSVLLHKLWVSGEVYQPLRNHSAVESAVA

SEQ ID NO: 283985 - protein, 351 aa, unidentified
MIIIGVDYHPSVQQIAYVDTETGETCERRLNHSDGEAEHFYRALERRQVSVRVGIEATGHARWFERLLAELKFELWIGDPAKIKAARVRKQKTDRQDALLLLKLLVEDRFPRLWVPSPENRDLRQLIWHRHRLVQMRTRAMNQIQATAMNEGVRRKKTLWSKSGRQQLESLLLAPWATRRRQDLLELVDRLNGTIAELTIAIEQEAHKRPEVRRLMTHPGVGPITALAFVLVIGSPDRFACGKQIGSYLGLIPCEDSSANRQRLGHITKQGSSLLRFLLVEAAQAAVRRDPDWRRRFVHLAMRRDRRIAKVAMARRLAISLYWMWRKGCDYQHSLKFGSHAGEPGYRHGVK

SEQ ID NO: 283986 - protein, 401 aa, unidentified
MKIIYPRVCGIDVHKQFIVAVICISESVEPVYLKKRFSTFHNDLIRFRNWLIQNDCQNVCMESTGKYYIPVYNVLESHISNIVVANPKWVRAVKGEKDDDKDAKWIADLFKFDIVRSSFIPQKDFRILRELTRYKYKLVNMRSSEKNRFQNALTSGNCKLDMVFTDVFGKSASNIIDLILSDNPYTDEDILSKVHKKCKASPDMILDSVNGTDLTPVQKSRIELVNDHIKQLSSNIQRLDKLIDLMIEPYEDYISFLCQIPGVSINSAITILSEIGVDMNQFTSTRRLTSWAGLTPSSNQSAGKKKSVRISRAGVYLKPCLVEVAHAAVKDKKHPYYANKFNKISKRRGKKRAFIAIARKILVAAYHMLLTGEIWNPADLAEVETPVEQRIKYVNQILNNY

SEQ ID NO: 283987 - protein, 349 aa, unidentified
MLADELDYVLGVDTHRDEHVVAVVTAPAGAVVAAAAAPANAHGYRELLRLAEQHAPGRRAWAIEGTGSYGAGLSRYLHARGESVLEVSRIPRGERRLRGKDDALDAARTAPAALASDTLALPRRGERREALRLLLVARRSAIDVRREALTQLRAVIVTAPELLRQELCQLPEGKLLDRCSRFRRTNSAGADELATRIVLRSLARRVRTATVEADELEREILAHVHALAPTLLNEPGVGPIVAAQLIVAWSHHGRLRSEACFARLAGVAPVPASSGQTTRHRLSRGGDRQLNRALHTIVLHRRQHDPATRDYIARRIAEGKSRRDATRLLKRYLARHLYRLLQQQEPIMA

SEQ ID NO: 283988 - protein, 425 aa, unidentified
MDELIKLWELFQRPQKPSFHVAEKIILKIVKNQGVCVVGVDVGATFSVFAIDGQVYKVKHSQLQEFKEKLIELASNRRIKLYFEQTGRYSLPIVETFLDIAELFLVEGKKLKAARELFSAPSKNDYYDARLLAIIGVLPISVIPLDYDAYTLRFLMQRRVRLEKSIQQSINKIRQCIAVLFPPDYETFNKRNLQKEKTIKKLKKSLENFTPFSAIQEELLLELKSELQVLELLLSQKQQLEERIELLSEKPSIKEDLQVLTSFPGIGKNRALTLKASYIDIRRFPNWKTFIKFMGFTVQDNQSGTSVKYKKKVNSNRLVRREMYMLCQLFKREDIKNPAADYYRYYYIKTGGIDKRAFHKFSVKYLRAIYYCLKHKTKFSPELLKASLEDLISPQTIEELRQNVKQLKEQKGKRKKKEGSDGNSN

SEQ ID NO: 283989 - protein, 400 aa, unidentified
MLSIGIDVSKGKSTVCGMKPGGEIVYAPFEVQHTREGMLELVSLLRSSGEEVRAVLESTGSYHCPVVTALLENGIFVSVVNSLRMKRFCSQSIRKVKTDRIDAMQIALYGLAYWQELQPARLPEDTYRELQLLARQYYQMTSLLIKAKVDFNAICDQVLPGMQELMSDHAGRHKLSDFVLRYHHTTHILEMGETRFRKDYCKWAEKKGYRNCERMAALIFATAQNGIPVLPNAPSTQIVITEAIRVLHTVEASRDAILTQMQALAKTLPEYSLVREMPCIGDTLAPRLIAEIGDVRRFHSKRALIAYAGIDAPPYQSGKFCANNRHISKRGNRYLRKTGYEVMQSYVMHKPANDPIFTFIEKKRGEGKSGKLAMVAGLNKFLRVYYGKVTELYRSLPAIE

SEQ ID NO: 283990 - protein, 337 aa, unidentified
MQVTHFVGIDVSKNNLDVSWVVNAQVLFHETFENNSRKIKPKLICWMKKQGSTFENTLFCLEFTGVYSLPLLHCLSQLGALIWVESGVQIRRSLGMVRGKNDQVDSQRIALYAYTHQHHVNLWKAPRAIIEQLSALLSKRALLVKMQKALSTSFNEQAEFLEPTVVKSIRVSTTKVVRELRKQIHQIESEVRKLISSDDKLNHLYQIITSITGVGFVTAVHVITTTNEFINFNNPKQYACYCGVVPFEHTSGTSVRGKTRVSHYANKTMKSLLHLAALGAIKSPGELREYYDRKVAEGKNKMSVLNAIRNKLVLRIFSCVSQNRLYNKNFTLDLVLS

SEQ ID NO: 283991 - protein, 339 aa, unidentified
MKLYAGIDLHSNNNFIGIINEQDQRLFQKRLPNRIEEVLQALEPFRESLEGIVVESTYNWYWIVDGLEKEGYKLSLANPSAIKQYEGLKHTDDKWDSFWLAHMKRLNILPEGYIYPKKERHVRDALRRRLMFVRQRTAHILSFQSDVTRNLGSKMSAREIKKLDEIDADQIFDDPFLSLTSRSHVSVIDFLSDRIKEIEKAVIEHVKIKPEFEILLTMPGIGIILGLTIMLEVGDIGRFPEVGNYSSYCRTVKSEKISNDKKKGKGNQKNGNKYLAWAYVEAANFAIRSYPEVERFYNHKKSKRNGIVAIKALSNKLARVSYYVMRDQVAYDEKKLFRS

SEQ ID NO: 283992 - protein, 330 aa, unidentified
MGITHNSDSMEQISFDRVVSRGCGLDVHKKTVVATIDGDGIKKETREFGTFTRSLTDLRDWLLEHGVTHVAMESTGVYWKPVYHVLEPTGITVWIVNARHVKNVPGHKTDKKDSAWLCKLLLAGLLKPSYIPPKEQRELRDLTRYRRKLVQSISAEKNRTIRILEDCNVKLSSVLSDTDGVTGTKLINKLVAGVEITMEEIDRVYHKKLKASRDDLFEACQGVITEHHSFMLKAIKRHIEETETLVSEVDTRIKAMLAPYDNVLDLLFEVPGIDRRSAEDLVAEIGLDMSVFPNEKHLASWVGVSPGNNESAGKKKADAPLTATNRLKGL

SEQ ID NO: 283993 - protein, 356 aa, unidentified
MDSTKYIGMDVHKEATTIAVMNSAGKLVMESIVETKAATIVQFIEGLRGELYVTLEEGTWAVWLYDLLKPHVTKVVVCNPRKNALLKTGNKSDRIDARKLAELLRAGLLSAVYHGETGLRTLKELCRSYLAISKDLTRTMNRVKALYRSWSIPCGGTSVYAPRHRKEWLSKITEPGVRRRAELFYQQLDGLQKLRQEARRDLLAESRKHGATEQLRRIPYIGPIRAALLIALMQTPHRFRTKRQLWAYSGLALETHSSAEYHYVQGQLQRSKRPVALRGLNQNHNHDLKSIFKGAANKAGSAKGPFHDFYTALVAKGMKPTMARLTLARKIAAVTLIVWKKGVCFDAQQLKQQVSV

SEQ ID NO: 283994 - protein, 337 aa, unidentified
MKRQYVGIDLHRRSTTLYRMAEDGEMLSTERIVSQPFELAQAMEAAGPEPEVVLESTYGWYWAADVLQDLGAHVHLAHALGNNWGDRRVKNDERDAQDLAAMLRIGRLAEGWIAPHEVRELRELVRYRYSLIRHRTSAKAQIHGVMAKNGILPVVGELWGPTGQAQLDRLELPEAYATRLDSLRNLLDVYDRAIAELDAHIHAELKGDAGYRALMTLPGVGKVLAAIFVAEIGDISRFDSAKKLSSWAGLTPKHRESDEVVHRGNITKQGSPLVRWACIEAVGNYRAKGNEKLRADYKRIAERRGKYKARVAVARKLLTLVFYAMRDGEVRCLETAA

SEQ ID NO: 283995 - protein, 349 aa, unidentified
MKIIGCDFHPGYQQIAVWDKATGETLEKSLSHERKEEVRAFYAGLAGLVRVGIEASGQSQWFERMLAELGHEVWIGDAAKIRASCERKQKTDRRDAELLVKLLDEDRFPRIWVPTPAERDARQLLLHRHKLVRMRTQVKNQLQALALNQGVQRKWKLWSEAGRKQLEALSLMPWASRRRTELLVLLDQLEASIGELDRAAAEQANTRPAARRLMTHPGVGPITALAFALTMGPAQRFRRGKQVASYLGLIPTEHSSGGRGQRLGHISKQGNPFLRGLLVEAAQSAVRHEPEMRRAYQRLAQRKCRALAKVAMARKLAVRLYWMLREEVDYAQLLQGSHAGQPESFRGRS

SEQ ID NO: 283996 - protein, 374 aa, unidentified
MAEALANAIAFVGVDIGKNSFHVVGLDRSGAIVLRQKWSRGQVEARFANLPPSLVGMEACVGAHHLSRRLKALGHDARLMPAKYVRPYSKGQKNDFRDAEAIAEAVQRPTMKFVATKTADQLDLQALHRVRERLVSQRTGIINQIRAFLLERSIAVRQGIRFFRAELPCILATPPDVLSPRMVRIIEDLACDWRRLDERVEGLSNEIETIARQDAGCDRLMSVPGIGPIISSAMVAAIGAGDVFTKGRDFAAWLGLVPKQISTGDRTILGKISRRGNRYLRVLFVQAAWVVLINRKSGSAMGSSPGSRQPGGGCITMCWRSHSPTSSPVSPGAFWLVAGPSRCGRSIRPRPSQPDPNSTLTAAEIAQNEEPATT

SEQ ID NO: 283997 - protein, 419 aa, unidentified
MSFKILKFKCCGLDVHKTWIYACIGITDSNNRTEYKQARFSSFTKGLNELCDWLAKYNCTDICMESTGKYWIPVFNILEQHNLWVTLSHPKYTKPMKGNKTDRKDAKWICDLYMCGMVKPSFIPPADIRELRDLVRYRYKLTCMITGEKNRAQNCLTVSNLKLDDVFSDVFGKSSRSITEQILQHPGEKFDVAPFVHGRCKTPIEEIQAAVDGAISKEQAVKLRQCLDHIDELNKHISELEQEILRLSDKYEAALNLIRTVPGFDKNPMTAVQILSEIGGDMSVFPTAKHLVSWAGCCPRNDQSNQKIKSTRISRAGSYFKPVLVQVANALIKSKKHLEFTNRYKRIKARRGHKKAIIAICRMILTAIWHILSDLKPYTPEGFLESHPVKEGKVLSSSQALNFFKQRGYIIKDEPLSVS

SEQ ID NO: 283998 - protein, 414 aa, unidentified
MEQIHDRVAGLDVHRDVVVACARVPGARGGTVTEKERFQTTTGALARLAGWLADRYVTLVAMEATGVYWKPVYYALEDSFEVWLCNAHHVKNVPGRKTDMSDAEWLADVAAHGMIRPSFVPPPAIRELRELTRYRKTQTDARVAEIQRLEKVLQDAGVKLTSVASKVLTQSGRLMVEALIDGQRDPAELANLAKGKLRPKIPELSEALNAHFGAHHAVAAARILAHVDFLDATIKALTEQIDVRTKPYQAARELLMPVPGFDRLTIDTVIAETGADMSKFPGPGHLAKWAGVCPGNHESAGKRRRVGVTPGNPWLRRALVEAARAAARTKGSYFGAQYRQIAKRRGPNKAAVAVAHSLSDLIWHMLSTGEVYHDVGDGYFQRRRDPERETRRLVAQLEQLGFQVALTTLQDPAA

SEQ ID NO: 283999 - protein, 328 aa, unidentified
MKTIFIGIDISKDSLDVAVCQDPALDLDTTFKVENSIKGISKLIKKSTKFNQEVWFCFEHTGNYGLLLMCQLQSEGFTYSVVPALEIKQSQGMTRGKNDTVDAKRIALYAATHSYKLQPFHLPGENLLKIKSMLAYRSQLVGMSRQLQNSYKSHQITNKSVDVSLILDDIKQNIDGLKQKIKKLETDIVELIQADPKMESNFVKASKVKGIGLIIAAYMLVYTNNFTAFDNPRKFNCYAGLAPFEHTSGTSIAGKTKTSRLRNKTIKTLLFNGANTATNYDQELKAYYKRKKDQGKPHNLIMNNIACKLVYRVFAVVNRDEPFVNLMH

SEQ ID NO: 284000 - protein, 435 aa, unidentified
MEAAPGGRRQRRVTKRASTKKLRTPRGWRDNWVLPPLRSPAENIWVDVDEEPMEIQSRGHISARLVLKQPAEQLLPTLEDLPMLSNTTLQNAVYAGIDYHKKTISVTFGDRDGNILEQPTIQNHRQLVEPFFEQFQKLECVVESCRGYEWLVDVLREQGHTVHVGHSRAIKLIAKSNCKTDKIDSRILMQLLAKSFLPTTYIPTADERKYRELLRHRSSLVRTATRSKLRIHAILAKENIHIRFPFSTRGRMQLQQLCDELKLPAHRQRILEQELSVLDFAEERADEQMSQITRHSRKEPGVLLLRTIPGFNTLMAMAYIGEVGDVSRFKKGDQVAAYLGLVPRVYSSGSTARCGRITKTGSPFMRWMLVQAAWSAIKGSPNLRFRFASIAKRRGQKVAIVAIARKLAIIAFKVLREKTEYKEEMLDAGLARAAF

SEQ ID NO: 284001 - protein, 389 aa, unidentified
MEARTVNNLPPAASDDDAVRCLIAIELSKKSWIVAVNTPLSDKIGRHTVKPGDGKELLDLCERIRTRVARETKQRVEIVACYEAGYDGFWLHRLLEAHGIRNYVIDPASLQVDRRARRVKTDHVDVERLLRSLMAYLRGEPKVWSVVRVPSVAEEDDRRLHRERGRLINERIQHVNRIKGLLAIHGIYDYQPLRRDRMQQLERLRTADGRTLPPRLKAEILRELQRLELAVGMVRTIEAERDAIASAKTETEHRSAKKIQDLAKIKCVGPEFATTLVGEVFYRSFDNRKQLASYVGLTPAHFQSGSMCRDQGISKAGNAKARTVMIELAWLWLRHQPDSPLSVWFRDRVGKLKGRIRRITIVAVARKLLIALWRYLEIGLVPERAILKM

SEQ ID NO: 284002 - protein, 350 aa, unidentified
MIIIGCDYHPGFQQIALVDTETGEVRELRLEHREPAEKFYRSLAAQRAVVRLGMEGSGHTRWFERLLAELNFELWIGDAAEIRTKRVRKQKTDRQDAQLLLRLMVEDRFPRVWVPSWENRDLRQLLWHRHRMVQARTRIMNQLQAVALNEGLRAKKRLWREAGREQLKSFPLAPWASRRRGDLLELLDQLNPTIAELTQAIEQQVEKYPEARRLMTHPGVGALTALAFMLIVGEAGRFRCGKQIASYLGLVPLEESSGNRRRLGHITKQGNSLLRFLLVEAAQVTARSLPEWRNRYFHLMMRRGRKIAKVALARRLAVRLYWMLRKEWDYEQVKQFGSHAGQPENRHGVQ

SEQ ID NO: 284003 - protein, 322 aa, unidentified
MSISVLGIDIAKQKFDAALLVDGKTKHKTCKNSAEGFETLKLWLEKQGIQKVHVCMEATGNYGEDLAIYLHEAGHIVSIVNPARIKGFAQSELIRTKTDKIDAALIARFCLAMKPGTWIPPSPEIRSLRALVRRVDSLIDMRSQEKNRISTAHESVIFLIKEHIAYLDQEIEKIRRQIADLIEQNPHLKRRKELLDSIPGIGKATIPHILAELDDLEKFNHVRQMVAFIGLAPKETLSGSSIKGKPRLCKIGHVRLRKALYMPALVSIQCNPVMIAFYNRLRDKGKNGKVIVCAIMRKLVHVIFGVLKSGKKYDPNFLTISA

SEQ ID NO: 284004 - protein, 387 aa, unidentified
MYFVGIDISKFKHDCAIIDDLGDVITPSWSFQNDCEGFSLLRELLNTLDGEKKIGLEATGHYGQNLKLFLENNGFSFMEFNPLLVNRFVRSKSLRKTKTDSLDALMIAQYLMTVEYKPYPPSFYTLEKLKSLTRFRDSLIRQRSKQMVELTNILDKVFPEFKPFFKGRFSATALYILSHYASPEKISNMNSKSYEPLRRLSRGRFSMVDFIELKTLARNTVGSTFDYLLQEMEITIDIYDQLQSKVEEIELQINDCVLGLAPPMLTIPGIGVASAAVILSEFGDLSKFNSPSKLLSFAGMEPGYFQSGTSENSGKMVKHGSSHLRYAIMNCAQTVINNEPTFPAYYAKKRAEGKEHRVALAHVAKKLLRVIYSLQTKELSYNPDLVR

SEQ ID NO: 284005 - protein, 339 aa, unidentified
MKQLNGGIDLHANNSVVVVLDEEDQVVFHKRLPNELEKILPQLAPFRTCLQGLVVESTYNWYWLVDGLQEAGYVVHLANPAAMQQYAGLKYTNDDTDARWLAHLLRLGLLPTGYIYPKEERAVRDLLRKRSQLVRQRTANLLSVQNLLTRNTGHALNGTQIKQLTPTTVREFVALPEHALALQVTVAVMQHLTEQITQVERAVHARVKLRPAFQALLTVPGIGQTLALTIMLETGEISRFPTVGQFASYCRCVGSTKLSNGKRKGQGNTKNGNKYLAWAFVEAAHFAIRYEPQIAQFYQRKRAKTKVVVGLKAVAHKLARACYYIMRDTVPFDVTRAFA

SEQ ID NO: 284006 - protein, 408 aa, unidentified
MAAVMIGVDPHKGSHTAVVIGPAEEPLGELRVRASAAQARKLVEWAAAWPERTWAVEGAGGLGHLLAQQLAAAGELVLDVQPKLASRVRLLQAGDVNKNDPNDARSVAVAALRSRARREVTADDYPAVLKVWSKRHRDLARNRNQVACRLHAVLCDLVPGGHPKEISAAQAAGILEQASPSGAVALARAELAAEFLSDLRHLDAQLRETRKKLAAAVTASGTTLTQVFGVGPVIAGTIAGDVGDVARFPRRDHFASYNGTAPVEVSSGNRKIHRLSLRGNRRINHAIHMAAITQMRHKHSDGRAYYDKKLAEGKTHKEALRSLKRRISDAVYARLQADAHQAAATRGNGPGGQPGNDSDSSAAGSHPEHLLFGQATPGPDIKIRPRATADTPPPPKPKPASKKTRTTP

SEQ ID NO: 284007 - protein, 354 aa, unidentified
MNQTAAAEVVVGVDTHKHIHVAAAVSPLGMRLGTITIPTNAKGYRDLAAWACSFGNIRAFSIEGTRSYGAALARFLRVQEHTVIEVNRSDRQLRHQRGKSDPIDAEAAARAVLGGQATGLSKSGTSTVEMIRHLKVARDTAVKARSQSMLAIKALIVGIPSALRERLELLRGKMMLIRHLAALRPGPIVSTVASAKAGLRALAQRWLALDDEIKVHQAHLEALTRARAPDLVEVHGIGSGTAAEMLLLVGDNHDRIRSEAAFAKLCGVCPIPASSGKTQRHRLNRGGNRQANAALYRVVVTRMRGHQPTVDYVQRRTAEGKSKPEIIRCLKRYVAREIFAHLRREPIAPNITAA

SEQ ID NO: 284008 - protein, 419 aa, unidentified
MRNGNTKKIKRISEGTLLVTIDMGKGKHTGYYRFPDGAEGKIFEFSNSRSGFEDMWQRVCEAKKSRNLTEVVVGFEPTGPYAEPLLHFLRKRNARLAQVNPFHTKRLKELPGNSPSKTDQKDPKVIADIIELGHALTVIIPEGTAAELRRLTQARERSMQRMSMLMNQLQDLVFLIFPEFMPIMKDITGRSTQYLLKNCPRPKDLLEKGVETLAISLKEVSRGHFGRMRAEDLCRAAWESVGIAEGSESIALEIQESVAMIEKIEQFVKELEKHMSKHLKDIPYSRFILSIKGIGEITTAGLIGEMGDFKKYHTIGEVIKHAGLDLFEISSGKHKGTRRISKRGRPLLRKLLFFASINVVRKGGILHKQYLQHLDKGMPKIKALIAISRKLLSIIFALVRDHSVYIAQYSKIQQLKEAA

SEQ ID NO: 284009 - protein, 477 aa, unidentified
MKSKKELLAIKKHIKRKSAKAKHNRLLGIHNPHAAGADIGATEIYIAVPPDRLEMNVRCFGTFTQDLRAIVQWLREYKVTSVAMESTGVYWIPLYELLEQEGFEVYLVNARHVKNVPGRKSDVQDCQWLQYLHSVGLLRGSYRPAQDICAMRAISRYRDNLLHFGAQHLQHMQAALDQMNLRLHHVIADLSGLTGMAIIEAILAGERDPRQLAKLRDPRIKASQETIAKALEGNWRVEHLFVLGQALQSWKQVQQQLGQCDQKLEELSSQLEGKIDLANSPLPPSAKYCGREPRSKNQPNGPWREELYRHFGVDLTEVPGLSLGVVQTLFVELGADLSAFPTPRHFAAWMGLCPDNAITGGKVIRRGTRRNRQRIRLALRLAATSLHHNKTHLGECFRRLRARLGAPKAITAMAHKLARIIWHLVTHRVGYDESIFAEREEQLLRRKQRQLRNLAHSLGFTLVPNPRPAATSNAQVS

SEQ ID NO: 284010 - protein, 330 aa, unidentified
MSSCEIVGIDVAVRTLVAIGERVTLTAAYDNTPASRSSLIQTLGRSRRPVRVVLEATGIYFVDLACELVAAGIAVMVVNPKAAHHFAEAILQRRKTDPVDAAMLREYGRRMDFVPWQPPRPELFGFRALTREVQALSKAVAAAKNRLHAVTATRLTPAALIRALERQIAHNQTLIDELVAAALAQTETDPELARLFARTDSVPGFADKAAVLVIGELTVLPPMTARQWVAQAGLDVREESSGTSLTRRPRLSKRGNKRLRQTLFYPALFYPALTAARCCPAAGAFVERLVAHGKTRLQAIVALMRKLLHGLHAMWRNDEDFNAEKLFAQA

SEQ ID NO: 284011 - protein, 342 aa, unidentified
MTIAILGIDLGKSVCSVVGLDVTGAVVLRRRMRRQTVIKFAFDLPSCVVAMEACCGAHHLGHALSGQGHTIKLMSPEYVRPYVKAQKNDDRDAEAIAEAATRPTMRFVELKREDQLDLQTLHRVRERLVGTRTRLINQMRAILLERGLTFAKGRRKFEVGLDAILDAEGADVSDRINGLLIDMRQEWTELDRRITELDREFADRAKSDDVTRRLLTVPGIGNLTATALVAAIDDAAAFSTARDLPAWLGLVPRQHTTGGKPRLYGISRRGNIYLRQLFIHGARAALPSLSKAETPLGQWLRGLLARAHYNVAVVALAAKLARIAWATLQRGTTFERSMPGLA

SEQ ID NO: 284012 - protein, 354 aa, unidentified
MTSSSSNEVSGHPGAVQFVAVDEVGKQIGQLTVAATSAGHAKALRWARTQLGEELTWAVEDCRHLSARLERDLLSAGQQVVRVPPKMMAEQRRIARTRGKSDPIDALAVARAYLREPDLPVASHDEVSREVKLLVDRRDALVATRTRTINSLLWRVHELDPRRAPKPRSLDLAKHQQLLRAWLGTLSGVVAEMALDELDDAISLTARIKTFERRIRQLARQHAPSLVAMPGCGELSAAKLLGESAGISRFHSEAAFARHGGLAPIPVWSGSTAGRVRMTRSGNRQINCAIHRIAITQQRMPGSLGRAYYDKKIAEGKTKTEALGCLKRRLVRVIFNHLTTDQTNRQTATLPTAA

SEQ ID NO: 284013 - protein, 424 aa, unidentified
MKVTYQTCCGVDVHKSFLVATIIKTTAGIEPSYQKKRFSTFNNSILDFKSWLLENECHDVCMESTGKYWVPVFNLLEDQINVTIANPKWVKAVKGNKDDTKDSKWIGDLFRLGLVKSSYIPCRLIRILREYTRYRYKLVSCRSSEKNRYQNALTVCNIALDSVVSDIFGKSSSSIIDYLLEQSGTTINHEEIASKLLKSLKSKEDAVIESIEGYQMTDAQKYRMRLIRAHMDYITAEINDIDKQIESLISSDPDYDKAIQLLTTIPGVKRDSAITIISEIGIDMSQFCNSKRLCCWAGLTPGNNESAGKKKSVRITRAGVYLKPALVQCAHAAVKSDKSPYYKTKYESLVKRRGKKRAVIAIARMILTAIYRMLSTGEVWNPSDLYKIDMPAPLAEKQKAKAIKQAKKLLQKEGLLPPDEPLAS

SEQ ID NO: 284014 - protein, 359 aa, unidentified
MQTQSNKIDFTGQHIYAGIDVHLKSWKVTILTERLPFKTFSQDPRPELLYQYLTRNFPNGTYHSAYEAGFCGYWIHNKLSELGIDSIVVNPADIPTTDKEKVQKADKRDSQKIAKALRNGDLKGFHVLSSKTLEGRCLIRTRATIVRDMTRNKNRIKSFLQFHGIELPQDFKELTHHCSTRFMTWLKSLEIKEPSAKMSIDLFIGEAEHLRAMILGATKSIRELSEKEPYSNQVGLLRGIPGIGPLTAMIILAELETINRFGNFDKLCSFIGLIPSTHSSGEKENIGEMTHRGNSFLRCALVESAWIAARMDPALNISYHNYCKRMEPNKAIIRIARKLLNRIRFVLKNNQPYVCAVVK

SEQ ID NO: 284015 - protein, 296 aa, unidentified
MKKLSTVRGRESKIFNEHNLTIGLDLGDRSSYYCVLDEASKVIQEANVGTNKKAMAMVFGSMGRCRIGMEVGTHSPWVSRLLLGLGHEVVVANPRQVKLISTSSRKDDRVDAQTLARLARVDPQLLRPIQHRSAKAQGDLMVIRVRAALVEARTGLINTARGLAKSLGERLPICDSDQMGVEQTESLPTQVSLTEKIKEMDRRVEQIAREDYPETELLQQVKGVGPLIALTFVLTLEDKTRFAKSRDVGCYVGLRPRRGDSGESQPQLRITKEGDAYLRKMLVQGAHYILGYRAGA

SEQ ID NO: 284016 - protein, 344 aa, unidentified
MIIIGCDYHPGFQQIAFVDTETGECGERRLERREEAEKFYRDLRAQGATVRLGMEASGHARWFERLLSELRFELWIGDAAEIRTKRVRKQKTDRQDAELILRLLLEDRFPRVWVPNWENRDLRQLLWHRHRMVQARTRIMNQLQAVALNEGLRCKKRLWRDAGREQQESFALAPWASRRRRDLLELLDRLTPTIAELTQAIEQEAQRLQTHPGVGALTALAFVLIIDRADRFQCGKQIASYLGLVPLEESSGQRRRLGHITKQGNSLLRFLLVEAAQVTVRSDQEWRSKYFHLAMRRGRKIAKVAMARRLAVRMYWMWRKGWDYEQLKKFGSHAGQPVTGDGVR

SEQ ID NO: 284017 - protein, 348 aa, unidentified
MLIIGCDYHPGFEQIAFVDTETGECGERRLTHREEAEQFYGMLKGRSVRVGMEASGHARWFERLLSDLQFELWIGDAAEIRTKRVRKQKTDRQDAQLLLRLMMEDRFPRIWVADAENRDLRQLLWHRHRLVQMRTRVMNQLHVVALNEGLRRKKALWRPAGRNQLESLILAPWASRRRRDLLDLLDQLSPKIQELTRALEDEVEKRPVTRRLMTHPGVGPLTALAFELVIGSPERFHCGKQIASYVGLVPSEESSGDRRRLGHISKQGNSLLRYLLVEAAQVTVRSHQHWRSKFFHLAMRRGRKIAKVAMARKLAVHLYWMWRQGWDYGQFEKLGSHAGEPGNRQGVQ

SEQ ID NO: 284018 - protein, 376 aa, unidentified
MYSITKYVGFDVSKEKIAVSVAEPGIGPARSIAMIENTQEKIRKTLKRLGKPEELYVCYEAGVMGYELARFLKGLGVKCMVVAPSKIPEVPGPKVKTDRRDSSRLAELLRAGELTPVWVPGEEDEALRDLSRARKARKEDLKRAKQRIRMFLLRHGIRRPCSMKSWGEPYRAWLRSIEFPFKASQAAFQEYLIVLEEIEQSVYRLDLKIHEIATDSPHAPIIQALQALRGIKETAAVTIVAEIGDFTRFKNPEQLMAYAGLVPREYSSGNRTWRGSVTKTGSSCLRWILTECAWSARYKPRISRDLIKRMERSSPNVHTIAWKAQVRLNKTYTKLLIRGKSRSVAITAAARELLGFIWAIARQVNHEMEGGKGKVA

SEQ ID NO: 284019 - protein, 355 aa, unidentified
MHSENIAAYIGLDVHKETLAVAIAAPERLGEVRYYGTINNEAQAVRRLFQKLQGLYGNILSCYEAGPCGFGLYHQLTAMNIKFQVIAPSRIPKSPTDRIKNDHRDAISLARLLRAGELTPVWIPDLTHEAMRDLIRARAAAKRDSRVARQRILSMLLRTDKRYAGKHWTGKHRTWLANQSFSQPSQQIAFQHYCQSLEQIEDRILQLDQEISRLLPGWSLCNLVCQLQALKGVGQLIAITLVAELGDFSRFSNPKQLMAFLGLVPGEYSSGNSIRPRGITKVGAWLIYYRPDSVTQYSKDIAWKAQQRLCSRYRTLTAKGKKSQVAITAVARELTGFMWDIALAAQSSFSQQKQN

SEQ ID NO: 284020 - protein, 367 aa, unidentified
MKKSSKIFVGMDVHKESIDITVAEVGGEVRRWGQIGGERAALEKALRKLESSGGALHFVYEAGPCGFWIERCIRARGHVCWVVSPSLIPKKSGERIKTDRRDSEKIARMARAGELEPIYVPAEIDEAVRDLVRSRDDAIIAQRRARQQLQALLLRNEIRYVGKCAWTQAHRRWLAQLKLPQPVQQIAFEEYVDAVVVAGSRIERLTRAIEQAVDGWRFAPVVKQVQALRGVQFVHAVTILSELGDLARFTEPRQLMAYLGLVPSENSSGARRQQGAITKSGNHFARRALIEAAWAYQHPARVTPIIARRQTGLPKAARDIAWKAQLRLCPRFRKLCARRLNKNKVVVAIARELAGFVWAMAKDVKLT

SEQ ID NO: 284021 - protein, 336 aa, unidentified
MTLYCGIDLHSNNHVVCVIDDKDQRLLEKKLDNDPELTLRALSRYKKQLKAIAIESTFNWYWLADALMEAGHQVELVNTARVVQYSGLKRTNDRYDAFHLAHLMRLGILPTGYIYPKAERGLRDLLRKRIQLVQDRSSHLIRFKFQVQMHTGQSIRSDRIKTCKFQLPVIGDANVQLALQSHLVIIRALTAQIKILEKSILSQVEPNACFNWLKTAPGIGDILAEAILLETGDITRFKAPGNFASYCRCVDSRRESNGKKKGENNRKNGNRYLAWAFIEAANFAIRHNEKAKRFYLKKEKATNAIVARKALAHKLARGCYWVMRKQQAFNQDQVFG

SEQ ID NO: 284022 - protein, 323 aa, unidentified
MQGKVSFQEDAMPVVYAGVDVSKEWLDVHLHPLGESRRFSNDKTGIRQLKRLLARHQPKSIVMEATGKFHRPAHRSLWLDGFAVAVVDPLRARMFARACGYLAKTDRLDARFLALLAESLRPPADTPPSPHVEALQELVNARSAAKCDITALQNRSKTATTALLRGELNRLVRRLEQHVERLDKEIERRVGEDPQLYRKAEILTSIPGIGRVTALALMAGMDELGSCSGKQAAMLAGLAPIANDSGARTGRRSIRAGRPAPRRALYMAALSACRYNPALARFADTLKAAGKPAKVILVAVMRKLLVLANCLLSHDRLWTPNPP

SEQ ID NO: 284023 - protein, 333 aa, unidentified
MSRFWVGIDVAKRKLDVALLDEAGKVKSKVLTNDPTGFAALQTWLRERGADEASTHVCMEATGVYSDACATALADAGWKVSVVNPALPKDFGKSELKRNKTDAIDAGLLARYCSKMDPPAWQPPPLEYRKLRSLVERRQALQDMHQQEANRLESSLEAAARVSISEHLAWLETRIAEMEKDIDDHIDGNKDTLGKDAELLASIPGLGRTTAAKVLGLLGDLRRFESGKALAAFIGVTPRRHESGDSVRGRSSISRAGHTSIRHALFMPTLVATRYNPTIKAFRDRLVAAGKPKKSAVLASMHKLVHIMYAVVRKGINFDPRFGQLALDVQDGI

SEQ ID NO: 284024 - protein, 448 aa, unidentified
MSMKVVNPHAAGIDVGSRSHFVAIGQDDDQVREFGAYNEDLNSLAQWLLAYDVKTVAMESTGTYWQNLYTVLQGAGLEVILCNGKFTKNIKGKKTDVQDCQWIQKLHTLGLLSGSFLPDEASEQLRTYCRHRTNLLGLAASTTHKMQKYLQLLNLRLDIVVKDVTGLTGLSIINAICNGESNPEKLASLRNGNCKKSEKEIAKALQSNGRKDYLFTLKQEYRLYLSLQEKIKECDQEIEKMLQEQINGDEEKEQHFIEKKVHKRVNKNTPKNIDINLLAYQYYEGVDLLAIEGVSHATILTLMSEIGTGINKFSTAKEFSSWLRLSPNIKISGGRVLSSKVAKGSNRLKIALRNAANAIGNLKDTALSNFFRRIAFRKGRVSAISATARKLAVIIWNMLVKKVPYKPETDYEFLDQKRKRKVMEMKKLIHKFDITPDDLGLQLNINNL

SEQ ID NO: 284025 - protein, 345 aa, unidentified
MTIVETRPVTGGVDTHLDVHVAAALDANGGVLGVESFPTTIVGFAELYAWMCSFGTLCRVGVEGTGAYGAGLARSLRAAGVAVVEVDRPNRQARRRHGKSDTVDAVEAARAALSGRAAGVAKTADGNVEAIRALLVAHRSGSEVRIKCLNQVRHLGFTAPDELRERFHGVTVDTLAREAAALRPNPAGDCVVYATKLAMHTLGRRVVDIDADNARLDSELTTLVRATAPSLVELYGVGTQTAAILLVAAGDNAERITSEAAFAHLCGVAPIQASSGKTTRHRLNRGGNRQANHALWRIVFTRMSSDPRTRAYVERRTLQGRSKREIMRVLKRYVAREVYRHLPRT

SEQ ID NO: 284026 - protein, 386 aa, unidentified
MIYIGIDISKYKHDCFIATETNHVSFSFENNLLGFNEFLTQTKPLRKEKMIIGLEATGHYGDNLKSFLLDHGYKFMEINPFLIKKFSDSKSLRKLKTDKKDAKLISEYMRTVDFKAYHLQSYHIKKLKSLTRYRSRLVSIRTSLYNQLTKSVDVVFPEFRTFMREQGYSLTSLYILGKYTTPNKIKSLNSKHYDSLRKLSRGKFSFVKFTKLKGLAKNSIGTQDDGNIYIIKNNIKLIETFNSLIKNTEHDIVEIMKQYPTYIQTINGIGLLSAAIIIAEFGDISRFNHSSKMVSYAGLDSSISQSGTSEAVGKLVKRGSKYLRATLINVCMTVMISVPIFYTYYHKKKQEGKHHRVAMTHLAKKLIRIIFHLEKNKVPFDQSLLK

SEQ ID NO: 284027 - protein, 315 aa, unidentified
MEAEVFVGIDVSKARLEVALGAAGELLSVEHEPRAIAALVKRLLQVRPARVVLEATGGLETTAVAELGAAGLPVVVVNPRQVRDFARATGQLAKTDALDARMLALFAERIRPEPRPLPSEQERELKALLARRRDLVEMLSAERNRYANAPKLLRKELAAHIRWLEARLKERDRDLDRMLRGSPLWREREDLLRGVPGIGPVLCATLLAELPELGRLGRREIAKLVGVAPLNRDSGAMRGKRTVWGGRAPVRAALYMATLSATRCNPPLAAFYRRLRERGKPAKVALTAAMRKLLITLNAMLKHRSTWSPPCPTAA

SEQ ID NO: 284028 - protein, 330 aa, unidentified
MKNYEEVVGIDVSKKTLDAYCYQSQVHREFVNNIVGYKSLLKWVLKTTKGVAVFYCFENTGYYSLKLALYLDSQNIIYVEESPLKIKRSSGIVKEKTDELDAALIARYAWLYREELTPSKVKSKSHLELGRLLALRDQLVRNTAGLKGTLKEMRVLLSSATTDTGCIILKRSIAYQEKQVKSIEDRIKEIISADTSMSNNYELLTSLKGIGLVVACQLIYHTGNFTRFANWRAFSSYCGTAPFEHRSGTSIYKRKQCHYLGDRKMKSLLSMASVSAIQHDSELRFYYNRKLAEGKDKMLAINNVRNKLIARAFAVVKRGTPYVVLQQYAA

SEQ ID NO: 284029 - protein, 309 aa, unidentified
MLTAEADKCKTKVVVNTAAGVQALLAWCAKHGAQPAQLHAILEPTGLYHEQAATALPQVRVSLVNPAQARDFAKALALRSKNDALDSYVLARYGQTLSPALWHPAPLHARQLRALLTRREALSKDLLRELNRKEKSQFSPSAPLVDGSIDKAIAFLREQINQIERAIDQHIDNHPDLKQDCELLNSIPAIGPQAGNAILAVMHNRHIDSAQSLAAYLGVVPVQRQSGSSLNSCARLSKAGPSQVRATLYMAALVGTRHNPHIRALYQRLLKAGKSKKAALGAAMRKLVHLCFGVLKNRIPYQPNYAMNG

SEQ ID NO: 284030 - protein, 390 aa, unidentified
MFFVGIDVSSAKHDCCILDDSRKMIRSFVIQNSREGFSALSAALTELAAPENIRIGLEATGIYGDNLARFLRRKGFNVHIINPLLCKKHQSATTLRKTKNDRSDAKNIALIVASEDLQPDQPLSYHIAELKSLSRARFLTVKDRSALKNKVKRLVTLLFPELLDVFTDLFGASGMALMSRYPSAKALAACNLDTLSELLKTASRGRFGREKAEALRKLAKDSIGTFSESDVFQLRLLLKRIDLLNSQVEMYDVEIRRLMDQLDSPILSLPGIGYTLGAMILSEIGDIKRFSSPAKLLAFAGLEPSVYQSGKFIPSSGKMVKRGSPFLRWALLQAATYSPASSVTFAAYFAKKRSEGKSPSVAHSHVAKKLVRVIFSLLSRNVPFVDAFAA

SEQ ID NO: 284031 - protein, 427 aa, unidentified
MPYKIAGIDVHKRMLHVVVSDVQVDGEYDFTRRVFGSLPEALRSLAAWLVEQQVEEVVMESTAQYWKPVWGTLERYWKRICQTREGALATSGTLHLALALSNRGRRGRKKDFRDAERLVKRLVAHELTLSFVPDVEQRLWRTVVRTKYQLTRNRVQLQNRLEALLEEAHIKLSSLVSDLLGASSRRMLEAIAGGETNRETLAALADRGLRATQEQLQDALGVCQELNPVYRRLIKMVLDEVASIDKRIDQLNQEMASLLRPHEDQVKRLAEVPGLGVDSAQQIVAEVGATAATFPSEKHLSSWVGACPGDEESAEVNHSRRSPQGNRHMRRILNQAANAAAKHKGSIFQILYGRYVPRLGHNQTIGIIAHKLCRLVWKISHRGIRNEERGPEVSKASKQKRTRKMIRQLRRLGYRIEPSPSQSAITA

SEQ ID NO: 284032 - protein, 405 aa, unidentified
MPVLYVGHDWAETHHDVHIEDVAGTCLSKARVPEGVAGVGQFLDLIAEHDVDPAEVLIATETDRGLFVTALISAGFEVIALNPMATARYRERISNSGAKSDAGDAKTLASVARLDGHNHRRVLGDSGLVSAIKITARAHQSLVWGRNRQLNQVRSALREFYPAALEACPVLAHSDFLGVISAAPTPTTGRKLSLSQIKAAMRNGGRKRGFDMRAQQIQEVLRSDQLAAPTQVELAMGSLVEALMAVAVELTAQIQRIEAELATLFDAHGDAEIVRSIPGLGTKLGSRVLGEFGDADGRYADARARRNYAGTSPITRASGRSHVVLARHARNLRLADACYQWAFVTITASPGARIYYDEKRAKGDSHSKALRALSNRLVGILHGCLAHQVPYDEETAWAHRQNVAA

SEQ ID NO: 284033 - protein, 336 aa, unidentified
MPKIPRSRTVDRVNQTRIVQGRDNGRKMSEVYTGIDVSKEFLDIAVLPSGERKQYGNDEAGIGKLTARLKKLSPVLVVMEPTGGLEMPLAAALTLEGVKIAVVNARQVRDYARATGKLAKADKIDALVMAEFASVIKPPVREFRDEETAEIKSIMSRRRQLLEMLTAEKNRLAIARKILKPKILSHIEWLKKEIADLDNELRQRIEDSPIWRVKDNLLQSIPGVGKVLSATLLAELPELGKLNRRQIAALVGVAPYNRDSGKMRGKRSVWGGRVSVRSVLYMATLVSTRFNPVITSFYQRLLEKGKAKKVAIVACMRRLLIIMNAILKTQKAWNYA

SEQ ID NO: 284034 - protein, 396 aa, unidentified
MLYLANDQHRKQLTVNLRNEAGDVILRRQVSTEWSRVRTFMEEVRDLSTPEGGFVAIVEVCGFNDWFLKLLAEYGCKETVLVQPQKRSKNKTDRRDADALGELLWTNRQRLLAGKKVQNVRRVVPPSPRDAEDRQLTALRQRTSRLRTRAINRVQHLLLKHNLQQECPTKGLQTQAARKWLTQLPLGMIDRMELDQLLAQWELLDQQWKQLEAKIGERQAQSEAAATIATIPGAGAYGSLALAARIGSVERFPHARSLAHYFGLTPGCRNSGDATRRLGSITKEGSGIARSVLGHIVLHVLRRDRRMKEWFQRIKKRRGAKIARVAVMRRLATIVWYMLKRREPYRSDSPPAEDGGRECNRPSADRGAFLEAWQGRSRGGKQKGCPASQATAAARP

SEQ ID NO: 284035 - protein, 366 aa, unidentified
MRKNSTVVKNGNTIFKQPALTIGLDLGDRTSCYCILDESGNVILERSVPTTSSGIRQAFGKMPRSRIALETGTHSPWVSRQLARMDHEVIVAHARNVRLIGESSRKDDQLDARTLARLARIDPGLLGPVRHRSAQAQIQLTVIRARAALVSTRTALVNAARGLTKSYGERLKKCGTEQMNRNSSEGLSQELREALDPLLREIESLNERIKEYDQRIEQIAKEVHPEVARLKQVKGVGTLIALTYVLTLDDPRRFRHSRDVGCFLGLRPGRRNSGQSEPQLHISKEGDRYLRTLMVQGAHYILGPFGQDSDLRRWGLKLAERGGKNAKKRAVVAVARKLSVLLHKLWVSGEVYEPLRNNRKAERAVA

SEQ ID NO: 284036 - protein, 449 aa, unidentified
MGNGSGVSRGDRNRNARLERLRALVPVANAIAGIDLAGKKQMVVVTDHDSKVIARRTFRCRAWDLGSALDWAAGRAAAKGWAGVTVACEPTGHRWRVLGQLAADRSMPFVCVQPLVTSWSRRTEDLTVDKTDEKDAVLIARLTAQLRCYIPEPVDERWGRLRHLGTRREQLITEAGRQIQQMRDLLECAWPAALDTARQPFRSRTWMAALPVIAGRDGGDFGRTRRLGAARFEQAVRREITRRGGQKPCLRIVRRLFTALADPAGVIAHRPGALERVQLLMEDWQLTKTRLNDTERRMTGVLDELRLTALATSITGLSPVGAAAILAETGGPRRFATGRAVVKHAGLAPREKLSGAFTGRTRLTGQGRPGLRLAAWRAVWGAQRANPVYAARYQYLTSREQNKLTPTQAQTVIAAAILRQLHAVITTGQAWDPLTAAHGTRRESTPAAA

SEQ ID NO: 284037 - protein, 402 aa, unidentified
MRTSSVTMEGSRNGLALMSGERVHVGIDTHKEDYRVHVWSEQRQEAVAAWVQPPDASVLVKRLGPVKAQVARVVYEAGPTGYGLCRELRQAGFAADVIAPSRTPKSTSKAAKSDRLDARKLARYCAKGLLQPVAVPSVEEEGDRQVVRMREVTMLSSRRAKQQIKSLLLQHGLGQPRGCGGDWSGRWVAALRAMPLSAQPRVSLDLLLDELAHLRGALLVATRAVRSLAKQPRYRAHGAALQSVPGVGPITAMTFLTELIHPERFDEPREVTAMLGLAPLVYGSGQSVRQGPLMKTGNNRLRTALIEAAWRWVAKDPWAGAKFAQLQRRTASRKKGIVAMARRLGIIPWRIRLTGRPYQPKAPKLPDQHAGSQPRLPDAPAGKRKGACAKRSARPASVQTSG

SEQ ID NO: 284038 - protein, 450 aa, unidentified
MKKEEKASNLVKKNRVFNGLTVSNPNSAGIDIGSRHHWVAVAPHLTTNNIRKYSTFTSDLNEICKWLKECKVGTVCMESTGVYWIPLFDLLEKSGFEVFLCNATQAKNLPGRQKTDNLDCAWIQKLHSYGLLTNSFIPDLTIRNFRSFMRHRENLIHDQSRYKLRMQKLLTQMNILLPKVLSNITGQTGMLIIKAIISGNTKPEQLLKFKHYGVKASDNTFLKALQGNYDKSLIKLLHIELKQFESTKALISNLDDEIELVLAEMLTPDSKKISSKTKLSDKEMLIAYTGVDLTEIPGVDVLSARKLICETGTDMSKWKDSAHFASWLRLSPHSKISGGKLQSSSTLNHKPRAAIIFRQCADTLKSNKSYLGDFLRRKKSQKNYGKALTATARKIAIIYYNMLKYKTPYVELGESFYSLSYKTRSIKRLDNYAKSLGYQIVKNDENIAVL

SEQ ID NO: 284039 - protein, 400 aa, unidentified
MLSIGIDVSKGKSTVCGMKPGGEIGYTPFEVQHTRKGMSELVSLLRSSGEEVRAVLESTGSYHCPVVAALLENGIFVSVVNSLRMKRFCSQSIRKVKTDRIDAMQIALYGLAYWQELQPTKLPEDTYRELQLLARQYYQMTSILIKAKVDFNALCDQALPGMQELMSDHAGRHKLSDFVLRYRHTTHILEMGETRFRKDYCKWAEKKGYRNHERMAALIFATAQNGIPVLPDAPSTQIVITEAIRVLHTVEASRDAILTQMQALAKTLPEYSLVREMPCIGDTLAPRLIAEIGDVRRFHSKRALIAYAGIDAPPYQSGKFCANNRHISKRGNRYLRKTGYEVMQSYVMHKPANDPIFTFIEKKHSEGKSGKLAMVAGLNKFLRVYYGKVTELYRSLPAIE

SEQ ID NO: 284040 - protein, 347 aa, unidentified
MGYFAGLDVSLEETAICIVDEAGQILREVRAASEPEALVAFFGACGMKMERVGLEACSLTAWLHGALTEAGIPAICIETRQAKAAMGAMPNKTDRNDARGIAQIMRTGWYRAVHVKSRSCRSWRALLTARRMVLNKRRDVENGIRALLREVGLKVGTPSRKDFPARVRELAADDPVLASLAESLLSVIEVMTQEIEKLTKRVLDEVRVEPTCRRLMTVPGVGPLTALAFRATIDQPNRFRKSRDVGAHLGLTPRRYQSGETDVQGRISRCGDELARTALYEAAHSLLIRSTQWSALRAWGMNVAKRRGMARARVAVARKLAVILHRMWADGSDFRWGKQAAAPAAAA

SEQ ID NO: 284041 - protein, 410 aa, unidentified
MEVLYPRCAGIDVHKQSVSVCVLTPGQGADPRKEIRQFGTMTGELHQLAEWLREMRVSHAAMESTGVYWKPVFNILESACDLILVNARDIKQVPGRKTDKADCAWIASLLRHGLLKASFVPPPEVRELRDLCRSRTTLVRDSVTVGNRLRKVLEDANIKLDSVASDCLGTSGRAMIDALIGGEQDPLQLAKLARGRLKSKLAELVSALEGKVTAHHRFLLQEAMRQLRFLEDQIARFDEEIERHMPPFEWALSLLITMPGVDRVAASALLGEIGCDMTRFPSARHLASWAGLCPGNNESAGRSRSGKSHRGNQWIRGLMTEIAWAASRTKNTYASAFYRRLVTHRGKKRAIVALANASIQAVWHILTDRQKYHDLGPNYFDRLRSADQTNNLVKRLKKLGYEVTLQHTAD

SEQ ID NO: 284042 - protein, 409 aa, unidentified
MDLVITRCAGLDVHKATVVATVRVPGEAGRRQVVTETFGTMTPDLIALREWLQAYGVTQVALESTGVYWKPVYYVLEDAFDLWLINMLHLQHVPGRKTDVKDSEWLAQLLECGWLRRSVVPPAPIRELRDISRYRVQQTRDRSQEVNRLQKVLEDAGVKLTSVLTDIMGVSGRAMVEALVDGTTDPQVLADLARGKLRKKLPLLRRALVGRVRPIHALLLQEILAKIDYLDEALERLTAEIDRRVAPFEPMLTALDTIPGLDRIGAISVLVETGGAMDRFPSAAQLCSWGGMCPGHHESAGKRRSGRTRKANRYLRTTLIQAGVAASRKRASALQALYARVKTRRGHKKAVVATGHQILEIAYYVMRDGITYHELGADYFQRRDRDRTVRRHVKQLQALGYVVTVNPAA

SEQ ID NO: 284043 - protein, 442 aa, unidentified
MENNRSLTQGEFQIIHPNAAGIDVASQMHFVAIPPSRDHPSVRKFGSFTQDLHDIAKWLKKCGIDTVAMESTGIYWIQLYLILEEYGFEVFLVNARHIKNVSGRKSDVQDCQWIQQLHSFGLLNASFQPDLNGRELRTYMRHRKHLTESYAAQIQLMQKAFEQMNIKLCNVLSDITGKSGLAMIEAILKGERDASQLALLADIRVKASHQDIVKSLQGVWRNEHIFELRQAYDLYLIFKEKIKECDHQIEQTLQQQQNTSFDSGQNKGKSKGTNKFDFNATIYLKKILGVDITEIFGISELTAMQIISEIGVDLSKWPTPKHFVSWLNLAPNNRISGGKMLKTKRNRKKNKAGQAFLMAAFTLHRSNHWLGATYRRIAAKNGAPIAIKATARKLAIILYQMITKQVEFCPLPIVDYNQLFKERKIKYIKNQALMLGFQLIPS

SEQ ID NO: 284044 - protein, 344 aa, unidentified
MQITTIGLDLAKNVFQVHGINSAGEVVVKKTLRRVQMRRFFQQLDPCMVGIEACGTSHYWAREITQLGHEVRLMPPAYVKPYVKRGKTDAGDAEAICEAVTRPTMRFVAIKAPEQQAALALHRTRDLFVKQRTQLVNMIRSLLAEFGIEIRRGIEQALTLAKRIAAGEVPDIPPLAAKVIAGLAGQVLDLQARLGEIERELLAWHRSNDTAKRLSTIPGIGTVCATALAASVTDPHQFRSGRQFAAWLGLTPLQHSSGGKERLGRISKMGDKYLRRLLVVGMTSLIRRAKYKPEAVDPWLADLLSRKPARLVTVALANKAARVVWAIMVRGGSYRRPASVMTPV

SEQ ID NO: 284045 - protein, 408 aa, unidentified
MNQLYVGIDVGSAKNAAYLMMPDGSKHSSFSVQNNLGGARLLTEKIVSALTAQNLSSVTIGMEATSVYGDTLVYALREDGRLGHFERKIHVLNPKQVSKFKEAYPDLPKNDDVDAFVIADHLRFGRVNREVYMDDYRYKALQTLTRARFGVVQALTREKQHFANYLFLKCSGLAQDGDITNTSATTLALMERFTTVDELAYADLDELTAFIQATGRGRFANPEATAKAVQAAARGSYRLPKTVNDSVNQAMSVSIATMRALEAQIKTLDKAIEQQFEIIPNTLTSIPGIGKVYSAGIIAEIGDVNRFQSQASVAKYAGLVWTQHQSGNFEAQHTRLIKSGNRYLRYYLLEAANSVRRCDSEFRRYYDLKYKEVNQFQHKRALALTARKLVRLVFRLLKDNRLYKRPEG

SEQ ID NO: 284046 - protein, 461 aa, unidentified
MAKRKKEAPQAIPPMTTFEQMHLNAAGLDIGAEEIYVCVPADRDEQSVRAFRTFTADLHALAEWLAACGIDTVAMESTGVYWVPIYEILEAQGFQVFLVNARHLKNVPGKKTDILDCQWIQQLHTYGLLHASFRPPEEIVALRSLARHRDNLIRYRSAHIQHMQKALELMNVKLTQVVSDITGVTGLSIIRTIVAGERDPHTLAQLRDPKCTKSEAEIANALEGHYKAEHLFVLKQALAQYDFYLQQIRECDAQMEAMYGDLPPADPDTRAGPPPPPKKGKTRKNQADYDLRACLYRVVGVDLAAIDGLDALSVQKIVTEVGVDVSPWPTEKHFTSWLSLAPRNDKSGGKVLRSRTLKTGNPANLAFRLAAQSLSRSNSALGAFYRRMRAKHGPEKANVATAHKLARIVYHLLKYREPYDDPGEAFYEQHHRERTIRSLERRAANLGMELVPRSTNSVVVS

SEQ ID NO: 284047 - protein, 355 aa, unidentified
MKYYTSTTQYNCGIDLHARQMYVCLMDREGKKLVHTNIVRNDFEFFLRRVAPYRHDLTVCAECMFGWYWLADACQAAGITFVLAHALYLKAIHGGKNKNDRIDSEKIAHLLRSNLIPPAYVYPAEKRPLRALLRQRTYFVWQRSDLLARIQSVQLAHNRVPPRQTRPNRDPWQAQLLAAEDHPVRQLSLQNELAMIRHFDAQITTIETQLRQHTKQIASRDYALLQTVPGIGETLAALILYEVGDIARFPTVKDFLSYCRLVKGTVASAGKIKGLRGKKLGNPYLRWAFGEAAIIAKRDHALIGPLAQRLEARMGGNKFKANTVLAIKIARAVYFMLKNHTAFDPQRLVGTAVPK

SEQ ID NO: 284048 - protein, 350 aa, unidentified
MIIIGVDFHPEYQEIASVDTDTGEYQEKRLAHPKEAEEFYRSLSCVGQVVRVGMEASGHGRWFERLLEGLGVELWRGDAEVIRAKRGRKQKTDREDARHILKLLLKDDFPRIWVPNWENRDLRQLLWHRHRMVQARTRVMNQLQAVALNEGLRCKKRLFRADGRQQLESFQLAPWASRRRGELLELLDRLNPTIAELSQAVEREAEKCPEARRLMTHPGVGALTALAFVLIIGETERFQCGKQIAAYLGLVPLEKSSGNRRRLGHITKQGSSIVRFLLVEAAQVTVRSLPEWRSQYVHLMMRRGRKTAKVAMARKLAVRLYWMWRKGWDYEQWKKFGSYVGQPVHRHGVQ

SEQ ID NO: 284049 - protein, 520 aa, unidentified
MATSTRSRRPSRRRSAEHVGKLAGVLHPRVQQVGPEHFGMVCFDCAKVRSKFLLADFYGRILIPPTNVAHSRPELDAAIAQIRNAFATHQLRDGLVAIERTGRYHRVVQRSFAAAGFETRILHPFVTKQYRQPVDPGNKTDDKDLNAIHRATVTGCALLEATRDEAWTTLQLVIRHRRDLVRKGAALNCQIREHLEAALPGFAACFNKLWENPVAWHLLGHFPTAEQLRQAGLTMLCRSLRQADIRFQQRTVQAVVDWAEQAAPGDVAAGQHRRIALALYDDRQRKTQEIHKLEREIAGLLVQTPYVLLLSFPGINVVSAADFGGEMGPMEHYANPKSITGRSGLRPSRYQSDQVDNADGPLVRHCNRTLRAAILGIADNLIVCNHHFQHLAALWRSRGKDARDIHVRVAHRFCRIAFQMVAGRQVFRHPAIPGRHYILDKLNAFHRDHDTGMAEVLRDLQAAVDQVPRHEHAAEARPLQEELEKIQDGRRRGPQLLGDILPIVLARLGVGAVQSVESGE

SEQ ID NO: 284050 - protein, 410 aa, unidentified
MELLHRRCCGLDVHKDTVVACLRLVSDGKVTTEVRTFRTTTADLLKLSEWLAANECTDVAMEATGVYWKPVWHILDDGEFGLVLANAAHVKNVPGRKTDVNDAMWLAELLAHGLIRASFVPDSQTQEMRNLLRTRKQLVREQSRHLQRVQKTLEDANIKLDSVLSSLMTKSGRAMIAALIAGETNPVKLARLADPRVKASSQDLREALRGRVTDHHRFLLRLHLKQIDGLAAAMAEIDAQVETNLGPFRTAVDLIKSIPGFNDLGAHVVVSEIGIDMSRFPSAAHLISWAGICPRNDESAGKRRSNRLRKGAPWLKTTVVQCSWAAIKKKGSYVQAQYHRIKARRGAKKAIMAVAASILTAIYHMLKDGTMYQDLGGNHFNRRSTDQQKARLVKRLADLGYAVELKPLAA

SEQ ID NO: 284051 - protein, 380 aa, unidentified
MKESNLYLGLDVHSREIMASVIEQDGTERYLGVIPNRPESVRKLVNKLGEKERIRAVYEAGPTGYGLYWQLEGMGVSCAVAAPTLIPTKAGDRVKTNRRDAQKLARYHRSGDLSYVWVPDEAHEALRDLVRAREAAKRDEVRSRQRLKSFLLRHGLRAAPGVRAWSAKYRAWLEALTFDRAALAGTFQDYLHEIDHHELRVKRLEAAIEDAVEQAPERFREVVAALQSLRGVRKTTAVGVAAEVGSFSRFEHPQQLMGYSGAVPSENSTGDKHRRGSITKTGNSHLRRLVGESAWSYRYRPSLRYALKKRQEGQPAEVVEISWRAQVRLCGRYQRLVARGKAKQKVVTAVARELLGFMWAIGVEVERRRGEITNSEEKLG

SEQ ID NO: 284052 - protein, 316 aa, unidentified
MSEPQVFVGIDVSKAQLDVALRPIDDCWHVSNDELGITGLVERLQAVQPTLVVLEATGGLEVPVTGALAEAGLPVVVVNPRHARDFAKATGRLAKTDTLDARGLAHFAEAVRPTPRPLPEAQAQALSALLTRRRQLVQMLTAERRRLQTAPQRIRADIQAHIAWLERRLARTDEDVAAAIHASPLWRAKDEILQSTPGVGPILSRTLVAEVPELGVLNRQEIAALIGVAPFNRDSGTLRGKRAVWGGRAHVRAVLYMSTLAAVRHNPVLKAFYERLRSVGKAPKVALTACMRKLLTILNAMLKHRTPWQENYANHS

SEQ ID NO: 284053 - protein, 464 aa, unidentified
MKVAKTNQQERKNAKKRLPSFPIINPNAAGIDIGSAEHWVAVPEDRDEQPVRKFACFTQDLHAMAAWLKQCKVQTVVMESTGVYWIPLFQMLETHGFEVKLVNAKQAKNVPGRKTDVLDCQWLQRLHTYGLLSGSFRPDDAICVLRSYWRHRTTLISYISSHIQHMQKALTQMNVQLHKVISDITGVTGMKIIRAILSGERDPVTLAQLKNYRIQSTTETIAKALEGDYRQEHLFSLKQAVELYDFYQQQVQACDREIARYLRQLDGIDIASNPIPPSKRRIQKHKGNQPDFDLRTHLYRISGVDFTQIDGLDVLNVQTILSEVGLNPDAFPTVKNFTSWLAICPNNRITGGRIKSRSTRKAPNRAAEAFRMAAYTLSHSSSALGGFCRRMRARLGAPKAITATAHKIARIFYQMWKHRTPYRDPGADYYEQRYKERVLSNMKKIARQIGYFIELTPMPQTAVS

SEQ ID NO: 284054 - protein, 389 aa, unidentified
MIYVGIDVAAEKHACCILAESGKVHKQFTFSNDISGFEKLHKALLAPSETKIGLESTGVYGNNLAEFLRRNGYETHIFNPLLVKKSIQATTLRKTKTDKSDAKHIAQYTKEHSQPNLEPSYHISELKSLSRGRFSLVRERSKVKTQAKSLLVQLFPEFSQIFSDVFGAAACAVLRQLPSARTIAQCSVDVLTDLLRTASHGRLGKVKAELLIDLAKHSVGTHSTALELQMQMFLQQIDLFTLQINRYEVEIKSEMEKIQSPITTIPGIGSVLGAVILSEIGDIRRFATPAKLQAYAGVDPSVGESGASVSTPGRMVKHGSHYLRWALCQAARCVSLYDPIFAAYMKAKRDEGKHYGVACSHVAKKLTRVIYSILKNNTAYSLTYSQIGA

SEQ ID NO: 284055 - protein, 342 aa, unidentified
MGVDTHARKHVFAIIAAANGEQIDTRDFPATGAGITRPIAWVARRTEADLATLWVIEGAASYGAVLAGAVAAAGYQVAEATRMDAMPRRGVGKSDPLDAHPIASAVLALEEDKLRRPRLNEGVRAALRVLVCARHSMTTDRTRTVNALTALLRINDLGLDARSSLTGSQILEVSTWRTREEPLAVSVARSEAVRLAKRIGDLDAEIKANASRITELVEVSEAAPLLQESGFGPVTAAICLTAWSHQGRVHSEAAFASLAGVNPIPASSGNTVRHRLNRGGDRTLNKALHLVAVTRMAFDPETIEYVAKRQAEGRTKREIRRCVKRYLARRIYRTLNANSPCH

SEQ ID NO: 284056 - protein, 343 aa, unidentified
MQFFVGIDVSLDSSSICVIDERGVLIKEGKTDSEPAAIARFIRHKGRKIEHVGLETGSLSQWLHAGLTREGFRVTVMEARHVHAAFAAMRVKTDRNDARGIAQLVRLGWFKAVHVKAPSAQETRAVLNGRRFLVDKLTGIENSMRANLRNFGLKMGQVSRVKWAARARELAAGNPALELVIDALLRVREALRLELRRIDRRLLDEAKADPVVRMLMTAPGVGAVVALTFKSAVDDPTRFKRTRDVGPWLGLTPSRYQSGRTDIVGHVTKAGDAGVRTVLYEAATTLLGRVTGWSTIKNWGMRIARRSSTKKARVAVARKLAVVLLTMWRSQSPFRWAAPETIA

SEQ ID NO: 284057 - protein, 387 aa, unidentified
MDVRTVNNLPPAAAHDEAVRCLLAIELSKKSWIVAANTPLSEKISRYKLKGCDWKGLLELIEKIRARVARELNRPVEIISCYEAGYDGFWLHRLLEAHGVRNYVIDPASIQVDRRARRAKTDNIDVAQLLRSLMAYLRGDPKVWSVVRVPSIAEEDARRLHRERDRLINERVQHVNRVKGLCAVHGIYDYEPLRSNRMLRLEQLRTGDGRKLPPYLKAEIVRELQRLELVLTMIKTIEAERKAIISAKSPHLNVKKIQDLIKIKSIGPGISTVLVGEVFYRKFNNRQRLGSYVGLTPSHFQSGPMSRDQGISKAGNPKARTVMIELAWIWLRYQPNSPLSVWFHQRVGTAKGRIRRIAIVAVARKLLIALWRYLETGLVPTSAVVRG

SEQ ID NO: 284058 - protein, 316 aa, unidentified
MTKVVTNFTNQTIYVGLDVHKRSWNAALYLNDQYLRNIHQPPSPQALYKFLQTTYPGAHYQCAYEGGKFGYWIQRQLSGKGIQCMVVNPADIPSTHKDEVHKSDPRDARAIAMALQCGQLRGIYIPSLQQEADRSLVRQRKKIWKDLVRCKNRIKGFLDYTGIVVPDKFVNCNWSLNFLHWLAAIPFEYASNRVTLNYMLREAELLRKELLAVSNDIRKLMRSKEYKQRYYLLRTITGIGPLTAASLITEIGDMKRFPSFYELNSFIGLLPMEHSSGERELKTKLTIRRHRQLRSDLVECAWTAKRTDPALSLFYA

SEQ ID NO: 284059 - protein, 345 aa, unidentified
MLYVGLDLSRKRLDWQALDEQGDEVAIGAVPPDRDGLARLAGRVGDAEVLGVIESMTGARFVHDQLELHGWDVRIADAVKARGIAPLACKTDRIDCWVLAELARRDFIPEIWLPDPAVRAERERARFRLHLVRHRSSLKNRVHAILFQHGIPNAHSDLFGAAGRQTLERLRLPEPWQSTVAGSLKLIDTLNLEILECERELERLGADHRYISRLVTCPGISWVLGYTIASEIGDISRFHSPRKLVGYTGLCPRVDQSGERDRRGPLRKNGPAYLRWALIESAHAGLRWHQPYRDLADRMRARHGRKRGTKIAVIEVARRQTQAIWHMLTNDQPFAPAGASLRLAA

SEQ ID NO: 284060 - protein, 342 aa, unidentified
MKKYAGLDVSMEETAVCVIDGEGSVVAETKVRSDPAAIADYLKRWAGDLVRVGLEAGGLTPWLCHGLRELQVPAICIETRRMKAYAKASAVKTDRRDARLIALAMRAGLYREVHVKGEAAQKLRLALSARQMVLRQARQLQGKVRGDLKPFGIRLGKVGSGGFAGRVKERLADRADLWTLVEPLLDLRAALLAQVRAYERMLRRFAKGDAACRLFMTAGGVGVLTAVAYRATIETPARFRRSADVPAALGLTPRIDQSGESARCGAITKAGDKLMRALLFEAANALLTRTRRPSALKRWGLDVAKRRGMNRARVAVARKLAIILHRMWCDGSEFRFATPKAA

SEQ ID NO: 284061 - protein, 345 aa, unidentified
MKITTVGIDLAKNVFQVHGIDERGKTVLRKQLRRAQVAVFFGNLPPCLIGMEACASAHYWGRTLQGFGHTVRLMASQFVKPYVKTNKNDAADAEAICEAVGRANMRFVPIKSIEQQAILSVHRVRQGFVKARTAQANQIRGLLGEFGLTIPQGIINVAKKVPELLEDASNELPAPLRHLIERLTAHLKELDRQVKEFEKEIIAWHRSSELSRKLEAIPGIGPLAASALVASIADPHSFKNGRQVSAWLGLVPRQHSSGGKPTLLGMSKRGDAYLRTLLIHGARSAILAAQNKVDNTNGWLSNLLNRRHPNIAAVALANKNVRTVWALLAHGREFRAHYAPQPIAA

SEQ ID NO: 284062 - protein, 426 aa, unidentified
MRVLYDRVAAIDVHKDMVKVAIRVPGAKRGTRKTDVLEFRTFYGVLQAMARELRRRGVTHVVMEASGVYTDPVYYALRELDFTEVMVINPAHAKALKGHKTDAKDAIRLLDLYECGLLSGSYMPDADLREVRDLARYRMKTVQARTSEIQRLQKALETAGIKLGSVVSEITGGSATAMIEALISGERRGSVMADLAQSRLRTAGKMADLSMALTGRFTDHHALMCRLHRDRIMIFDDAAKDLDATIAPLVARYAREAELLKTLPGFGDVIVAGWLGAIGPAPHQHFATASRLASWATICPGNYRSAKKSKGGRTGNGGAYLKPLLIQAAWAAVRVPGRLQARFRRLVRKFGGPRNKGAQKRAITAIAHTLLKIACSVLKTGTPYADLGADFYTRRESPDARQDYLMRQLQKLNPGCVITITPAEAA

SEQ ID NO: 284063 - protein, 343 aa, unidentified
MSIVGVTGGVDTHADTHVAAAIDHNGGLLGVESFPADPAGYESLLGWLVGLGEVIRVGVEGTGSYGVGLARFLHSRDVVVVEVDRPNRQKRRKMGKSDPTDALAAARAALSGEASVVPKQRNGPVEQMRVLLVARRSARQQRIQTLNQLRHLVLCAPEPIRVRFKDRYQTGLVTEAANMRPRQGSDPVAFTTNVVIRNLARRIKALNTEMGSIDQTLITLIGDTAPSLFELYGLGADTAASLLVAAGDNPERLGSEQAWAHMCGVTPIAASSGKITRYRLNRGGDRQANAALYRIVLTRMSSHQQTRGYVTRRRAEGLNTAEIMRCLKRYVARQVFKHLPTAA

SEQ ID NO: 284064 - protein, 400 aa, unidentified
MLSIGIDVSKGKSTVCGMKPGGEIVYTPFEIQHTREGMSELVSLLHNSGEEVRAVLESTGSYHCPVVAALLENGIFVSVVNSLRMKRFCSQSIRKVKTDRIDAMQIALYGLAYWQELQPTRLPEDTYRELQLLARQYYQMTSMLIKAKVDFNAICDQVLPGMQELMSDHAGRHKLSDFVLRYHHTAHILKMGETRFRKDYCKWAEKKGYRNCERMAVLIFATAQNGIPVLPNAPSTQIVITEAIRVLHTVEASRDAILTQMQALAKTLPEYSLVREMPCIGDTLAPRLIAEIGDVRRFHSKRALIAYAGIDAPPYQSGKFCANNRHISKRGNRYLRKTGYEVMQSYVMHKPANDPIFTFIEKKRGEGKSGKLAMVAGLNKFLRVYYGKVTELYRSLPAIE

SEQ ID NO: 284065 - protein, 405 aa, unidentified
MNKRVALQEPSIKEVHFMEGERAEVGIDVHKRTYSVTLWSEQRDEVVTRWTQPADPSALIRSMTPFKEHVNRVVYEAGPTGYGLVRALRAEGFRADVIAPSRTPKSTGQEAKSDRLDSRRLSMWSAKKLLKAVRIPTLEEEGDRQVFRTRDDVVAKRRRVKQQIKSFLLQHGIAEPDGLRTWARRGIESLRKTKLSPQLRFSLDFLLADLEHYDSQVRKADAALKSLAATKRHKQASEALQTVGGVGTVTAMAMRTELIAPERFDKGRQVAAMVGLAPLVSSTSETTRQGPLMKCGNARLRKILIEAAWRWMARDDWAAERYGQLVRNTGDRKKAIAGLARRLVIILWRISVTGEPYRPRPVEEPAPRSRTARKRCQPGLPDKNIKRKRAPSTSRRRPVSVQPPR

SEQ ID NO: 284066 - protein, 325 aa, unidentified
MQGKELSEHVPSEETYIGIDVCKSHLDIHIHPCDATWRVSNDRCGITAFLRRLAALPVVVRLVVVEATGKWHRAVHRRLHEAGYDVAVVNPYRSRKLADALGHLAKTDAIDARTLARFGQALRPRTTPPPPETVAALRELVAARRAAVAEAGALGNRLMTAEHGLVARQLRARIAMLKRHIQAMAISISDAIEADPAMANLFHILTSIPGVGSVAATTMIAELTELGACSRTQIAALLGVAPMNWDSGAMRGRRIIKGGRAPLRAVLYMAAIAAVRCNPEISAFYERLKDRGKKPKLALTAVMRKLVILANTLVRENRSWLPDAP

SEQ ID NO: 284067 - protein, 364 aa, unidentified
MIRLLHLIKQGDGSMNEITILGLDLAKNTFQLIGVDKHHKVVMKRRCQRDKLVEIATNLPACTILMESCGTSNYWGRRFQEMGHTPKLISPQHVTPYVANHKNDYKDTEAIIEVGTRPRTKFVQIKTIEQQDIQSVHRVRERLVNNRICLSNQIRGLLLEYGIVIPQGFSSLKSKITELLSPECDLVNKEIQEILVDVYDEFKILSERITKYDKKIESISNQQESCKLLKTIPGIGPITATALYASMGNGSQFKNGREMAAQIGLVPKQHSSGDRQLLLGITRKGNRDLKQLLIHGARAVVATAGKKEDKRSIWVNKLAAKKHFNVAATALANRTARMAWAVLTSSKPYNANFSYVKTNEGGAC

SEQ ID NO: 284068 - protein, 395 aa, unidentified
MILVGIDIGKYSHHFALVRKEDGEVLREPSEINNDLEGFDQLISSFRKYQKKDILIGMEDTGHYHFAILKHLLDKQYTVALINPITTDLTRKMNGSITKTDDLDSLTICDVLSSNKKDKKPYRITKINRFDMYEQRCLTRHHHNLKEELNVYSNRLQKCIDVVFPEYNSLFKSKYGIVYMNVLKKYGSADNIAKADIRSLRKCFEINRRGKRISLTAEKLKETAKNSIGISSSSEVIQIRHLIGQIELIYAQLKEIDKKIEEFSRQINSPILSIPGISHFSGTSILSELGDISNFTNPRQVIKFSGTAPLTYESSQFKAQHTKITKKGSKYLRKTLYQIILPVIQHNKVFGDYYALKLSQGKSHRCAQGHCVRKLLRVIYHLLKTGQQFDPALLS

SEQ ID NO: 284069 - protein, 338 aa, unidentified
MVYGAIDLHMRQSQIRIVDEAGVVQRDQRVPTTRERLTQAFLGHGRMRILLETGTESEWVAQALEAAGHEVIVADPNYAPMYGEVTRRIKTDRRDAVALAEANRRGWYRAAHRTSAAQRDTKQILRSRRFLVQARSGAVSLLRSLLRQSGYRLGTGSCDTVPARVARLPLPTALAETLAPLGRQIATLTTEIHAMDARLQTRTASDAIVARLRSVPGIGLIVATTFRAFVDRHERFGHGGQVSAAIGLVPREDSSAERRHRGHITKAGPRELRSLLIQAAWVCWRHGGSGTLRAWADRVAARRGRRIAVVALARRLSRILFALWRDATTFEGRTLATT

SEQ ID NO: 284070 - protein, 382 aa, unidentified
MNEAITGVRRFVGLDVHAETIAAAIAEKEGTVRQLGTVPNREENIRKFVKKLTEGGAWAACYEAGPTGYALYWQLTKLGIPCVVIAPTLVPTKAGDRVKTDRRDAQRLASSFRAGELTPVWVPDAAHEALRDLVRAREAAKQDQLRARHRLGKYLLRHGKRPPQQMRAWGKNYLEWIKGKVSFDQRCQQVTLEDYLNEVEHAALRITRLEKAIDEAVEQAPENMRELIQALQALRGVAKVGAVTIVAEVGTLTRFEHPRQLMGYSGTVSSENSSGGKIRRGGITKTGNAHLRRVIVEAAWSQRHKPVLSSAMRKRQEGLSAEVQEVASKARHRLHSRYMRLLGKGKTKQEVVTAVAREMLGFIWAIGVSVERAQAQRAKGAA

SEQ ID NO: 284071 - protein, 363 aa, unidentified
MKIMVGIDLHSNNALCGLMDENGRRLVHQKLPCDLAAILKLLEPYKDRIATIAVESTFNWYWLVDGLQDHGYHVVLANPARMQPYSGMKYTDDVSDAYFLAELLRLNLLPTGHLYDRKTRPVRDLLRRRLLLVRQRTTLILSFKSLNERTLGQRVPLARVKAMQAEEAQARFTDPADQLLSGQQIILMGHLTDSIMKLEQHILGVVGKWSTYQRLQELPGIGKILGLTIALETGDAQRFADAGNFASYSRCVKSLRTSNGKKKGENNRKCGNKYLAWAFVEAAHFACRYDDQCRRFYDRKKQQTNPVIATKSLACKLAKAAWHVMKDDVPFDAARVFGPARKSDFGETGREPAKGSGHPSQQD

SEQ ID NO: 284072 - protein, 356 aa, unidentified
MNANPVAARMHIHCVDLAKEKFQVHSFSHSGECLKQRTLTRSQFERFFCDAQMPRGLIVMEACAGASHWSRRFEALGHQTRLLPAQFVAKNRVGNKNDGNDADAIYATHCDKRIRPVPAKTLEQQDLAALHCARQLLIKQRIQLTNHIRGLLAERGCVAGKGDKGFQLLLARVAERLDPEVSEPLLEIIGLQLKVLEALDTQLSALEKRVHQAVQRSPLAMHLTSIFGVGPVIATAFVAEHGRGVERYADARQFAASLGLTPGEQSSGSTHRLGPITKRGDAYRRCLLAQGANTVVNNCHRHLDPLSDLARRLLDKHKRRNVVVIAVANRMARIIYALLKHPQEYRITRQGWAVQA

SEQ ID NO: 284073 - protein, 366 aa, unidentified
MLQKAELSAEADSENNLGGSSETMYFIGLDVHKKSISFCVKDAAGRVHQEGKVAATRRDLDAWVRALPQPRTIAMEATIFTGWIYDHLLPHAEAVKVAHPLMLRAIAAAKKKNDRIDASKIADCLRCDFLPECHIAPTEIRDRRRVLRYRNLVQRQAVQMKNRVSGLLMESGVPYDKLRLHRMGYFSQLMSTSEEIADSIRPLLKLCREHIDRSLRMDRALLRSLQSDPLLSERLQRLRTVPGVGPITALTWVLEVGDTSRFRSIKQAISYCGLCGAEKSSADKIMRTPISKQRNKHIQRMLVEAARLAPRFSDELAIIYERERQRGNANRATLAVARKMVAHMLAVDRRKTDFIPAGKLMPTAAA

SEQ ID NO: 284074 - protein, 338 aa, unidentified
MSLYCGIDLHSNNCYLAVLDEQLHPVLGRRVPNSLETILAALAPHQEQIAAIAVESTFNWYWLVDGLMEAGYHVELVNTSAVRQYEGLKYVDDRHDARWLARLLQLGILPTGYIYPKHQRALRDLLRRRFFLVRQRTANLLSIKNLYSRQTGSQVPTKDIKRLTAEQVTEQFTDPWIAQAITCGVNVADALQTEIVSLEKTIIEQARQCPEFALLESIPGIGKTLAMTILYETGSLSRFPDAGHFCSYCRCVPSQHLSNGKVKGKGNTRNGNPYLSWAFIEAAHFAIRFEPLAKKYYERKKARSCPLVALRAVAHKMARACFYVMRDQVPFQATQAFG

SEQ ID NO: 284075 - protein, 370 aa, unidentified
MKKQSKTVGRKSNQEMIEDGMNAVAGLDLGDKHSVVTVMNLDGEVVERKKIATSLAAFERYFQAWARMRVVFEAGSHANWTYRLLERLEHEPLMADTHRLALITQSLSKDDRNDSERLAELGLRMPEMLNAVEPCSLETQNDRTVLKAREALVEVRTKLINSIRGTLKSFGLRLPAVSAGAFAKKTGPLLPTELRGVLHPLMLLIQHATDEIRRYDKRIEELAENKYPQTKRMRSANGVGAITSVAFVLNLDNNPNRLRHSRDAGARVGLRPKRRDSGERSPELSITKTGDPMMRRLLVQCAQYILGHRGKDSTLRRWGLGLAARGGKSAKRKAVVAVARKLAVLLHVLWQRDVDFEPFYGVEETPPKAA

SEQ ID NO: 284076 - protein, 326 aa, unidentified
MQDLLEVCCGLDVHKETIVACLLKGSVNDEKPEKTIRTFSTLLKDLEELKTWLETENCHHVAMESTGIYWQPVYNVLESAFDGNISIIVANAKHMKNVPGKKTDMKDAEWIATLLRAGLLSGSFIPPQEIRELRNLTRYRKSIIEEISSQKNRIEKHLQSCGFKLSNFLTDIFGVSGRAIIDHIAEHGSITAKEVENYVRGRARNKIEDIKLSINGRMNKHQREFLKLLLKHLDETYKHLYEIEESINAEIEKYKRQIEQLDGIPGIDVTAAAAIIAEIGTDMDKFKTAEHICSWAGLSPGNNESAGKKKVHSSNKRKHLYKEDTV

SEQ ID NO: 284077 - protein, 351 aa, unidentified
MMIIGVDYHPSFQQIAFLIEEMGECGDQRLNHEGGEAERFYRDLKQRGISVRIGMEATGYSRWFERLLAELGFELWIGDPAEIKTKRVKKQKTDREDARLLLRLLREDRFPRIWIPSPENRDARQLLWHRHRLVQMRTRIMNQLQALAMNENKCWKAKLWSEVGRAELAKLPLDPWASRRRRELSELLDSINPIIEELTTAAEQEARNCPDALRLMTHPGVGPLTALAFVLIIGTPTRFVCSKQIGNYVGLIPSEDSSGGKQRLGHISKQGNSLLRFLLVEAAQAAVRCNTEWRRRYRHLVMRRQRNIAKVAMGRRLAVRLYWMWRNGCEYSPSFELGSHAGKLGTGDGVR

SEQ ID NO: 284078 - protein, 316 aa, unidentified
MSQFSVFAGIDVSKDHLDVHVLPEGKAWRVVNDEAGCAQLSEQLLALSAPVLVVMEATNVFWRLAATQLASAGIGAAVVNPRQVRDFAKAMGQLAKTDAIDAYVLALFAQRIEPPVRALANQQCQEAAELLSRRAQLMGMRVAEKNRLGSARASRVRKDIMVTIGFLEKRLAGLDEEIDQWLKSTPIRHSRAKLLKSFTGIGENTARTLLISLPELGNLNGKQISALAGVAPFARDSGNKRGARQIRGGRTAVRAALYMPALTAIRCNPVIRALYRRLIDAGKHHYVAITACMRKMLVILNAMLKSNQPWIDPQKV

SEQ ID NO: 284079 - protein, 346 aa, unidentified
MVMQPGRVVIGMDPHKRSVTIEVMAADEAVLGGGRFATDPAGFMELGQYVRAWPDRVWAIEGCNGIGRHVALRLLAQGQDVVDVPPKLSARARVFATGQGRKTDATDAHSIALVGTRMAGLRPVVDDEQLAVLRTLVDRRRSLGEEHTRMVSQLHHLLLELVPGGAKQYLSAAQAKAMLAGIRPRDAAGKVRRRVAAELVSDLERIYKRKKAADKELRELVRATGTSLLDLTGIGPSGAARLLVEVGDITRFPNRAHFGSWTGTAPIDASSGDHVRHRLSRAGNRQINRVLHIMATVQLRNHGIGRDYYDRKKAAGKTSMEAMRCLNLDPPVRVVFWAGRDARMSF

SEQ ID NO: 284080 - protein, 347 aa, unidentified
MDHYAGIDVSLEYASVCVVDASGKIVREGKVLSEPAALIAWFGSLGLGLARIGLEAGPLSQWLYAAMREAGLAVELLETRHVRDAFKAMPVKSDRNDARGIAQLMRLGWFRPVHCKSLPAQEVRALLTARKLVQSKLHDVEMSLRGILRGFGLKVGPTTPKRFAGRIRELVAGHATLEGVAAALLAVHAVLRREFAGFEQRVRMMARADAQAKLLMSTPAVGPIVALTYAAAIDDPARFKSSKQAGAHFGLTPRKYQSGETDYSGRISKIGDAAVREALYQAAHVILTKPLKGCTELKSWAMRLARRAGMKRAKVALARRLAVILHRMLADGKPFNPTVRKPVAAAA

SEQ ID NO: 284081 - protein, 399 aa, unidentified
MAEGVVAGIDWASEVHVACVVGGDGTVADRFSFTHDTAAIRSMVSRLRSANVAGIAIERGDGPVVEELLAAGLVVFVMPSRQIKGLRTRYGSAGNKDDRFDAYVLADTLRTDGHRWKPLRPDTGPTRALRALCRSRKDLVETRVLVTGQLRANLELAFPGAIGLFTKPASAISLAFLQRFPAAGKAAWLSPSRLASWLRSAGCTGGVSAGTLYGRLAAAAPGLTGPEGDARGQITLAFVAMLRTLNEQIAVMDAEIGRLFAAHPDRHIFASLPRSGTVRGATLLAEIGDCRQRFPTDDALAALAGACPSTRQSGKRSQAVFRWSCSKKLRAAVMDFANGSRMSDPWAAGVYAAATGRGCRHPHAIRILARAWIRVIWRCWQDGTAFDPALHRGRQAAAA

SEQ ID NO: 284082 - protein, 408 aa, unidentified
MNAVGIDVSKGKSMVAALRPMGEVALLPQEFLHTGVGLEQMAYAILALGEDTRVVMEATGRYHEPVAAALHEYGIYVCVLNPLYIKQSGGGSIRKVKTDKADAMKIAKYGLDNWVDLREYTPMDTVRQQLKLCSRQYNLYMKTVVSLQNNLISLTDKTFPGVNVLFSSPERADGHQKWVDFVMTFWHCDCICRVSEKAFIERYQKWCKRKGYHCSVEKALDIYASSCGHFTTLPKNDNTKLLIVTAAQQLLAGKTTLAALRAEMTRLASQLPEYETVRAMYGVGETTAAQLMAEIGDVRRFPRRSSIVGFAGVDPAVDQSGKHETQSTSTTKRGSPHLRKTLYQIVCTYLRKAPADEPVYQFLDKKRAEGKPYFVYMTAAQNKFLRIYYARVKECLEAFDAQQSTSQG

SEQ ID NO: 284083 - protein, 395 aa, unidentified
MPADLAGRGLARTASWVTEQSSLFGSAYMCEEAPVFTERTSVGLDVHARSVVAAAIDGVTGEVFRARLTPGNDDVIGWVRSLPGPSAVVYEAGPTGFGLARAFMTAGIRCEVAAPSKIQRPAGDRVKTDARDAMLLARLLRLDDIVSVSVPSVAREAARDLVRAREDVRGDLMRARHRVSKLLLRQGIVYYDGHAWTRKHLLWLRKQRFDAPGLQLAFDAEHEAVLQAEARRDRLDKAIEAMAADSEYTPVVNRLGCLRGVATLTAFGLAVEIGDWERLTGSSIGAYLGLVPTESSSGQSRSQGSITKTGNTHARRLLVEAAWQHLKPYRTPGATMSARWELAPAAARARGHAGNRRLHERWLHFNDRKKDPVIANVAIARELAGWCWSLAVMDD

SEQ ID NO: 284084 - protein, 523 aa, unidentified
MATVVSTRKTSPVRKESSAFRYSAGELAALVRQVGVERFAFVCFDPAKHRSRWRMADFLGNPLLVPASVEHTAGPLQAAVASVRRTMQQNGIQVVWVIVERTGQYHLPVQRAFAEAGFETRILHPCATSQYRSAVSPDVKTDDIDLYAQHLASVAGFGLVELPLDETYRRLRLMARHRRDLVKKSSTLCSQIREHLHLVMPGYAQCFEDLWLCPGAVPIARHTGTPQAVLDLGLAKLARKLKEDGVRIQERTIERVIAWARQAAPPAPDAAMHQRIWTALDDDRLAKRREIQGLERDLASTLVCTPYVLLMAFPGINVVLAAELAGEMGPITHYGNPNAISGRAGLFPRRYQSDTVDLANGRLARRANRRLRSALMRIADSLVMNNHYFRSQAELQRKQKADERSIRVRVAKKFTRLAYAVLAGQQVLRHDCCKPGDSILLKLSEFHRLHHTDTKQVLIDLQAVVDQLPKKAYTQEAKSLSERLKTETSRSRGPSPLGALLPAVLAKLTAKPTEESSEAQASR

SEQ ID NO: 284085 - protein, 354 aa, unidentified
MHKHLYLGLDAHTRNCVLAAMDPSGHVVSTTAFSTSEAVLIGHVTRRPSQDRYLAVEESSLAGWIVGVLRPYVTEVIICDPRHNALISRSGNKDDYTDAVKLCRLLRLGELTPVYHADHEHRTDFKIAVQQYLAFRCDHATLKRQIKAKYHQAGLVRVSGTAVFSKTHRGSYLNQLPTKARQQVVARLYKRLDALGKLRQEARTAMIELGRRYPEIIQFQRMPGIGVVGAHVFSAFIQTPHRFATKQKLWRCCRLGVVERSSAGKPLAYKRLDPSGQGALKALSHQCWLSSLRTAQPNEVSLFYDASLRRTQDTVRARLNTQRKELMVLWTIWKNNVDYNPQLFYQAPAPAVGA

SEQ ID NO: 284086 - protein, 347 aa, unidentified
MNFYNNMHPYYCGIDLHARLLYVCIIDNTGLILVHKKIKDDPEALLKLLKPYTGNIVVGVECMHCWYWVADFCKEHTIDFILGHALYMKAIHGGKAKNDKIDSYKIAKLIRGGNFPLAYVYDKDMRATRDLLRRRTKIVRHGADLKAHVANTASQYNLPAHNVNLKNVCDREKMRYYFPDPVVQRSINLNMAILDCYHSELKPLEHYIEQMAKQHNPVHLNILQTINGIGRILALTIIYEIGDINRFSSVQKFASYSRLVKCKAESAGKTYGTQGNKIGNAHLKWAFSEAAVLLLRHNHNANKYLEKLQKRMSKAKALSALAHKLARCVYYMLKKETVFDEAKFLKS

SEQ ID NO: 284087 - protein, 344 aa, unidentified
MKFTRCGLDIAKQVFQVHGVNEHGVVKGHRTLPRTRVLEYFAQLPPCLIGIEACGSAHYWARELTKLGHVVKLMASQYVMAYRKRAKNDANDAEAICEAVGRPNMRFVAIKSEEQQSVLMVHRARSLTVANRTAQVNQIRGLLGEFGLVVPRGVGRLRRELPGILEDAENGLPMLAREVLSGLLQELREADLRISAYDRQIRALAEASEPARRLMRVESIGAQTATALVATVGDPHVFRNGRGFAAWLGITPRQHSSGGKERLGPITRQGDGYLRTLLVHGARSYLRVVDKKTDAKSDWARRLKQRRHVNVAAVALAAKHARIAWAILAHGTEYRPAGPQTAVA

SEQ ID NO: 284088 - protein, 338 aa, unidentified
MNIVFLGIDLAKNVFQLCGLNQAGKPVYTKRTGRKELLQTLANIPACLIGIEVSTGAFYWQREFEKLGHKVKVISPQYVKPFVRGQKNDGNDAQAIAVALMQPTMQFVPPKSPEQQDIQALHRARQRIVNHRTATVCQIRGLLLDRGIPIGSAVSRVRRAIPLILEDAENGLSSRMRRTIAELYELFNDLGRRIHFFDKEIETVFRQSEACQRIARVKGIGPKTATAVVAAIGKGTEFKNGRHFAAWLGLVPRQHSSGDRQVLMNMTKKGDKHLRTLFIHGARAVVRVATNNNDGHMNQWVNQLKERRGFNKTTVAVANKNARIIWSMLRNETEYQVV

SEQ ID NO: 284089 - protein, 358 aa, unidentified
MKYYIGCDAHKKYSVFAGVSEAGEIIPAQRVEHDREKYSSFLKGLPPASDIAIESVGNWYWLIDEMEKAGHIPTLVNAGKAKLMMGNINKTDKLDAKGLAVLSINGTLPAVWIPPRELRDQRELARMRIFLVHIRTSLKNRIHATFAKYAITFEEVSDLFGVRGRNLIEKRLAELPPETRDSVKEQLKLLDQLQRQISMVEEHIRQIVKITPEMQLLMSIPGIGPILAILIALEIGNVARFGDGAHLASYCGAVPRVKSSGGKTYYGKTRPDVNHYLKWGLTEAANVIVLTQHRMTGHHVVTLYRRIRQSKGHAKAIGALRRHLAEASYAVLRSGQPYHEPGTPRKSSVTKEVCARLA

SEQ ID NO: 284090 - protein, 375 aa, unidentified
MYQYNKYVGLDVHKEKIMIAIAQADRTAPLYYGEIANTEEAIAKAIRKVIGQEDVAFCYEAGPCGYGLYRQITDMGCRCDVVAPSLIPKKSGNRVKTNRRDSLSLAGLYRAGELTSVWVPNKEQEAMRDLTRAREDMKAMERHSRQRLGGFLLRHGKVYPGRSKWTQAHFRWFEGVRFETATQQIVLQEYIDMVKHAQGRVKAMEEEMRKALDGWKLKEVVEGLMALRGIDLIAAMTIVAELGDISRFESPRQLMAHLGLVPSEHSSGEKRKQGGITRTGNGHVRRVLVEGSWSYRLPARKTAHLRRKAEKTSEAVREIAWKAQKRLCKRFWYLINKGKLPVESCTAVARELVGFIWAIACEVMGKGTISSAVKG

SEQ ID NO: 284091 - protein, 418 aa, unidentified
MIDDVQWFVGIDWATQSHRVCLLDIEGRQVNERDFAHGGAGLTELRDWLLEKTKAAPGQIAVAIETPHGPVVEMLLDHAFQVFAINPKQLDRFRDRFTVAGAKDDSRDARVLGGSLRTDRQAFRRLVVDDPLVIELREWSRIAEELQQERTRLANRVRHQLWRYYPQAIELTDDVADDWFLALWQQVPTPATAAKVSEQAITRILKDHRIRRLDAATVLQTLRKTPLFVAPGTTEAACAHIRNLAARLHLVNQQIKEAHRALDGLCARLEAATENPSGQIREQHDVTILRSWPGIGRIVLATLLTEATEPLRARDYHALRALAGTAPVTRRSGKQCFVIRRLACNKRLQNAVHHWSCVAIQHDTAARRRYDALRRRGHGHARALRTVGDRLLYALCTALKRQTAYNPNCQTAQVTASL

SEQ ID NO: 284092 - protein, 423 aa, unidentified
MSYRIAGIDVHKKKLAVVVADVEVEEAYQFERRWYGSNPEQLRLLAEWLIEQQVEEVVMESTAQYWKPVWGALERYWKPTCQNREGAGRMSGTLHLAQALSNRGRRGRKKDFRDAERLVKRLVSQELTLSFVPDAEQRLWRTLTRTKYQRTRDKVRLQNQLEALLEEAHIKLSSLVSDLLGVSARRMLKALAEGETDPAALAALADQRLRATPAELRDALGACTELNPVYRRLVKLALVDLHLIEEQIGQLDQEIASLLREHQDAVQRLAEVPGLGVDSVQQIIAEIGAKAATFPSAKNLVSWVGACPGDDETAGVNRSKRSPKGNRQMRRILYEAANAAVKHKGSIFEIVYRRLVLRLGHNKTVGAIAHRLCQLIWFILHNGVRYEERGPAVSEKSKRLRTTRMIRTLRNLGYRVEPLGNPA

SEQ ID NO: 284093 - protein, 387 aa, unidentified
MEKIIEETSIKLEFLEQKKLNNLLYVGVDVHKDQHTALAVNCFSQILWEKEINNSKEEFCQLVKQIKKLAEGQGLEPVFGLEDTSGYGLRLACYLYQQNLPVKTISPVLVDRGRKYETHPEKSDSLDALGVAKALIQRIGTLPDYTISKTEEISKEIKELAMDREFLVKEQTRIKNQLHRLLHKAYNSGYREKFKNPFSVKALNYWSKYPVPKKSDGLISCFPILKNQIKRKLKRLRDIKKEIIEIEKELRILMDQTEQKIETLNGCGLVLASSLLAEIKNIDKFKSPDALAKYGGLCPREKSSGKKLRHIKTKSGNRKLNKAIHRIAFSQIGRNGNQYAKEYFLRKVSEGKSKSQALCCLKRRLVNIIFMMLKHKQEYRYSVKNLT

SEQ ID NO: 284094 - protein, 324 aa, unidentified
MAKRITICAGIDTGKRKLDVAIDGSSSQLQVKNTAEGHRVLLEWLRRHKVKRIGIEASGGYELPVVTELRRKRFVVVVFQPAQVRAYAKFHLQLAKNDKIDAALIAACTAAVKKIHDAPDPRLQPFAEHLTLIDQIGEDIQLYKNRLETCRDPRIQKLWEEEISRLAKRARAELKALVAAIRQHRDLARRLDLIYSVSGAGMPTAVAILVRMPEIGKLSREQVAALAGLAPYDDDSGERSGARHIDGGRKRLRRALYTAALPASFRWNPHLIALYQRLRAAGKVHKSALIACARKLLIFVNTVVARGTPWQKEQPVRATNPAAA

SEQ ID NO: 284095 - protein, 356 aa, unidentified
MGKDITSVGGLTIGLDLGDKHTVGCVLTGSGEVEEIFSVATTMSALGRTMAGFESSRVVLEVGTHSPWVSRLVEQAGHEVIIANPRRVRLIAENDSKTDEVDAELLARLGRVDPGLLKPIVHRGERAQHDRILLLARDGLVRSRTQLVNQVRGFAKSLGHRMPSISTEAFPRRVREQFSKDLFPGQSVMLEMIDRLAQEIRRMDREAEKLCNDRYPETGVLRQVKGVGALTALGFVLTLEDPSRFAKSRTVGAYLGLRPRSRHSGEQQPQLRITKAGDELLRRYLVGAAHYILGPFGPDTELRRFGLKLAERGGKAAKKRAAVAVARKLSVLLHRLWVTGEEYQAIGYGQPTQEAA

SEQ ID NO: 284096 - protein, 341 aa, unidentified
MENVALIGIALGKHSFHLHCQDKSGKALQRKKFTRTNLMQFLATCPSTVVVMEACAGAHFMARRISDIGHEAKLISSQFVRPFVKSNKNDFVDAEAICEAASRPSMWFVQPRTEVQQAMRALHRARESLIRDKVKTTNQINGFLLEFGISLPAGDTVIKRLPLVLVEHEIPEYLSRLLMKLHAHYLYLVEQITELESELNQSIKTDDATQRIMTIPGVGPITASLLSSQLGDGKQFSCSRDFAASTGLFAASTGLVPRQYSTGGKSTLLGISKRGDKNLRRLLVQCARSFMMRLEHHQGRLAEWVREQLSKKHSNVVACALANKLARIAWAITTNHNAYQA

SEQ ID NO: 284097 - protein, 348 aa, unidentified
MTLVGCDLHSRKQQVAVLDTTTGEVLEQELVHDGDAVERFYRALRPPVTIGIETTGYTHWFHGLMHRLGHTVLVGEAAKIRAMVVRKTKTDRRDARHLLELLKHDRFPTVWMPDPDTRDLRALVSHRVRLVRMRTMVKNGLQAIALNQRLAVGSKLWTQRGLSQLRVLDLPPHTRRRRDDSLELLAWITSRIDQLDEQLADVVAHDSRARLLLTHPGVGPLTALTTVLVLGPLARFPDSKHVVSYVGLAPSINASANKQHLGKITKQGNALLRWVLGQAAPLAARVDDDLRRRYFAILHRRGRPKARVALARKLLVRLYVMLRDQVDYDEFRRRGRTVSAQHAAMPIS

SEQ ID NO: 284098 - protein, 308 aa, unidentified
MMWIGVDVSKDRLDVYARPSGETAQFDNDPSGLKALRKWLQRYAECHVVLEPTGGYERAVVRELLEAKVTLSVVNARQIRDFAKATGRLAKTDRIDAQVIAHFGEVVKPQPRTPLDPQAELLEALLVRRRQLIEMRVQETNRRPLAAKAIRPLIEAIVQTLSEQIAQIDDELDQVIKQSPAWREHEDLLTSVPGVGTVTARTLSTMLPELGKIGRKQIAALVGLAPFNCDSGQHRGQRQIRGGRYAVRAVLYMATLSAIHHNPVIQAMHERLTAGGKLFKVAMVACMRRLLCILNAMVRDQKPWLPST

SEQ ID NO: 284099 - protein, 322 aa, unidentified
MSVSVLGIDIAKQKFDVALLVDGKTKHKACKNSAEGFETLMLWLEKQGIQKVHACLEATGNYGEDLAIYLHEVGHMVSIVNPARIKGFGQSELIRTKTDKIDAALIARFCLAMKPGEWIPPSPEIRSLRALVRRVDSLIDMRSQEKNRISTAHESVILLIKEHIAYLDQEIEKIRRQIVDLIDQNPSLKQKKDLLDSIPGIGKVTIPTLLAELNDLDKFNHVREVVAFIGLAPKETLSGSSIKGKARLCKIGCVRLRKALYMPALVSIQCNPVMIAFYNRLKAKGKNGKVIVCAIMRKLVHVIFGVLKSGKMYDPNYQQNFA

SEQ ID NO: 284100 - protein, 348 aa, unidentified
MRFYSQPHQYYCGIDLHTRTLSLCLLDAAGAIRLEATLPPDRDRLATTLAPYRNGLVIGCECLFAWYWLADWCAEQGIPFVLGHALYLRAVHGGKTKTDAVDAAKLARLLRGGTFAEAYVYPNAMRATRDLLRRRTYLVRQRATLIAHLQTTFLQYNLPAPQKKLAYAANRADLDLSVFPDPSTRSMLEADLAVAAALDAQVKRLEAELVRTAKVHDPQTFARLRSVPGIGPVLALIMLYEVQSIHRFEHEGQFLSYARLVGGVRESAGKSKGTGGRKIGNAHLKWAFGEAACLMLRESGKAKTWVARKERKVGKPRALGALACRIGRTVYHLWRKQASFDAAKFLAS

SEQ ID NO: 284101 - protein, 368 aa, unidentified
MNDLIRIGMDTSKSVFVLHGVNAAEQPVLRKKLRRREVVELFTTLPPTRVGIEACGAPHHWARELTTLGHEVCLLPPQYVKPYVKRNKNDAADAEAICEAMSRPRMRFVPVKTAEQQAALMLIGVRDQLGRRRTQLSNAIRGYAAEFGLIAAKGLDKIEPLLARIAADEMLPALAKELFAEQAEDYARLTLKLGKIDARLKAWHRQNEPSRRLAEIPAIGPIGASLLAMKVPDPMAFRSGRDFAAWIGLTPKDHSTAGKTRHGAITRAGDESLRSVLVVGATAVIQQVRRGRGRPSPWLIALIKRKPPKLAAVALANKTARIAWKLMVSGQGYDRAHASRAGRSGFAMGVRPVLEAPTAIAQTAMGQP

SEQ ID NO: 284102 - protein, 418 aa, unidentified
MTKKLDTTFIQIVHPVCCGLDVHKKKISACLIIIDEHGKEQYEVKEFGTFTNDLLEMKKWLTDNSCPVLAMESTGVYWRPVHNVIEGFMEVILVNARHIKNVPGRKTDISDCKWLAGLLRHGLLKGSFIPPKEIRQWRELTRLRRTYTESRADYKRRVHKLFETANIKIDSVVSDLFGVTGRNLIFLLCNESELSLDAIKENAKRGLKAKSKELHSSIHGFFEDHHRFQLIGMMEMIATFEKRITEITQRMDTLTEKHQDLLNRLDEIPGIDKKSAQSIVSELGITLDEFTCMAALASWAGLCPGNNESAGKRKSGRTSVRSHPFKTILVEVAWAAVKKKGSYYRAKYYKLKARRGAKKAIVAIAHRISKAIFNIIKQGDTFMDLGEDYLTVQTRQRVINNIKKQAEQLGYKLVPCEN

SEQ ID NO: 284103 - protein, 312 aa, unidentified
MNKTICGVDVSKEWLDAHIEPSGAAGRFRNDAAGIAELAAWCQGHGVELAVMEASGGGERLAFLLLWELSLPCALVNARNVRRFAEAMGFLEKTDRIDAAMIVGYAQAKRVQATPPPSAAEQRLKALVARLGQVTGDLTIQKQRKCAAANAEIIASLDEVMALLVRQSRRLEGEIASLIDDDPLWACLDRAFRSLKGVASRSVARLMAELPEIGILSNKAIAKLAGLAPIANDSGKRSGRRPVRGGRAGPRSLLFLIARIVAKYDPHLAAFHQRLQAAGKEKMVIRIALARKLLVILNAKARDARSEFANAT

SEQ ID NO: 284104 - protein, 340 aa, unidentified
MQTERKNYLGIDVSKFWFDVSLLVVVDHAKQPLLTDRFENNAPGIKAFRTWLKLQQVSYDSNSLLVIENTGVYHRLIWSFCSKHNLPLHIGNAAHIKWSLGITRGKNDVIDSQRLCIYCCKQADELKATPVLDPVFMKLKDLMTSRSRLVAQLHSTKNYIKEIQCTNDNALLSMLDKAHKAAIEGIKKSIVQIEEMIKQIIQQNKAVYTNYQLIRTVPGIGHLTAVYIICCTNNFAAKPSGKQLGSYAGVVPFTNSSGTSIKGRNKVHKMANKDLKKLLHLCALTAIKYNPEFKHYFNRKKAEGKNGMVVLNAIRNKLVLRVVAVVNKQEPYVNNTQIAA

SEQ ID NO: 284105 - protein, 315 aa, unidentified
MDHPIPQTAGIDIAKDRLDVCLCPDGAARHFTNDAQGHRALIVWLAAHSIQRVVFEATGAYHRALERSLAAAGLPLAKINPRHARRFAQALGQLAKTDRLDAALLARFGALLEPPTRPVLSPTLDAMKELLVACQALIKDRTAALNRQKTVRSPLLRRHLTQRLSQIAHQLAALEAHLLNLCKGDADLAPRLAILMSIPGIAQATALSLLVDMPELGSLDQGQVASLAGVAPVAHDSGTSRSRRMIRGGRANLRQALYMPALVAARFNPDLKAKYQALVAAGKPAKVALTAIMRKLIILANALLRDQRHWTPQPA

SEQ ID NO: 284106 - protein, 427 aa, unidentified
MLKHNTEPNPAEEFAAFLALDWADQEHAFRLQVVGQSEIETGTLEQKPHVLGPWVAQLRERFGGRPIAVGLEQSRGGLIHALMAYDFLVLYPIHPTTVAKYREAFKSSGAKNDPLDAGQILEILTKHQDRLHRFNPDTVETRLLGRLVEDRRKAVDLRTTHVQALGASLKEYYPQALELTHGNLSSRLAGDLLLKWPTFEDFQQAKPSTIKRFYYGHNVRSPELIERALALAEKSQALTTDPAIVESGRRLSRMYVGLIRALNPVIEDYEERIQRVFDAHPEVKVFSGLPGAGPAMAPRLLAFFGTDRSRYATALNVQSFTGIAPVTKSSGKSRVVYARAACPKFDRQTFHEFSRLSVTYCQWARNYVDYYTSKGKKYHTIIRALAYKWIRILHKCWQERTPYNEDKYMESLKKRGSIFATLHLQKT

SEQ ID NO: 284107 - protein, 425 aa, unidentified
MRYYLGVDWADQTHAVWVVDERGTKVAMRTVPHTAEGLSEWGRELDEWRAQGTELWAAIERPEGRVVDFLLDHGVVVYPVNPKALDRARDRFRQSAAKSDPFDARVLADFLRTDHARLRALRPSSEAAQELKLLTDDYQRQIRHQTRLVNQLTMTLKAYYPRALEVAELPTALARDFLQAYPTPAALTVLTERQWQRWARAHRMHEARTQELWAVLQRPQLPVPAHVVRAKTRLMQSLVAQLTLVVEVVGTYREAIEDFFAQIPAAQWIRTLPIGDHGITAPTLWARLGDAPGRWESFRHLQAQAGTVPVTIRSGKQQVVRFRFACDKSLRYVIDHVAFLSLRWSEWARAYYAGQRARGHSYHQALRALSAKWLKIIFVMWERQVPYDEQYHLATMTRQQLRLRQKQIARQGRTRFEAHRTPCGR

SEQ ID NO: 284108 - protein, 409 aa, unidentified
MLKIVYPNCCGIDVHKTFVVAVIAITNNQGITEYHRKRFSTFTNGLTQLRDWLEYYSCFDVCMESTGKYWIPVFNILEEQTNVCLAHPKYVKAIRGKKTDKKDAQWIADLFKHDLVASSFIPPLKIRQLRDLFRYRMKLTQLQVGEKNRYQNCLTWSNLQIASVVSDVFGKSAQAIIKSILDNPQDKPNIEQLVHKRMKNKVQDLEIAMEGALTPEQAEKIRVIKAHYDALAICKEDLEQMIRELGQDYQHQVKLIQTVPGFKEDLSALRIISEIGCDMTVFDSAAKLCSWAGLVPANNESAGKKFSTRISKGGKYLKPFLVQVANAVVKSDKHPELRNKYLKLKKRRGHRKAISAICRRLLVSVYQVLRKQEDYNPVLQGLTEIRNPDKTMSVQDAVRFAQQHGFNVA

SEQ ID NO: 284109 - protein, 409 aa, unidentified
MKTLHRRCAGLDVHKDEVVACVRVVDRSKATHEVRRLATTTRGLLELADWVQANGCTHVAMEATGVYWKPVWHVLEGHVELVLANAAHIKNVPGRKSDVNDAVWIADLLAHGLLRSSMVPPTQIQELRDLTRTRKQLTREVVQHTQRIQKVLEDANVKLSSVVSDVLGVSGRRILEAIVEGESDPGKLAALGNERLACTRAELVEALRGRVSEHHRFMLKQPLRMVDELERSIRAFDQRIEVALEPFRDDIERLTAIPGVSTTGAQVILAEIGADMSRFPTVGHLLSWAGLCPRLDESAGKRRSTRVRKGAPWLKTVLVQCGWAAARSKETYLRAQFLRLKARRGPKKAAVAVAASILVAAYHILRDKADYHDLGPDYFVRRDSARVAQRLARRIRELGYDVQIQQKAA

SEQ ID NO: 284110 - protein, 425 aa, unidentified
MKITQTAQKIKLNQVLDISVDVHKDTLNFFFETGGKEHSDECSNRTDVIGRKLKSYHEIAFEHGTKTLRIICEPTGQYHNKLFRTARRMGFFTCFVNAESVAKFRVIETNDTGKTDTKDPRVIRTLGQLDKVITHRIIDEEYLVLRKLNKIYDEVDVAIMSLRCRLDRLLTELFCDYSFKKDFLYTASGLALIEQYGCNPYRIIKAGYRVFCACMRKAAPRIQQKTLQRLWEDAQSSVLNEQPEGYIEILEIHLRQLINDWLQQIRRKDKIVEKMIEVLNRLRGKDLHIPPPTPGVINDKNMARLLGETGPLGDFANWRMLMRYGGLNIRMRQSGKYQGQSKITKRGRPLLRKVLQHIVLPLVRGNCLYGQYYYRKKEIEKMPGNKAMTCVARHFLKKFYGWYKSGEAFNQQRFFACETQYRKAA

SEQ ID NO: 284111 - protein, 371 aa, unidentified
MKQFSKFVGMDVHKATIAVSVADANGGEVRYVGEIANTPEAIEKLVRQLRKGDAHLSFCYEAGPCGYGIHRQLSDLGWDCQVVAPSLIPRKAGERVKTDRRDSLMLARLHRAGELTAVWVPDDAQEGLRDLTRAREDMKHLQRQAKQRLCAFLLRYGKCYSGKSNWTQAHYRWLEAQKFGQSVQQIVFQEYVDTVKALSKRVDGLDTQLESAASESVFWPVIEGLMALRGVNLLTATTVVAEIGDLKRFASAPQLMAYLGLVPSEHSSGATKSRGAITKTGNAHVRRVLVEASWTYRHPARKTAHLQRRAERTSEAVQDIAWKAQKRLCARYRLMEAKGKLKVQACTAVARELTGFIWAIGQELPQPVPNR

SEQ ID NO: 284112 - protein, 427 aa, unidentified
MKMWCGIDWAEHHHDVAIIDESGTLLARLRTTDDASGFTALLELLATHRLDAVTDIPVAIETAKGLLVANLRAAGVPVFAINPLSVSRYRDRYSPSRAKSDAADALVLANILRTDATAHRPLPNDSELAGSIRVLARAHQDAIWDRMQTASKLRSVLRDYYPTFLATFEDLTSREARATLQLVSSPSGVGRLRKTTLVAALRRAGRRRLVENAADRILAKLKSGQLQQPALVEAAMAQQALAYARVLDTMVANIAALEAALEAAYLSHPDAPIISSFPGLGTVLGGRLLGEIGDDRTRFADARGLKAFAGTAPVTRASGMKTVVTRRVIRNKRLGQVAYLWALPMLAHSPGARAHYDRRRTAGDTYSAAARNLGNRGLGMLYHCLQTRQPYNENTAFPTTIPSATSRKPSATKAHREAEAPTTGAVA

SEQ ID NO: 284113 - protein, 378 aa, unidentified
MFLHTSDELNTLVTYLKSLVGETRAVIECTGRYHEPVVKSLSEAGIFISAVNPKLIKGQKRNTLRKVKSDPADARKIAKYALDNWAELREYSSMDTTREQLKTLNSQFTFFMKQKVAAKTNLISLLDNTYPGVNKLFDSPTRDDGSEKWVDYAYSFWHVDCVRKIGLKAFTERYEAFCKKHHYNYQKNKPALLFEESKQLVAVFPKEKSYKLLIQQSIQQLRLASEHIEIIRKEMNELASTLPEYETVMSMYGVGETYGPQLIAEIGDVSRFTHREAITAFAGVDPGVNESGQFKQRSNRASKNGSTRLRKTLFQVMSTYLQNKPVNEPVYQFLDRKRAEGKPYLVYMTAGANKFLRIYYGKVKECLRNLEQSQIEES

SEQ ID NO: 284114 - protein, 368 aa, unidentified
MVRADGDSVMTVSPSRPEARSLFGFQSASELGAPVASSIPEQLPGHEPASARKGYEDALVLRNRRVEGSLGRRGVAPGAGGWAALIEGLRKLSIAAIGLEASGGYERGVARALCGAGMSVRQVNPFKLRQFAKASGVLAKNDPLDARMIASFVAVMPTRPAQRPAPAAEQLAEMLAVRRQLSAEKVAAENASRLLEDAMLQRLSRRRIARLSADIDLLDKRLSEIVRTNPALHRRYRLLTSMPGVGAVLACTLIALLPELGQLGRKQIAALVGVAPYDFDSGKLKGMRCIWGGRAPVRGVLYMAAMSASHWNPLFKGFHDRLRATGKRPKVVIVAVMRKMLTILNAMVRDDSVWADRCSGRHSVPAAR

SEQ ID NO: 284115 - protein, 377 aa, unidentified
MKRIKFVGLDVHAETISVAVAEQGGEIRSLGVIPNREESIRKLVKKLGPVEELRFCYEAGPTGYALYWQLTRMGAKCEVVAPTLVPVKAGDRVKTDRRDALKLARNYRAGELTAVWVPDAAHEALRDLVRAREAAKKDELRARHRLSKFLLRHGRRPPMAVKPWTMKYLEWVKRDVYFEQLAQEVTLLDYLHEVEHGAARIARLDGAIEEAVKLAPPQMRAVIEALQALRGIAQVSAVTVVAELGEFSRFARAKQLMGYGGIVPSEDSSGERTRRGHITKAGNAHLRRVIVEAAWAYRHRPAVGTTLRKRQEKVSEEIKEIAWKAQQRLHERYRKLLAKGKNKGVVVTAVGRELLGFIWAIGIQVETAQKESLQRAA

SEQ ID NO: 284116 - protein, 358 aa, unidentified
MAADPAETHIIGGVDTHKDLHVAAVVDHCDRVLGTESFPTTRHGYRLMLAWMRSFGDLQRVGVECSGSYGAGLLRYMQAAGVEILEVTAPDKLDRRRRGKNDDFDAESAAHAAFAKRHTVTPRSRDGMVESLRVLRVCRKTAVQARRIALQMIQMNIVCAPDKIRDPLRSMTRMQLIRTLAAWRPDLTAYRQVEEAYRISLKSLARRYLELHDEIADLDDMIEAIVQDLAPELLAQTAIGLNSAAQLLLTAGDNPDRLRSEASFAALCGVSPVPASSGKSVRHRLNRGGDRAANSAIHIIAIGRLRLDARTQAYVARRVAVGNSKLEAIRCLKRYIAREVFGIIMRRHREINQSQIAA

SEQ ID NO: 284117 - protein, 339 aa, unidentified
MKDIKILGVDIAKDVFQLCGIDEWGKVIYTRRVKRAQYVSTVASLKVGCVVMEACGGANHWYRTFMGMGISTQLISPQHVKPYVKSNKNDRNDAQAIAEAASRASMRFVRGKTVEQQDVQALLKIRDRLVKSRTALINEIRGLLQEYGLTMARGAKRFYEELPLILASEAVGLTPRMKRVLNCLYTELLNRDEAIGDYEEELKAVAKANEDCQRVQSIPGVGYLTALSVYASVGDIHQFHRSRQLSAFIGLVPRQHSRGNKEVLLGISKRGNVMLRTLLIHGARALLRHVKNKTDKKSLWLKALIERRGMNRACVALANKNARIIWALLTRQETYRCGA

SEQ ID NO: 284118 - protein, 428 aa, unidentified
MDYTQNAKIAQVTEKTLIIGVDIGGENHYARAFNWRGQELSKKAFRFSDDVLGYLAFGQWLSGHKEKLNAEKVIIGCEPTGHYWFNFARYVKEAGMTLVLVNPYHVKQIKELDDNSPKKTDFKDPKTISKLVVDGRYAIPYIPEGIYAELRQAVSSRDRIIKELNALTNRIKRWLKIYFPEYLKVYKVFSSESGLLLLEHAPLPKDILALGAGGINQIWREHKLRAVGMKRATTLVEAAQKSVGIDGGVFAEMELRLLLEDYRAKQEQLKKVTDVLEAETLKVPNVEKLLAIKGIGLITVAGFIAEVGEIGRFDSPKQIQKLAGLELKENSSGKHKGQSSISKRGRKKLRRILFQAVLPLLRSNAEFADIYQYYTARQNNPLKGKQAVIAVGCKLIRIFYAILTKGIEYDANRMRSDIIRPGDLPQAA

SEQ ID NO: 284119 - protein, 414 aa, unidentified
MEVVNERCAGLDVPKKVVVACVLTPEEVGPSGQPKPVLRRFGTMTEDLVALAAWLAERGAVQVAMESTGVYWQPVWNILEEAGGFALLLVNAHHIKAVPGRKTDVKDAQWLAELLRHGLVRASFVPDRAQRELRELTRYRMALIEERTAHVNRLQKTLESATIKLGAVASDVTGVSARAILARLVAGDDHPVALADLAQRRLRAKLPELERALAGRFGEHHRYLVPRILAAIDFLDEQIADLDARIAELERPVADAVERLDGIPGVGPRVAETIVAEVGGTVDRFPSAQHLASWAGVCPGNHESAGKRLGGKTRKGNAPLRRALVQAAHAASRARQTYPDAQYRRLAARRGKKRAAVAVAHTILIIAYHLLARNATYTDLGPDFFDRRDTDAIERQLVKRLERLGNKVTLEKVA

SEQ ID NO: 284120 - protein, 326 aa, unidentified
MTSWIGIDVSKAHLDGVLLNAQGHQHTQVSNDKHGFRTLENFLKKRCPQGGHVCLEATGLYGDAVAEFLFQHSYVVSVVNPARIKAYGDSQLKRNKTDRADAALIADFCRTQPPDPWQPPAPQVKELRALLRHLDDLQAMRQQESNRAQSGEQSLTVLGQLQQHITFLDTQIQALKHQIDDHFDQYPDLKRQRDLLTTIPGIADLTAGRLLGELSERRGFHSARQVAAFVGVTPRQHRSGSSIHGHSRISKQGNAAFRAALYMPALAAKRYNPILKAFAQRLHARGHSKQSIVVAVMHKLLHLAFAVLKSGQPFDPLYLDKRLVTP

SEQ ID NO: 284121 - protein, 387 aa, unidentified
MQKSYDDSKACRTTFVQDNTLVAVIEMGLSSWLVAGMIPGVSREPLKKIAPNAQDLLQLLYRWRDEAITAGKEITRIAVAYETGRDSFWLARWLRERVIDAHVIHATSVAISREHRRAKTDRIDTAMLRRGFLGWLRGEPGHCSMAIVPTVAEEDAKRPCRDRDSLVHERTSIVNRMKAILIQFGVRNFNPVLRKAREKLDAVQTPEGIPLPPNTVCALRRNMERLHLIKEQIKAIEQTQLQGLKRDPGEKTNAIIFLLVRIIGLGVETAQQLAHEILFRNLRDRKAIARYAGVTGSPDESGSKRREKGISRSGNARVRKILIQLSWRIVKFQPESDLVLWFKNRTQNARGSRKPMIVALARKLIIALWRYVNTGVVPEGFKLRPAA

SEQ ID NO: 284122 - protein, 340 aa, unidentified
MRFYTKQHRYYCGIDLHARRMYICILDADGQIRVHRNGPATPEHLLATIAPYREDLAVAVECIFTWYWVADLCAREGLAFVLGHALYMKAIHGGKAKNDKIDAHKIAVLLRGGMLPMAYVYPRAMRATRDLLRRRCHFMRKRAELLTHIQNTATQYLLPPFGKKIAHKSNRTDVAAQFKIHDIRRFPSVQDFVSYCRLVKCGKESDGKHYGYSGAKIGNAHLKWAFSEAAVLCLRQNPPAQRFVAHLTQQHGKAKALTIFAHKLARAVYYMLRREQVFDATRFFAGTAATPDPPGRATLTPGAPRGQATTTTGAPRGSRIPRSTRRRHCPGVVPMTTTAE

SEQ ID NO: 284123 - protein, 415 aa, unidentified
MALKIVYKICCGIDVHKTFVVACIASTNSKGVTTYESHRFSTYTNGLKNLLQWLLDRNCTDVCMESTGKYWIPVYNILENDCTIVLAHPKYVKAIRGKKTDKKDAKWIADLFKHDLVAGSFMPPADIRQLRDLMRYRFKLTCFKSSEKNRLQNCLTVSNIQLGNVVSDTFGKSAQAILDKLLENPADTSFDLEPLVYKSLKKKLPELRDAIDGFITPEQAGKLKVIKAHYEDLESRKAELEELILALAAPYQQELAILQTAPGISSIFTAIGIISEIGTNMEAFPSAKHLCSWAGLTPTNNESAGKKKSVRVSKAGCYIKPLLVQCANAVVTSKKHPEIRNRYLRLKKRRGHKKAIIAIARMLLTALYHMLKNGENYNAELYRKSDLPPVDREITVEQAIIIARNQGYRIKSATA

SEQ ID NO: 284124 - protein, 353 aa, unidentified
MITIGVDAHKHVHMAVALDERGRVAGHWQGENSVAGWDEATQWARALGDERRWGIEGGGGYGRGLAQHLVGGGEVVYDINPRLTATERRRSRRTDKSDAFDAQAIAQVVQREEDTLPRVAAEDETVALDLLTAEREDAQAEATRLRNRLHHLLLQLDPEYHLHLPALTSVAGVQAAETYTTTSGNLVQQERAAVVRRLAGRLRLAMEQVAELGGRIEALAQARYAPLTRLCGVSLLTAGSLAGILGPGHRFASEAQLAAYAGIAPLETSSAGRVRHRLNRGGNRRLNAIVYRIALVQARWSPEAKAYLARRVAEGKTKREAFRALKRYLVRAIWRLWGACLPPAAVESVRQAA

SEQ ID NO: 284125 - protein, 352 aa, unidentified
MAVYIGVDLHVRTQTLCWVDESDGEQHEITLDHERDDVRAFYSHFPAPALIGVEATGYSLWFHRIVEALGHQLRVGDALAIRQFARRRQKNDRRDAELLLDLLRHDEFPAIHIPSPASREVLALLRYRHRLVRIRTMLRNGLQAVALSHRLRLGPKLFTTRGQQQFAALPLTGAFAVQRQHSLLLLASLAEQILAVEAELEHRAQGDPRVIRLRTHPGVGLLTSLALVHALDPVSRFDRARCIAAYCGLDPKERSSGDTQRFGHISKQGNRLLRFLLIEAAHNAIRGDDHLRRFYFHLQARKNSSVAIVAVARKLVLRLYRMLRDEIDYDQFRRRGRDARRARENASLAVPG

SEQ ID NO: 284126 - protein, 443 aa, unidentified
MEVTYPNCAGLDVHKKTVVACCLTAEDNKDHETRTFGTMSQDLLALSDWLSSKGITHVAMESTGEFWKPVYNLLEASFTVLVVNAQHIKNVPGRKTDVKDAEWIAQLLRHGLLRGSFIPPLPQRDLRDLTRQRTNLVREKAAVVNRLQKVLEWANLKLASVVTDVTGVSARKILAAIVEGQQDAQVLADLARGCLRRKQQQLEQALRGRVREHHRFLIANHLTHIDFLDEQIAVFDAKITEYIQASTPPTDPPASSTPLSELSPSTDNPSAITSNLSWEQAVALLDTIPGVGRQTAELLLAEIGADMSRFKSAAHLAKWARLCPGNYESAGKRYSGRTGQGNNWLRTGLVQAANAAVRCKKTYLSAVYRRLAARRGRNKAIVAVAHRILIAIYHILTKHQPFQDLGVSYLDERRQQHLLQRMSHRIQQLGYQVNLQPIPIPEP

SEQ ID NO: 284127 - protein, 304 aa, unidentified
MEHYVGLDVSVKETSICVVDGAGQVVREVKVASEPGAILGVLADEAFTLKRIGLEAGPLSQWLYGALAEADLPVICVETRHMKAALSAQVNKSDRNDARGITQMMRVGLYRPVPVKTLASQKRRMLLTSRQLLQAKAHDIESDLRGTLRNFGLKVDPVSRGKFEARIRELVVDCPGLAAITGPLLIAWRTLREQFAVLHRQLLAVVRDDAVCHRLMTVPGVGPVVALTFRATVDMPNRFANSKAVGAVFGLTPRQHQSGEVNRMGYVSKCGDAMMRAMLFEAAQVMLTRTTLHGSLLCLPAPGY

SEQ ID NO: 284128 - protein, 388 aa, unidentified
MYYVGIDIAKYKHVCFIFTSEGEIVLESFTFENTREGFSKLKLILDALNHSQKIKIGLEATGIYGKNLKLFLSSIGYDFDELNPLQVKRFTNALSNRKTKTDKIDASQIARFVSTGASRTYVYSSYHTEALKQLTRARNSLIDERSKHQTVLTGILDVEFPEFKGFFNNKFTDTALYLLNKYKTVKRISRLSHNDCVLLHNKSRVISTSRFEELRESAKNTCGHHFDYNDSLISANLQIIKCLNNEIDKIEKEINSIMSTINSPVVSIPGISAISAASIIGEFGDFSRFDNAKQLCAFCGVEPSIYQSGTSYHEGKMVKHGSSNLRRTLFNAVPYIIMHNETFKTFYNKKRSEGKAYRVAQSHVVKKLLRVIFTLEMTGSTFDPSKLY

SEQ ID NO: 284129 - protein, 324 aa, unidentified
MAEWIDTAIGEIERARVALAHRESVARFLGRFGGADLEVALEATTGWRFVVEELRRVGAGVHLAEPAQTSDLRGSKKRARSDRADASHLRELLMVSRVPESWIAPDHLLDLRARVRLRRTLSDQRGEWQQRIQGVLYHHGCPQRRALMTREGREWLGEQPLPAVAREQITVAVAMVDALDVQRAPIDRELRAYARRQPGCRALMAHYGIGELTAITILAELGDCRRFGSSRHAVRYSALDITVHQSDQRRAPGHLSRQGPPALRWALFEAAQTARRIGSPDRDYYTQAAERLGGNRACLSIARKLLKRSYHTLRELGEEALQPA

SEQ ID NO: 284130 - protein, 408 aa, unidentified
MKHVIALDISKGKSNLVIYDGYRQCEFEGELNHTRADFERLHEQMEEIARQDGVAPEIVFEATGVYSKPVEKFFIDYGYTYCRMNPLEANLQMATMRRNKTDVSDAHELAKTHFKSERESTYVQDDYYEQMRALTRYYDEIDEEVITLKSRMHALLHLSFPELEKLITPSSALFLNIVQLFPHPALLLAHSKTVIKNRLKANTRKKLSLARAEAKAEVLLEAAQNSYPAMKDNDIRCDQIRDYAARIMDLVEKKEAIIKQMVGMSAERNEYRIFRSIPGIGDTTACRLIGELGDIRRFENAKQLNAYAGIDIMRYQSGNTQYRDRINKRGNKKLRKILFFMICTMITLRKKTDNHLIDYYDKLKTQPQRKPHKVAIVACINKFLKMTFQLLKHDILYDYESALPAQKS

SEQ ID NO: 284131 - protein, 416 aa, unidentified
MALPRWVGRAIGLDVHREFCVVAICEDGRVRSAGRVPSTPEGIRSLAESLLPSDRVALEVTGSCWEVARMLEPYVNRVVVVSPDDTGIASARAKTDKLDARALALLLWRGELDAVWMPDGRCRILRRRLARREQLVRSRSRTKNEIQACLQRRLQAKPAFSDLFGVKGREWLAALELPVEERESVDAGMRHIEFLDAEIAAVDRLIAQQALSWPEIRRLMTVPGVNLICAASFIAAVGSANRFLTSRKLVAYLGLDPRVKQSGEEPARSGRISKRGSVNARWALVESAWSVVLQPGPLHAFYERTKGRRGHGRAIVATARKLAVLFWCMLTRGEDYAHQQPSLTRKKLRRLEITAGAAKNTRRAAGTWSTNQLMRVAERELAEQAEASYNRMVQDQRAGAPAKTAKVGASATPERA

SEQ ID NO: 284132 - protein, 406 aa, unidentified
MSKWVVVVGVDWGKYKHWVDEGVGKPYQVLQTPTDIFRWIAELRARYPEGRIGVAVEQHRGALIHALMEYDFIDLLPLNPAQTGAYRQAVRPSGGKDDPTDATMIRIFAEKHQDQLEVWQPHDARTRELAYLTEWRRKLVDQNTGLLQQVDDALMQYFPQARELAGEAGSPMWCAFLKEWPTLDAVLQARATTLQKFYRKHGSRSSKLIESRLALVASAVPVTRDAAVINSRAAIVEALVTLIATLVKEIGKLQGRIAGLWQSHPDRAIFESLPGAGECLAPRLAVVLGSDRDRWDAKSLQTFSGVAPIIIASGKSRTVAARFRCPKFLRQTFHEFALHSIGHSEWARRFYDHQRARGKSQHTALRALAFRWIRIIVACWKSATPYCEARYLASLAHRGSPSAKIA

SEQ ID NO: 284133 - protein, 405 aa, unidentified
MAIFVGIDWAEAHHDVCLLDPDGSVLATRRVPEGLDGVARLHALLGEHAERPDEVIVGIETDRGLLVTALVAAGYQVYAINPLAAARYRERHATSRAKSDRGDAKVLGDVVRTDRHNHRPVAPDSELLAAIKVLARAHQSLIWTRQRQLNALRSALREFYPGALAAFDELGHPDALAVLAAAPGPDRGRRLSTGQIAAALRRGGRQRNRERRAAEIHAALRAPQLAAPALVAEAQAASVAALVAVIRTLSTQIAALEASLTERFEQHPDAAILRSQPGLGSILGARVLAEFGDAPNRYLDARARRNYAGTAPITRASGTSRAVVARLARNKRLFDACYQWALCALTASPGARAYFDAHNPGPHTAKAARRKLANRLVGILHGCLTHQTRYEELLAWPQRIEGIAA

SEQ ID NO: 284134 - protein, 338 aa, unidentified
MYYTGIDLHKKTSYLTTIDENGKIIAKGNMHNVEEAILDYFAKLERETKIVIESMGSWYWLYDLLTGNGFDVVISNPSKTKAIASAKIKNDKVDSHMLAQLLRADLIPTVYVSSLETRKLKELLRHRARLIRDTTRMKNRIHMLLMKNNCHIRVSDLFGVQGLRYLKKISLPEHHQEQLETYLSFYEELMAKVLELTKRVYSIAKGHPMAKLLMTIPGIGPIIAMSIVAEVEDISRFRSYRNLASYAGLVPSLDASAGKQRTGRITKQGSPYLRTAMIEAAQVVARLKKCRLNVFFRKRIVRSGYQKAIVATAHKMLQIVFYVLKKQTPYIEEYPACA

SEQ ID NO: 284135 - protein, 312 aa, unidentified
MTPTFGGLDVSKDHLDLHVRPAGAAARFANDDAGIAALVARLAAAAPDRVVVEATGGYEAPAVAALAAAGLPVVVVNPRQARDFARATGRLAKTDALDAAALAAFAEAIRPPVRPLPDADARALAALVARRRQLVEMRTAEQNRLGLAAPGVARSIRDHIRWLDRQLDRAGRELAAAVEASPVWRAKDDLLQSAPGVGPVVSRTLLAEVPELGTVSGRRIAALVGVAPVADDSGRHRGARAIAGGRAGARSGLYMACLSAVRYNPALRAVYARLRAAGKPAKVALVAAMRKLLVILNAMLRDNRPWDPAIVA

SEQ ID NO: 284136 - protein, 343 aa, unidentified
MDYFAGLDVSVKDTSVCIVDGTGKIVREVKVGSEPQALLAVLRNATYCFKRIGLEAGPLSQWLYGALAEAGLPVICVETRHMRAVLKAQINKTDRNDARGMAQMMRVGLYRPVHVKTLRSQKLRMLLTHRKLVQSKAIALDNDLRGTLRNFGLKVGVVGTVKFEARVRELVENLPDVAELVEPLLIVRRVLREQLGILHRRLLAIVRDDDVCRRLMTIPGVGPVVALTYRATVDVPVRFRKSKSVGAVFGLTCAKYQSGEIDRTGAISRCGDEMVRTTLYEAAQILLVRSTKWSWLKAWAMQIARRRGMKRAIVALARRLAVIMHRIWVDGTEFRWTRKAAAA

SEQ ID NO: 284137 - protein, 372 aa, unidentified
MKEHSEVFVGLDVSKLKISVAVAEGGRGGEVRFYGDIDSSPAAVAALIKKLSKAGTTLNFCYEAGPTGYELHRQILAAGYECAVVAPSLIPKRAGDRVKTNRRDAMSLAKLHRAGELTPVWVPDRGHEAMRDLVRAREAAMEALRRARQQLQSFLLRHGRLYSGRKPWSKTHSRWVRELVFDHPAHHIVLTEYLQAIEEGEVRLDRLTQQVAETTSTWSMAPVVRAYQAMRGVSLITAVTFAVEIGDVRRFDNPRQLMAYLGLVPTEASTGERVRRGGITKAGNSRARRALIEGAWTYRFPARIGRPILERQKDLPRVVRQIAWKAQVRLCGRYRKLTAAGKLKVVTITAIAREMAAFLWAISQEVAPAMGV

SEQ ID NO: 284138 - protein, 391 aa, unidentified
MIYVGIDVAKDKHDCFIVNSDGTVLFKVFTIANNLDGFNNLYQKIESVMKDITKVKVGLEATGHYSYNLLGYLIDKGLTTFVINPLHTNLYRKSLSLRQTKTDKVDARTIASMLMSDVNLKSYSNISYHNEELKSLTRYRFNKVEERSKLKSSVSRLVCILFPELEKLVPKLHMASVYAMLSEFPGAKHVADAHLTGLTGLLSGSSMGRYGKEKAITFREAARISIGSNMPAKSLELKHTIKLIQELTTEIDEIEKEIKIIMDKINPSILSIPGINYRMGAMIIAEIGDFSRFDSPDKILAYSGFSPSTYQSGQLDGACSHMEKRGSRYLRYALYNAAKYVCHWDPTFAEYLAKKRAEGKHYNVAISHAVKKLVRVIYHLEKTKQRYVKAA

SEQ ID NO: 284139 - protein, 360 aa, unidentified
MDVHKDAIAVAYVAQDHGAEVMYFGTIGTRQCDLDQLIRKMQSKAKHLIFIYEAGPCGYWLYRYLTKKGYDCWVVAPSLIPKKPGDRVKTDRRDAVQLARLARSGDLTAVYVPKGEDEAIRDLTRAREDTISDLKDAKYRLQAFLLRHDIRYTGRATWGPAHLRWLSEVVCPTPAQQIVFQEYVRAVSEHSDRLQRLDQELREHVTAWRLSPVVEALQALRGVQFIAAVTLVAEMGDLTRFASPRELMKFMGLIPSEYSSGEQRRQGSITKAGNTHARRVLVEGAWAYRYPAKVSRHLQLRLENQPKVIQDISWKAQVRLCKRYRRLISRGKHANVVTVAIARELSGFLWAIAKEVPVIA

SEQ ID NO: 284140 - protein, 424 aa, unidentified
MDTSVNVLWAGVDWADEEHQVCVVDTAGKVIASFALAHQAEALAGLTSRLRALGQVAGVAIETPRHLVVHQLLADGFLVYPLNPSISHKWCEALSVAGATDDPSQAFALADGLRHHHERLRPLLPDDPATRELALRCQGEVALIAKHTALVNQLQATLKQFHPVALEWFEDWTCPSAWEFAVVFPTPAAVARAPEKKLYAFLARHRIGASPRWQERIEHRNDAARWPSDPAAEAALPQLVASLVALLRTLREQLAKHRRRIEALFAVHPDAALFDSLPGAGPKLAPRLLAHFGTQRGRYESARPLQQLAGVVPVTKQSGKSKEVHFRRACQKGFRNTMHQFAFCSLRKSEWARAAYHRARDRGQANAHALRTVAAQWLKIIYRMWVTNTPYNEALYLASLIRHRSPLIAWMQSERAGENSSKRT

SEQ ID NO: 284141 - protein, 372 aa, unidentified
MHQSSTLYVGMDVHKESIAVAYVAKDHDAEVISLGTFGTRQCDIDTLIRKLQSKAKHLVFVYEAGPCGYWLYRYLAKKDYVCWVVAPSFMPKKAGDRVKTDRRDAMPLARLMRSGDLTPVYVPAVDDEAIRDLSRAREDTLRDLKAATLRLKAFLLRHDIRYTGRANWSPAHLRWLSEVVCPTPAQQIVFQEDVQTVTEQSERLGRLELELHEQVKTWRLAPVVEALQALRGVQFTVAVTTVAELGDLTRFENPRQLMNYLGLTPSEYSSGGRRQQGGITKTGNTHARRALVEGAWAYRYPAKVSRHLQLRLEKLPTAIQAISWKAQVRLCKRYRQLMATGKHANQVVVAMARELRAFMWAIAKQVAGSPQA

SEQ ID NO: 284142 - protein, 326 aa, unidentified
MQGKEASKQETEGKSTVGIDVSKSWLDIHVLPGGETHRFANAELGIRQLKRWLQRFDLALVVVEATGKWHRQVRRSLHASGVPVAVVDPYRVRMFARATGTLAKTDRLDARVLALFARAMNPAQRPPAPEALDALNELVSARDAAVGEQTALKNQRHAVTDKFLIRHLAHRLTRIAKAIEAIAGEIAKRIAADPCLARRHDILISIPSFGPAVATTLVAALTELGTCNIKQISLLAGLAPIADDSGERQGVRVIWGGRSRVRRVLYLAALSATRCNADMKSFHDRLIAKGKKPKCALIAVARKLVVLANTLIAQDRTWATHAPKQA

SEQ ID NO: 284143 - protein, 348 aa, unidentified
MVMVGGLDLHRKQITFDVLDTETGQVHRGRISPADRRLFRGWLAEFAGQQVELAVEGCTGWRFVIEECQRAGVVAHLAEPAEVAGLRGRRRHAKTDRIDARHLRDLLLEGRLPQCWIPPQLVLETRAKVRLYKDLADQRVGWQQRMHATLYHLGAPAHRDLLAGDRDRLARIEGLSPAARQAITVALSMIESLEAQLEPLRAELTGFARRQPGCQALQAEYGIGALTAVVIWSEMGDARRFTHSRDAVRHAGLDITVYSSDTKRSAGRLSRQGSPLLRWALYEAARCSARAASPDHGYYRQVADRLGGQRAALSVARKLARRAHHRLRALGEHALAPPPTTPAPPTRS

SEQ ID NO: 284144 - protein, 314 aa, unidentified
MSQATFVGIDVSKKSLEVHVLPSGEHLSVNYDKAGLTALIKKLKPLKQLQVVLMEATGGYEKLLAAELCAAGLNKVCISNPRLIRDFARSTGQLAKTDTIDAAMIALFAQMFNLEPKPIPSQAEEQLKALVSRRQQLIKIRTAENNRLEKATTSRVISSLHKIIEILNRELQEIDQEIEKTIRLNPVWCAKEKILRKVKGVGPVTACQLLATLPELGQLNRREIASLAGLAPINRDSGQFRGKRMICGGRSAVRKALYMATLVATIYNPTIRKFYNRLLVTGKPKKLALTACMRKLLIILNSILKNDPISCIQS

SEQ ID NO: 284145 - protein, 357 aa, unidentified
MKIIGCDLHARQQTIAMVDTETGELIEKTLSHEGDAVREFYAGLGAPVVVGIEATGAMQWFLELLEELGIECRVGHPAKIRAAETRKQKHDRRDAHLLLDLLGMKDRFPEIWMPSTEQRDLRTLLRDRHQWVKIRARLQHTMQAIALNHALRRGPALWSAAGRNALQALPLPPYSGQRRTELLRLYVQLQKRILELDKEVEVQARQRPQARRLLTHPGVGAVTALATEVFLGDPKRFETGNQVASYIGMIPCEHSSGKRQRLGKLSKEGNSLLRYLWVEATMHAVGKDPELKRFYRRKLIQKGMGKARVAAARKLGIRLWIMLRDQIDYEEFCRRGTLRQKGKAHAGMPDYNSGPTL

SEQ ID NO: 284146 - protein, 422 aa, unidentified
MPYHIAGIDVHKKMLAVVVADVAVDADYQFEQLKIGTGPAQLRVLAEWLVAHDVAEVVMESTAQYWRPVWEALERYWQPRRTHDGAPAHLYLAQAQSNRGVGGRKKDFPDAERLVKRLVAQELTLRFVPDAEQRLWRTVRRRRYPLARNRVQLHNRLEALLEEAHLKLSSLVSDLLGTSARRMLQAVADGATAPADVAALADQRLRATPEQLADALDACTTLHPVYRRLLALTLEELRLLETHLGHLDQQMADLLAPHHEAVQRLAEVPGLGVESAQQIIAEVGVTAATFPSARQLASWAGVCPGHEESAGINYNPRCPKGNRQMRRVLNQAANAAARAKGTIFAVVYRRLVARLGHAQAIGAIAHRLCRLVWKILHERVRYEERGPAVDAQAARIRTRKMVRALRGLGYRVELPSPRPITE

SEQ ID NO: 284147 - protein, 356 aa, unidentified
MSQKLNSKVAVIGIDIGKNSFHIVGQDRRGALLLRQKWSRGQVEARLANLPPCLIGMEACTGAHHLSRKLQALGHDARLMPAKYVRPYCKGDKNDYRDAKAIAEAVQRPTMKFVATKTADQLDLQALHRVRERLVSQRTGIINQIRAFLLERGIAVRQGLRFLRAELPGILAKRTDVLSPRMLRIIEDLCGDWRRLDERIENLSGEIELLASQDKGCERLMTVPGIGPIISSAIVAAIGTGDAFSKGRDFGAWLGLVPKQMSTGDRTILGNISRRGNRYLRTLFVQAAWVVLVKVGPKHWERYGLKSWIEAAKERLHHNVLAIALANKLARIAWAVLHKGRAFEYVKTNATASRSA

SEQ ID NO: 284148 - protein, 409 aa, unidentified
MLYAGDDWAEDHHDVALVDESGRRLARARLGEGVAGIARFHELIAVHLAAGEGPEQVAIGIETDRGPWVTALVASGYQVYAVNPLSVSRYRERYSVSGAKSDAGDAWLLADLVRTDAARHRKVAGDSPAAEGIKVLARSHQRLIWERNRSVLRLRSLLREYFPAALDAFPKLAGPDTLELLARAPGPRSAARLSKAQITAALKRARRCHAADKAAAIQAALRAPQLSQPGELTAAYAAAVVALTKVIAAFNEQIAVMEQQVSESFRRHASAGIYLSQPGLGALLAARVLGEFGDDPHRYASAKGRKNYASTSPITRASGKKTMVLARYARNDRIADAVHWWAFCSLRASPGARSYYDELRGRGKSHSTALRQLGNRLVGILHGCLKTGTAYDEHTAWGHRYGNPQPAAA

SEQ ID NO: 284149 - protein, 408 aa, unidentified
MEVIHERCAGLDVHKETVVGCLRVRERGQVRREVRRWATTTAELLKLGDWLRQAGCTHVAMEATGVYWKPVWHMLEGEFELLLANPAHIRNVPGRKSDVNDATWIADLLAHGLIRASLVPPGPIQELRDLTRTRKQLMREIAQHKQRIQKVLEDANVKLASVVSDVFGESGRRMLKALSAGQTDPRQLAALRDGRLSASRETLAAALQGKVTAHHRFLLSQHLRMIDYLEQTIRDFEGQIEVVIAPFRAAVACLVTIPGISATAAHVIIAEIGVDMSRFATVAHLRSWAGLCPQLNESAGKIMSRRLRHGAPWLKTVLVQCAWAATRNKHNYLHAQFVRLRARRGPQKAIIAVAASILSIAYYLLRNQMPYRDLGALYFTRADQERTAQRLARRIKDLGYEVQIRKAA

SEQ ID NO: 284150 - protein, 364 aa, unidentified
MHRLNSAATLIQRTTTEAPRGHMYYIGLDVHKKTISYCVKDVSGRIQQEGKVGSIRRELDCWMKTLPQPWTVAMEATIFSGWIYDHLLPHATQIKVAHPLMLRAIAAAKKKNDQIDASKIADCLRCDFLPECHMMPAEIRHRRRTLRYRHLLVRQMVQMKNRVSGLLMETGVEYNKQRLHKVSYFRELLSENEEVDPSIRPLLKLSRETIERCQKTEYALVSSLQRDPVLADRIKRLRTVPGVGPITALTWALEIGDVSRFRTIKQVISYCGLCGDERSSADKAMRMPLSKQRNKHIQRTLVEAAKLAPRQSHELALIYDREKQKGNGNRATLAVARKMVAYLLAVDRQRRDFTPAEERRTAAA

SEQ ID NO: 284151 - protein, 343 aa, unidentified
MEYYVGLDVSLKQTSICVVDQTGSVVREGVVDSDPEAISVYVRSKAPGAVRIGLETGPTSTWLWTELKRFGLPVICIDARHAKAVLKMQINKNDRNDAIGIARIMQTGWFKEVHVKDIDSHSVRALLASRALLVKIKRDLENHVRGLLKNLGLVIGRATFNVFAARAEELIEGRPDLVAAVRPLLEARNAVEQQVSELDRKVMKLARRDAQVQRFMTVPGVGPITALAFKATIDDPARFARSRSVGAYVGLTSRRHASGEIDWSGRISKCGDAMLRSYLFEAAGVLLTRVPKWSTVKAWGMRLAKRNGLRKAKVAVARKLAVILHRMWIDGTEFNWSKKEIAA

SEQ ID NO: 284152 - protein, 356 aa, unidentified
MHAVIGIDPHKHVLSAMALDARGGRLGQWCGGTTRQAIRALQAWADQRAPGAVWAIEGSNFLGRRLALALVDAGADVRDVCPTRTSDRRRRRPNRGKSDAVDAEAIARELLAHPDLPHAFKTTAPGRPEPAREALAVVLRTRHQVVDHHRRLLNEADVLLGELPARLSERLPGGSKVEPRLMAAARLHLTGDRVTDLRLRLLRVHAQQARALARERDALEREISGLLKELGTSLPKLFGLGPLGSAELLVESGDPRRFRSADAFASYTGTAPIPASSAEARGQPVHHRLSRYGNRRLNSVLHIMAVTRLRTDPGTQAFIARTTERGKTSRDALRIVKRRLARLVWSTMIRDVETAS

SEQ ID NO: 284153 - protein, 349 aa, unidentified
MLIIGCDFHPGFQQVAIFDKQTGEIMQRRLAHPQEAIEFYRQLPAGVLVGLESTGYSGWLERLLETLGHQVWVGDATQIRASMTRKQKTDKRDAEHIVKLLVEGRFPRLWVPSAADRDARQLLVHRHKLVQWQTQVKNQLQFLAMNQGLQLKWRLWTRAGREKLEQLPLADYAAQRRASLLALLDQLEQQIASLDAVVLREAEARPEAVRLMTHPGVGPVVSLAFVVTLGPPERFPGARQVASYFGLIPRERSSGGRQRFGSISKQGNSFMRYLLVQGGHGAARLDPELRRFYGHCKHTHEHPGVAKVAVARKLAVRLYWMLRNRIDYAALLRRRRSHAGEPESCCGRS

SEQ ID NO: 284154 - protein, 408 aa, unidentified
MLLLVGDDWAEDHHDVELMDSSGRTLAKSRLPEGSSGIARLHALIAAQLGDDAGDDAEVRVGIETDRGPWVAALDAAGYVVYPVNPLQAARYRQRHAVSGAKSDAADAHSLADMVRTDAHQLRAMAGDSPDAEAVKVVARAHKTLIWERTRQTQRLRHALREYFPAALEAFDDLDAADTLELLGKAPGPTAAARLSRAQISAALRRARRRDIDTKTTRIRAALRTEQLGRPGVVTAAYAATTRAAVAVLGTLNEQITALEAQVDAHFRRHPDAEIVLSQPGLATVLGARVLAEFGDDPTRYATAKNRKNYAGTSPITRASGKRKLVAARYVHNDRLVDALMRQAQSALQTSPGARAYYDRQRARGLDHNPALRQLANRLVGILHGCLKTRTHYDETTAWSHHVDKPAA

SEQ ID NO: 284155 - protein, 377 aa, unidentified
MSKIRFVGLDVHAETIAVAVAESGEEVRWLGIIPNREDSIRRLVKKLGPAEQLRACYEAGPTGYVVYWQLTQLSVKCEVVAPTLVPVKAGDRVKTDRRDAEKLARSYRSGDLTPVWVPDAQHEALRDLVRAREAAKKDQLRARHRLSKFLLRHGKRRPAGMKAWTQRHMRWVKSDVRFEQQGQEVTLLDYVNEVDHGGARVERLERAIDEAVKSAPERMLAVIEALQALRGIAQISAVTILAELGRVSRFPAPRQLMGYSGIVASEHSSGERSRRGGITKTGNAHLRRVVIEAAWAYRHRPRVGQMLHKRQKKLSEEVKEIAWKAQHRLYARYRKLSARGKNKQQVITAIGRELLGFIWAIGMKVEAEIWEPKGCVV

SEQ ID NO: 284156 - protein, 343 aa, unidentified
MDKNTMIGVDLAKNIFQLHIATMTGVVLSKKKLSRDRFKEFMKSHEPALVVLEACGSAHYWAETLGDMGHDVKLIAPQYVKPFVKRQKNDAADAEAIVVAAQRPEMRFVAAKTKEQRAKAVVFRSRERLVHHRTEQVNALRAVLYEHGYVIPQGIASISRVENILGGQNCDMPDLVCDECRELLAQISSNTKLINAKTDLIKQLAKQTDMARQLQTIPGVGPMTAMAIEAFAPPMDLFRNGRDLSAWLGLVPRQYSSGGKERLGRVSKAGQADIRRLLIIGAMSRLTWLGKKSIPEGSWLAQMMARKPKMLVAIALANKMARIIWAMLTRGTDYRDPMKTATA

SEQ ID NO: 284157 - protein, 341 aa, unidentified
MGIVAVGVDLAKNVFALHGVDETGKVILRKPNVKRDQLLALFASLPPCLVGMEACGGAHEWARQLKALGHDARLMAPKLVAPYRDGGKRKKNDAVDAEAICEAVQRKKMRFVPIKSEEQQSRLAVHTAREGYVAQRTATINRIRGLLTEVGIVMPKKAATVRKLAHEHLEDLPGYLNQVVNDLIDELARLDQRVAQYDVLIREMARQDSRSQRLMQINGIGEITASAMVALVGNGHDFKNARQFAAWLGLVPRQYGSGGKVQLGRITKVGDPYLRKLLVMGARAVLNAAEGKTDRMSTWALQVKERRGYGKALVAIAAKNARIAWAMLSKGQDFREALKQA

SEQ ID NO: 284158 - protein, 416 aa, unidentified
MNAAGIDISSRKSTVAVLRPFGEVVEVPFDVQHNAEALTALAEQLKSIDGETRVVMEHTGRYYESVAKTLHEAGLFVSAVNPLLIKEYGNNSLRRVKTDKADAMKIARYALDNWVELRDYTPMDTIRYDLKTLNRQFQLASKQKTATANNLIALQEQSFPGIRKLFDSPVRSDGTQKWVDFTHDFYHVDCVRSGSQNTFTERYRKWCKRNHYNFNAGKAAEIYALAKSAVVLVQKTPLTKTLLQEAANQLTAISRSVETYRSEMNKLASQLPEYPVIMEMYGVGESLGPQLMAEIGDVRRFERKQSLVAFAGIDPMPNQSGEKNVRSNKSSKRGSPYLRKTLFNIMGIYLKCSPQDEPVYQFLDRKRAEGKPYYVYMTAAGNKFLRRYYATVMNYFATLENLPPVDMDSTGLQHTE

SEQ ID NO: 284159 - protein, 450 aa, unidentified
MPKKSSHRPLKKPMITQTVIHPDAAGIDLAAEVHYVAVPADRDPQPVRNFGPTTEQLNVLADWLQKCGIRTVAMEATGVYWIPLFELLEARGLEVCLVNAQHVRHVPGRKSDVQDCQWLQFLHSVGLLHASFRPALEVCAVRTLLRHRDSLVQGASAHLLRLQKALDQMNVLLHRAVTDITGTTGLAILDAIIAGERDSVKLAAHRDHRCKKSEAEIAAALRGDWKEDQLFTLRQSLAAWRFHHQLAEECLQEVHRLAAKLESCTEEAPPPPTKRGRQPDAAVRTLLFQKFGVDVTAVDGVNTHVGYTFLTEVGPDLSRFASPENFASWLGLCPNNKVSGNHQLSVSTRPVSNRLATALRMAAQSLNRVESSLGDWFRRMRAKLGPAGAVTAAAHKLARILYTMIKTGTAFDPTKLGNPALIRQRKERSLRKQAALLGFSLQPAKAGAVS

SEQ ID NO: 284160 - protein, 341 aa, unidentified
MNVSKEVVGVDIAKRVFQLHWVDQETGEIVSLQFKREKFLEHFANRTPCRVGMEACGGSQHWARKLVAMGHEVSLLPSKAVKPFVTGNKNDRQDARAIWTATQQPHVKRVAVKTEEQQAILALHRMRSGLVKFRTAQINALRGLLTEYGEVMPQGKAALRRGIAAALARLEDRLPAIVIDTLREQWARIDKLDEEIAAIEQRLKLWLKEDESCRRIAQIPGVGPLTATAAVAIMGEARAFKSGREFAAFAGLVPRQTGTGGRVKLLGISKRGDTYLRTLLIHGARSVLTHAKDPGPWMTELRRRRPLNVAVVALANKMARTIWAMLAHERPYQRGFVSQPA

SEQ ID NO: 284161 - protein, 432 aa, unidentified
MTLDPSLPKNAVLVAIDVSKRRNEVLIAFPDHARRKRLTVLNTRDEHDRFVGYVTSLSAPVVAAFEATGNYHRPIAWRLIEAGIDVRLVSSLALARTREALHNGWDKNDPKDAQVMLHMIQIGATQVFHDPIRAGINDIQELSKTHEMVSRAKTELWHRLLTHYLPLYFPEAERFSGSARTDAFLALLEAFPIPSAITAMTEAEFIAAAWQVAGRKVSKERYLSDVYRTAQSSIALPIELSSEAIAMFKMVLQEGRSLVQQRNAIERRAEAMLSGNTDYRRLKTIPGIGPINALIVLAEAGDLRRFRHHRQFLKFCGLDLATQQSGQFRGQTKIAKFGNARLRRAFWLAGQVAIRQRENGFRDKYERYVARDRDNPDLKRKALTAIAAKIARVTHAVVTSGEDYRPFFDRAMPSGRTSFWRAVEARQTRPRR

SEQ ID NO: 284162 - protein, 387 aa, unidentified
MAQVNDLSRSLTAFDLISTLVVVVEMSKASWLVSGAVPGVERQPLKKLEPDATALLRLIERWRSEAVRAGRPISRIALAYEAGRDGFWLARWLIARGIEAHVIHSASVAVSRERKRAKTDRLDAAMLMRVFLGWLRGERGHCGMVAIPTMEEEDARRPSRERESLINERSRITNRMKSALARLGVRGFKPHLRKAPERLAGLRTAEGTGLPANIIEEFRRDMARLALVREQINSIEKTRAERLKRAPDTGPHAMVRLLARVIGIGIETADMLVREILSRKLRDRRAVARYAGLTGSPDESGLKRREKGLPKAGNARVRRGLIQLAWRFLTFQKDSALARWYRTRTEGPSGARKTTMIVALARKLLIALWRLVTTGEVPDGVELRPAG

SEQ ID NO: 284163 - protein, 340 aa, unidentified
MPAGDIAGLLMRFAQLQEKAQARTGQVSPIIAIQEAGLDGFWIHRVLLSEGIESYVVDPASIATSRRRRRAKTDKIDGEALVRTLLAYKRGEPRVCAMVKAPTPEEEDQRRVSRERQTLTAERVRHVNRIKGLLFAQGIRDYEPLHRNRRQRLDALTTGDGRPLPLHLKTQIRRELDRLELLLEQIRTVEAERDALLERARAAEAAPAPALLLGLKGIGADIAGILWSEGLFRTFANRRQVAAYAGLAPTPWKSGSIDREQGVSKAGNPRLRTIMIQLAWLWLRHQPHSALSQWFKGRVRASGSRQRKTTIVALARKLLVALWKYVTSGVVIEGAVMKTA

SEQ ID NO: 284164 - protein, 339 aa, unidentified
MKLYTGLDLHSSNSYLGIIDETGKRVYKQKLPNDRERILTALNPYKIDIAGIVVESTYNWYWLVDLLMGESYHVHLANPAAIKKYTGLKFADDQHDAFWLAEMLRLGILPEGYIYPKEDRPIRDLLRKRMHLVRLRTSLIVSLQNILSRNNGFKLKTSDVKALTEDRVAPYLAGSEDLALAGLVSKESIDFLTRQIKKIETVIENKVELKPPYEKLQSVFGIGKILALTIMLETGPIRRFAKVGNYVSYCRKVSSKWLSNDKVKGKGNKKSGNKYLAWAYSEAAEHARRSYTQARAYYNRKMQKTNFMAAHNALAHKLARAAYYVMRDEVLFTPDKIFL

SEQ ID NO: 284165 - protein, 310 aa, unidentified
MEITVGIDVSKARLDVHVHPVGESFAVGNDEAGVAELAARLRRLEGLGCVGLEASGRYERLAVAELAAAGLPVVVLNPAQVRHYAQAMGQRAKTDPIDARVIALFVEAARPEPRPLPEAWTEELAALMTRRRQLTQMLVAERLRRQQAPKGIVRVSMARIVASLEEALREIDAEIDRSVRGTPVWRDKEDLLASVPGIGKTIARTLLAEMPELGTLSPRQAAALAGLAPYTRQSGKWRGRSTISGGRSQVRTALFMGALVAARFNPTLKAFRDRLVAAGKPKLVAIIATARKLLTILNAILRDAKPWTQT

SEQ ID NO: 284166 - protein, 343 aa, unidentified
MEHIAIDLGSRESQICVRNEKGEIVEERRYATSQLRSYLAKRAPGGRVLLESSAEAFKVADWARESGHQAQVVPASLVRVLGIGERGLKNDQRDARKLSEMDCRMDVPSVHIPSQLRRDHQTRVTARESLVQVRTKLVNTVRSFLRMLALPPVRATPNTLAKNLRLVLQKTSDGVPDYLEHLLCTIEHLNAQIALADEQLEKIADSDPICKRLQTMPGVGPVTSVCFAAAIDDVSRFDSAAKLTSYLGLTPGENTTGFKTRRTGMTKAGSGRARWTLNQAAWTLVRTRPEDPIVHWFNQVAGRRGKKVAITALSRKMAGILYAMWRHEQPYNPQKAAQQDLQA

SEQ ID NO: 284167 - protein, 315 aa, unidentified
MTPAPWFVGIDVSKAQLDIALRPEGRFVVPNDEPGLAHVVERLRALPVALIVLEATGGLELPLSGALVAAGLPVVVANPRQVRDFAKATGKLAKTDPLDAQILAHFADVIRPVPRPLPNEQMQALAALLARRRQLIEMLTAEKNRLGSAPHLVHKRLHAHITWLEREVTQAERALAHAIHESPIWREKDDLLRTVPGVGPGLARTLIVDLPELGTLSRKQIAALVGVAPLNRDSGTLRGKRTLWGGRAHVRAALYMAALVGARCNPVIRSFYQRLCDAGKAKKVALTACMRKLLTILNAMMKHRTCWGLNEVVCP

SEQ ID NO: 284168 - protein, 407 aa, unidentified
MDVLHPKCAGLDVHQQTVVACARTGAGKAVTYDVRTFGTTTAEVLALSDWLTAHGCTHVAMESSGVYWKPVWHVLEGHFELVLANARHIRNIPGRKSDVNDAPWIADLLAHGLIRGSFVPPEPIQELRDLTRTRKQLVREIAQHPLRIQKTLENANINLTAVLADVLGSSGRAILRALARGERDPARLAELASDRVKASRAELVAALHGRVPPHHRFMLTLHLTQIEALEAAVREVEARLGDALAPFRAALDRLITMPGVSETVARVIVAEIGFDMTRFPSAGHLVSWAGLCPRLHESAGKRLSNRTRSSNPWLTTTLVQAAWAAARKKDSYCRAQFLRIKSRRGPKKAVLAVAASMLTAAYYMLKHGVHYRDLGADHFDRRDKAKLAKRLIARLHDLGLTVEVRAA

SEQ ID NO: 284169 - protein, 349 aa, unidentified
MISYIGLDAHSATCTAVVVNEKGDILCRKTFPTTESQLVSFLEGIPGVKHLTFEECHLAQWLYVTLVEHVDQLLVCNPVYVAKKQGAKTDFRDALHLAQELRTGHLKPVHHEESRWIELRVLTNNYLALIEEIVRTKNRLKAVFRSEAIDTNSRGFYSDRARAKELSHDSAKFVAESLFDQIDRLEKTKGEYREFFQKNVKKYKPIRNLTSVPGIDLVRANIITAVVCTPHRFKNKHLFWGYCMLVRHIQMSGGRIYGNRRIHGRAELRDVFLGAAESALRTETSLRKYYEALRAKGVDHKDAKIALARKIAALCLCLLKNNDTFHDDFDVQQNRRTEARKSLNLDVTL

SEQ ID NO: 284170 - protein, 320 aa, unidentified
MAKQVEERTIGVDVAKCWLDIYVSEIGELERIENTEGAIEEWLRGLPGSARIAIEATNRYHELFIERAHAQGHCIYVIDAFRLSRYRDAVGHRAKTDRHDAELLARYLQQEHEHLRRWQPRDPRHARLWRLLKRRATLVQTNVRLRQSLADIGALDDAAKELIRHCQQLVRQVDRELLAPARRLGWQQDLQRSRGIPGLGPTTSLALVATFHRHNFRNADAFVAFIGLDVRVRDSGKFRGRRKLTKKGDPEIRRLLYNAAMSGCKDSHWQPYYQSLRDRGFSGTAALMALARKLVRVCYALLNNQLSFDPEKRKLPCNAT

SEQ ID NO: 284171 - protein, 344 aa, unidentified
MEQVTTIGLDLAKHVFQVHGADAAGHALFRKRLTRTKLIAFLAAQRPCIVAMEACAGAHYWAREIGKLGHGVRLIAPAYVKPFVKRQKNDAADAEAICEAAQRPSMRFVPAKTEEHQANGIVFRARDLLVRQRTQCINALRGHLLEYGHVFPQGIRHVASLVALVEDEQSSLPQGVRTILKLLVDTFTTLEGQIAQLDAEINQRSRTDPTARRLMTIPGVGPIISTAITALVPAAQSFAAGRDFAAWLGLTPVQRSTGGKQKLGAVSKRGERTIRRLLIVGASAVVRQASRRGAPKGSWLAKMLARKPRMLVTVALANKTARIVWALLVKGGVYKAPTVTASAG

SEQ ID NO: 284172 - protein, 356 aa, unidentified
MDTIYIGVDFHAREQTICYLKTATGELVICELKHQDKEKVRAFYAQFQGPVVIGLEASGYSPWFERLLEELGCEVWLGHATEIRCRARGRHKNDRRDAELILDLMLHDEFPRLYLPPLQSREVLRMLRYRQKLIKIRTIGKNSLQALALQAGLAKGPHLFTKAGLQEFRQAPMSPAMQWQREQWLQLLESLNQRLLETMLWLKQQSQADERISRLRTHPGVGLLTALCLVHSLEPVSRFRNSRKVTAYVGLDPLERSSAERQRFLGISKGGSRVLRFLLVEAAHTAIRKDAALKRFYQRLAERRGRPKAKVAVSRKLLIRTYIMLRDEIDYAEFQRRPSQLGLLAQPMGFNARHPD

SEQ ID NO: 284173 - protein, 389 aa, unidentified
MQIIADRPEAPSAIHTDLGAIFISLELSRSTWLITSLSPGGGGKMSKHSVPAGEISALLARFSEFRQKAFARTGKWFPIIVIQEAGLDGFWIHRVLQNEGFESHVVDPASIATSRRRRRAKTDRIDGEALLRALLAHKRGEPRVCAMVKAPTPEEEDRRRLCRERKVLTNERVLHVNRIKGLLFSQGVSRYEPLRRDRRQRLDELRTGDGGRPLPKHLKAQISREFDRLELLIEQIKAVEAERDALLAAQRVAAPAPAAMLLDIKGIGPEFAAILWSEGLFRHFDNRRQVASYAGLAPTPWQSGKVDREQGVSKAGNPRLRTTLIQLAWLWLRHQPQSALALWFKERVGRNGGRFKKTTIVALARKLLVALWKYVTAGVVIDGAVMKAA

SEQ ID NO: 284174 - protein, 362 aa, unidentified
MDCFAGLDVSIEETAICVVNEAGKVMMTASVPTDPAAIGAVLAPYIRQLRRVGHEAGALSPWLQPGLKDMGLPAVCLETRHVRAAMSAQRNKTDAADALGIAHIMRTGWFRTAHIKTEACYRLRLLLTQRRNLKRKFLDLENTIRHSLKAFGIKLGGIGRGRFDQAVRDAVANDPLSTALMDCMLRARAALWAEYVKLHRLVLQVVARDELCRRFLEIPGVGPVTALTFATAIDDPHRFRRSRDVAAYFGLTGRRWQSGTSIDVQGRISKAGDADVRRTLYEAATVLLTRYKRPDRLKEWGQKLSKAKSHPKACVAVARKLAVIMHAMWKDGTCYEGAPESVPADLVRKLAHHEPRAMSAVL

SEQ ID NO: 284175 - protein, 299 aa, unidentified
MEEISTVGLDIAKSSFQVHAINSAGEVVVRRKLRRRQVLPFFGRLSPCLIGMEACATSHHWARELAELGHEVRLMPPRYVKPYVKRNKNDAADAEAICEAVTRPTMRFVPVKTPEQQSVLMVHRSRELFIRQRTMLINAIRSHLAEYGIVAGVGRNGVEVLLNLIAKGQDHRLPPIARECLMALATQLELVRKQILEADRRVLAWHRSSALSRRLEAIPGVGPLIATALEASVPDPHAFRSGRDMSAWIGLVPKQNSTGGKERLGSISKAGNRYLRKLLVVGALSVIKRAKQQGYSRYP

SEQ ID NO: 284176 - protein, 349 aa, unidentified
MHSTTVAVDLAKNVFELAVADAEGKIEERLRLNRARFSSFFVHRAPCRVLMEACGSAHYWARRIGEHGHAVQLLPAQYVRQYVRRNKTDRADAAALIEAARCTAIHTVPAKSLEQQQVLVLHRLRSQWMSTRQRYLNTLRGVLREFGIAVPLGARVARARIAHYLAQPPQELPAATRPLLSQMLSEVKELEHRIEQIERDLTALTRADPVVQQLRQIPGIGLLSSTAIRASVGDVERFACGRSFASWLGLTPREYSSGERRRLGGISKRGDVYLRTLLVHGARSVLLAAHRQQRTGHPLDHLRLWALQCERQRGPNVATVALANRLARIVWATWKHGRAFDGNWGCTAQ

SEQ ID NO: 284177 - protein, 406 aa, unidentified
MNMNAVGIDVSKRKSTVAVLRPGGKVVVKPFDVPHLSADFQSLEKLIRELDGETRIVMECTGRYYEPVARELSQAGFFVSAVNPQIIRNFQGQDNPLRKVKTDKADSVKIARYTLDSWANLKQYSLMDELRSQLKTMNRQFDFYMKHKTAMKNNLIGLIDQTYPGANTYFDSPAREDGSQKWVDFIGTYWHVDCVRKMSLSAFTDHYQKWCSRRKYNFSKSKAEEIYRKAKELIPILPKDNFTKRIIKQAIDQLNIASQTVEQLRALMNETASRLPEYPVVMAMKGVGPSLGPQLMAEIGDVTRFTHKGAITAFAGVDPGVNDSGDYSQKSVHASKHGSPVLRKTLFQIMEVLIKTKPDDAVYRFMDKKRSEGKPYYVYMTAGANKFLRIYYGRVKEYLSSLPESE

SEQ ID NO: 284178 - protein, 369 aa, unidentified
MKQVTTIGLDLAKAVFQVHGVDGSGVVTLRRAVRRRQVLAFFAKLPPCLVGMEACATAHYWAREITKLGHDVRLIPPAYAKAYVRRNKNDPADAEAICEAVSRPSMRFVAIKTETQQAASGIHKVREMLIKQRTMLINTLRGLMAEFGIVVAEGPHHVGELVAILADPANQRIPSPLHEGLLAIVETLRGLQRRIEIVEKQIVGWGRDNQTCRHLITIPGYGPILSSAMAAFAVDPATFASGRHFSASLGLVPRQDGTGGKVKLGPISKRGNGYLRRLLVNGAMSVLCSKRAKEDPWLVKLLETKERKVAACALANKMARIGWAVMIRQEDFRSRRHDQSCPDPGPLGAVLTTVKTAARAPAAVAFGQS

SEQ ID NO: 284179 - protein, 536 aa, unidentified
MADKKRNTQRKHIRSEGAYSLDEIRSLTMDDGTRVITSADGDIKRPVCAGIDVHKEILMAAVCKTDPKTLNAVFYVRQFKSTNSDIRTMGAWFQSHGVQDVCMESTGKYWIPVFNILEQCGQRPVLTHPKYVKQAKGQKTDFRDAVHIASMFRMDLVVASFIPPADIRDLRELCRYRLKLTYMRTSEKNRFQNSMTVSKVRLDCVFSDPFGKSASSIMEYLIMTEPEDVSDKQILSMVDRRVKASGEDILDSIHGYEFIGIQRDKLKVINLHLGQINECIRLIDEKLDYFRQKYSRIIRHLATMVGVTEESALYILGEIGTDMSVWRDDASLASWAGLSPANNASAGKKKSTRTGDGGHYLKPLLVQCALAAAKSTKKDPYFHYKYETLKKRRGHKKAIIATARKMLVAIYHMIRDDADFLPVDHEEVLHSTKKQKGLNLDNVIAFLKEQGADDDTLRLVERQCGAQEMDAAEEMESVSSAEKKQSVSGSAATSQPIQESVNGSPVLISGSQKGHALNHHPKDSAVATATAQNELL

SEQ ID NO: 284180 - protein, 356 aa, unidentified
MNKISKLDFEGQQIYVGMDVHKKSWSISVLTDEFEHKTFTQPPEVSTLVNYLKRNFPGASYKSVYEAGYCGFWIHDCLQERGVQCLVVNPADVPTKDKERRKKTDRVDCRKLAKSLRSGEIEGIYVPCRPKVEDRTLIRTRHSMVKKQTRCKNQIKSILQFYGIQIPEELVDSHWSKRFITWIEAIRMERASGNFALKAYLEELNNMRKIIAELTRGIRSLANAEEYRQNVCLLKSVPGISILTAMTILTELYEISRFRNLDKLCSYVGLIPDTNSSGETDRDMGITKRRNAQLRGILIESAWVAVRKDPALLMTFNTLCKKMPKNNAIVRIARKLLSRIRYVLKNQQKYASAIVQ

SEQ ID NO: 284181 - protein, 349 aa, unidentified
MNRVMAGIDLHSNNLVVGLVDQDGQRLAHCKLECRLEPVLEFLKPYKERLDTVAVESTYNWYWLVDGLAVENYPVVLANPAKIDQYSGIKHADDKNDAFFLAELARLKILPTGYIYDARLRPVRDLLRRRLSLVHQRTSLLLSFKSLFTRTTGQLMELREVKALTVEQAAKLYEHPANQLIAEVQMQHIQGLSESIGRLEKAVLKVAQDLPSYPKLTTLPGVGLILGMTITMETGEIGRFAGPGNYASYCRAVDSQRLSNGKKKGDNNHKCGNTYLGWCYVEAAHFSCRTDERCRRWYDRKAARTNPVIATKALACKLSKAAWFLMAEQVNYDPKRVFPELAMKTKPSA

SEQ ID NO: 284182 - protein, 393 aa, unidentified
MQHQTHPRAIGIDVGKASIHLAAADPATPPPAWKAYEIPLQGDWPAELAHYAPPNSLVVLEPTGWNYSLPIARTLEHIGAHVLYTSNHAAEKIRSVHVSQHKTDPNDARALAVIARMHAQGEALRITRHYFTDTTELNADLRALFTLRARTQRQNTQALNRLDTALHAVWPALSQKKEHWLQRFAEAGSAPPLTRAELEAVYRHAEAQRAHGNTLRAMLALVNDVPGWITPPPATRQTISILLAELASHAATLETLESEIDTLTWAEPLRDITGLWWSVPYASTISIAALHIATNCRADEFTADQFRAAVGCHPLRQESGNYSSSRENKAGYRPAKSALHLWTMSLIRQGENPVARYFYEQKKAGKKAAIHSARGKLARVLSGIARSEEECNW

SEQ ID NO: 284183 - protein, 370 aa, unidentified
MKDATKYVGLDVSKEKIAVALADEGRGAPRYWGVVLNTPEAVRTLFKKLGDSSQLKVCYEAGPTGYWLYRLLVSMDIECVVVAPSLIPKRPGERVKTDRRDALRLAQLLRAGELTSVYVPTEEDEALRDLVRAREDAKEDQLRARHRLTKFLMRNNITSPENVRNWSAAHRKWLNRLEWSNAALRVVFQEYLHHLNEIEQRLQRIEQEMHHQALYSPKAPIIQGLQSLRGVAEITAIGLVAEVCSFTRFEGARSMMSYTGLVPSEYSSGERRRQGAITKAGNTHVRRLLVEAAWSYRYQPALKGNLLKRQEGLPPQVQAMAWKAQHRLHGKYSKLMAKGKPPGKVVSAVARELAGFVWAIANELEKETVS

SEQ ID NO: 284184 - protein, 413 aa, unidentified
MEVWLGGISCLISEGGARMYSLLVGIDVSKDFFATAGINFEGKESFSKSHSMDSQGFGELLKTIASHCEDLSRVMVAMESTGCYHINLFSFLTCQGVRTMVVNPLLIANFAKLSLRKTKTDKKDAMTIARFLMDHHEEVSHLSLSQDHQDLRDLSRERESLCHLMAATKVEIKRVLRATFPELESIGNLYTGAMLRFLGQYPSARLVRGAKPRAIAKALKGPYVGDKLTFCAEDILRAAKTSIGTLSPAKEIILQGKIATLLHLQERLDEMTKLLTDLCKATRVDDLKILRSIKGVGPKTAAPFLAEMGEVQHYASHKKLIAFTGIDPSLHESGNYIGMSKLSKRGNRHLRRAVYLMTVAVASKNPFFKAYFLRRKREGLPPQKALFATAHKLLRVIFAMLSNRTYFKVKEAI

SEQ ID NO: 284185 - protein, 343 aa, unidentified
MSEISMIGLDLAKNVFQVHGVDGSGKVVLQKQLRRGAVEKFFAKLSPCTVGMEACGSAHHWARVIGRYGHDVKLMPPAYVKPYVKRNKNDGRDAEAICEAVSRPTMRFVAVKSVEQQAMLSVHATRALLVKQRTMIANALRAQLSELGIVAAQGHKGLHELMARLQASSQEIPEMMRGALLVLAGQWQSLDANERALEKQIVKAARCDREACRLMEAPSVGPIIASMVLAKVSDASVFRSSRDFAAWVGLTGRDHGTGGKHRPGRISKQGDRILRTLLINGASAHLRQQMRRGVSDPWLRELLARRPYKVVMVAFAAKTARIIWAMLAKGEAYRDRASASAAA

SEQ ID NO: 284186 - protein, 383 aa, unidentified
MKSVCGLDVHKDSVYLCFLSEFGELIEKVFGVLTYQLEEMRDLMLHHHVVEVSMESTSVYWIPIWRVLSPHFKLNLANPYFIKQLPDRKSDVKDAQWIAECTMKELIRGSFVPPETIQQLRQYDRRIFDLNEEIVRKLSKLDAVLQRCNIRLSNYVSNVDSKSYKAVVRAISQGITDHEELVKLIHGRIINHHGIDVITASLKGVVSLAEIDMISQLRDELDMAEAHKEKCQARMLEICEREFPEELRRLQTIPGIKERAATSLIAEIGTDMNKFETANHLASWSGLKPRNDESNKKIKSRSITHGNVYLRKTIIECAWAASRTKDCFFSRFSYHQTQVRKKNKMKVLVAVARKMLVAIWHVLHDNTNYIDFTTDRKTSRTRG

SEQ ID NO: 284187 - protein, 347 aa, unidentified
MTYYAGIDVSLESLSVCVVDATGKIVREAKVASEPEELIGWFGALGLALERIGLEAGPLSQWLYAAMRQTGLAVELLETRHVRDAFKAMPVKSDRNDARGIAQLMRLGWFRPVHCKSIVAQEVRALLTARKLVQSKLFDVEMSLRGILRGFGLKVGPTTPSRFAGRIRELVTGQATLEVIAAALLAVHEALRREFDGFERRVRSMARADGRVRRLMSAPGVGAIVALTYVSAIDDPARFRSSKDVGAHFGLTPKKYQSGEKDVTGGITKIGDTSVRTALYEAAHIILTRPIKGGGLKSWAMKLAKRTGMKKAKVALARKLAVVLHRMWVDAKYFAMDKALSPTCAAA

SEQ ID NO: 284188 - protein, 342 aa, unidentified
MIYVGVDLHLRFCSMTVLDASGATRQQKRVLNDDASLHSFFTGLQDSFREETILVAVEACGFWCAFVDSIEPLVERVVLVHPAKVKAIASAKLKNDRVDSQTLAQLLRADLLPEAWQADVATRDLRELLRLRIALAEDRTRYKNQIHAVLHLHGERPQVTDLFGRAGRAWLETRPLRPAARQAIHTSLRMVDQLDQEVHTLDQQLRLLAKEDPAARCLMSIPGIGAFTAMVLKAEIGDIHRFPDKKSLFNYAGLVPVIRQSAGHQYRGSITRAGSRQLRWVMSEAAMTAARYSPAARAWFLRLAQRKHPHLARTALARKLLGTVWALWTHGVCFDERIFAAM

SEQ ID NO: 284189 - protein, 340 aa, unidentified
MKITTIGIDLAKSVFQIHGVDGNGKPQLKKQIKRSEMATFFSNMPPCLIGMEACGGAHYWARKLVDQGHTVKLMAPQFVKPYVKTNKNDAADAEAICEAVARPTMRFVPIKNVHQQAVLAMHRARQGMVKSRTAQANQIRGLFAEFGLVMPQGIANLYKQVPALLEEAKDELPGMFRELVLRLLTHLKELDRQVGEMEVEIQAWHRSNALSRKLEKIPGIGPLTASALVASIGDAKSFENGRQLAAWLGLVPKQHSSGGKQTLLGISKRGDCYLRTLLIHGARAVIYAAQRKLASTGWLASLLARRDKNVVAVALANKNARIVWALLAHDREFRSDYARA

SEQ ID NO: 284190 - protein, 375 aa, unidentified
MGDYSEAFVGFDTSKLRNAVAIADAGRSGEVRFVGEIENTAAATAKLVRKLSAKYQRLTFCYEAGPTGYGLHRQIKDLGFECVVVAPSLIPKRPGDKVKTNRRDAHSLAKLLRADELTPVWVPDGGHEAMRDLTRARETAMLDLRTKRQHVSAFLLRLGRPYPESRKTWTKAHVSWISSQNIEHPQQRLVLEEMMLAIRQAQERLARLEQAIAAAVPEWSLAPVVTALMAMRGIDLISATTLLAEIGDLSRFRTPTELMAYLGLVPSESSTGDTIKRGPITKAGNRRARRMLVECSWSYQHPPRVGQAKQPKVDAAPPAVREIAWKAQCRLYRRYRTLIRKGKLKTVAIVAIARELAGFIWAVARAVTTAPVVAV

SEQ ID NO: 284191 - protein, 346 aa, unidentified
MEHYAGIDVSLELSSVCVVDAQGKIVKEAKVASEPEAVVAFFEALGFAVKRIGLEAGPLSHWLHAGLKEAGFETVLLETRHVKAALSAMTVKTDRKDARGLAQLLRMGWFQPVHAKSMASQEVRALLVGRKQLLGRLIDVELSIRGILRGFGLKVGAVTRKGFEARIRELVTGQATLERIAEAMLSARAALKAEYEKLHKAVLAIVREDPVCRRLMTVPSVGPLVAITYKSAMDDPSRIAKSKAAGALFGLTPKKYQSGEKDVTGGITRTGDEMVRTALYEAANVLLSRITRFSKLKRWGMDVAKRRGSKRAKVALARKIAVILHRIWIDGTTYRWAEAKPIAAQG

SEQ ID NO: 284192 - protein, 385 aa, unidentified
MAPPTRPRIVIGLDVGKSAHWACVVTREGELLASGPIPNREDAIDGLYAQYPGALVVVDQVRNIGSLALSRAKLAGMPRAYLPGLAAHGASKLFAGDAKTDERDAMVIAKTALGIPDALLAVADRPPEIEAARSLAAQRDFLTCENTRSKNRLRSILLESCPEFEAQADLSDPATLKLMAAVGGPWSISEASPQAVGALTRGCRRAKVAALVESVESSSRPHPAAVACEDRAVRLLARRISENAAEIESLTSEISALLAADETYRCLLTVPGIGPRTASELVISIDIADFAGHDRLASYCGLAPRNRRSGTSISSVSASRQGNKRLKNLLIFSCNCLARSRNRWGEYYARCRDRGMPHGKALKAVARKRLKVIYAIMRDKVPYAA

SEQ ID NO: 284193 - protein, 387 aa, unidentified
MIYVGIDIAKETHVAAAVDQNGVTIISPFSFANNHEGFKLFKSKLDPLDKTDLLVGLESTAHYAENVIFFLYSHGFEFTVINPVQTAAMRKTGIRKTKTDKVDAMLICKTLMVNSFRRYTENDIITLKLKSLCRFRQNLKKSKARLKIQLTSYVDVIFPELQFFFKSGLHIKTCYELLKVCSSPDDIAALHLTKLSNILSKASRGRFGKRNAESLKSLAKSSVGVKNTYISIQITQTIAQIELIESQLTELETVIESAVDELDSVIMTVPGIGKLNGAMILGEIGDIKRFSNSSKLLAYAGLDPVINQSGKFNAKRTRMSKRGSKLLRYALINAAWNVSLNNDTFKRYYDSKIAQGHSHYSALGHTAHKLVRVIFKLLNDNIHFALA

SEQ ID NO: 284194 - protein, 349 aa, unidentified
MTMLAELVDIVIGVDTHKNTHTAAVVIAATGAASEDVTVDTDPDGYAALVAMADRHSALRAWSIEGTGGYGAGLTRYLTDRGELVIELDRPNRPARRNGAKSDSLDAIRAGREALAREHLAQPRAAGARAALSVLLAARRSAVEAATVAQRQLHSLVIAAPEHLRDRFRSKSTTVMITTAARLRVNASRDLETRTYATVLHDLGRRIRAMQLEAHTHEKAIVAVIKSWRPDLLETQGVGPIVAATVLSAWSHAGRCRHEAAFANLAGAAPIPASSGLTTRHRLNRCGDRQLNRALHVIALSRLRYDPTTRAYAERRRAEGKTDREIKRCLKRYIARQLFRQLENPPPTP

SEQ ID NO: 284195 - protein, 440 aa, unidentified
MAGQRDDNIKSSRAAMNNSPEQQGDSWLEKRGFGGLDWASQKHYVVVVDPKGKVLEDFELEHSSLGWKKFREVMQPYGRIPFAIETSQGFVVEQLLEAGMEVYPLNPQSAQAYRQRKAPSGVKDDRLDGWSFADALRVDGQNWKPLRPESALIKELRLLCRDEVGLIEERTALVNKLRHALAEYYPIALEAFEDWICLSAWMFLQRFPTPQVLEKAGKRQWEKFLHSRHLWRNESGPRRMELFAKATEFCGSQGTTNAKSMLALGLVKRLFVLEAQLSDYRKRIEELFHSHPDHDLFGSLPGAGPKIAPRLLSEIGDDRDRFQGDVQNLQCLAGTGPVTKRSGKHWECHQRWACSKPLRHVLHLFSEHTITQCAWAEIYYRTHRAKDQSHAGALRCLAHRWLKIIYKMWLERTPYDPELHHRNQVKHGSWVFELKTVNCK

SEQ ID NO: 284196 - protein, 330 aa, unidentified
MEHCAIDLGGRESQVCVRRADGHLLFEGRWQTALLPDYLRQLPPSRVILETAAEAFRIADAAKEAGHEVRVVPATLVRSLGVGARKTKTDKRDARVLSEASCRIDLPSVHIPSARSREWKTICGMHDALITARTKLINNLRGWLRGRGLRIGPGKAETFADRMLKFEPLPDYVRSQVEALAALTEKIRGSDKRIDALAKDELCQRLMTVPGVGPSSAVRFAAIDEITRFESAHKLESYLGLVPGESSSSERQQRLSITKAGPSSVRWVLDQAAWSLQVRCRDPAARPLQLWAADIGRRRGARIATIALARKLAGILYSLWRDGTTYEQRP

SEQ ID NO: 284197 - protein, 370 aa, unidentified
MEKRSMFVGLDVHKESIDISLAEDGRDGEVRHYGVIAGDLEAVAKVVRALRAPHRRLRFVYEAGPCGFGIHRHLTTQGEECVVVNPSSMPKRSGDRIKTDRRDGEALARLHRAGELTPIYIPTADDEALRDLVRAREDAVGVSTQAKHRLKAFLLRQGRRYPGRAGWTQPYRRWIADLSFPLAPQHIALQEYRDTIDETERRVERLTDQLRQLTPTWRWAPVVDALQALRGVSFVTAVGLVAEIGDIRRFTHPRQLMAYLGLVPSEHSSGPSVRRGGITKAGDPHARHLLAEAAWAYQGVPRIGRAMLYRQEALPKAICDIAWKAQLRLTSRFRQLVARGKPKPKVATAVARELTGFIWAIAREVPPPAA

SEQ ID NO: 284198 - protein, 368 aa, unidentified
MLKQSHYKVGCDAHKHYSLFAVLDHRGKPVEQTRVNHEPGAIRAFVSRFPPGTPVALETVGNWYWIVDEIEQAGCVPLLAHAQMAKKMMGHVHKTDKLDAQGLAILQHLGSLPTVWIAPREIRDERELPRTRMALSKMRTALKNRMHSTLAKYALSLDTQSDIYAPKWRPQLMQLICSLPDETRRCMEQELELLDQVQEQIHRLEARILERVQMTPTIQLIQSVPGPAKILSIVIDREVGSIDRFPSPHHFASYSGLVPKVMASGGKTHYGKMIKAANNYLKWAFIEAANVIVRQQHHPSWRQKYVVALFERTRQRKGHAVAVGAVARYLAEATYWVLKKGEPYREPVPQHPVGRKSAASLKQGQVRA

SEQ ID NO: 284199 - protein, 328 aa, unidentified
MFLGIDVSKSTLDAALLKEGTRVRHQVFSNDAAGHAALIAWLGELGELGEHASRPVHACLEATGTWAQAAALALPQAGHIVSLVNPARTHAFGKSQLKRTKTDKADAILIAEFCRMHNPPVWAPQSSQVQQLQGLVRRLEHLEEMQKMEENRLSSGGLSSQVEASLQEHISYLAQQIEKTRRQIKDHIDGNPDLKEQAYLLESIPGIGATTAALLLAELGDISHFSNARQVAAFAGLVPRIRESGTSVRGRSRLSKVGSSRLRKSLYFPAITALRFNPLIKAFGLRLSVQGKSKMLIIGAAMRKLLHLAYGVLKSKQPFDPAFCHQNA

SEQ ID NO: 284200 - protein, 334 aa, unidentified
MEKIPVFVGLDYHKDSVQVCVLDGGGKVLGNRTCDNDPRRVAEYVATHGGVRGAAMESCEGAADFAEGLIAAADWSVDLAHPGYVHRLRQNPDKTDYSDARLLADLERVGYVPKVWLAPQAIRELRRMVRYRRQLVNERRNVKLRVRALLRAHRRGCAAPRWGVAWFQWMRAVELPEQSRWILDRHLDRLQQLNGDVQVVERRLDVVTKDDAVVQKLMTLPGVGSVTAWVLRAEVGRFDRFRSGKQLARFCGLTPWNASSGSRQADAGLIRACNHDLRSVLIEAGHRLKRCDPRWSALANQLRQAGKPGSVIAAAVANRWMRWLYYQMTAAQAA

SEQ ID NO: 284201 - protein, 413 aa, unidentified
MATTSPPLRFVALDIHRKYLVVGAVDPHQQVVLTPRRFGFEAFSAWATTHLSPSDAVVLEATSNAWLLYDQLEPLVGSVTVAHPLAVKLIAAARVKTDSRDTIKLAHLLAANLVPAVWVPPLHVRELRALVSHRKRLVNQRTQVRNRLHAVLHRHNLTVPPGKPFAAHQQEWWLALDLSSSEKLRVQQDLSLLHSLEELIGAVEAELGRLSTCDPWVKQVPFLVQLPGLGVLSVMSILAAIGDITRFPSAKKLVGYAGLGASVHDSGETHQGGHITKEGRRDLRGVMVEAAWVAVEHHPHWQAQFERLSRRIGKQKAIVAIARKLLVAVWHVLTEQEADTNAQAQAVARKLMNWITHHGVIPGQHRDRLLLLYQHLDELGLSEELEEIDYYGTTYRLSVRQKLLREAQKSKRS

SEQ ID NO: 284202 - protein, 416 aa, unidentified
MDTMYERCCGLDIHKKTIEACFRSGKKKAHMSFGTTSAELRKLTMWLVENGCQSVAMESTGSYWKPIFNILELSGTDMEIIVVNARHMKNVPGRKTDVNDAEWIAELLQHGLLRPSFIPDREQRELRELSRYRKSLVGERAREINRLQKMLEGGNIKLTSVVSEVTGYSSRRLLDRLLRSDEPMTEEVISELVHTSLVGKSKELEIALDGLLSELQKELLIKVLDHIDDMSRRIADLDDFCRKQMKKYEDALDKLDEIPGIARRTAETILIETGLDMSRFPTAKHFARWAGLAPGNNESAGKRSSGRTTKGNPTLKSTLIQSAKVAARKKDSFFKARYQKIAARRGANRASVAVAHSMLIAIYHILKSGERFKDLGEDYYNQFNKEKKKKYYLKKLTKLGVNLKEATLSISIQAAT

SEQ ID NO: 284203 - protein, 415 aa, unidentified
MNYLGIDVSKSSHRIAILDGEGESLTKSFSVESSQEGFNSLLEKIKSLSLSPDILLCGLEATGNLWENIYSLLTAAGFKVIVLNPYQTNKYHQLLAKKAKTDDIDALVIAGLLRSKEHINSYVPDDLIQSLREHVKLRDKLLKDLKDYKRQTYSLLELVFPEYLKAVKNPFGIASSTILKHFPTATHFAQAKLKDLLNIVRHIQGNTYPEDFLSELIELAKKSIYSGKASKSRGLNVKILITQIEQTQNSIAELDAAIEQLLKPEDPESSLPDTPLSIPGVGKKTLAVYLAMVGDTLRFPSTKQLIGFIGLYPEIKQSGESQNSPHLTHRGCPILKHALYMAAVASLIHNPYLKSIYDKKISQGKKPKQALIVVARKIACMIHSMIKNNTEFEPERFFVSKTKYKNDSLCYLTAL

SEQ ID NO: 284204 - protein, 318 aa, unidentified
MSDSVFIGIDVSSQTLEVASSAQAKTWQASNDAHGIESLCSQLTALGPALVVLEATGGYEFEAACALQAAGLPTAVVNPRMARDFARAMGALAKTDALDAHMLAAFARVLHQHPQRERFVKPLADAQLQQLQALVLRRRQIVQMLTGERQRLRISHAAARPSIERVIEFLKQELGDSDTEVAAHVQHHHAQLAQALTSVPGIGAASVAVLLAELPELGKLDRRRVAALVGVAPLNRDSGQMRGQRSIWGGRAQVRRTLYMATLTAVRYNPVLKPYYEHLLAAGKRKKVALVACMRKLLTMLNAIAKHGCTWNPNHHCA

SEQ ID NO: 284205 - protein, 450 aa, unidentified
MQKQLGGLPVVRPDVAGIDLGSERHWVCAPAINGEGREVNDFGATTAELIRMAQWLKERGVQSVAMESTGVYWIAPHEILEARGFEVLLADTRQLSRVPGRNRKSDPSDCEWLQRLHSCGLVKGSFRPPEQVCMLRTLIRDKGNLVAERSDWIRRLQKGLDQMNVRLHRAVSDVDGATGMAILRAIAAGERDPRQLARLRDRGCRKSEEEIAEQLTGHWREDHLFSLRQSLQMYDAIEQRIADYDGEILRLLNSMTPEQRRQQSAPALKNQPKMRSLRKRGQEPARQALYRMSGVDMTQIDAVGVETVQIVLSEYGPDLSRFPTEKQFISHATLAPRVPKSGNKPIRKKKRTSASTRVAAALRMAALSVRHSQTALGAYYRGIARRIGADVAVFATARKLASLIYRLLRWGQPYVDEGAEAFERRYQDRRILGLASRARELGYALTPATA

SEQ ID NO: 284206 - protein, 353 aa, unidentified
MRTYYVGMDVHQASIVIVVLNGAGKVVMESIIETGAETVRGFLKQLRGKVYVTFEEGTQASWLYDVLRPVVTEVVVCDPRHNKLLKSGNKSDRVDARKLAELLRNGSLQAIYHGHQGVQTLKELVRNYDCLVGDTTRVMLRLKAIFRGRAIACAGHDVYRSERRAQWLAKLSEPGVKQRASCLYEQLTALQRLRHEAKRLMLKEARRQPAYQLLLSIPLLGPISVAQLIAVVGTPFRFRSKRQFWAYVGLAVVTRTSAEYVLVNGLVRRSSRPVATRGLNRNHNHLLKRVFKSAATSACARGPFKPGFDARVAQGMDASLARLTIARQLAAITLVVWKRGQQFAPERMKQQVA

SEQ ID NO: 284207 - protein, 319 aa, unidentified
MYVGIDVAKMELVVAVHPAGERWSVTNDEHGIGALVKRIKHDALNAPKLIVLEATGGYELACVAALAVAALPVVVVNPRQVRNFARATGQLAKTDRIDADILALFGERVQPEVRELPTEEAQELNALLTRRRQLLEMLIAEKNRFDHVLGLGRKAVKQGIKTHIAFLERQLRMMDSDLGRMIRESPVWRERDDLLQSVPGVGRVLSVTLLAELPELGRLSRREIAKLVGVAPLSRDSGTLRGRRCVYGGRASVRGALYMSTLVATKYNPVIRTFYLRLVEAGKPKKLALVACMRKLLTILNTMVRMHEPWRVDCSLATA

SEQ ID NO: 284208 - protein, 389 aa, unidentified
MKIFVGIDIAKLNHFAAAISSDGEILIEPFKFTNDADGFQLLVSKLESFDKNSIIIGLESTAHYGDNLVRYLVAEFYQVCVLNPIKTCQMRKNNVRKTKTDKVDTFVIAKTLMMQDDLRFITFFDLDMMDLKALGRFRQKTIKQRTRLKIQLTTYVDQVFPEIQYFFKSGLHQNAVYALLKEAPSPKEIASMHMTHLANLLKVNSHGHFTKEQAKELRILAQKSVGANDSAISIQITQTIQQIELLDSQLDKIEAEMTDIIKFNDSVIMTIPGIGYINGGMILGEIGDIHRFSNPNKLLAFAGLDPSVYQSGNFQAKTTRMSKRGSRVLRYALVNAAWNVVRNNATFKAYYDAKRAEGRSHYNALGHCAGKLVRVIWKMLTDEVEFNLE

SEQ ID NO: 284209 - protein, 414 aa, unidentified
MNTLVSNTSLSGTLIALDIAKKHHDAKIRHPDGRTSFLRIENTLEGFNRLLALTASPHDDIIAAFEPTADYHRNIAWWLHKQGVKCHLVSSVRCARAREMLFKTWDKNDRKDASVIMYLLEQGLSSPFYDPLANGIIDIQEISNTYHQVTLARTRCLNSLVNHYLTLYFPEAEQFLHMSRAEWFCQFLLHFPTPSCITSLNRDVFVKQSWDVVGRKQYKQQFLEHLYDVAADSIALPLSEDSLAVTTFRLQLHRYVGLSAQRLQLEKQAENYLQERSDYRHLRTIPGIGAIIALMIIAESGDLTRFAHYRQYLNFCGFNLSASQSGQKHSDYRLSKRGNARLRYAFWLAATVAVRTRENSFRYKYERYIRENGDKPDQKRKAMTAVATKVARVAHAIVKQDIDYKGYYEISHGT

SEQ ID NO: 284210 - protein, 351 aa, unidentified
MKKILKQVCGIDVAQIELVVTLGRLFDDLTPELYSHKTFPNTKKGFLALLQWVRKLTSDQSVVRFVMEATGVYHESLAYFLDSEGCEVSIILPNKISNYMRTLDVKTITDKTASDAIVRFGLERSLQRWQRPNPVFKRLRQLTREREQVIQIRSMTKNQLHAEEAEAEPNEGSLVRIKKHIGFLNKQVKELNAEIKTLSMQDEKVKGSMKVMCSITGIGLITAATALGETNGFDLIRNKRQITSYAGYDVVEKQSGTSVKGKAKISKKGNKYLRKAMHMPALSAIGHDERFKAIYARLISKHGIKMKAAVAVQRKLLEMIYTVYKTNTPYDKNYLQPKNNTNQPEESRAVI

SEQ ID NO: 284211 - protein, 371 aa, unidentified
MESIVYVGIDVHKDTYSICCYKSREDRFYYEKKLVAESKRVIKYLESVEKEFGEDTLFVCGYEAGPTGFGLYRDLQKAGYSCVVMAPTSLKHSANQKIKNDRVDAKFLAKTLFTKDYSSVNVTTEHEEAIKEYCRMRLSLKAELKKAKLVMQSFLLRLGKVYTEGKTWTVRHREWLQKVHFEEEYLNEAFNEYMISINTYENRIKSIENRLTEIAQDKCIKEKVEKLVCFCGIETVSAVSIVSKVGDFNRFEKAYHFSNYVGLTCGEESSGKKEQRLGITKTGDKELRRLLTESAKSIKQTNSQGRKSKRLRDRQKDKDPLVVAYADKCRQRLKNKITHLELRGKSPNVATTAAARELACFIWGMMTNHIA

SEQ ID NO: 284212 - protein, 389 aa, unidentified
MIYVGIDVAKDKHDCCILGSEADKLYPVFTIPNNKAGFDELYEKIFSLTDDKAKIKVGLEATGHYSLNLLGSLIDKGLHTCVINPLHTNLYRKGLSLRKTKTDKVDACSIAMMLMTDKTLKPYSDTSYHSEELKSLTRYRFDKVQERAKLKSSVARLVNILFPELEKLVPSLHMASVYALLSKLPGAFYITECHLTHLKNLLETASKGHYGRDMAITLRNTARDSIGSVIPAKSMELKHTIHLIEVMTEEIDEIEGSIKSIMDTCNSPIMTIPGISYRMGAMILAEIGDFTRFNYADQILAFAGLSPSTYQSGQLDSSYSHMEKRGSRYLRYALFNAAKFVCKWDENFGAYLSKKIGEGKHYNVAIGHATKKLVRTIYRMELTGEAYRR

SEQ ID NO: 284213 - protein, 360 aa, unidentified
MTSTKYIGMDVHKESISIAVMNSAGKIVMECVIETKASTILQFIDGLHGDLRVTFEEGTWAAWLFDLLKPHVTEVVVCNPRKNALLKDGSKSDRIDARKLAEQLYMNKIKSVYHGEHGLRTLKELARSYLTITKDVTRVMNRLKALYRSWGIPCAGNEVYAPRHRSEWLGKITEAGVRRRAEHSYQQLDVLRLLRQEVRRDLLLEAKKHKAWKLLRQIPGIGPIRAALLVALIQTPHRFRTKRQLWTYSGLGLETHDSAQYRVVEGQLKRSKKSVTLRGLNKDHNHDLKDIFKGAATRVSSSSGPLHDFYEHLLAKGRKPTMARLTLARKIAAITLIVWKKEVRFRRQLFETTSSLSASG

SEQ ID NO: 284214 - protein, 413 aa, unidentified
MKKNYIQFDQVVERGAGMDVHKDIIVVTIQGKGIKTVTKSFAAFTSSLIKLREWLKKHGVTHIAMESTGVYWKPVFNVLGDDFELLLVNARHVKNVPGHKTDKKDSRWLAKLLLSGLLRGSYIPNREIRELRDLTRYKTKLTNQVSAEKNRFQKILEDANIKLSSVLSNVFGATGQKMIAEILEGDYKPERLLYHIHGRVKAKRADIKEALTGYVTDHHRFMLKTILGNIERIECTIAEIEEQILKKTECYKEILDLLETIPGVGREGAVFIIAEIGVDMQAFASQKHLASWAGMSPGSNESAGKNKSGRITYGNKYLRAILVQQAWAASRTKNTYLSSKYKSLVGRRGKKKAVIAVGHKILLATYFMIKNKVGYNELGEDYLNNFRKDKLVEYYKNQLERLEPNINFDNRAV

SEQ ID NO: 284215 - protein, 350 aa, unidentified
MEYIAFDAHKHYTLASVVRPNGNLVREERIEHDRGSLREFLERCERGSPVAVETIGNWYWIVDEIEAAGCVPKLVHARKAKLMMGEINKTDRLDARGLNRLQRNGTLPTVWIPPGELRDQRDLPRTRMVLVRQRTQLKNRIHATLAKYALHDLEVSDFFGVRGRALLRQRFDLLPPHTAYASQQLLEQVEELDRRVREFEQRIQAVFKPTPAIQLLLTLPGVGLTLAAVIALEVGDVARFARAEKLAAYAGATPRVHASGGKTRFGPSRPDVNRYLKWAFVEAANAICIGRGRAPHCHVSRLYERIARRKGHAKAIGAVARHLAEATFWILRKHEPYREPKAVGRFAHGG

SEQ ID NO: 284216 - protein, 471 aa, unidentified
MIESVGIDLASVGEHKVRCLDEKAQMCDGFSFETTTEGLTKLEERIFINGSNPVIVFEPTGLSWLLVAVYLKGRHSDSRLVRVQAQKVVALRKYLNRSSKSDKIDSLTLAKMPFIDPEKLEEIYFPPAKIYAIQRLARQRRRLENEIAGRKKRIGAIIDGYFPMMRKAFSDPWSAHARAFLRSRLNPLAVVHTGEKALHVFLTKKRRHCKVDASVESHMVYLACREAATLYKASSSVGMINDEFFSSLQDEISRELRLMEIEEAESAAIAKRLEKLYLEIHPSDNLRTIPGVGDHTAPIFLATVGDPARFRSQSSFANYCGIVPGSNQSSDSEAKGLRMTKAGPAIMRWALFQAGGIGHDPQLACVYYREMVHNGKNHMQAMGAVMSHMSARVLAVLREDKPYELRDKDGRSVSREEARKLILAKYQVPEEIRRERRRRKTPGSPSLQKKLREMLVPRVNEAAAAPQPVVV

SEQ ID NO: 284217 - protein, 344 aa, unidentified
MDNHTQYSGFAGVDLAKKVMQIHFVTEDGEITDKSTKRAEFLDFFRNRGKCLIGMEACGSSQDWARKLEAMGHEVHLMSPKAVKPFVSGQKNDHNDAIGIYKAMFNGVRRVPVKSTEIRDLQTLRRIRSQVTKDKVKEINHVRGLLAEYGIVMGKSLKAFNKDISSALERLKERGDVSPLVAEELRTTVEAIKTKIKRQKKLDQEIEQLARGCKSYENFLKTPGVGPVTAAMLCVLLCDPSIFANGRQFAAYIGLAPRSRGSGGKNYVIGIPSKFNCDCESRAVFVECAQAIARCKNKSPWVEGILRRKPKKVALIAIANKLARQVWAMANKGESFKQMAILTA

SEQ ID NO: 284218 - protein, 333 aa, unidentified
MGIGIIDQDGQRLKCQKLACDLKLVAAFLAPYKAQLKSLAVESTYNWYWLVDGLQALGYPVKLANPAAIDQYSGIKHADDQNDAYFLADLQRLNILPTGYVYDAQLRPVRDLLRRRMSLVHQRTALLLSFKSLYTRTTGQAMPLGRLKAMTVAEAQTLYEHPANTLIATLQKEHLDQLDQSIEQIEKTVLASARELPCHAPLLTLPGVGRILGMTITMEIGELKRFPSPGDFASYSRTVDSKRMSNGKKKGDNNQKCGNKYLAWAFVEAANFAKRYDAPCRKWFDRKAAKTSTVLATKALACKLAKAAWHVIHDHSVYDPQRMFPGGEPKQTP

SEQ ID NO: 284219 - protein, 402 aa, unidentified
MPMLSIGIDVSKGKSTVCGMKPGGEIVYTPFEIQHTREGMSDLVSLLRSSGEEVRAVLESTGSYHCPVVAALLENGIFVSVVNSLRMKRFCSQSIRKVKTDRIDAMQIALYGLAYWQELQPAKLPEDTYRELQLLARQYYQMTSLLIKAKVDFNAICDQVLPGMQELMNDHAGRRKLSDFVLRYHHTTHILEMGETRFRKDYCKWAEKKGYRNCERMAALIFATAQNGIPVLPNAPSTQIVITEAIRVLHTVEASRDAILTQMQALAKTLPEYSLVREMPCIGDTLAPRLIAEIGDVRRFHSKRALIAYAGIDAPPYQSGKFCANNRHISKRGNRYLRKTGYEVMQSYVMHKPANDPIFTFIEKKRSEGKCGKLAMVAGLNKFLRVYYGKVTELYRSLPAIE

SEQ ID NO: 284220 - protein, 410 aa, unidentified
MPMLQVALEPSTAVVAIDPGKVANRVWLSNGSGPLAEPVSMRVSRAGIAGVEQLVSGHLEHGLVIAIEATGSLHRAWSAELERRYPGAVRLFAPSETKAARTQLGSGRFKTDDRDCAALTYLARQGAGRRWSEEADVEALRAVVRHRRGLVHDRKVIQQRLHDQLNALAPGLSAPAGHGRSLVLTRPSGQAVLACAAAFDGRAPTVRSLRARATGRFSLADAQYWAQRWRDCLPPPADAQQRAARLGRDLIRLQALQADIAGLEAELGQMLNGSEGQVLTSLPGVAVVRAAGFAAHSLPIDRFPDAEHLYSATGLAPALYQSATVRRRGRISRQGLAEHREALMGIAWGLSKHSATFADRDREYRARGMSPIQARVALARHACRLAYRLLTSQQSFDEEKYRQGRHSRGR

SEQ ID NO: 284221 - protein, 383 aa, unidentified
MDTTATRTREYSAGGPVLYLAFELGNAEWKLGFSVGFGQRPRVRTISARDLEGLQREIELAKRRFGLADTTRVVSCYEAGRDGFWLHRYLVEAGVENLVVDSSSIEVNRRFRRAKTDRMDVSKLVDQLMRYERGEKKVWHVVRVPAAEAEDRRQLHRELEDLKAERTQHINRMKGLLAGQGVQLEIEAGFLGRLSAIRLWDGRPIAEGLKTRLEREYERLQFIQGQIHELEAKRVEAIRRSADPEVEMVRQLLRLKGIGLNSAWVDTMEFFAWRDFRNGKEVGGLSGLTPTPYQSGDSSRERGMSKAGNRHVRALAIEIAWGWLRYQPESELSQWYQRRFGDGSSRLRRIGIVALARKLLVALWRYLETGLIPEGAVLKTRLI

SEQ ID NO: 284222 - protein, 355 aa, unidentified
MNSGKYIGLDVHQATICVAVMDAKGKVVMESILETKATTILEFFAGLRGTLSVTFEEGTWAAWLYDLLKPHVANLVVCNPRKNALLKHGNKSDKIDARKLANLLRLNDLEPVYHGETGVRMLRELARSYLTIVKDVSRVMSRLKAIYRSWAIPCAGRDVYYTRHRGEWLGKIPEAGSRRRAEQLYQQLDMLQPLRQQARRELLAESRKHTITAKLRQIPSLGPIRSALAVALIQTPHRFRTKRQLWTYSGLGLETRDSGEYHYVEGQVRRRKKQVFIRGLNKDHNHDLKGLFKAAATRASVRPGPFQDFYQRSLAKGIQPTMARLTLARKIAAITLTLWKKGENFDVEKLKAQAA

SEQ ID NO: 284223 - protein, 281 aa, unidentified
MSHFYLGIDVSKAKLDCALRLPSGKSRAKVIPNSLEGFATLLTWLNTQKAESVHVCMEATGIYWEDVAQHLATAGLTVSVVNPAQIKAYGASRLTRSKTDTIDAKLIADFCAERQPPVWQPRSEAEVTLRALVLRLDALQTMRTQESNRLQVAREAVREDIQQHLNWLDAAIQQLIDAINDHIDHHPDLKQQRELLDSIPGIGERTSAIILAFYADTSRFANSRQAAAFAGLDPRQYESGSSIKGKPRLSKIGHAFLRKALYMPAMVTLGEYVDKKRKGFN

SEQ ID NO: 284224 - protein, 405 aa, unidentified
MSAGLRVNSNLKSVASYQPVLYLALELGWTKWKLAFASAPAEKPRRREVEARNQSGLLAEIAAAKQKLGLPADCPVVSCYEAGRDGFWIHRWLETQGVRNVIVDSSSIEVNRRARRAKSDSLDAAKLLSMLFRHAGGEKVWSVVRVPTEEEEHARQLHRELQSLGQESTRHVNRIKGLLASIGLALEVDKHFPKTLKEARQWNGKPVPEEMRDRLLRDFERLQIINRQIRALNQQRNKTLRTKDSPTLRKVQQLLGLRGIGVNSAWLFVHEFFGWRDIQNRRQIGSLAGLAPTPYSSGDLRHEQGISKAGNRRMRWMAVEIAWWWLHFQPGSALSKWYERRFAKGNSRQRRVGIVALARKLLVALWKYLKTGELPEGAELADWQAKTRTSISSLDLSPVKRRQAS

SEQ ID NO: 284225 - protein, 339 aa, unidentified
MEIKRVAIDTSKHVFTLHGVDERDHLVLRRELRRTQIEPFFSKLRPTEVVLEGCGGSHHWGRMLAAMGHRVRLIPPQYVKPFVKRGKNDRNDAEAISEAAARPSMRSVPVKSAEVQAEAMALSVRELLVKQRTQLINALRGHACEFGVISAKATANAGKLVERVETDATLPAPAREMFVVLGREIARLEEALRDIDRKLAVQHKANPLSQLLVEVPGIGPIGALTLALTADATQFKSGRHFAAWIGLTPKDKSTGGKQRLGGISREGNERLRQLLVLGATSVIRLAKPGSKHATPWLSGLLGRRPRMVAAVALANKMARIVWAMMTSGEAYRPAPVAAG

SEQ ID NO: 284226 - protein, 369 aa, unidentified
MSEYSEAFVAFDVAKIKHAVAVAEGGRTGEVRFLGEIENREGPIERTVKKLAGRYGRLHFCFEAGPTGYGLYRQLQALGHDCMVVAPALIPKRPGERVKTNRRDAVTLARLHRAGELTGVWVPDAVHEAVRDLVRARQAAADDLRRKRQQLLSFLLRHGRIDSGSGHWTLAHRRWLANQAFEHAAQQIVFQDGIDAIEDAIARLRRLEEQLVTIVPSWSMAPVVEAYQAMRGASFLVAVTFAAEIGDVRRFDNPRQLMSFLGLVPAESSTGDTVRRKGLTLAGNRRARRALVEAAWTYRYPARVSETLRARLEGLPKAVRDIAWKAQVRLCARYRRLSATGKKLPVVVAAIAREMAAFLWAIGREVAPG

SEQ ID NO: 284227 - protein, 329 aa, unidentified
MNNVTTIGIDLAKNSFSVHGIDSAGAVVLRKTVSRARLMGLLIEQPPCVIGLEACSGAHEWARRLQQFGHTVKLMAPRFVAPYRKNGKNDGNDAEAICEAVSRPQMRFIPIKTPEQQAVLCLHRVRQGFIEERTATINRLRGLLAEFGFVLPQSSAAIRHGVGELLERLPPHAARALGDLLQHLHTLDARVREYEHSIEAHARENHAAQIALQRQGIGPITASAIVASVGDTREFKNGRQFSAWLGLVPRQHSTGGKQRLGHITARGDPYLRTLLVMGARSVLQRAVGKDDPLSRWALAVRARRGYHRACVAVAAKNARVLWAMLAHSA

SEQ ID NO: 284228 - protein, 388 aa, unidentified
MFAGIDVASERHMLARLDATGVPLGKPVPITEDREGYDTLLRLLGPPPVLVAMEATGHYWKNLYAALVAAGHSVVLLNPLKTRRFQDSALERTKTDAIDATGVARFAFEKRPEATQLHDAAAEALRELVRHRDRIRQDFDDRVRQLHRLVDLGFPEFTRYVRGLDSMLATALLAECPTAHDFARATPKRLAKLRYDGRHLVGAERAAQLIEAAKRSIGQHHGPAYRLQARHICQDLDMWRRRLVEIERDIDGLLESNEVGQLLLSIDGIGPQTTARIIAAVGDPARFKSAAAFAAYVGVVPGLKQSGKNGSRRAACAPMGNARLRRAVWMPVVGAVRRNAWLKSFYDGLIARGKPPKLALVAAMRKLLHAAYSVTKNRKPFTINLAEA

SEQ ID NO: 284229 - protein, 327 aa, unidentified
MNTQYIGLDAHSSTCTFCVMDPQGVEIDNKTIVTNGRLLVDYVQSLGNKSILAFEECDLSCWLFDILHKHVREVVVCNPAQNAQYKRAKTDKLDARNLANLLRGGYLKPVFHDASAREKLRMLVSSYQDNLQEVVRIKNRLKTIKRRVRLYPKKDAPVHAAFIQEQLTSHLEQLLISHKEYQQQITRCVQRFKETTILMSIPGIGYIHSAKIIAQVIDPERFKSKYKFFAYCGLVKHPRISANRNYGSTRIWGNRTLKCVFKMAAHSAIGGHNALNVLYGHLLDKGVSDRNARNAIARKIATLTLSLWKNNQRFSNEIILEGLPVKV

SEQ ID NO: 284230 - protein, 472 aa, unidentified
MRKHKRAKTKSKASKPIHDPQPDSAGVDIGANEIWVAVPAERTEKSLRRFDAFTQDLKALVKWLLDCGVRSVAMESTGVYWIPLFQLLEDAGLKVCLVNARHVKNVPGRKSDVRDCQWLQYLHSVGLLLGSFRPHQAICAARSIYRYRQNLLSMAAQHIQHMQAALDQMNIKLHHLIDDLTGLTGRTIIEAILSGQRDPVQLAKLRDKRIQAAESTIVKALEGDWRKEHLFVLAAAWDNWKQVQQQIQKCDQQLWQYTRELEAATTIAKPTKTMRLKPQWIGSSPVIGPQPAPRVRKKTSKNQPEAPWREELSRFFGVDLTAIPGISVLTGLTLMTELGNDLSAFKSQHHFASWLCLCPDNETSASKVLRRATRRSQNRVRQALRMAASSLHHDKSYLGHKYRRLRAKLGAPKAVTAMAHQLARIIWTLIARRVPFDLSIFALQEQANEQRRLNRLAASARQMGYQLTPIAA

SEQ ID NO: 284231 - protein, 347 aa, unidentified
MTTIEDARVITGGVDTRADMHVAAALDSIGGLLGVQEFPATAAGYASLLGWLRGFGTLAVAGVEGTGSYGAGLARHLAAAGVRVVEVDRPDRQDRARQGKSDPLDAVSAARAALSGRASGAPRGRDGAVEAIRALMVAKRSARQERIQAINQARALIMTGPEELRARFVRRSPAQLIEAIAALRPRPGDVPGFATRVALRELGRRAQFLDAQLDRLDELIGPLVTARAPGLLALHGVGPDTAAMLLVAAGDHPERLRSESSWAHLCGVAPIPASSGKTAGRYRLNRGGDRQANSALWRIVIVRMSSHPATRAYAGRRSEEGLSKKEIIRCLKRYVAREVYRQLRNGA

SEQ ID NO: 284232 - protein, 369 aa, unidentified
MADRITYVGLDVHKESIVVAVASGGLRGEVREYGRIANTAAALDRLMRKLGGAGMALRFCYESGPCGYGIQRRLSAGGQECVVVAPSLIPKRAGDRVKTDRRDAASLAKLHRAGELTAVWVPDARHEAMRDLVRARLDAVHSLRRARQQLSGFLLRQGCHYGRPAWTKLHRRWLAGLKFDQAVHHIVLEDYIAVVEAAQVRRDRLTAQIEAMLPDWALAPVVAALQTMRGMALVNAATLIAELGDLSRFTNPRQLMAYLGLVPSEHSSGASVKRGGITKAGNGAARRLLIEAAWSYRFPARLSRELLLRQENQPRSIRDIAWKGQVRLCARYRRLTRAAKPANVVTTAIARELSGFVWAIARHVTMPAG

SEQ ID NO: 284233 - protein, 415 aa, unidentified
MKGTEDTRQIERYIALDIHKEYVLAGGQNAKQEWVMPPRRISMAKFREWASANLQEGDAVVIETTTNVWDIYDSVAPLVTRTVVAHAGAVRQIAEARVKTDKEDVKRLIRLLIADIVPEVWVPPVEVRELRGLISYRNRLVKTSTMIRNRLQSLLHRHNILLPKGSLQDAARWQAQQMSGLEKMQIQQELVLLEEIDKHKAEVDAELGRQCLREPWGKQAVRLLQLPGFGVVMSMIVLSAIGDIQRFASAKHLVGYAGLGAGVHESGKEHIEKRITKSGRKELRWALVEAAWQAIRISPYWKEQYEKYLRRMRRPNQAIVVIARKLLVAVWHVLTKEETDIHASEEDLAYKMLVLAWDLDENVRLGLTYKQFAKYALMSFGIETDITRFVRRNVPRRIAPRAEVPARMEELGLTC

SEQ ID NO: 284234 - protein, 339 aa, unidentified
MNATTIGLDIAKSVFQLHGEDAEGRLVVQKRLSRRGMAEFFAKLAPCVVALEACGTSHYWGRTLRAMGHEVRLIPAAYVKPFVRRNKTDARDAAAICVAARRPDMRPVAIKSEEQQASRALERSRELLIKQRTQLMNSLRAMLAEFGIVAAQGARGFAELRARLASGDGLPKTLVTALRLVAAQLDGLTPAIESMEDKIKTIARADPTMRRLSRIPGVGFITAHAVVAAIGDGRQFVSSRCFAAWGGMTPRETSSAGKRRTKGLSRQGESRLRKLFALGAATLMRNARSRDDRASTWQRGILARRPMKVAVMAQAAKTARIAWAVLTSGKDYAPPAAAA

SEQ ID NO: 284235 - protein, 468 aa, unidentified
MPSKKSPKKRELDQLACVFPNAAGLDIGSAEIVAAVPPDRDAEPVQVFQTFTPDLHALVAWLLECGIDTVVMESTGVFWIPIYELLEAAGITPYLVNARHVKTVPGRKTDWNDAQWLQKLHALGLLAASFRPDAEIRTLRTLVRYRAELIERRAPHINHMIQALKHMNIQLNLVLTDITGKSGLAILRAIVAGERDPQQLACFRESGCKHSEAEIAKALTGTWDDAQLFILEQALEIFDYYTAKITGCDDKLEQQYQALESRAEKEAALPDLPPAKKDSRSKNALSFNARAQIARVVGVDLVAVMGLSAVTVQTIISEIGTDMELFPTVKHFCSWLGLAPHNDKSGGKVLRSRTMKVRNRANQAFRQAAQSVAQSDSSFGAYYRAMRARLGPKQAIVATAHKIARTVYHLLKTREPYQEESAAEYDRKRRERELKHLARRAQKLGYTLTAAHATAPESPPEPGGEGRF

SEQ ID NO: 284236 - protein, 354 aa, unidentified
MDIKYIGMDIHKETISIAVINGEGKVVMESIIETKASTILQCIQGVHGDLHVTFEEGTWAAWLYDLLKPHVTKLVVCDPRRNALLKEGNKSDKIDARKLADLLRGGYLRSVYHGENGLRTLKELARSYLTISKDLTRVMNRVKALYRSWAIPCEGQQVYAPRHRVEWLNKIGESGVRRRAEFFYQQLDALRALRQAVRQDLLAESRKQSATRLLRQIPSIGPIRSALLIALIQTPHRFRSKRQLWTYSGLAIDTRDSAQYRYVDGQLQRSKKPQQLRGLNQNHNHDMKAIFKSAASMASSREGAFHDFYQGLLTKGMEPAMAHLTLARKIAAITLIVWKKGVHFDAEQLKPQAA

SEQ ID NO: 284237 - protein, 420 aa, unidentified
MESQVSFNQVVSRGCGIDVHKKMLVATISGEGLNTETREFGTVTRSLTELKDWLLENRVTHVVMESTGVYWKPVYHVLEPSGLTVWIVNARHVKNVPGHKTDKQDSRWLCKLLLAGLLKPSYIPPREQRELRDLTRYRSKLVQDISSNKNRIIRILEDCNVKLSSVLSDTSGVTATRLIDKLCQGKEVTMGDIEEVYHKKIEATKEELFEACNGYITDHHIYLLGTIRGDNHHLESLIRDLDEKIKHALAPYENALERLREIPGLNRKSVEDLIAEIGLDMDVFPNENHLSSWVGVSPGNNESAGKKKNGRTTHGNKQAKSILSQSAWAASRTKGTFYHARYHRLAARRGKKRAIVAVAHSILKSVYHVLKDEVPYNELGADYLNSRVEARRKRYLKAELEKMGYCVELVPHNPVSPAGS

SEQ ID NO: 284238 - protein, 310 aa, unidentified
MGLCVGVDVAKSHLDWVLGSRGEVQRIPNTPAGVRRLVKQIGRLDFDRVVLESTGQYERALLEALEDQGVAVVRVNPVRARRFAEGMGVLAKNDALDARILALFGEKADLVERPPKSPRERLLGDLASRRRQLISMITAEKNRLEHAQGWAAKDIHSHVRLLEKRVDRLDEEIDRVVAQDEKQRGDFERLQSVPGVGPKVARALLIDLPELGRLDRRQIASLTGLAPYARDSGQKRGSRSIHGGRSAPRTALYLAAMVGSRWNPELADMKARLREAGKSPKVILIACARKLLTILNAIVRDQSEWRTVSP

SEQ ID NO: 284239 - protein, 376 aa, unidentified
MMRFYDQQHGFYAGIDLHARRLHLCVLDAKGKVVRDVNIAATPDAFLAAIAPFRNDLVVGCECMFAWYWLSDLCLAEEVPLVVGHAYYMRLIHGAKAKNDRIDAHKIARLLRGGNFPLSYVYPKGMRETRDLLRRRTFLVRQRAGLITHLQILNSQYNLPPFPKKLSNPGNRLEMDVAARFPDPSVRKSAACDLAVIDCLDGQIAELELYLTRAAKVDDVQTYHRLRTIPGVGPVLALILLYEIHDAGRFPGVGQFLSYARLVRCSHESDGKVVGTGGEKIGNGHLRWAFGEAACLFLRGSERAKRWKERQAKKRGEGKALAVLAARLARAVYHLWRKAEAFDEDRFWGARPAGGREGKTGSSSLSRAPEVADAAG

SEQ ID NO: 284240 - protein, 462 aa, unidentified
MKKQKRRAAAKVDQGSKLSVIQPDVAGIDIGSREMFVCGPPDAEGRRELRVFATTTAEIQNCIRWLKQQKVRSVAMESTGVYWIPVLEIMESSGLETVLVDTRPFSRVPGRDKSDAEDGQWLQTLHSHGLLRGAYRPSQQISELRTIVRQKAVLVRQQADWVRRMHKCLDQMNVRVHHAVRDTQGATGMAMLRAIAGGERDPGKLAKLRDPGCRKSEAEMVELLTGNWRSDHRFNFEQHMAMYDQAGKQIEVYEKEIQRRMQELTPTQRKDADAPPLAKPGKRKTMKRRGQEGKRQDLYRVLGADLTTIDGVGVETVEVIMSEYGTEMSKFPTEGEFVKPVGLAPHRPVSGGKVLKNKRKKQKGTRTAEVLRNAASSLKHSLSALGAYYRRMARRKDAGVAIFATARKLAGLVYRMLRFGQAYVDAGQAEYEKRYEETRLRALKSTANQMGFNLIKQEAVSA

SEQ ID NO: 284241 - protein, 342 aa, unidentified
MIASTIGLDLAKHNFHVHAVDADGLVIKTATLRRSEMIKFFTTARPCLVGVEACATAHYWARELMKLGHEVRLIPPSYVKPFVRRGAKNDAADAAAICEAVQRPDMRFVPIKSEANQSFLMLHRARGLLVRQRTMTVCAIRAHLAEFGIIFSQGRQRIETIMPMIDGITASLPEYARFALTGLINSVGELNKQIDGIETKLAEIGRSDPVSSVLSTIPGVGPITSTAIAATIPDARMFRSGREFAAWLGLTPRQSSSGGTTRLGGITKQGDAYLRHLLVIGARNIVRYPKARAKVGGAWIDALLQRRRPMIVAVAVANKLARIIWAMMTSGEIFREADIKTA

SEQ ID NO: 284242 - protein, 383 aa, unidentified
MRIVCGLDVHKDSVFVCILNEKGEKFEAKYGVLTPEQEELHQLLLTHEVKEVTMESTSIYWYPIWRILSDIECLKLVNPYFIKQLPGRKSDVRDAAWIAECTMKDLIRGSFVPDEIVQRMRQYNRRIFDLNKEKVYKLTKLDALLQRCNIRISNYVSSTDSKSYKDVVKLLSEGIVNAEKLTEAIHGRTVNRVGKEVITAALTGVVNEVDIDLIRQYREEILMDDKHLKECQEKLTEICRKEFPREFDNLQTIPGVKERSATSILSELGADMKMFITAAALVSWCGLKPRNEESAGKIKSRRITHGNKYIRKTMIECAWGASRTQNCFYSNFSYTQTVVRRKNAMKVKVAIARKMLVVIWHVLSDGVPYNDYKKPEAIAEGNS

SEQ ID NO: 284243 - protein, 353 aa, unidentified
MAKRNRVEGGMTVGLDLGDRFSHFCVLDASGEILEAGRVATTRKGLLQRFGNLPSSQVALEVGTHSPWVERLLSGLGHQVLVANPRKLRLIYHNESKSDQLDAEQLARLARVDPKLLHPICHRDRESQEAMAVLRSRQALVEARTKLVNHVRGAAKSFGSRIKLCSTASFHKQAAAQIPEEMRPALAAVLEVIADLTRRIRRYDQQIEQLSEQRYPQTSLLREVSGVGPLTSLWFVLTIGDPHRFSRSRSVGAYLGLRPRRSQSGDDDPELPITKTGDPELRRLLVTSAQYILGPFGPDTDLRRWGLALAARGRRNAKKRAVVAVARKLSVLLHALWLNAEEYEPLRNSEAAA

SEQ ID NO: 284244 - protein, 345 aa, unidentified
MSTTIGVDVAKSVFEVAVSNRPGRIVKRHRLSRGQFARFLATRAPATVVMEACGMAHFWGRQAVASGHRVVLLPPHAVRPYVPRNKTDRADATALLEAARNAAIHPVPVKSVTQQALTGLHRLRSTWLATRTARINTVRGLLREFGVTIPVGARQVVPRIAALLAGPDDTVPAVLHPALAAVISELRELDVRLRTVEQQLTAIAAAMPAVERLRTIPGIGLLTATGLVAFVGDARRFPTARHFASYLGLTPREHSSGLRRRLGAISKRGDTYLRMLLIHGARAVLCHAKKTITPARLQRWALHLERLRGHNKAAVALANKLARIAWAVWTSGTEFRVAHLTPTPA

SEQ ID NO: 284245 - protein, 345 aa, unidentified
MNKQVSTPQAMVFCGIDVSAASLAVALIAPDGSLAQREFSNNASGHEALLVWLKKRNSPVRVSLEATGIYSLDLALALDAEASVELMVLNPKLVNRFQQTLCRSKTDAADAMVLAEYSQRMPFCRWQRPAASHLALRTVSRYIGSLVVEQAGLKNRLRSAESTATTPRAVRVDLKRSLAAIERRVDRLRAEALKMVEAEAELRQRYQLLITVPGIGAINALAILSELILLAPAMTVRQWVASSGLDPVHRQSGTSLNKPSRISRAGNRRLRAALYMSALSASRYDRHLAAFYRALRARHKTGLQALMAVARKILHAIYGIFKSGTPFDGRRLFPNIQTEVESIAG

SEQ ID NO: 284246 - protein, 309 aa, unidentified
MDIVVGIDVSKDRLDVAVAPSGLAFAVVNTQAGIDELVARLQSVKADVVALEATGGFETPAVAGLSSAGLPVIVVNAAQVRAYAHAIGRKAKTDPIDAALIAAFVMAIRPTLRPLKDAETQALSALVARRRQIVQMIVAEENRARMALAKETHKSIRRLLGALRHELESLDADLEDHIRKSPLWRVRESLLTSVPGVGPATARTLMAEMPELGSLDRRQIASLAGLAPWTRQSGRWKGKSFIGGGRGKVRSALFMAALVASRHNPVLKAFRERLVAAGKPKIVAIVATMRKLLTILNAIIRDQKPWKSA

SEQ ID NO: 284247 - protein, 338 aa, unidentified
MDKSAECGIDVSAKQLWVVLRRQGACEAERSFANTAAGHKELKRYLVRAAERVRICLESTGLYGLDVALYLQADPRLEVMVANPRAVKDFAKALLQRSKSDPLDAWVLAEYAGRMPFRAWQPPSLAALAVTALTRRIHALTETATREKNRLHALAVTDTTIKILVTELKRSLQWIERSQARLTREARRIIAGEAGLERRFQLLLSLPGVGETSALQLLGELALLPADADVRQWVAYAGLDPCERSSGSSLRKRPRISKVGNRHLRRALFMPALTAARHNRVFGAYYQALQQRGKCKMVALVAVMRKLLHATFGMFKHDAVFDGNRVFRLPTATAGVAA

SEQ ID NO: 284248 - protein, 340 aa, unidentified
MNTTMIGLDIAKTVFQVYGEDAHGQPMLSKRLGRGAVEPFFAKLPPATIGIEACGSSHHWARRLQALGHAVRLIPAAYVRPFVKRNKTDARDAVAICEAMQRPDMRFVPIKSIEQQAARGIETARELLVRQRTQLMNAMRGLSAEFGIVVAQGSTGFAALCARIAAGDPALPAALLPSLRLMRQQWQALNDAVDVQQAQLVARAKADPVMRLLMGVPGIGPLTAHAIVAAIGDGRQFGSARDFAAWAGLTPREQQSANKRRLGHISRQGDPGVRRLLTLGASAVLRQVRAEPRRGTAWLRGILTRRPVKVAVVAQAAKTARIAWAMLRSGEAYRVAAPAI

SEQ ID NO: 284249 - protein, 349 aa, unidentified
MLVRSWGCAIDDEAGEIRTQRVSPKTEAIVEWVVALPGPVAVTYEAGPTGFGLARALAAAGVRCEVVAPSKLERPPGDKVKTDRRDAERLARLLRIGELPAVRVPSEAEEAARDLVRAREDARGDLMRARHRLSKLLLRQGLVWDQTAWTAAHDQWLRSHQFSRRGVQLAYDEAFDAVLTVHARRTRLDTEIVALAAEPPFAAPVGRLQCLRGVSTLTALGLCVELADWHRFTGSTIGSYLGLVPAEYSSGAHRAQGSITKTGNGHARRLLVEAAWHHRRPYRPHRDRARRADGQPPVVRDRAENGNRRLPHRWTRLDARHKRPTVSVVAVARELAGWCWSLAVLDSPT

SEQ ID NO: 284250 - protein, 369 aa, unidentified
MGDRITYVGLDVHKDGIVVAVAEGGVRGEVREYGRIANTPAALRRLAGKLGQQGVELRFCYEAGPCGYGIQRQLSAQGHQCIVVAPSLIPKRPGDRIKTDRRDASSLAKLHRAGELTAVWVPDPGHEAMRDLVRAQLDAVRALRRARQQLSGFLLRQGCHYGRPAWTKLHRRWLAGLKFEQAVHHIVLEDYIAAVEAAAARRDRLTAQIEAMLPDWTLAPVVAALQTMRGMALVNAATLVAELGDLSRFANPRQLMAYLGLVPSEHSSGASVKRGGLTKAGNSAARRLLIEAAWCYRFPARVSRELRLRQEEQAKPICEIAWKAQLRLCARYRKLARRGKPANVVTAAIARELAGFIWAIARRVPPAAG

SEQ ID NO: 284251 - protein, 310 aa, unidentified
MDATVVGIDVSKDRLDVHVHPGGEYFFVPRKAEGLDALIARIAPLHVSAVAVEATGGFETVVAASLCAAGLPVIVVNPAQVRAFAKALGKRAKTDAIDASVIARFVEATKPAIRALPDAETRLLAELVMRRRQIVQMIVAERQRERQLPTRHLRKSTARLIKALEKELNVLDNDIGDAVRGSPVWREKEELLKSVPGVGPVVARTLLAEMPELGNLTRRQTASLAGLAPWTRQSGQWRGRSFTGGGRASVRTVLFMAAMVARRCNPVLKAFYQRLVNAGKPKMLALIAVARKLLTILNALLRDKTPWQTA

SEQ ID NO: 284252 - protein, 346 aa, unidentified
MEKSISNLSSVTTVGLDLAKLVFQVHCVDASGRLVVAKAIKRKNLLAFFGALPPCLVGLEASGSAHHWARELIKLGHDARLMPPAYVKPYVRRQKNDAADAAAICEAVTRPSMRFVGVRTLENQATLMHHKTREMLVAQRTQLLNSLRGHLGEIGVIAAQGPRHARQLADRIEAGDEMIPPPVCEALAPLVVQLRNLDEAIARLDRAIAKMAHKDETARRLMTIPGFGPITASAMVASVQDASGFSGPREFAAFLGLVPTQNSSGGKQRLGRISKMGNRYLRKLLVVGAHAVLYHRKPHTDALRMWAKKLMETKPFKLVAVALANKMARIAFAILRARTSYNAIAA

SEQ ID NO: 284253 - protein, 454 aa, unidentified
MKKKVAKQLPDVVTMPLVHPRAAGIDVGDSLHSVAIPEGIFAERVKTFGSMTCDLEAIADWLLQAKITTVAIESTGVYWKSIFSLLNKKGFEVYLVNSRQTKNVSGRKTDEDDAMWIQKLHSCGLLKSSYLPDDEQEALRTLVRYRHTLVQDCSRFKNRMQKSLELMNIKFHTLFADIAGKTSIAFIEAILAGERTPANFLPLVDGRIKASKDEILQSVEGTWRSEHLFTLSQSYEMNKIYNQKITACDTAIEERLQCYQAFANGGECGPGEPANENPISKKKKQRGAPVFDVRSYLKRIYKTDVLAIYGLSEMGGLEILAETGVNLKKWPTENHFRSWLNLCPNNKVSGGKLISSKLLKKKPNAASQAFRIAANTVQRSNHWLGDYFRRMKARGGNKFAVVATANKIAAIFYKMVTQQQEFKPVDLEAYQQKYKQAKIAFYEKKLQQLKNVAA

SEQ ID NO: 284254 - protein, 457 aa, unidentified
MKTQNKKTQKQKMKRKTIKIMHPNAAGIDIGSRKHYVAIPAECGDETVRHFGCLTPDLHEMAKWLRENNVDTVAMESTGVYWIPVAQILDQYAIEVNLVDGREAKNVPGRKSDVQDCQWLQELHTFGLLRSAFRPTNEMVVLRSYWRHRGELVTAAAEQIHLMQKSLELMNLQLHKVISDITGVTGMRIIRSIVSGERDPLVLAKMRHASIKSSEETIVKALTGDWREEHLFTLQQALEAFDFYHKQMVACDQRIKQYMQTLPSQGDQANQNKGKRGYRRKNQVHFDLRSELCRVTGVDLTTIDAIDVMTAQTVISESGFDMSRFAKEGNYASWLGLSPNNTITGGKVRRRRTRKVHNRAAHALRLAAQSLHRSKTALGAYYRRMKGRLGPAKAITATAHKLAILIYRMLKYGMDYVDQGQERYEQQYQERIIQMTIRRVKKMGYELVPLQSGEVVS

SEQ ID NO: 284255 - protein, 432 aa, unidentified
MRSTKMAKQNEETIAAYIGLDWADSEHEVTMLDVETGQVESRKLKQESEALAEWVQSLRERFSGRKVAIAIEQRKGALIYALMCYDFLILYPVNPKTLARFREAFNTSGAKSDPGDSELLLDLIRLHRDKLRPWVPEDAETRLLQMLVEERRALVDEVTRLTNRLQSTLKQYFPQALEWAGELDSRQAFDFLTRWPTLESIRKAGAVAVEKFYRRHSVRNQDKIEQRVKAIKEARALTTDRAVLAASRMKALAIVRQLRALGESIAEMEARIQELFEQHRDHEVFSSFPCAKKVLGPRLLAAFGGDRTRYESALELQSFSGIAPVTRSSGKSKTIHKRMACPKFLRQTFHEYAAQSIKKAGWARVYYQGQRDKGVKHHAAVRALAYKWIRIMFRCWQEQEPYNEAKYIAALKRRSSPLVSGLPPTPSSLVEV

SEQ ID NO: 284256 - protein, 302 aa, unidentified
MMIIGCDFHPSWQQVSWLETETGETGERKLVQASGDAEQFYRQLPVPSLIGVEATGNCHWRVDLLAEIGHELWVGDAAQIRASCVRQQKTDQRDAEHILKLLVEGRFPRIWMPSSEVRDLRQLLLHRHKLVTIRTRVKNELQHLCLNQGVQRKHKLWSKAGQQVLRELPLKPWAARRREDLLGLLAMLDQQMEPLDRAVKEEAQRDKMALLLQTQPGVGAVTALAYVLTMGDVSRFARGKQVASYLGLIPREHSSGGRQKLGAITKQGNRMLRTLLVEAAQMAVRCDPGLRREYLHRCHQKP

SEQ ID NO: 284257 - protein, 363 aa, unidentified
MIVIGADTHKRNHTLVAVDGQTGALRGQREIPASDEGSLQALRFAAGLEDTERVWAIEDCRHVSARLEAALIAAGEHVVRVPATMTSQARKIARQAGKSDPIDARAVALAVLRDGIQSFPVAFTDAQALEIRVLCDYRDQIICERTRMINRLRWHLVTIAPDLEAQLGATSLRGPQICARLTRQLARLTPSPQLRVARRLLKRISEIVREERELFSELTSLIDAHCPQLLAQPGCGPVTAAIIIGHTAGAQRFPTDGHFARHAGAAPVPASSGKIQRHRLHRGGDRQLNRAIHIIALSRAKTDPETRAYLERKHAEGKTKLEAIRCLKRHLARRIWRLLYTAEAAAAPSVLINRSNPEIPTIT

SEQ ID NO: 284258 - protein, 377 aa, unidentified
MRKNIRFIGLDVHGETIAVGVAEPGGEVRSLGVVPNRPESVRKLVKKLGPASSLRACYEAGPCGYVLYWQLTQMGVHCDVVAPTLVPIKSGERVKTDRRDALKLARSYRSGDLTPVWVPDRDHEALRDLVRAREAAKKDQLRARHRLQKLLLRRGLRPPEKMKSWTMQHLAWIRSLHLQPPALEATLLDYLSEVDHAGERIKRLERALDQAIAAAPPAIRAVIDGLQALRGIARISAATIVAEVGMLSRFPRPKQLMGYTGAVSREHSSGDRIRRGAITKTGNAHLRRILVEAAWSYRYRPAVGRQLRARQAKQSAEVKEISWKAQHRLHYRYAHLAGRGKPKQQVVTAVARELAGFIWAVGVQIEKQLAIGDVRTA

SEQ ID NO: 284259 - protein, 429 aa, unidentified
MWEQKSTTPNRVIDMISPEKIYAGLDVGKESIEAVFVDESGNRVGELSFSNDHSGYEQFLKKLQTLREKGAKIVVGAEGHAGNLSPLDQYLNDESFQFLSLHPLKVRRFKDILGQPQKTDNYDAYVIADFLRSREDQLENSPRFDPTIQEVKKLSRTYKDLEEQINRYTNQLDEALTEYFPEFLGDEFPDLTTKTSLRLLNEYGSLKEIRELDADELSQFLHEASRGHYGEKLASQLLDTVTSIKRSPLAEEAYRLKIETLTDLLLRVKKHSEEIKKRIGKLLDDWEDAQIVLSLWGAGNTTVGRLLGEVETIDRFDGSDPLGLFCGVSPVPHSSGKYSTDRTTQRVNKRAKDAIMQIARCSIQHNPESKRYYDKKRKEGKSHWHAIKCLARQLIRVIYAMLRDRTYYQPDKNSKQSAEQKKEVEAVPA

SEQ ID NO: 284260 - protein, 369 aa, unidentified
MGSSIAYVGLDVHKDSIVIALADEGRSGEVREYGTIEGSVSALDSVIRKLQSRGKRHFEFVYEAGPCGYEIYRHLSARGYSCAVVAPSKVPKAKGDRVKTDRRDARQLARLHRAGELTPVYVPREEDEAIRDLTRAREDAKVAERKARQQLNAFLLRHGMRYGGKTYWSRPHFRWISGIAMGHPAQQLVLEEYVEAVRSCTERVERLSGQLREFVPQWRMAPVVDALQALRGVSLIVAATTVAELGDLSRFDDPHQLMAFLGLIPSEHSSGERVKRGGITKTGNGHARRVLVEASWAYRFPARVSRRLLQRQEQLPQRVRETAWKAQLRLCARFRRLIARGKPKQVVTTAIARELSAFMWAIARQIPVN

SEQ ID NO: 284261 - protein, 460 aa, unidentified
MAKRRKSTTNVPGLDILRQINVDAAGLDVGAEEIWVCVPAGRDSKSVRVFPTFTADLHAMAEWLRACQVKTVAMESTGIYWIPIYEILESRGFEVYLVNARHIKNVPGRKTDVLDCQWIQQLHSYGLLHASFRPSEEICALRALARHRDNLIRRRSAHIQHMQKALELMNVKLTEVVSDITGVTGLSIIRAIVGGERDPQYLASLRQSGCKRSEAQIAKALQGNYKPEHIFVLKQSLAQYDFYLRQIQECDTEMQAMYAALPLSDPDSRAPSPPKPKGGSPRKNQAHYDLATALYELVGVDLTAIDGIDALTAQTIITEIGLDVSAWPTVKHFTSWLGLAPHNDISGGKVLRRGTKKTQNKANLAFRLAAHSLHRSQSAVGAFYRRMKSRHGPAKATTATAHKLARMVYFMLKNRTDYVDPGVTYYEQQHRDRTIRNLKRRAAALGLELVPIPAQPAAVS

SEQ ID NO: 284262 - protein, 401 aa, unidentified
MGGVIIGMDPHKASATIEVPGGRERVLGGGRYATDRDGYRAMRDAVARWPERVWAVEGSAGIGRHLAQRLIADGEAVAGVPAKLSARVRVFSTGQGRKTDVTDAHSIALVAARTPDLAAVAEDGAVAALRLLADRHDELAAHRVQTVTRLHRLLLELVPGGAPVFLSALQAKALLATARPRDVAGRTRRAMAAELLADLAAADRRLKASEKRLREAVTATGSQLMGLYGLGPVGSARLLADIGDIARFPTRARFASWNGTAPIDASSGQQVRHRLSRAGNRRINRVLHIMAIVQIRHDTEGRAYYRRKLAAGKTPMEALRCLKRRLSDVVYRQLAADMLQAGHPLPGSQHEADPGGHVGAALQSSAAGLNPIAGTSDQSLPGPASSHATPARRPRRTPSLT

SEQ ID NO: 284263 - protein, 368 aa, unidentified
MTHPTCPISPSMLTTVQLPTTLALDVSDRSARFHVVRGDGVQLAAGDMPLERERLTELFTSWRGARLVIEVGAHSPWVFRLGEECGMQVVVANPRKVELISKSDFKTDKNDAKTLACLGKSDVTLLSPIEPRSKQAQLDLSIQRARKALVDARTALINHVRGVFKSHGHRSPPCSADCFGARTTKELPKELGPALGGVLQQIVSLTKEIKTYDQQLATVAKERYPMTKLFAPIAGVGVITALTFATTIDRPERFKSARRAGPYIGLVQRKHASGGPGPDLRITKAGDHEMRRLLVMCANYILSRHGPDCDLKRFGKRLEAKGGDKRAKKKARVAVARKLAVLMLHLWQTGSVYDPFYLAKKRGEPVPA

SEQ ID NO: 284264 - protein, 412 aa, unidentified
MPRWVGRAIGLDVHREFCEVAICEDGRTRSAGRVSATPEGIAVLARSLLPSDRVALEVTGSCWEVARILEPRVNRVVVVSPDDTGITSARAKTDKLDARALASLLWKGELEAVWMPDERCRVLRRRLARRQQLVWSRSRAKNEIHAALQRRLQPKPPCSDLFGVKGRAWLSSLELPLEERESVDAGMRHIEFLDAEIAAVEKLIAKQALSWPEIRRLMTVPGVNLICAASFIAAVGNPNRFLTSRKLVAYLGLDPRVKQSGEGPARSGRISKRGSPSARWALVEAAWTAVLQPGPLHAFYVRTRNRRGHGKAIVATARKLAVLFWCMLTRGEDYAHQQPSLTRKKLRRLEITAGAPKYTRRAAGIWSTNDLMREAELELARQAETSYLRLVQDQLAGAPAKKAGASVTLERA

SEQ ID NO: 284265 - protein, 346 aa, unidentified
MKKIFIGIDFSKEKFDATVIKAEGVEERAERQHGVFDNKVSGFRRLLRWVESVADGQDRGLWLFCGENTGGYSRALCNYLYGSGHDMWLENALSIKRSSALQRTKSDKADSGIIAEYAMRNYDQMRLYKPLEKNLERLREVFLYRHNLVKLKVSMTTRRGEKKLTQEKSDISRFMAQSSRHLISEFNKKIAECDMRIEKIIREDEELRRNFEIITSVPGVGVQNAVCLMVYTDNFCRFDFNSRKIACYYGVAPFGRQSGSSVNTPPHVSPFANKLIKALLTQAALASVNFCPQMAMYYHRLVKAGKRKPVAVNNVKNKLLHIITAMVRKGEKYNPNHDYHAVFEAA

SEQ ID NO: 284266 - protein, 441 aa, unidentified
MPMTFARLLDPSFEDDDDPFRHYDVRGEPLEDRLYLPCGIDPHKEVCYAAFVHPLPHRQKILSHRSIPNRDLQSALWLVQEGQRLADQFDATPIYVFETSGPYWRPYRLFLHQLGLPTATVSGRQTKRAGGTGTRKTVNDLKAAFLIAKIFKQGESHASRVPPEPLASLREYTRLHFFFVKHSVAIQNRMFDIRYQIHPGFAGRNGLLSKSTIPSALALAKQELVHPAKLLKADHDELAQILRRASRGKLGDQLATALHHSALTVFLSPYAVDALSFNLRMLAEAYEHIHHHILPPIRARIDECLSQLPFEQYLPEIPYVGPVTTGTFLGELGLSSWFKTVDSVVAWLGFDPSISESADHKTGISHLTKRGTKYGRRVWWLLARNWSRYVSQGCRMFKKEFYVNKLSYDGAICVIAAKLVRIAFAMVRDGAHFDMSKAFPS

SEQ ID NO: 284267 - protein, 398 aa, unidentified
MNAVGIDVSKGKSTVAVIQPFGVIIAEPFDVLHTDSDLKSLSAFIKSLSGETKVVMEYTGTYYEPIANALHSEGIFVSVVNPLLIGDYGGNRVRKIKTDKKDSLKIASYALDKWLDLREYIPADDLRKTLKIMNRQYIQYNKILTMQKNNLIALLDSCFPNANTLFSSPRRESDGHEKWVDFVLKFPHAESVSKLSLSAFKSKYQSFCRKNHYNYSESKAIEIHSYSRTLSVSLPMTDAVMKIITESAMMLNSILETLNILRTEMDNLSSQLPEYETVMNLYGVGKVFCSQLIAEIGDVRRLERSKSIIALAGIDPPPYQSGKVDTKSRSISKRGSPALRKTLFQIMTIIIQNQPADEPVYQFLDKKRSEGKPYKVYMIAAAHKFLRIYYARVMQALT

SEQ ID NO: 284268 - protein, 322 aa, unidentified
MVFIGIDISKLTFDAAYKLNSRYDHQQFTNSPKGFDAFSLWANKSKGEVFTCLEATGVYSFALAQYLSQQKVNVMVVNPIITHAFFKMELNRNKTDKADAQLIARYCEYAVLNGDFKKKSYKPKGKDYEAIQRLVTRCDQLEKSKTQERNRLEASMNKHTSRSINRLKKAIENEITVIKKTISELVKNNQSLRQQVDLLVSIKGIGERTAWSILAYIGDINFFSNSNQVSSYAGLTPKIIQSGTSINKSSLSKLGHKRLRKSLYMPALVAIRYNPTLKAVYQRLVSNGKPKKVAIVAVMRKLLVLSYGVLKSEQPYDVNYQP

SEQ ID NO: 284269 - protein, 337 aa, unidentified
MPTLTIGLDIAKNVFQIHGVDRHGKVVIQRKLRRSDVLKFFAKLESGLVGIEACHGSHFWARELTALGHTVRLLPTQYVKPFLIGGKNDANDAAAICAAVTRPGIHFVAIKSAEQQSLQSVHRMRQRLILERTAKSNQIRSMFAEEGVIFPIGLPQLRKGVVALVNDPDSGITTLLRRLGSMYLEQLKALQQWLDELATEIAEIFKSNEACQRLATVPGIGPVIATALVSSVGDPSQFRNGRQFAAWLGLTPMQRSSGGKTRLGGITKRGDTYLRTLLVQGARAVMHFVSRRNDRHSQWIKSVMQRRHVSIAAIALANKTARIAWAILTGNGCFRAA

SEQ ID NO: 284270 - protein, 391 aa, unidentified
MEPPNAHAERPEPIPYRPETGQHIDRGNRNELVELARCRRRAWRRAPAVEEARVVDESALLKLLNRWREEAEKVGRKIERIAVAFEAGRDGFWLARWLRARGIEAHVIHASSVAVSREHRRAKTDRLDTELLKRAFLGWLRGERDHCKMVAIPTTKDEDAKRPNRERESLVGEQTRIVNRMKAALSRLGIRGFNPKLKKAAERLEDLRTPEGEPIPPNTLAELRRDMQRRRLVSDQIRQIEDARLERIEHAPNDGPHAMVRLLARVIGVGIETADMLVQEVLSRNMRDRRAVARYAGLTGSPDESGTRRREKGLARSGNARVRRGMIQLAWRFLMFQKDSALAQWFRARTENARGTRKTMIVALARKLLIALWRLVREGVVPDGVVLRPAQ

SEQ ID NO: 284271 - protein, 358 aa, unidentified
MVNLTGEVAMGMLADRVDYVIGVDTHRDAHAAAVVTPSGAVEAEASVSADVRGYRRLLGFARERAPGRRVWAIEGTGSFGSGLTTFLLERGEWVAEVDRPARPARRTGAKSDQLDAARAAHEALAREHLAQPRRRGQREAIRVLLATREGAILARTKAIAQLKALVVNAPERIREQLRRLPTDEQLTRCARLRTGPSQSVEHRATIIALRSAARRALALEAEAADLQSQLELLIGELAPALLAEPGVGVITAGQLLNAWSHPGRFRSEAAFASLAGAAPIPASSGQTVRHRLNRSGDRQLNRALHTIVLSRLAHHAETRAYAARRTAEGKTPREIKRCLKRHLARRLYRLLEAGAVTA

SEQ ID NO: 284272 - protein, 479 aa, unidentified
MNVKARRTKKQVNVENWAINLLPKEELSKKIEVVEKELRSYTWRDLETNGKFAKNDKLSFITDDMLIVGCDIGSENHYIRAIDVRGRELSRGAFEFSNTSEGFENAKAWVLALAAKHDKKQIVLGLEPTGHYWFALAAWMISNGISVVQVNPYAVKQSKEIEDNSQRKDDRKNPKLIANLVKDGNYGMPYLPEKIYADMRRLSMFRDQLTEDRIRNINRLHRELKIYFPEYMDAFGKIDGAFTLEVLKVSAIPTDIVALGTDGLRNIWHNAKLRGRGYSRAHEIVSCAEKSVGLTDGIDAGCEAMKWYAGQILKLDVQLAAIESTLHKKCREIPYAENILAINGVGENILSGILAEMGDISRFDDVKEIQKLSGMGLVACSSGKHKGQTKISHRGRKRLRYWLFQAAKSAVSHADEFKQLHEYYTTRADNPLKKMQSLIVIACKLLRIVYTILKKGTVYDPKKMLMDIRRPEKKEAIAA

SEQ ID NO: 284273 - protein, 317 aa, unidentified
MTQTSTLTAGIDTSKEKLDIAVHGQSGCWEVANDQPGWRKLAQLLTEAGVRRVGIEATGGYERGVVEHLRAASFIVLVLQPIQVKAFGRARLRRAKNDKLDAALIAAFAASLDEVRDAPDSRLAELTEQLTFLEQIEEDIKRFKTRLEHIDKPGLRRIVLDDIARLKARRLSQIRHIAKQIRAHHDLAVRLDLVLSIPGIGERTALALLVRMPELGRVSREEAAALAGLAPFDNDSGQYKGQRRIAGGRARLRRSLFAAALPAAFRWNKAVMALYARLTAAGKAHNAALIACARKLLIYANSVVQRGTPWAEKPIGV

SEQ ID NO: 284274 - protein, 316 aa, unidentified
MASFLGIDVSSLSLDAAVRPQGIKMHLSNDPTGFEALLESLRKLSIKRVLLEATGGYERDVMCFLQDAGYKVIRVNPRRARSFADSLGIKAKTDAIDAEVLAHYAEVIPDQPSLRVSPERALLRELLQQRDRMVQQRDDDLRRLKQVQSTAVANYLNANLKHFKAQIKRVECEIEQQIAMLNDERVAQLIKVKGIGMVTAGKLIALLPELGRVESREIASLVGVAPFNHDSGKFMGKRSISGGRFAVRRSLYMACLVAMKYNPALKARYQSLRERGKLPKVAIVACMRTFIVRLNAMLRTGTSWLDLVLPQPESTT

SEQ ID NO: 284275 - protein, 465 aa, unidentified
MAKAQKSRSKSRAKPNHRAKLKPQDGTLGLQVVHPKAAGIDVGNEEHWVAVPPDLDPEPVRSFGCFTRDLEEMADWLVRCGIETVAMQSTGVYWIALYDILAERGIRVFVVNAKDTKNLPGRKTDIQECQWLLKLHAYGLLRNSFRPEEEVLVMRTYWRQRQQHIGDASRCIQHMQKALTQMNVQLANVISDISGTTGQAIVKAIVGGERDPGTLAKFRDPRVKASEATVAKSLEGNWRPELLFVLQQELESYQTFQTKIAECDRQLQRHYETMEAKADPKQLPPIPRNKRPHGNVPAGFDLRDELYRTTGVDLTAIDGINVLTAQTLIAEVGSDMGRFDTEAHFVSFLTLSPNNKISGGKVVGREKRKTKNRAGVALRLAAGTLLESDTYLGAQYRRLRTKLGAPKARKAMANKLARIAYRMLKYGEKYVDKGKEFYEQKYRQMQIRMLNKKATELGFKLVQPA

SEQ ID NO: 284276 - protein, 402 aa, unidentified
MGGDVSDRAWAGVDVGKEHHWVVVVDKSGRMLLSRKVGNDESEIAAVIADAADLAGQVSWTLDLTTAYAALLLSVLWQAGQSVHYLAGRSVHQASVLYRGEGKTDARDAKVIADQSRMREDLPRLVPDEDLIAELRMLTAHRSDLVADRTRTINRLRQQLSAVCPALERAAEITKHRGWVVLLARYQRPKAIRRAGVERLTRTLAAAGVRNAAVIAQAAVTAAKSQTVRLPGEDVAAGLVGELAKGVIDLDARIKHADTAVEERFRRHRLAEVITSLPGMGYRLGAEFLAAVGDPGLIESADHLAAWAGLAPVPKDSGKRTGRLQTPMRYNRALRRVFYMSALTSVRCHAESRIYYDRKRTEGKRPVQAVVCLARRRTNVLFALMRDNRTWTNEAPVTTAAA

SEQ ID NO: 284277 - protein, 360 aa, unidentified
MPRLVFENQSSTASKKGVHMNKTSIIGIDLAKSVFQAHGMTSSGKQTFARQLKRAEVAKFISKQPKCIIGIEACSGSHYWAKLFKQYGHDVKIIPPSYVKAYVRVNKNDKRDAAAIAEAASREQAPVVAVKTTEQLDLQALHRVREDSVNNRTRTGNRIRGLLAEQGIVVKRGHAATRYEVALILEDASNGLSCSLREIIADLREEWLRCDDRVDYYTSRIEKIARSDARCKRLMTIPGVGPVISTLLVAYAGNGQSYRGSRDLAASLGLVPAQHSSGGKDVLLGISKRGNRQLRKQLVHGARAAYRSLEKCPESSRLGLWAQSLRASGKHVNKIVVAIANKLARIAWSCLVNERDYKAL

SEQ ID NO: 284278 - protein, 358 aa, unidentified
MKYVGIDVHKKMCQAAVLDEDGTLIDETRFANTPEGIEEYATKLTSYSDDVKAVVESTGNLWIQIHDRLETRGFTVELSNPGKTRLIAEAKVKTDKVDARTLAQLLRADMIPTCYVPGEETRSRRELLRHRVNLVKNRTMVKNRIHGILDKHGLRMPGAYPFSGGNITWLRGLSLGFMDDAILRSDLALLEALSEQVELIEAKIAALAVEDQRTRLLMTMTGVGYFSAMLIVSEVGDIGRFRSEKAFASWMGLAPVVRQSGERTWIGGVPRRSNGRLKAALVECAQTAVRCDARFRGLHERVSRRRGAGCATVAVAHEMARIMFFMLSRGEAYRGVDVGLVGRKLKDMSRKAMVGLRS

SEQ ID NO: 284279 - protein, 422 aa, unidentified
MKKHRYKAINVKQVSWEKLCSSAAGQRIVFSVDVAKEEFFGVLMKSDLTVIDTLKWIHPVQTRELVGHLLNDLGASAVEVVMEPSGTYGDALRAYFTALGVRVYRVSPKRVHDAAEVYDGVPSLHDAKAAYLIGRLHLDGASREWMELTAQRRDHQALIAELELYQSEHRRNLNRLEASLSRHWPEVGHIMALNRVSLLSLVAEYGDPKAVSSHCEEAGQLLRRTSRGALKGAQIQRILESAQQSLGIVCTVGERHWLKVLGQALLRTHRELQAIERRIQAQVKADVVLTRIAKVVGATTSMALEASQGSPLDYPNAGSYVKGMGLNLKERSSGKHKGQLKITKRGPGRPRKYLHLATLRMSRQDPVMEAWYQNKIKRDGNRKGKATVALMRKLAMALWHVARGEDFDSRKLFNVRTLGLAD

SEQ ID NO: 284280 - protein, 433 aa, unidentified
MKVLYERVAGIDVHKDMIKVAIRSPGEKPQPRKTEILEFRTFYGVLQETARELRRRGVTHVVMEASGIYTDPVYYALCEQDFEQVAVINPAHAKALKGHKTDAKDCARLAELFECGLLRGSYIPPAELKEVRDLTRYRTKTVQARTSEIQRLGKALEMAGIKLGSVASSITGTASTAMIEALIDGERRGGVLADLAIGRMRTAGKLADLSMALAGRFTEHHALLCRLHLDRIAVFDDAVGGLDKRIAGKAARWQREQRLLTSVPGFGDVVAQAWLGEIGPAPHRHFATHEKLACWVTLCPGNNISARKRKHGRTGHAGTYIKPMLIQAAWAAIRVRGRLQARYNRLVRRFGGAKNPAAKKKAITAIAHTLLKIAYQVLKSGTPYQEPGADFYTRRESPEQKHAWLERQLQKLHPGCTVTITISPPEAALPPGA

SEQ ID NO: 284281 - protein, 360 aa, unidentified
MEGNQERSDRRIVGGVDTHKDLHVAAVVDELDQVLASQCFATTRHGYKQMLAWMRAFGSLQRVGIEATGTYGAGLLRYMQKAGIEVLEVTTPDKHDRRKRGKNDDLDAENAAHAAFAGKRTVTPKSRDGMIESLRVLKACRKTAVAARRVALQMIQNMIVCAPDELREPLRKMTRMQLIRTLAAWRPDLTDYRNVTSAYRITLKSLGRRYLELHDEIADLDTMIVAIVDELAPHLVARNSIGYESAAQLLLTAGDNVQRLRSEASFAALCGVSPVPASSGKTTRHRLSRGGDRAANSALHIIAIGRLRTDPRTQAYVAKRITEGHSKLEAIRCVKRYIAREVFSLIKQRPQESNPAPTAA

SEQ ID NO: 284282 - protein, 322 aa, unidentified
MAKNVLGIDVSKDKLDVLLLLDGKELPGQFANSGKGFKALRKWLKFNGAGGGQEVHACLESTGAYSEGIATYLYEAGFLVSVMNPLRIKSYGASKLRRNKTDKADARLIADFCLTQEPEPWQPPSVEVKELQAITRRIEVLAEMQQMEKNRLEMAPKQTRTSIRRMIRNIETEIADLKQQAKDHIDGHPGLKEQSELLRSIPGIGEKTAQTLLSEIEFSRFDSGRSVAAHAGVTPKRGQSGTSLNKTTLSKMGNARLRKALYFPAITANRWSLAFREFAGRLEKNGKAKKQIVCAAMRKLLHIAFGVLKNKTPFDPNVAFLC

SEQ ID NO: 284283 - protein, 410 aa, unidentified
MQALVERGCGLDVHQATVVACLLIVRKDGKVQKQMRTFGTTTQELLSLREWLLSEGCTHMAMESTGVYWKPVYTILEGALEIVVANAQHVKKVPGRKTDVKDAEWIADLLCHGLLRSSFVPPKPIRELRDLTRYRRKLVESQAAERNRLLKLLETANIKLASVATDVFGMSGRLMLRALVEGKATPQEMAELAKGKLRKKIPELEPALEGKVEEHHRFLLRLQLDRLEAAEKDLAVLEQRIQEKLKPYEAQLTLLDEIPGVDWTLAAGIIAEMGVDMSVFGSVSQLASWAGVCPGNNESAGKRKSSRIPKGNVYLKTALVEAANSAAKAKGTYLRDKFYRLKARRGYKRAAVAVAHKILVAIYYMLSHRVCYNELGDAYLDKRNKHQLTRNLIHRLERLGYSVTLEQKAA

SEQ ID NO: 284284 - protein, 345 aa, unidentified
MEPMYYIGLDVHKRTISYCVKEGSGKIYAEGSFPATRLDLDRWLKTLPQPWTAAMEATLFTGWIYDHLKAHAAALKVAHPLMLRAIAAAKKKNDRIDASKICDCLCCDFLPECYMASTEIRERRRTLRYRNLLVKQMVQMKIKIAVLLMEAGVSYNKHKLHKAGYFRELLATDPDIDEGLRALLRSCRETVVRLQRTEGALVRSLERDPLLKERVERLMTIPAVGPITALTWALEIGEVQRLSSIKKAISYCGLCGAEKSTGNTVQRTPLSKQRNKHLQTTLIEAAKMGPRVSPDLAALYDREKQKGNPNRATLAVARKLVAYLMAVDRRQKDFLVVENEKRTAA

SEQ ID NO: 284285 - protein, 396 aa, unidentified
MCIRVSGAGRRRRKEVRTFSTMTTDLLGMRDWLLAERVSVVGMQATGAYWKPVFYLLEHDIECWLLKAWHMKAVPGRKTDVKDAQWIAELVEHGLVRPSFVPPEPIRQLRDLTRYRTEIIRERTREVQRLEKFLEDAGIKLSVVVSDLTGKSARAMLEALIAGQRDPQVLAELALGSMRGKRPVLAQALTGRFTAHHAFLTRAMLDRIDACVAMEQRLSVQIEQAMAPFRHQLDLIATIPGVSTRTAEVILAEIGADPGRFRTAADLASWAGMCPGNNQSGAATKPSPTRHADPWLKAALGQAAVAASRTKGTYLATRYRRIATRRGKKRALVAVGHSILIAVWTMLTRDLPYHDLGAKHFIERLGPHGKAKQARRLIDQLHQLGYQVSLHPAQAA

SEQ ID NO: 284286 - protein, 357 aa, unidentified
MEQAHKMVDYSNQTISVGIDVHLTSWYITVYFDRLYIKSFRQDPCPDKLYSYLARNFPGGKYRCAYESGFCGYWILRRLEELGVECIVVNPADVPQTNKGQSNKTDKVDSKRLAIALESGMLKGIYIPDIEQQADRQLLRMSEKVGCEIRDNKRRIKGLLHHIGVKIPTEFSKGNWSVKYVRWLEGLELQHKSFELTVKRSIQTIAGLHEQQRLIFKDITEMTKKERYVKLVPLLKSVPGVGRLTAVTLAVEIGDMNRFANFDSLNSYIGLCPNEFSSGEKEKKGKMSYRKHNRIRSLLIENAWTSVRIDPALSLCYRQLCRRVTNKRAIIIIARKILSRIRKVWMDGKPYETGIEK

SEQ ID NO: 284287 - protein, 351 aa, unidentified
MAHFVGLDVSVEETSVCVVDDVGKVLCERKVRTEPEDIAVLLTSIGGDYIRIGIEAGPLSQWLVNGLTEADLPVVCVETRHMKALLKAQQVNKSDRNDARGIAQMMRVGLFKPVHVKTLIAQEQRMLLTSRKLVQRKLMDIESDMRGTLRNFGLKVGVVSSIRYEARIRDLVEGFPRLAAIIEPLLTVRRVMRQQLATLHKLLLNAVRVDPVCRRFMTVPGVGPIVALTYRASVDQPHRFIHSRAVSAHVGLTPKRHQSGEIDYDGGVSKCGDSMLRAMLYEAAQSMLTHSKKWSWLKAWGMRVAQRRGMGRAIVAVARRLAVILHRMWVDGTDFRWRNGSTAVVAVVQVA

SEQ ID NO: 284288 - protein, 366 aa, unidentified
MTSVALAAERIYLGMDVSRDKIAVAVLRPGQDVPAVEVISHDGEMVRRLIGKFADRSVLAACYEAGPGGYELYRLLASMGVACDVVAPALIPKGAADRVKTDRRDSVRLVLSHRAGLLTAIRVPSEQEEAVRDLVRTRADLVDDRKRMMQRISALLQRHGRIWRAPRWTYQHRAWLGRQSFTEPALQAALCTYLAALDARDAELAVLESQLRGCWASVDPLAPMVRRLGCYRGIAELTGLTLAAEVADFRRFASAPAFMGFTGLTPSEYSSGARTRRGAITKAGPQLVRGALIEAAWAYRHRPAIGATLRRRQAGCPEQTLARSWKAQQRLHATYTKLTRRGKIPSVAVTATARELAGFVWAEMTS

SEQ ID NO: 284289 - protein, 360 aa, unidentified
MYVAGIDAHTTYLVASIVSKQGQLMQRPTRVKNSDAEKLLDLLEPYRPLEAVVETCPSWPWLHDLLVGHGHGFVLAHAKKLRAIAEANYKRDEIDAELLARMRVAGLIPAVHSKSIEQREQATLLRHRATLVRLRTMAASRIHAQLHSVGLRLDRGKLLTRAGRRWVRKEAWPLLGPEQQLWIRTQWGIIRALGPRIKKLDRRIEEMGQEIDVVALLRTIPGIGPYRGLLIATEVLPIERFPTSAHLVSYAGLAPRSSQSGLRPIRHGSIPAGANRWLRGAFVRAVVSHVGLAPDSYLTRSYEETKARLSWQVARVATARRLARAVHAMLRTGEVWRDQPVYGERGELRSGHVASTTHRE

SEQ ID NO: 284290 - protein, 341 aa, unidentified
MKNIKFFIGVDISAEYITVSALSKKDGKVESFENFENNANGFQSLLAEFQSHKITAKNSIVCMEATGVYGESLAYYLVGKNFKLVIENPYKIKRAFDISPKKTDKIDSKRIAEYASRFTDKLTFWGPRSQILEEIRIFLSQREQITKQKTSLNNALKALQKKFHKSEKALKLYEDMINNCNTQIKYIDKEIESLINSEPEYKQIIENLKTVPGVGNVLAVHMMVVTEGFEAHLNAKEIGSYLGIVPLPYESGSSIRRRTSSSGVGPSIVRKLLYLSSMSSRRYDENMKKYFFRKVAEGKSKRLVLNNIANKLIKLLIALIISKKPYIKNYFSINPMILKKT

SEQ ID NO: 284291 - protein, 355 aa, unidentified
MNDEKYIGLDVHQATISVAVMDASGKVVMESILETKAATLLEFFAGLRGTLSVTFEEGTWAAWLYDLLKPHVDKLVGCNPRQNALLKDGNKSDRIDARKLAELLRGNQLKPVYHGETGVRMLRELSRSYLTIVKDRSRVMNRLKAVYRSWAIPCAGRDVYSRRHRAQWLAKIREAGVRRRAERLYEQLDMLQHLRQQARRELLAEGRKHVISAKLRQIPYLGPIRSVLAVALIQTPHRFRTKRQLWAYSGLALETRTSADYRYVEGQLRRSKKLVSIRGLNKDHNHDLKGLFKGAATMASVRPGPFQDFYHAALAKGIKPTMARLTLARKMAAITLTLWKKGENFDAEKLKSQAA

SEQ ID NO: 284292 - protein, 339 aa, unidentified
MELYCGIDLHSNNSHVAIIDDQHKRVFCRKLANDPKLIENAFAPYRDRIRGIVIESTFNWYWLADLLMEKGYPVHLANPCGIQKYSGLKHADDKHDAFWLAQMLALKILPEGYIYPKQERPLRDLLRKRSHLVRIRTSLILSLQNIVMRNHGIKIRSNDLKKLTQDPVAELLKDQQELALAGSASKETIDFLTRQIQRIEAAVRRKALSKEPFSKLLTLPGVGDILAMTILLETGPIDRFKAVGHYVSYCRKVSSRWTSNEKKKGKGNTKNGNRYLSWAFSEAADHARQTHEPSRNFYNRKLNQTNASVAHNALAHKLARAGYYIIRDHVEFQEGKMFR

SEQ ID NO: 284293 - protein, 405 aa, unidentified
MQTIIAFDVSMGKSYMVIYQNGQCVEEKEIQHNKKDFQALHVTIQSLFMRYGQYPEIVFEATGVYSKVLESFMQANQYPYYLLNPLEAKQQCDRLRVHKTDRSDAHRLAQTHLTSNRKPKVFESTEYQQLRVLSRFYEEIDKEIILIKNRLHNALQLTFPELASIFPNQNSALYLNVLLLFPHPELVLSCSRTVLKNKLLANTKKNLSSERALKKAEELVSIASSSYPAVTLEDVTVSKVRYYAEKISHLLCKKQEIIEEMEALASPLPEYDILRQIPGIGSSSAVRFIAEAGDVRRFTTSRELNAYAGIDIRRYQSGKTFYSDHINKRGNPKLRKLLYLMIQNMLKKQQNTSNHIVHYYYKQKEEPYNKCHKVASVACINKLLKTIHYLTKTNQMYDYSLATTS

SEQ ID NO: 284294 - protein, 351 aa, unidentified
MLIVGCDYHPSVQQIAWLDTESGECGERRLLHSNGEAETFYRKLKEQGVSVRVGIEATGHARWFERLLAELEYELWVGDPAQIKAKRVRKQKYDQEDARLLLKLMMEDRFPRVWVPGVENRDLRQLLWHRHRLVQMRTRVMNQLQAVALNEGVRRKKALWSDAGRSQLESFRLGPWATRRRQDLLQLLDQLNSSIAPLTASVEQQAGQHLEAQRLMTHPGVGALTALAYVLIIGSPQRFRCGKQIGSYLGLIPCEDSSAGRQRLGHISKQGNSLLRFMLVEAAQAAVRSNADWRREFLHLAMRRQRQIAKVAMARKLGVRLYWMWRKGWDYETFLQFGSHVGQPEVGYGVK

SEQ ID NO: 284295 - protein, 343 aa, unidentified
MKLHVLGIDLGKTVFHLVGLDSTGRVVIRKRCSRTQLLAFTANLQVQLIGMEACSGAHFLGRALREQGHEVRLMPAQYVKPYVQTNKSDYLDAEAIAEAVQRPRMRFVPIKSEEQLDLQALHRVRERWVMRRTAVVNQIRSLLLERGLTLPKGRSHLDEQLPRILEDAELNLSDSFRVLLAQLKLELEQLAARVEEMDRVIQKTARENEACQRLTEIPGVGPVTATALIAAVGNASAFGKGRNLSAWMGIVPGEYTTGGKQKLLGISKRGNKYLRRLFVQGARSVLQQRHKQAPGLSDWLAQLLARTHQNVVVVALANKLVRMAWAVLCKNERYRAPVLAITT

SEQ ID NO: 284296 - protein, 433 aa, unidentified
MLKLNYMSTLFVGIDVSSKTNAVYAMDFEENKYISSSFGNNQPGADKLVNMIAECMHKHKNLNTILIVLESTSVYSVHISNFLSTSEVLMPYKPYVFCVNPKAASNYRKSYIGMEKTDPTDAYLIADFGRVGRTKKLEPWRGGQFISLKRLTRHRMHLSECITREKTYMVSNLYLKFSELQLLEGDDKPFGSLYGATSSAVLTEFLSPQEIIDMPEEDLLTFLAGKSRNRISDLSKTSELLRKAARDSYRLDKCMYEPLSISLASSFNCIHAYQKEIKLIEQAIEKCINGMNPNALIILQSIPGIGPIWASGILSEIGDITVFHSSDALAKYAGLYWPKGDSGDFTSEDNKMSKAGNPYLRCYLGEAANSVRKHIPEYADFYARKYAEVTKHQHKRALALTSRKLVRLVFGLLVKNQLYTGEKLDTEYNIESN

SEQ ID NO: 284297 - protein, 403 aa, unidentified
MHKSFLVATIIKTPAGNLQPDYQKKRFSTFNSDLNRFADWLRENACLDVCMESTGKYWVPVFNILEKRGIRVVIANPKWVKAVKGNKDDTKDSKWIGDLFRIGLVKSSFIPAKDIRILRELTRYRYKLTSMKSSEKNRFQNAFTVCNVALDSVVSDMFGKSATAITDYLTSDENFDARHCVSLLQRSLKKKADDVVEAIEGYEITPEQKTRIGIIRDHLHYIDALISRVDACIDVMVQKYEGYISLLCTIPGIDRKSAITIISEIGADMTQFGSSKRLCCWAGLAPGSNESAGKKKSVRISRAGVYLKPALVQVAHAAVKDKASPYYALKYERITKRRGKKRAIIAIARMILTAIYSMLSTGETWNPVDLFKIDMPVHLREQQRVKAVKQAIRFLETQGLKVS

SEQ ID NO: 284298 - protein, 401 aa, unidentified
MPTMRDNGERVKRFRELKATLRTNRQRLLVGIDVAQAAHVVHLRQAHTGVVTPRLTIPNTRRGFTQLWQAITRAQRTTGCREVVVGLEPTGTYHQALAAFLEHHGADVLLLSSSVAYWNRRTHDGTWDKNDPKDAMNCADLLEQGKVLFYSQPTGPLAELRRLVKLLRRARAELGSCKTRWRTSLRPTLAPSGEPLPNRLRVELPAVLQAWERPTRGYPPEPRGRLPLGLATACADLGAQVTAVQARITAIEAALTPVAEPLPAYRLLRTIPGIGPTVGAILVAEIGDIAWYTTFSQLRKLAGLDIVHVQSGQYAGQHRISKCGRGLLRWALYQAAGGLARTAAGQARLAALLAKRRGDRFAFLKASVELAAKQLRVVWGVWRSGQPYDPTRAGGVRRQRR

SEQ ID NO: 284299 - protein, 319 aa, unidentified
MTRTFIGIDVSKDFLDAHARPASTRRRFPNTAAGIAELVAWAKPLAAERIVFESTGPYQKAAVGALLAAGLPAVVVNARQVRDFAKAMNQLAKTDAIDAGVIAHFGEVATTTVRPLPSKEVRDLQELYDRRGQLVGMLSMEKNQRHSATAAGASGKVLKSIDKHIDYLKRQIEDLEGRMDKIVESSAAFKARDEILQTITGIGPQVSRTLLAYLPELGQCSRQKIAALVGLAPFNDDSGTHGGARHIRGGRSKVRRGLYQAAVAAIRHCVGMRAFYASLKKRGKASRVALIAVARKLLVLANALIRDMKPYQAPANSVC

SEQ ID NO: 284300 - protein, 418 aa, unidentified
MKVEYPICCGVDVHKTFLVATIITTQGFTPHYSKRRFSTFNNSILQLKQWLIDNNCFDLCMESTGKYYIPVLNLLEDSIHVTVANPKWVRAIKGNKDDVKDSKWIGDLFRLGLVPGSYIPDRPIRILREYTRYRSKLVSCKSSEKNRFQNAFTVCNVALDAVVSDMFGKSASSITDYLIKSDSFDPVHCTSLLKGKLKKEADTVIESIEGYQMTKEQKERMVMVSSHLDFLHQSLEEIDEKLDKMVVPYQNAITIYCTIPGVAIASAITIISEVGMSMSQFANSKRLCCWAGLTPGNNESAGKKKSVRITRAGVYLKPALVQVAHAAVKSNISPYYKSKYESISKRRGKKRAIIAIARMILTAIYNMTVTGEAWNPSDLYKIDMPREMLEKQKEKAVKQAIKLLTAEGIIKPSNITVA

SEQ ID NO: 284301 - protein, 338 aa, unidentified
MELYVGIDLHANNCVVLVLDEQDHVRYARRLPNDLAAVIAALRSCTGTVHAVAVESTFNWYWLVDGLQDAGFEVKLVNTAAVKQYDGLKHSGDFSDARHLAHLLRLGILPTGYIYPRAERAVRDLLRKRSQLVRQRSTQILSIENLIARNLGQHAGGSQIKRWEDENIDAMALLEEQKLAVKANLAVMHCLDEQVRVLESSVLAKAKLREDYQALKTVSGIGVTLALTIALETGDITRFASPGDFASYARTVDSRRESNGKKKGQGNAKCGNKYLAWAFIEAAHFAVRYDALIKRWYQKKCATKLSVVAIKAVAHKLARACYHVMKDGKPFEAARAFG

SEQ ID NO: 284302 - protein, 291 aa, unidentified
MARYLGVDLHRNNFTVCTIAENGRRYFREYDIHSLNYFAGRLRPSDQVAVEVSTTTRLFYDAVAPHVEHVAVVNSSQFDVIRKSVKKTDRNDAEALALFLSKGLLPEVRMKDKLHAELASLTQTRDTLVKQRTALKNKINNIMAARGLSPRREQLSSEKGLRAVEGLPLGPVVLVEVRALVAQIRSLNQTISELEKTIKTEGEKLPGHKNLKSIKGIGDTSATILLSIIGDIDEFQSEGKLASYFGIVPRVRNSNETEHSGRITKRGTKLGRTTLVQLSLPKNTSEGDDSH

SEQ ID NO: 284303 - protein, 323 aa, unidentified
MQTPSAVLNIGADVAKDAIVVACSEGSFPVREVANQRTAVLAFLKGLPAGSRIGVEATGTYHEVFAEVAHQLGFLVFVLNPKDTRHYAKAVGLRGKTDRVDAELIARMIAHEHTKLHAWIPPTPQHREIDRLIKRRATLISLREAVEMSLHELDGFAADLKTLRTRFNQLIARIDLRVKTLIDANPDRKQNFTRLCTISGVGPVIGSALVNTLERVPVKSADAFVAFTGLDPRPDDSGQHRGKRRLSKRGPAELRRLLYLAALSAVKTKPWRPLYEHYRARGLSSTAALVILARRIARTAWSIYTYKTEFDPARLTNPVLRAH

SEQ ID NO: 284304 - protein, 342 aa, unidentified
MRRKIGVDLHKNSFRVCYYENDKKYDFETYRVSVKGLEGFKKGLKKTDELAVESTGNTGHFVRAIEGEVKRVRVINPFQFKIISESVKKTDDEDALKIAKFLSKDMIPEVRMKSKAESQLGSLIGTRDKLVKLRTALKNKVHNILNANGIVTKTELLTSEKSLDKVLGKGLDASYQFELEIIVGEIRHLNEAIAKIDEQIKDRGRTLKGYENVTSITGIGNLSGTILLNAIGDVKYFRDEKALAGYFGIVPRIRASNETVHMGRITKMGNKIARTALVQSTLIAIRYSPYLRAFYDRLKAKKGSGKAIIATARKLLGIVYNTLKNNWVFEDFGNYKLAPSCS

SEQ ID NO: 284305 - protein, 398 aa, unidentified
MTESSDCESVQVFIGVDVGKDTHHAVAINRSGKRLFDKALPNDENKLRSLISDLKQHGQILLVVDQPATIGALPVAVARSEGVLVGYLPGLAMRRIADLHAGEAKTDARDAAIIAEAARTLPHALRTLKLADEQIAELSMLCGFDDDLAAQTTQASNRIRGLLTLIHPALERVLGPRLEHPAVLDLLQRYPSPEKLASLGEKKLAAQLCKLAPRLGKRLAADIAQALAEQTVVVPGTNAAAVVLPRLALQLITLRKQRDEVALEVEQRVLAHPLYPVLTSMPGVGVRTAARLLTEVACRAFASAAHLAAYAGLAPVTRRSGSSIRGEHPSRRGNKALKRALFLSAFAALRDPLSRAYYTRKMSQGKRHNQALIALARRRCDVLFAMMRDGTFYTPQGS

SEQ ID NO: 284306 - protein, 319 aa, unidentified
MAQNDLIVAGIDVAKDKVDGCIRPLSLRRTFASTVEGRRELASWLRRKKVGKAVMEASGGYEREWAKALRDAKIEVRIVDPKRVRDFARSAGRLAKNDAIDAEMIAWFAETFDEAPGQAHDAAREELAQIVNARLGLLDLQTRLLNRGEHAGPEPVQKMHARLLKKIAAEVAKLEAVIAAMIKATPRFAELAEIIESVPGLAETTSATLIAKMPELGQVNNKIGAALLGAAPYDDDSGRRRGERHIKGGRRKVRNLFYMACLGAATQHNPVLKAFYDRLIAKGKEKKVALVACMRKLIVILNIMIARREKWDARRYAVS

SEQ ID NO: 284307 - protein, 345 aa, unidentified
MRYYAGLDVSLEETAICIVDEVGKIERELRASSDPAALIDAFAALDLPIERIGLEACSLASWLHQGMARAGLPVLCIETRAAKAAMGAMPNKSDRNDARGLAQIIRTGWYRAVHVKSPPCRSARALLGARRMVLNKQRDIENEVRAVLREAGLKLGTPGRKMFAPRARELASADAGITDIVEPLLAILATMAIELARLTKRVLDAVRVEPVCRRLMTVPGVGPLTALTFRATVDQPERFRRSRDVGAHFGLTPRRYQSGETDIQGRISRCGDELARTALYEAAHTLLTRCTKWSTLKAWGMRIAQRRGLAKARVAVARKLAVILHRMWTDQTDFRWGKASAVAAV

SEQ ID NO: 284308 - protein, 339 aa, unidentified
MRLYVGVDLHANNNFLAMVDRKGKRREQKKLPNDLSVILEFLRPHQKEIVGLVVESTYNWYWLVDGLMEGGYPVHLANPSAIQQYSGLKHADDKHDAFWLAQMLRLEILPEGYIYPKEERPIRDLLRKRRHLVRLRTSLIISLQNIISRNCGVQFRVNEVKRLKEDRVSPLLEGNEDLALAGKASKEIIDHLTRQIRKIEATIVHRIELKEGYRFLLTLPGVGKILALTIMLETGPIGRFAQVGDYVSYCRKVPSKWTSNEKTKGQGNQKNGNKYLAWAFSEAAEFARRYDAQARAYYTRKMRKTNFMVARSALAHKLARAAYYLMRDQVPFMPEKLFG

SEQ ID NO: 284309 - protein, 426 aa, unidentified
MRMPLMNSIHINDTHKPAPTHLLLAVDVSKRRLDAYSRYEQGRCEYDCIDSFANDVPTIDAKLAYYGRQALALGYQGLDIVVEPTGRHEQKLTQAAHARGHTVWMVNPEHMYKAGVIHHGDDGKSDPLDGQVLHMMARMGKVSRWVPLPMPWQKLRSLGQWLEDATLAAADVRIRIIGLRRELFVDYQQSTDLTWGATGKALQEVFGFDPWAITQGTYHSYARQMRGYNPRIPERGLAGIWQQALQSGNVECHPQQRALLLEQLTHLWRNWEYQEQRKHELGVQMVGLVNELDPEHWIPPLWPGFSQVMRAKILAETGPLRGFPHWRALVAYAGLKIRMRASGTYRGKDRITKKGRILLRKHLGQATFTLTRKDRLLGPYYHRKLGEGMPPRKAKVACMRKLVKILYGTARSKQEFSKERVYRSAG

SEQ ID NO: 284310 - protein, 359 aa, unidentified
MLTQSNKIDFNGQHFYVGLDVHLKSWKVSIMTEKLTLKTFSQDPKPELLHHYLVKNFPNGIYHAAYEAGFCGYWIHNKLTALGIDSIVVNPADIPTTDKEKVNKTDKRDSKKIARSLRNGDLKGIHVSSLKTLEDRCLVRMRRTLAKDLSRNKNRIKSFLYFHAIEMPEAFNKSATHWSKRFMNWLRSIEFTESSAKKSLSLLINESQHLRLTMLDAIRGIRELAQSEEYCNLVKLLRTIPGIGTLTAMIILTEIETISRFSGFDQLCSFIGLIPSTNSSGEKEITGEITHRGNNFLMSIIIESAWIASRWDLALNKSFHDYCKRMQPNKAIVRIARKLLNRIRFVLKNNQPYVFSVIK

SEQ ID NO: 284311 - protein, 332 aa, unidentified
MKKVQFFVGIDVSKATLDVFIHGLNLYFVVENSIQGFVCLLEKVMKGTKCKKEDVFFCFENTGKYSRMLSVFLQSENISFTMESALQIKKSLGITRGKNDRIDASRIAHYAYEKRESLAPTILPGAKIDQIRSLLSLREKLLKHRTAYKNGISDLHDCYEDGESELIKEVQQRLISNLNDEIKKVEQKIEDIIESDESISRNYKLILSIRGVGKILGFYLIGYTANFTLFANARAFACYAGIAPFSYSSGTVKGTPRVHPFANKMLKALLNLAAMAAIKYPGEYLQYFNKRVNELGKNKMSTLNIIRNKIVYRVFAVVQRQTPYVDLLKFAA

SEQ ID NO: 284312 - protein, 343 aa, unidentified
MDQHIGLDVSLKDTSVSVRQDGKRIWRGKCASDPKLLAEVIRKRAPNAKRVVFETGPLSVWFFHALTAEGLPAICIDARHAKAALDMAANKTDANDADGLAHLAEVGFYREVRVKGFDSMLMRTLIAARRQLMKMRVQMSNQIRGLMKTFGLVVPKGVGSVFERNVLTLLEGENDLARIILPLLKAWSDIRVRVAELTKQLVTMAGTDQRCRLLTSVPGVGTVTATAFAAAIEDPINFKNSRAVGAWVGLTPKRYQSGEVDYEGHISRRGDAKLRTLLYEAASVILNRSTETNTLRTWALALKERLGFKRAAVALARKLAVIMHAMLTSGELFDPNAGAAVPT

SEQ ID NO: 284313 - protein, 314 aa, unidentified
MPHYHNFIGIDIGKFNFVVSVLGQKDTKEYENTMSDIAQFITDYKSILPDGLTVLETTGGYELELLYTLCQHHFPVHRADTRKVKNFIKSFGNSAKTDALDSKALANYGKERAERLELFSPQSKQAINLFHLVQRRADLTKIVVAEKNRLKSPSYEIVEESCKILIATCSAQVELITQQIKELIASDPILKEKLKILKTIPGIGDVVAFNLLILLPELGYLNRKKIASLAGLAPQANESGRFKGYRRTGYGRNGIKPLLFMAAMAARNSKSHLKEFYERLLANGKKKMVVLTALMRKILIIANARLKELAYAKT

SEQ ID NO: 284314 - protein, 325 aa, unidentified
MPDTAYLGIDIAKRKFDVALARPDGKVRVKACPNTPAGYTELVAWIARQHPGAVHVCLEATGPYGEPVAAALADAGYTVSVVNPAMIEAYARSRLTRTKTDRVDARLIAQFCATQQPPPWVPLPREVRTLQAVVRRLDALEGMRTQERNRLVAEPADAVIRASIQHVIDLLEDEMATLRARIHDHLDQHPDLRAQRDLLTSIPGIGEATAAVLLAEFGPLTRFRQAPACAAFAGLVPRLGESGTSVRRKPVLSKLGVPALRKALFYPAMVALRHNPIIAAFGQRLRAKGKHKMVVIAAAMRKLAHLAFGVIKTGQPFNPDHLVRR

SEQ ID NO: 284315 - protein, 354 aa, unidentified
MKKIFIGIDFSKEKFDATLIKAEGLKECAPSVHEVFDNKTSGYRRLVKWIKTHAEGFTVDTWLFCGENTGGYSIGLSNYLYASGYDMWLECAYKIKHSVGIQRVKNDKADSRAIAEYAMRNYDKMILYKPQSTSLTCLREVFLYRHSLVRQKVALQVRRDEKRLTQEKSGARAFMSFTSKHLITEVNKTIAKCDEKIKEIIASDDELKEVFDIITSMPGIGVQNATCLMVYTDNFQRFDLDSRKIACYYGIAPFGRQSGTSVNSRPQVSPFANRMIKSLLSQAALAAIKFDANVHSYYQRLIERGKHPLLVHNNIKNKMLHILVAMVRDRVKYNPDNVYRTNNEVSLAPQVLNI

SEQ ID NO: 284316 - protein, 276 aa, unidentified
MIIIGCDFHTRYQQIAMADDETGELLLERRLDHESGEAQAFYRNFSITVRVGIEATGPIHWFERLLAELGHELWIGDSAKIRASEVRKQKTDERDARLILDLMLANRFPKIWVPTPAERDLRQLLWHRHKLVCLRTMLGNQLHFLAMSQGLCRKKKLFTKKGRVELTGLALGPWTRRRREELLKLLDQLDPAITELDRAVLEEAQRRCDAVLLMTHPGIGPVTSLAFVLAIGPVTRFSRSRKIASYLGLNPSEDSSGSDGGPEPSASRATPWCAGC

SEQ ID NO: 284317 - protein, 341 aa, unidentified
MQITTVGLDLAKNVFQVHGVDAEGKVVVRRRLRRAKVREFFAGLEPCLIGLEACGTAHFWARELRALGHEVRIMPPSYVKAYVRRGKNDAVDAEAICEAVTRPTMRFVPIKTEDQQSALMLHKARELLIRQRTMLVNALRAHMAELGMIAPQGKEKIDDLIAVIEDGEDESIPALAKAALKPLVAQLRAAEEAIAAADAEIMAWHKGNEASRRLETIPGVGFRTASAIAASVPDPSFFRSGREFAAWLGLVPRQNSSGGKERLGHISKQGNRYIRSLLVLGATSTLRSARANRAPGADWVNGLLERRPPRLVTVAMANKTARIAWALLAKGETYRAPGAAA

SEQ ID NO: 284318 - protein, 342 aa, unidentified
MNATTVAVDLAKNVFELAAADEHWKVVERARLTRGQLERWFQNRCVRLVVMEACATAHFWARSLRARAIEVRLLPAKYVRAYVKRNKTDAADAMALLEAARASDITPVAVKSVEQQALHRLRSGWMSTRTRRLNTLRGFCREFGMEVSVGAARGLAQIARLLADEHSALPELLRTPMRLALEEIRLMEARIDGRERELAALAHQSEACQALATVPGIGLLTSTAMVAAVCDPSSFRSGRHYASFFGLTPREHSSGESRYLGRISKRGNRYVRTLLTHGARSVLRAATVARRAGRKVDRLRSWALELQARTNHNKATCALANKLARIAWAVWVKHERFQSQAT

SEQ ID NO: 284319 - protein, 421 aa, unidentified
MKKADTRKVRGVRDDTLIVAIDVGMEMNRGYCTTPDGRSTKPFKFGNTREGLDTFWGMVMASKNRFKCNEVIVGYESTGPYGEPLVHYLIKKPVKVVQVNPMHTKRVKEINDNSPLKTDDKDPRVIADIILLGHTLSIVIPEGDAAYLRRLNNSRERHVRERTALVNQLQQLVFLLFPEFKKVIKDIKCRTPLYLLKKYPTPEAISVLETHVLGEEMRKQSRGKFREHHADMLITLARDTIGIREGVLGLSMDIRHILVQLEMLKNLIAEIESEMEMALGRIPYSSKLLSIKGLGVVSVAGIIGEIGDFKKFGTQPEIMKLTGLDLYEISSGKWKGRRRISKRGRSLLRKILYYAAIQTIRKNGILHDYYTRLIDRGMKRMMALVAVSGKLLRIIYAIVRDDSEYSVNFESIKRQVIKKAA

SEQ ID NO: 284320 - protein, 343 aa, unidentified
MKVTTIGFDIAKGVVQVHGVDAAGEVVLRKRMSRAGALKFFAGLKPCLVGMEACGGAHFWARELTAFGHTARLISPIYVKPYVKRSKTDAADAAAICEAVSRPHMRFVPVKSREDQALAQAYKTRGLLVAQRTALINALRAHLTEFGVVAPLGPAGAARLIGLVRGGEAPLPELARLTLLELADMIEATQARIAAFDARLKALAAADEASRRLMKVPGVGPVAAGTLRALVGDVTRFRTGRDFAAWLGLTPRQNSSGDKVRVGAISKAGNRELRTLLVMGQLAVLRYALANPAKASPWLAGMIKRRPPLVVAVAMAAKTARVIWAMLARGECYRPPRPSTAAA

SEQ ID NO: 284321 - protein, 355 aa, unidentified
MHHTLNTQPVKVIGIDLAKSHCDFVCYGPNRKVCQVGSNVSYPELFEFLANLPKATVLMEACKGSHYVARRCADLGHDSRLVNPADVKCYRGYRHKNDLRDAEVIGALEYSPITTFVQAKTTEQQAAQLILRAYQGRQRIRIQIGNRIHAALEEFGAPARKSKVFLQSALVEHLENNRDKFPQLAYEELIDLRDDWLDAWERELKSLRRINAIAAQNPVTRLLMTIPGIGPITSLALLVHTGAPQRFKNSRQFAASIGLVPQQYSTGGKDTLLHITKRGSKKLRSLLVEAAGTFLRKREKQANDPLGRWILKLIGSGKKYGVQACAIAAKLARIAWSMMMTNTEYGKAKCQPTVE

SEQ ID NO: 284322 - protein, 345 aa, unidentified
MGVDVSKRKCRAAVIDGDGVLVDEFNFSNDFEGIKLFVSRLSEGNAVVMESTGNLWVNLYEAVEANGVKAVLANPLKMRAIASAKIKNDKVDARVLASLLRGGLVAECYVPPRDVRELRALVRHRVQLVKSAGMVKNRVHSLLDRYGFRREFSDLFGKAGLEWLKRLELKPLDRLLLDSFVQQIECLERLTRNVDVEIGPRASVDEDVRLLLSLTGVGVYSALLIKSEIGDIRRFPNYKKLIAWAGLAPSLHQSGSVERRGRITKQGSKLLRWVMVECARIAVQYDPRLGEFYERVKRRRGEQKALVAVACKMLKIVWFMLTRREPYQSRNSRLYDEKIYRLSRY

SEQ ID NO: 284323 - protein, 430 aa, unidentified
MKSNTQNAKIEAITEKTLVLGIDVGSETHYARAFDYRGVEYSKKPFKFSNTEAGFVTFKAWVLDIKEKHGKDKVIPGMEPTGHYWFNLGKFLQDNEMKPVLVNPHHVKKSKELDDNNPTKNDRKDPKVIAGLVREGRYMIPYLPDGVYADLRTASNIRFQLQAELTRIQNRISRWFHIYFPEYKTVYGKPDAKSGILILKTAPLPEDILTLGVDGVNQIWRDAKLRAVGKARAKTLVEAAEHSVGNKEGAVSARMEIRMLLEDYESRNIRLQEVMGLIEGLVNQIPMAEKLLEIKGVGIRTVSGFLAEVGDISRFNNPKELQKLAGLALVENSSGKHKGETTISRRGRKRLRYLLFEVAMSLVAKNQEFRELHVYYTTRKLNPLKKMQSLMAVATKLLRVFYAMLTKGVDYDPKKMVSDIKRPAAYLQTE

SEQ ID NO: 284324 - protein, 337 aa, unidentified
MTLFCAIDLHSNNSVVVILDEDDTVLYQERLPNDLPAIERALSPFQNELYGVAVESTFNWYWLVDGLQAAGYHVMLVNTHAVQQYKGLKHTNDVSDARWLAHLMRLGILPTGYIYPYEQRTLRDLLRKRLFLNRERVMHLLSAQCQIRRCTGVQVNCTELKRASPQLLQVHHHPNLRFALRCHLVMVQALNEQIELIERHVAKQTQDNPYLQSLLTVDGVGPILGQTIALETGDIDRFSTVGQFASYCRCVNSQRLSNGKAKGRNNTRNGNKYLSWAFVEAAHSIIRHNKVAHRFYQRKRAQKNGALATKALAHKLARACYYVMRDGVVFDETRLFA

SEQ ID NO: 284325 - protein, 428 aa, unidentified
MNKVDRIRLEEFRQLRQEIRGSKDYLIVGIDVAKERHTAFFGTATGKTLFRRLVFENNREGFERLLTQVEAMMVGQGLDKVVFGLEPTANYHKPLGEYLIGCGYGVVLVSGKSVKRNRELLDGRWDKHDTKDSANVADLISQGKCLYYEYPEMGLRQLRSLLSLKRRLKKQEHAQKVRIRNHLLAQYFPEFDPYFSPSESQSLAIVKWCSAPSVIAGLEYDEFVRLVAPGKKSIGQQSRLRAIWQKASLSIGCEAGQAVAFEAKLMVEGLKQIRGALADTEAKIKEICLGFPEYPYLLTIPGFGPDVSSKVLGAIGDPFRFNRASQVIKTAGLDLSANRSGNRSDGVVPVISKNGKADLRYALYQAALIASIRNRDFVVWFTNRLRGRQREKGIKTKMRVKLSAKLLVIAWTLMKKKEPFDPYYLKTE

SEQ ID NO: 284326 - protein, 320 aa, unidentified
MQQDPIYIGIDVAKAQVDVAVHPTGMRWQALYTEEGVQELISRVEALQPTLVLLEASGGLEIPLVAALANAHLPVVVVNPRQVRDFARATGRLAKTDSLDAQVLAHFAEAVRPEPKPLPDAEAKALAALLARRHQLVAMLVAEKNRLGKALPSVRSRIQTHITWLERELEDTDDDLQTMLRQSPVWCEKENLLRSVPGVGPQLALSLLAYLPELGTLDRKRIAALVGVAPFNRDSGPFRGRRKVWGGRTRVRTALYMATLVASRHNPVIQAFYQRLLAAGKPKKVALTACMRKLLTILNAILKNSTPWRAAIPQITGPCS

SEQ ID NO: 284327 - protein, 427 aa, unidentified
MSAAGSLSAVSCRAVSSSAVSSSAVSSSAVSSSAVSSSAVSSSAVSSSAVLGSGVDLGLVVDVVVGVDTHADTHTAAFCDGRGAVLQVATVGTDVDGMSALLEVLEGVVAAVDCPRVVFAVEGSGSYGAGLAELVRRWGFTVIEVRKAGRPAGVAKNDANDAVQIARAALRQLSSPDLAERIAVPREGHIRAGLRALCVARDKHVAHKTAHRNQFRAVILTGPTPVRQRLRGLTERERLAAVARMRPRPVLPQPGKDLAAAAEAAQAYAVAQTYAVLAAVAATITHLDETIKKFDLAIDAVTARYAAPLRDQVGVGPITAADLLIGYSHDRFRSEAAFASLAGVAPLEASSGRTTRHRLNRGGDRHLNAALHRIVLTRRCRGHQPTLAYIARRAEHDRMNDKEINRCLKRAVARNMYRILHTLPELP

SEQ ID NO: 284328 - protein, 420 aa, unidentified
MHEERRWFVGIDWGSQEHVVTLCDGDGNKIGQRKYAHGGTGLSDMIAWLLKASGGKSGEIHVAIETPHGPIVEALLERGFNVYSINPKQLDRFRDRFTVAGAKDDGRDSYVLADSLRTDMLLFRKLSVAEPLIVELREWSRIDEELKVDRVRLTNRLRDQLWRYYPQMLELGDLDEDWMLELWEAAPTPQKAARTSKAAIQRILKKHRIRRFDAAQVLNELRKPALSVAQGTIEAATAHIKVAIERLRLVNRQLADAKLQLDQICKKLAEPVAGGNGENVLGQRQEHRDATILDSLPGVGRVVLVTMLAESPDALQRRDYHALRGLYGTAPVTRRSGKSCIVKRRRACNRRLRNAVFNWGAVAVQHDPISKAKYEALRARGHGHARALRSVVDRLLYVACTMLEKGTLFDPSLATKNAAA

SEQ ID NO: 284329 - protein, 357 aa, unidentified
MKYIGCDFHPSFQQIAMLDKETGEMVERRLLHTEEARAFYEGLQGPVIVGIEASGNTHWFESLLASCRQQLWIGDAAAIARQEGRKQKHDRRAAALILKLMLENRFPRIWVPTVEERELRQLLMHRHHLVRMRTQVKNQLQHIALNQGWQKKRKLWSEAGLELLRNLKLGPWTQRRRDTLLEMLKDLEEKIRPLDQAVAKEAEQREAARRLATHPGVGPVIALATVLTMGEVNRFADSRRWVSYLGLNPSEHSSGQSRRLGSISKQGNPFLRQLLVEGAITATRGDKDLARTSARLKARKHHGVAKVAVARKLAVRLYWIARTGKSYPEVVRMQGSQSHPVAETKAENLNRPPASHQ

SEQ ID NO: 284330 - protein, 311 aa, unidentified
MESGPFVGIDVSQEYLDVAVSGQKRVLRVANDEAGLQSLMRQLQEKELELIVMEASGGYERRAASMLLAAGLPVAVVNPRQARDFARSLGQLAKTDAIDARVLARFAEVLKPAPSRLSEEAAEQLRELELRRRQVVEMIIAERNRLRTAPRTADRIQEHLRWLEEEVKRTEKEIEGVIQSDPGLEAKAAILQSVPGVGRAVSATLLGSLPELGLLNGKEIASLVGVAPLNWDSGKLRGKRAIWGGRAHVRSILYMAALVASRCNPVIRALYERLCAAGKPKKLALVAAMRKLLIILNSMLRTRTLWNASTL

SEQ ID NO: 284331 - protein, 428 aa, unidentified
MSNQEIIRRRQFCQISKEISGSDQYLVVGIDVAKNKHHAFMGTATGHCIFKRFVFENTIEGFSRLLETVEQLKARHGLSKVAYGLEPTGNYHKPLARHLICCGCNVVLVAGQAVKNNRQLLDGRWDKNDTKDAANVADLVSRGRCLYLDWPSDQIIDLRQLLSLRRRLKKHEHSLRMRIRNGLLALYFPELDSYYGSCESETLAIVRWCLDPDKIAMMDHGQFFKLVTRIRRGVAQKLRLNKIHQAAIDSVGCPMGPAGEFEAELLVDSLDYVRHQIRDTEDLIEQISMDYPEYSYLLTIPGFGRYISARVLSAIGDPFRFKNRRQVLKMAGLDLCANRSGKTSDSAIPVISKKGSSDLRYALYQAAHVASSRVNHFRAYFANMLRGREREKGIQTKMRVKLSAKMLVIAWTLMKRKEVFDPTYLNIA

SEQ ID NO: 284332 - protein, 352 aa, unidentified
MEFVGIDWATRRAAWCAVDAGGRRLDEGVVSADEDGLLRLVAARGVEVTAAVEMMSGAAWIAETLRGVGWTVRVADARRARALAPLAAKTDRIDARVLAELARRELVPEVWVPAVADRALLEQLLRRMHLIRLRTSAKNRIFGLLSQWGVRAGVVSLRRPGAVDALADRGVPEVWRASIAEAIAVIEMLDARLAPIDADLVRLARGDERARLLRTIPGVGWLLGLTFASEIGEISRFSSAGKLVGYSGLVPRVRQSGESSRTGRLAKAGSPLLRWAAVEAAQHAWRPQNPWHRLYVDVRARHGHGNAAKSAVARKVLIAVWHVWARQQPFKPTAAAAAAPIVPASSGQPLAA

SEQ ID NO: 284333 - protein, 346 aa, unidentified
MDKFDSCGIEVSAQELVVALCRDGRAERLRSFPNSAEGHAAILRFLNSGEERVRVALESTGLYGLDLAYALHEDAHIEVMVANPRAVRHFASALMQRSKNDHLDAVVLREFAARMPFQAWVAPSADCFALCAVTSLLESLTEQCTAEKNRLHAASLSVAFPAAVRRDLQRSVRSIQRAIVRLTREAQRILEGDPLLNSSYHLLLTAKGIGPTSALRLLAETALLSEDLDVRQWVAYAGLDPREYQSGSSVHKKVRISKTGNRHLRRALYMPALVAVRHEPHLRAFYQHLLAQGKCKMQALVAAMRKLLHAVYGMLKHRQPYDGAKLYRLVMDLPAPSSGHCSAEAA

SEQ ID NO: 284334 - protein, 421 aa, unidentified
MKAAQTILHVGLDVHKDSIAVALAAQDGSLRRYGEIPGHIEAVDKLLKRLDRADQQIRLCYEAGPFGFVLCRHLRRKGYVCEVVAPSLIPKRAGDRVKTDARDAEQLARLFRAGELTAVRVPDEADEALRDLIRGRLSAVFEQHRARHRLKGFLLRLGFRYPGKTSWTPAHMNYLSKLKMSHPAQQIVLEEYIQAVQSATERLDRLTTQVQAQLPGWKWEPVVRALMCLRGVSVINGMTLVAEIGDIDRFESPRQLMSFLGLTPSEHTSGDKRHQGAITKAGNGACRRALVEAAHHYRIPPRISPTLRQRQHGQPEQVRQIAWKAQQRLYSRQRALSLRRKKSVVVVTAVARELCGFVWAICRALKHPHPKAPTRTSEGSARVYVLKPDLKFKSSAGRSRLASSAAAPPARARKGPTSLAS

SEQ ID NO: 284335 - protein, 354 aa, unidentified
MKRTSKHVALDVHQATTVASVREESGRVIARTILPTEDGPIVEFFRGMRGTIHVAFEEGTQAQWLHDLLEPLVHRVVVCDRRGEARRGNKGDQVDADALSELLRRGSLRAVYHGSAERATLKELTRAYENLVEDATRVMLRLKALFRARGIPAPGKRVYHPAERAQWLERLTNRGARYRAETLYAQLDPLRALHPRVKAAMVAEARRDPAWKLLQAIPFYGPVRVAQLLATMQTPWRFRTKRNLWAYAGLAVVTHTSAEYELVGGRPVRRRRAPLTRGLNQNYNRGLKNVFKGAATAATAQPGPFQDFYQGLLARGMREELARVTLTRKLAAVTLRLWKKGERFDPTQLTVQAR

SEQ ID NO: 284336 - protein, 338 aa, unidentified
MKITTIGLDIAKSVFHAVGVDKAGKLIKKKMLRRKDLLPFVAKIEPCLIVMEACGGASYWAREFEQFGHIVKLIAPQYVVPFRQGNKNDYNDALAIAEAAQRPNMRFVKPKSVEQQDVQLLHRMRERLTKQSTALINQVRGMLAEYGIVMTKSKSAFKAQLPDILIDEANTLTTKGRAIFYQLYDEVIDIEKRLKSCDTQVLNETQNNVICQRLQTIPGVGPVTATAIYAAVGDGKDFSNGRHFSAWCGLVPKQHSSGGKDNLLGISKRGNAYLRTLFIHGARAVLRHSGSKSDKLSCWAIQVAERRGFNRACVAVANKLARMSWVIAAREEEFRLAM

SEQ ID NO: 284337 - protein, 331 aa, unidentified
MKFKSFIGIDVSKSTIDAYLKINQLHAVFDNNEEGFKELVEWVMENSGLVLAEDLFFGFESTGIYSSELALFLEKHALPFYIMSGLELKRSLGIRRGKSDKADSKDIAEYLYEKQEKIEPTVLPSQTIQDLKKLFNYRERLVKARAAFTTRLNEYETIVSQNKLKVYQKSHTTVITCLDKQIETIEKEIEKLLHKEELLLNQYKLLNSIKGIGPQTALALIILTEGFTLFNSWRKFASYAGTAPFPNQSGTFNGRTKTSKLANKRIKTLLTLCAGTAIQYSTEMKNYYQKRIGEGKSKMSTLNIIRNKLLSRAFAVVNRNSSYVDTLKYAA

SEQ ID NO: 284338 - protein, 391 aa, unidentified
MVCVGIDVAKDKHDCCILDSDGTIRADCITIPNNMDGFKQLLQTIRDCTKKSDKIKVGLEATGHYSYNILGFLLDNGLPTYVINPLHTNLYRKSLSLRKTKTDRVDARTIATMLLSDVDLKSYTDTAYHNEELKSLTRYRFDKVRERAKLKQSVSRLVTILFPELEKLVSSLHIASVYALLSEYPGAKQISEIHLTKLTNLLATASKGRYGKDKAIQIRDAARTSIGSVMPAKFLELKHTIKLIRELTSEIDEIEVSIQKIMDELNPPILSIPGVGIQSAAMILAEIGDFSNFESPDKILAYAGCSPSTYQSGKLTNCYAHMEKRGSRYLRYALYNATKYVCHWNPVFAEYLAKKRAEGKHYNVALSHATKKLVRLIYALQKSGKAYLVAV

SEQ ID NO: 284339 - protein, 377 aa, unidentified
MHSENIAAYIGLDVHKETLAVAIAAPERLGEVRYYGTINNEAQAVRRLFQKLQGLYGNILSCYEAGPCGFGLYHQLTAMNIKFQVIAPSRIPKSPTDRIKNDHRDAISLARLLRAGELTPVWIPDLTHEAMRDLIRARAAAKRDSRVARQRILSMLLRTDKHYAGKHWTGKHRTWLANQSFSQPSQQIAFQHYCQSLEQIEDRILQLDQEISRLLPEWSLCNLVCQLQALKGVGQLIAITLVAELGDFSRFSNPKQLMAFLGLVPGEYSSGNSIRPRGITKVGNSELRRLLYEAAWSYRTPAKVGAWLIYYRPDSVTQYSKDIAWKAQQRLCSRYRSLTAKGKKSQVAITAVARELTGFMWDIALAAQSSFSQQKQN

SEQ ID NO: 284340 - protein, 370 aa, unidentified
MGNRSMFVGLDVHKETIDVSIAEGHRNGEVRHYGVIASDLEPLDKVVRALRAPDRQLHFVYEAGPCGFGIYRHLTKRGEACVVVSPSMVPKRSGDRVKTDRRDSLTLARLHRAGELRAIYVPDDADEAMRDLVRAREDAVVAGTQAKYRLKAFLLRQGRRYPGREGWTLPYRRWLTDLSFPTAPQHITLQEYRDTIDETERRIARLTEQLRQLAPPWRWAPVVAALQALRGVSFITAVAVVAELGDLTRFGHPRELMAYLGLVPSEYSSGPSVRRGGITKAGNPHVRRLLAEAAWAYQGIPRIGRQHAYRQEALPKVVCDIAWKAQLRLTTRFRRLIARGKAKPKVATAIARELTGFIWAIAQEVSPASQ

SEQ ID NO: 284341 - protein, 429 aa, unidentified
MNYTQNEKIEQVTDTTLVVGVDIGSQTHYARAFDNRGRELTKRVFSFQNDIEGFNFFQLWTEKLKNENKKTAVLIGCEPTGHYWFAFAKYVQDHQKTLVMVNPFSVKKIKELDDNSPKKTDAKDPKTIAKLVVDGRYSIPYMPEGIYAEIRDLVYSRDRIMKQHNISANRIQRWLGIHFPEYLGLYTRFDAASGLAVLEKAPLPKDVIALGVEGIRKIWHDKKMRGRGVTEDRAKNLVEAAYNSVGLDGEIGTRSELYMLLEEHQLWTSQLEAVNKVLEETIRKVQHVEKLLAIKGVGSVTIAGFIAEVGDIRRFKSPKQIQRYAGLELVENSSGKHKGSSRISKRGRRKLRKILYQVMIPLLARNKEFRTIYDYYVTRVKNPLKRRQAMIAVSCKLIRVFYAVLTKGVDYDRFKMMSDIHHERGVIAA

SEQ ID NO: 284342 - protein, 403 aa, unidentified
MTVRPVVWVGIDVGKTSHHACAVDETGKVLWNQKVSNEQRAIEQLIARAHKGADEARWAIDLTSPMALMLITVLLGAEQSVVYVPGHVVNTMTGAFRGEGKTDAKDARVIAETARMRSDLSEVAMPDELVVELAQLTGYRTDVMADWVRGVNRLRSLLGSIFPGLEAAFDYSNRTPLILVAHLCTPAEIRAAGIKGVTAYLGDNGGWPTAIAKTAATAVAAAKQQPLALPGEAGTAALVKRLAGKLLDLDHEIKDIDKTITERFRDHPYAHIIESLPGFGPGLGAEFVVVTGGDLASFATAGRLASYAGLVPVPRDSGRISGNLHRPKRYNRRLRRVFYMAALSSIRGDGPSRQFYDRKRGERFIHSQALLALARRLVDVLWALLRDGREFTPHKPTPATAAA

SEQ ID NO: 284343 - protein, 350 aa, unidentified
MLMIGVDYHPSFQQIAFLEEETGECGEQQLNHSDGEAERFYRNLHQRGIRVRVGMEATGYSRWFERLLAELGFELWIGDPAEIKTRRVKKQKTDRKDAQLLLRLMREDNFPKIWVPNPENRDMRQLLWHRHRLVQMRTRIMNQLQAIAMNEGKRRKTKLWSEQGRAELEKLRLAPWASRRRQELLELLDRMDPVIQELTAAAEQEARKHPDVARLMTHPGVGPLTALAYVLIIGTPERFHCGKQVGTYVGMIPSEDSSGGKQRLGHISKQGNSLLRFLLVEAAQAAARINPEWRRRYVHLAMRRHKSIAKVAMGRRLAVRLYWMWRNGCEYSPSLEFGSYAGQLGTGHGG

SEQ ID NO: 284344 - protein, 364 aa, unidentified
MNAITKCVGLDVSKEKIAVAVADQDASPRFCGVIPNTREAIRKQLRRLGESHELRVCYEAGVTGYGLSRFLQTLGIECVVAAPSKIERVPGPRVKTDRKDALMLAEKLRKGDLVSVWVPDEGDEALRDLVRARKARMEDRTQARQRVSMFLMRHGIVKPDTMTPWGNPYRTWLRSLTFVNRASQMAFQEYIIAVEETEMAIRRLEQEIHEIATHSSYAPMMQALQALRGFKEIAAATVVAEIGDFTRFAHPQQLMSYAGLVPRESSSGNKVWRGAITKTGNPCLRWILTESAWSYRYRPSVSASMAKRMEGLSPHVQAIAWKAQNRLHRKCMRLLSRGKSRPSSGLDGRRTRASGIHMGYSPAG

SEQ ID NO: 284345 - protein, 406 aa, unidentified
MTSCSYFAGIDWASQSHVLRVIDAAGGVALRLEIAHSREGIEHLIRQLKSFAGNGGLAIAIERPSGVLVDALVEAGLRVVPIHPNVLKASRPRYRSAGKSDPGDAYMLADLLRTDGHRFRALEPQNDKIRALRALVRTRDDLVAERVALANQLRSLLESFWPGAAEIFFDIDSPIALAFVARYPTPQSTTHLGEKRLAGFLAQHGYCGRRPAGALLERLRSAATGCTGELEAQAKGELARSLASILERRGAELAKLTARIEHTVASLPDGQIIMSFPRSGRICAAQILAELGSVRERFPTEAQLAAEAGVAPVTYQSGKQRSVTFRWACNHRLRRAITCFADQSRHANTWAANVYHRARSRGCDHPHAIRVLARAWVRVLWRAWFTKTPYQPHLHHTAAAFAATTG

SEQ ID NO: 284346 - protein, 338 aa, unidentified
MAIVMGLDQHRAQITAEWIDTDTGELGRARISPALRGDVRRFVKRFAGQPLEVALEATTGWRFVVEELHAVGAEVHLAEPAETAARRGNKKRAKTDRADARHLCELLMIGRLPESWIPPEHLLDLRARVRLRHTLVDQRGEWQQRIQAVLYHHGFPQRNGLLTGENRAWLEALALSPSAREQVRIALQIIDSLDAQSAPITRELRLYARRQLGCRALMKHYGIGELTAVTILAELGDARRFSSSRHAVRYAGLDITVHQSDQRRAAGHLSRQGPPALRWALFEAAQAARRPGSPDRGYYDQAAERLGGNRACLALARKLLKRSFHTLRELGDEGLMPA

SEQ ID NO: 284347 - protein, 421 aa, unidentified
MIDHETFTWFAAIDWGTEKHQACVVDVRGGIAGERAFSHDGAGLALLCDWILSIAGNATIVAVAVEVPHGPVVDALLDRGLAVYAINPKQLDRLRDRFSVSGAKDDRRDAYVAADGLRTDRHLFRRLQIADPRLIQLREWSRLAEELQQERVRLSNRLYSQLWRYYPQMLGLSDDLAAGWLLDLWTMAPTPVKAMHLRKTSVAQLLKRNRIRRIDAETVLRALREPAINVADGVAEAATIHIGSLVTRLRVVGRELHDAMRKLDELCACLDEPSATASEHGGSGRQDVKILKSMPGIGKIILAILLAEASGPLSRRDYQALRTLSGVAPVTKQSGKSRMVVRRYAAHVRLRDAVYHWARVAIQHDPRSHSRYVALRQRGHSHGRAIRGVADRLLALACTLLQRQTVFDRDFSRGEELTAVP

SEQ ID NO: 284348 - protein, 315 aa, unidentified
MTTSSGKFVGIDVAKDKLDIAVLGEKKASQVGNDEAGIAKLIKKLEMQEIELIVVEATGGYQRDVVLGLYEAGLPVAVVNPARVRQYARASGLLAKTDKLDAFNLAEFGKQMGPRRFEAKSEAGRYVSALLVRRRQLEDMLKAEKSRLRTVHTAMRASLERMIAVLKEEIKQLEKELDQFMKENEEWQAQEQILTSAKGVGRVTAATLLAELPELGKLDRKKIAALVGLAPMNFDSGKKRGYRKTKGGRMEVRNVLYMSTLVATRYNPMIQAQYQQLLKRGKLKKVALTACMRKFLTILNAMMRDKVPFRQTVIA

SEQ ID NO: 284349 - protein, 354 aa, unidentified
MIIVGCDYHPSFQQIAFVDTETGEVRERRLQHREEAEKFYRDIAGQRMKVRVGMEASGQARWFERLLAELQFQLWVGDAAEIRRKRGRKQKTDRQDAQHILGLLLKDDFPPIWVPSWENRDLRQLLWHRHRMVQARTRIMNQLQAVALNEGLLCKKKLWRERGRQQLEAFPLAPWASRRRHDLLELLDRLNPTIAELSQAVEKEAEKCPAAQRLMTHPGVGALTALAFVLIIGDVKRFQCGKQIASYLGLVPLEDSSGNRRRLGHITKQGSSMLRFLLVEAAQVTVRSLSEWRGKYMHLMIRRGRKIAKIAMARRLAVRLYWMMRQGWDYQQCIEFGSHAGQPETGHGVRSNIE

SEQ ID NO: 284350 - protein, 349 aa, unidentified
MRFYNQQHRFYCGVDLHARTMYLCILNATGQVVFDRNLPANPNSFLQAIAPFRDDLVVAVECLFTWYWLADLCDRENIAFVLGHALYMKAIHGGKSKNDQIDAAKIARLLRGGNIPVAYVYPAGMRATRDLLRRRMYLVHKRAEAIAHIQNTNSQYNLAPFAKKLAYAANRAELDIADRFSDPSVRKMMDIDLALIDQYDAALSDVELYLTRTAKVDDANTFHRLRSVPGIGKILALVLLYEIHDIRRFPTVGQFLSDARLVRCAQESGGKKLGSGGKKIGNPHLRWAFSEAACLFLRQSERAKKWLQRQEKKRGKGKALGILAAKLGRAVYHLLAKKVAFDERRFWND

SEQ ID NO: 284351 - protein, 343 aa, unidentified
MSVIIGVDPHKATHTAVAISSSEHELARKKVRSGAHQAEQLLDWAASFETRTWAIESAGGLGYLLAQQLVAAGETVVDVPATLASRVRVLATGRSNKNDPNDAVSVGVAALRSPGLRRVEAAGHSEVLRLLAKRNTDIGNHRTRVVCRMHALLAELAGGGISKEINASDVDWFLTTLVPATPVEQARYELALELLEDIRRLDAQLKASHKRIRVAVQASGTSVTDLFGVGPIIAAELIGYTGDVGRFRNRDQFAAYNGTAPVEFSSGGRTVHRLSKRGNRQLNHAIHMAAICQLRQPHSDGRAYFERKVADGKTNKEAIRALKRQISNAVYRHLVADAHHTAR

SEQ ID NO: 284352 - protein, 397 aa, unidentified
MTLSSWLVAGLVPGAGLVPGIERQPFKKLDTDEDVLLKLLHRWRDEAVKAGFKITRTTVVFEAGRDGFLLARWLRMHDIEAYVIHPNSIAVSREHRRAKTDRLDTALLKRSFLGWLRGEPHHCSMAMIPTLAEEDARHPNRERENLVGQRTRIVNRMEACLARFGIRNFKPTLRKASERLETLSTPEGSPLQPNSLAEMRRDMARLRFVIDEIKEIEAVRLNQLEQAPEEGPLAMVKLVARVIGVGIETADMLVHEILSLHLRDQSAVARYAGLTGSPDESGKKSREKGLAKAGNARVRRGMIQLAWCFLKFQKASALAQWYRMVTKDGRGAVRKTMIVALARKLLIALWRMVRTSHCAPPKTERRNFRASEARDDSFVAHFRRRSEVAVTRMIARF

SEQ ID NO: 284353 - protein, 348 aa, unidentified
MNALHYIGFDVHKKTISFCVKTASGEIVEEGSVPAQRRVLRQWASARPQPWQGALEATLFSGWIYDTLKPYGERLEMAHPAKMKAISAAKKKSDTIDARTIADLVRCNLLPACYVAAPRIRELRRLLRYRSLVVSEAVRMKNKMAGLLMETGALYVKEKLHRKKYFANLLEELEEVPESVIDLLRLSRGALEMFESTQKRLVRELLADPELAQRVERLMSIPAVGEITALTWALEVGDPQRFRSGSDAMSYCGLTAALQSSAGKQQRGPISKQRNRWLQTTLIEAAKLAPRWNPQLAALHARELERGHRNRATLAVARKLVAYLLAVDKSRQPFQVRESSQDLAQKTG

SEQ ID NO: 284354 - protein, 413 aa, unidentified
MNVLHPRCCGLDVHKSSISACILLRESGREQKHQRRFGTMTQELQELAEWLQQSGVTEVAMESSGVYWKPVWNILEGQFTVVLANAQHIKNVPGRKTDQKDAEWIAQLLQYGLLRASYVPCEIIRDLRDLTRMRASLSQEASRISSRIQKVLEDANVKLASVATNVLGKSGRAMLEDIITGEDNPEQLASLAMGHLRVKIPQLQLALEGKIRSHHRFLLRRLLDQVQFVEHEIALLDERLEDIGRQRPDLAHAVARWDTIPGIDRVAAWALLAEIGDNMGQFSTAGHLASWAALCPGNHESAGKRLRGTTRQGSPWLCRMACQCAWAAARTKNTYLSSQFRRLAARRGKKRAIIAVAHTLIVIGYHLQKNQSNYDDLGGNYFDRIHSDGLKRYLVKRLQQLGHKVTLEPIETA

SEQ ID NO: 284355 - protein, 387 aa, unidentified
MPQPNDLSRSLVALDQNSTIIAVVELSQSSWLIAGVLPGVERQPCKKLEPNPERLLVLLHRWRDEVVRAGRTITRIALAFEAGRDGFWLARWLEARGVEAHVIHSSSVAVSREHRRAKTDRLDTELLKRGFLGWLRGERGHCSMARVPTIAEEDAKQPNRERDCLVGERTRIVNRIKSTLARLGIRNFKPTQRKAAERLATVPTPEGMPLPPNTLAELQRDMARLSFVVSQIRQIEDARQKRLEQQPETGPHAMVRLLARIVGVGIETADMLVHEVLSRPMRDRRAVARYAGLTGSPDESGAQRREQGLARAGNARVRRGMIQLAWRFLMFQKESALALWYRARTADSRKGTRKTMIVALARKLIIALWRFVTTGETLEGVILRPAG

SEQ ID NO: 284356 - protein, 361 aa, unidentified
MVVQRTSVGLDVHARSVVASALDGVTGEITERRLTPAYEDVAAWIESLPGPVKATYEAGPTGFGLARFLTGRGLDVQVAAPSKLMRPSGDRVKTDVRDARHLARLLHAGQIVAVTIPDAATEAARDLVRAREDARGDLMSARHRVAKLLLRQGIVWSGGKAWTGIHDRWLRAQRFESVPLQLAYDTAYDTMLAAVARRDRLDEAIADLAADSTFTPLVHRLGCLRGVSTLTGFGLAVEIGDWRRFTGRSIGAYLGLVPTESSSGATRSQGGITKTGNGHARRLLIEAAWHHRPAYRAPGMDLRRRWKAASPAAVDRGRRANRRLAARWAHFDARGKRSTVANAAIARELAGWCWSLAILED

SEQ ID NO: 284357 - protein, 313 aa, unidentified
MNFVGIDVSQSTWDVHLRPQGRSFSVPADHDGATLLRQQLVALGPCLVVLEATGGLERGLAAELIDAGLSVAVVNPRQVRDFARALGRLAKTDRIDAETLALFAEKVQPRPTQKCPEKQAEIDALVTRRRQLVALRSMERTRQHQATAKAARRSIDKLLKVLDQQIAALDKAIGQLLESDDDWRTRCELLQSVPGVGATTSATLVAELPELGRLNRQEIASLAGLAPFNHDSGRFRGQRRIRGGRSAVRSILYMAALTARRCNPILQRFAKRLEQAGKPFKVVITACMRKLLTMLNTIVRNGTPWAPSSMAQR

SEQ ID NO: 284358 - protein, 348 aa, unidentified
MLIIGCDYHPSWQQICWMDTETGETEEKKLDHASGEAERFYRQLSKPAVIGMESTGNCQWFLEMAASMGHDVWIGDAARIRASEVRQQKHDRRDAALILKLLLEGRFPRIWTPSREEKDLRQLLIHRHKLVRIRVQVKNELQHLAMNRGITKSRKLWSKAGERVLRELPLPPWASRRREDLFKIREMLNGQIDLLDPAVQEAADKNESARLLMTQPGVGPITSLAFVLTMGDVSRFPRGKQVASYLGLIPREYSSGGKQRLGSISKQGNSFMRMLLVEAAQVAVRCDPQMRNEYLHRCHSKAKGVAKVAAARKLAIRLYWMLRSNTAYPEVVRVESSSRVPLVVRSGG

SEQ ID NO: 284359 - protein, 356 aa, unidentified
MSEATPTDIIVGVDTHKHTHAAVAISGLGARVAELTTRVGLAGYRELEAWARSLGTVRAFGVEGTGSYGAGLARFLRGEGHVVHEAGRPDRGLRRRHGKTDHLDAEGAARAVLGGRATALPKAGTGEVEMTRHLKVARDTAVKARTQAMPALKAIIVGAPAALRERLEAIAGKTALVRHLAASRPGPLTTTTASAKAGLRAIARRWLDLDAEIGSHDAHLCRLAERCAPEMVAAHGMGTGTAAAMLVLVGDDPGRIHSEAAFAKLRGACPIPASSGKTGRHRLNRGGHRQANAALHRVVVVRMRTHRPTVDYVRRRTAEGKSKREIIRCLKRFVAREIFGYLCRAPRAADPEQMAA

SEQ ID NO: 284360 - protein, 404 aa, unidentified
MPQSVLYLSAVIRKCENRDEAGPRNPSRAVSSPDSLRPPRSRLLPELEQLTVAGSPADLKRSSRPRIQDRARARALIGRRAMSGSIGIDVAQGDFVVAHEGVSGSKSYPNTDRGCRDLVKDLLRTAGDAGSVERIVVESTGGYERRVVAALGAAGLPVVVVNPRHVRDFARSKGQLAKTDQIDAHILADFAATIKPKIKPLPSEDQEDLRELLTRHEQLVQMLVAEKSRLLQAQGQSRHTLRKKIKNHIKFLEREIMMLDSDLDDTLKKSEVWREKDDLLQSVPGVGKGTSRTLLGLVPELGTVSSTEIAKLVGLAPFNRDSGRSRGSRHVGGGRGRVRVMLYMATLCATRRNPVVRTWYQRLLAAGKPRKVALVACMRKLLVVLNQMLKTKTRWQAPLALTTA

SEQ ID NO: 284361 - protein, 347 aa, unidentified
MVSIADWRCFVGFDYHNCFVQVCVLDPSGEVLGNEQIANDLRSIRNYVEDTRDGRLVQEAAVETCGGASRFVEQLRELDYPVGLAHAGICSKMKQSPDKSDFADAHLLADLCRVGYLPRVWLPPKDIRDLRRLGRYRQQLVEQRRNVKLRIRAMLREERIPAPAEVGNAWTKAWLAWLKSTESLNDHSRWVMDQHLEDLERLIRKVREVEQRMEKATADDPLVQKLRKTKGVGLVTAVVMRAEIGSFDRFSCGKQLARYCAVTPKNASSGRRQADGGLVKAGNLTLRTMLIEAAHRLARYQPKWKQMKEHLTKRGKPASVAAAAVANRWVRKLFWEMREAPDQSVAA

SEQ ID NO: 284362 - protein, 450 aa, unidentified
MSAEKQKKSTTVKLPKHLQHINIHAAGIDVGSRSHFVAVPEGTSEPPVREFESFTDDLQRMADWLSACEVTTVVMESTGIYWIPIFEILESKGFEVKLVNARHVKNVPGRKSDVLDCQWLQRLHTYGLLEGAFRPPEQICTLRGYVRQRMNLVRYAASHIQHMQKALAQMNLQLTNVVSDITGKTGMLIIKAILGGERNPLVLAALRDQRCKNSVETIARSLHGNFRPEHLFSLKQAVDLYGFYQGQIAECDQVILAQLATFDVASDSDKDNKPPTTIEEALQRMSDVNLTKIDGIDSNSALKIIAEIGIDMNRWKSPKHFASWLGLCPGTKVSGGKILSGKSKQVANRAAATLRMAAFTLFNSKSALGAYLRRQRSRLGAPKAITATAHKLARLVYAMLKHGSAYVDAGQDYYEERYRSRVVQNLKRKAQELGYQLIEISGIQQKTTAT

SEQ ID NO: 284363 - protein, 343 aa, unidentified
MDHFAGLDVSVKDTSVCIVDGTGKITREVKVASEPDALLAVLNNPAYHFKRIGLEAGPLSQWLFSALAEADLPVICVETRHMRAVLKARINKTDRNDARGIAQMMRVGLYRPVHVKTLRSQKLRTLLTHRKLLQSEAIAVENDLRASLRNFGLKVGVVGTVKFEARVKELVENFPDLLALVEPLLVVRRVLREQISILHRRVLAAVRNDEVCRRLMTVPGVGPVVALTYRATVDVPARFRKSKSVGAVFGLTPARDQSGESDRPGAISRCGDEMMRTTLYEAAQVMLLRSAKWSWLKAWAMKIARHRGMKKAIVALARRLAVIMHRIWIDGTEFRWTREAAAA

SEQ ID NO: 284364 - protein, 342 aa, unidentified
MMVIGIDAHKRTHTAVSADELGRKLSTKTVGTTSTDHLALLKWARAQADPERLWALEDCRNMTRRLASDLIAAGERVVRVPPKLMAHARDSARTYGKSDPIDALAIARAALREPDLPVARLDGVERELRLLVDHREDLVAERTRMIARLRWHLHELDPGWLPPGKLERASAYDRVAAHLAQFDELVARLAMTLIQHCRRLTIEIDELAGEIGERVQQIAPSLLAIVGCAALTAAKIIGETAGVDRFRSKDAFARHNGSAPLPVWSSNRARHRLSRTGNRQLNAALHRIALTQARCHPDARALLARRKAKGDGGMEALRILKRRLSDVVYRAMLADLETPTAA

SEQ ID NO: 284365 - protein, 413 aa, unidentified
MISLSNSLLVGIDVSLNDNKVRILHPDGTSLSKFVVSNSVPGAKTLSQKVSGIAEKNSFDSIVIGLESTSVYGDPLVYFLKQDASVNRFNTKIHVLNPTQVNKFKMFYPDLPKTDDIDAWVIAEHLRFGRINKEVYMDDKYKALQKLTRARFHTVQNLAREKNWFLNNLFLKFSSLAQEKIFSDRFGATSSSIIEEFFSVDEISYMPIAELAEFINKKGKGHFQDPEKIATAVQKAARSSYRLPKTVTDSVNQILAVSFVAMKAYKEQLKIFDKAIEEQFKLIPNTLLSIKGIGPVYAAGIVAEIGDIHRFKDHAALAKFAGIAWTKHQSGNFTAAHTHLIKFGNRYLRYYIMEATNKVRMHDHEFKRFYDLKYSQTPKTPHKRALALTARKFVRLVYALLHSNRLYTPPKGE

SEQ ID NO: 284366 - protein, 452 aa, unidentified
MAQAKPQVIDDEEHERVYERVAAVDVAKDSGMVCTRTPHRSRPGARQSTVWTVKARMTAIRALGRQLTKDGIEMVTLESTSDCWRIWLYVLEACGLAVQLVNAAQARNLPGRPKTDKLDAMWLARLTEMGLLRPSFVPPAAIRALRDYTRARTRLVQERTRCFQRLEKLLEGALVKLSSVASKLTTESAKDMIKAMIAGERDPHTLAALARTRMKAKHDELVEALAGMFDDHHGELAQILLDQAAFCDARIAQLTARITAAVAAMPAAWGVDADGTTGPDAGTGPDAAALPAVQRLAEIPGVSPDLARSIIAEVGLDMSRFPTAAHLVSWAGLCPRARQSGPRTRAGKKNQGDSWLRNSLGQAAIGAARTTTTFLGERYGRIARRRGKAKAQVAVARSILTIIWHLLADPAVRYADLGAGYYQTRTDTDRKLRNHIRQIQALGFEVTLTKAV

SEQ ID NO: 284367 - protein, 355 aa, unidentified
MSVYVGIDVHRKRSQVAVINEGGEVLANRNVPNGAQPVLGVIGGLPPGTPVAFEAAFGWGWLVELLEDYGFAPHLVHPLRCKAIASARLKNDKVDAAILAQLLRADLLPEAWIAPPPVRQLRALLRHRAQLVRLRTLLRNRIHAVLADHGHDRPAGCWSGPGRAWLAALELPAVSREVIDDDVALIDALQVPIDRLDWEIHQRARSEPAVKVLTQLPGVGPFTALVLLAEIGDISRFGSARKLASWAGLTPTVRGSDRTVRHGHISKQGSAWLRWILCEAAQTAKRHPDFAASYQAMARRRGKKIATTAIARKLLTRAYHLLTAASGGEPASREGRQAPGELAFSHEPASPRSMT

SEQ ID NO: 284368 - protein, 408 aa, unidentified
MNAVGIDVSKGKSIVAALRPMGEVALLPQEFLHTEVGLEQMAYTIIALGEDTRVIMEATGRYHEPVAAALHEYGIYVCVLNPLFIKQSGGGSIRKVKTDKADAMKIAKYGLDNWVDLREYTPMDTVRQQLKLCSRQYNLYMKTVISLQNNLISLTDKTFPGVNELFSSPERADGHQKWVDFVMTFWHCDCICGVSEKVFTERYQKWCKRKGYHFSPEKALDIYAGICGHFTTLPKNDNTKLLITTAAQQLLAGKMTLAALRAEMTRLAMQLPEYDIVRAMYGVGETTAAQLMAEIGDVRRFPRRSSIVGFAGVDPGVDESGKHSAKSVPTTKRGSPHLRKTLYQIVCTYLRKAPADEPVYQFLDKKRAEGKPYFVYMTAAQNKFLRIYYARVKECLEAFDAQQSISQG

SEQ ID NO: 284369 - protein, 379 aa, unidentified
MERIIYIGMDVHSTSYSLCALEPVFGQENKFFFETKVAAEPSNIIKYIDDIESCFANDECTFVTGYEAGCLGFSLYNYLKGRGIDCKILAPTKMSEEKGGKKVKTDKRDARTIAQNLAYGTYSAVFVPTEEDLAVRDYIRMRNDHKAAVKRIKQQINALCMRHGYIYQRTKWTAEHLKYIQRMTLSPLYREILQEYLATMEQLNNKIKAFDVRIEELSKTKRYKDNVGKLACFTGITRSRALAIIAEIGDFRRFLKPLNFAAYVGLVPGEKSSGKKQKRIAITKAGNSHIRKELIEAAQSICRGLPGYKSRALLARQQGNDNTVINYADKASARLRRRYYKLGRCGKKHNVAVTAVARELSCFICGMMNGLTEVQIKKA

SEQ ID NO: 284370 - protein, 312 aa, unidentified
MRNDKIYVGIDVGKTWLDMAVRGIDNVTRHRNDSPGIEALVGIIDTIKPELIVVEASGGYEKELVETLLLKGGKVAVVNPTRVRALAKAMGVLAKTDEIDAQIIATYAYTIKPEAKAAQDDEELHLKALVTRREQLVNMRTSELNRLGTCHSSTKADIHEHLNWLDHQINILDEEITLLVKGLEKWNQQTKRLQSIPGVGYVTSITIAANMPELGQLNRQQIASLAGLAPFNRDSGAKRGKRRIFGGRQAVRRVLYMAALSASRHNPVIKQFYLHLRSKGKPFKVAITACMRKMLTIMNTMEKTGTLWRCTA

SEQ ID NO: 284371 - protein, 339 aa, unidentified
MQLYTGIDLHANNSYLAIIEDTGKRIFHQKVPNDPGAITQALAPYEGTMAGVVVESTYNWYWLVDALMTAGYHVHLANPSAIQKYSGLKHADDKHDAFWLAEMLRLNILPEGYIYPKEERPLRDLLRKRGHLVNLRTSLLISLKNIISRNCGQTLTANEVKKIREDLVAPLLASHEDLALAGQVSKEAIDFLTKKIRKIETFIENKVKLQEPYTHLLGLPGVGTILALTIKLESGPITRFPQVGNYASYCRKVCAQWSSNGKAKSGGNKKNGNKYLAWAFSEAAELARRFDPQSRAYYNRKLQKTNFMVAHGALSHKLARAAYHIMRDNVPFLPEKLFG

SEQ ID NO: 284372 - protein, 355 aa, unidentified
MADVAMDLHKRHSQVATLDQWGEIRELRIEHDGDSRTMEKFLGGLEAGSRIAIEATGSWWWVVDLAEKHGHEVVLSNPKKTRLIADACLKNDRVDTDELLHLLRLGYLPRVWIPPAPMRYGKELLRYRALLVSMRTRLKNHLGSLLTKRNLKGPGKQLWSQPGEAYLESVKLNAEAGEIRHQTLALRKTLDKLIGHWDRELGRRVVSAERVRQLQTAPGVGPQTAFAYRVFVGEVSRFRSGKQVAKYFGLVPRERSSGERRHLGHITKEGDGLMRTLLVEAALRATRKPGPLREGYRRMVRHKGKAKARVAVARKLAVILYQMWKKDLTYQEFLQGEAQLAGGPGNGVGHQGPKH

SEQ ID NO: 284373 - protein, 358 aa, unidentified
MSKPTRMSGLDKVFERADRGGAFVGLDVHKRTIHVAFWLDERIVAGWVMPAEVNTVAVMLAPYRDRITQVVYEAGPTGYGLARTLRRAGLAVEVVAPGRSPRPAVRENKADRLDAARLAEYAAKGLLVAVAVPSETEEADRQLLRLREQLVRKRRCVKQQIRSFLLQHGVAEPRGLSGWSRAAVAALRALGLGPTLRLCLDVLLDQLAELEAHVRHIERALAELAATARHAEAVAIARTHPGVGPVVAMSYLVEVHRGGRFHEPRQVASYLGLAPRVRQSGETRREGPIGRTGRAAVRALLVEAAWRWRQLDQGARRLFQRLRHNTGSAKKAIVALARRLAINLWAMLTRREPYRGAA

SEQ ID NO: 284374 - protein, 460 aa, unidentified
MSRKRKSNPKSNPKTTGESLLSCLNLNAAGVDIGATEIYVAVPGDRDPQAVRCFSTFTEDLHEAAAWLKACHIETVAMESTGVYWIPLFQILEARGFKVFLVNAHHVKNVPGRKSDVSDCQWLQYLHSVGLLRGSFRPEQAVCSVRSILRHRDSLVQMGSSHVQHMQKALDQMNLQLHHVISDITGMTGIAILEAILAGERNPHTLAALRDRRIKAGADTIAKSLVGDYRREHLFTLRQSLAAFRHYQELIAACDREIAQSLEEVESKLDPPVDPPPAFPSPSNDGSKPKASEPSFDLQTHLHRIFGVDLTQVPGINVLTARTLLAEIGPDFSRFPSGPEFASWLGLCSDNRVSGGKVLSVKTRKVKNRAATALRMAALSVHRSQSFLGHFYRRMRAKLGAPKAITATAHKLARILYHMVTTGHAYDETICAQNEVQNRKRMEARLRKQAREFGLQLVAL

SEQ ID NO: 284375 - protein, 406 aa, unidentified
MLEVLIGSCAGLDVHRRQVVCTVIREGRKETREYATFTRELKELAAWLGCEQVELAVMESTGIFWKAVFASLEEAGIQGCVVNARHVKQVPGRKTDVCDSEWLAELGRCGLLRPSFIPPRDLRELRLLTRYRRKLSGIIAGEKNRLHKVLDDAGIRLGCVVSDIDGVSARSMVEALIKGGFTPEQIAEEALGRLQKKKDQLQLALEGEISDRHRLVLKEIQSHIKWLDRHTALIDAQIVVGMKPYREEWKLLQTIPGIDALSAAMLLAEIGVDMSRFGSKDRLCSWAGMCPGNQESAGKRKTGRVRKANAYVRSLLCEAANSARKTQSQFQGFYKGLVIRRGHKRAIVAVGHKILEIIYVLISRKEPYRDPEIDYEALVVHRNAPRWLDALNKYGYLQRLRTPVER

SEQ ID NO: 284376 - protein, 319 aa, unidentified
MHCIGVDVSKQELVTFDGKTERIFPNDRGLSEFRRFVKRTEDAFIVFEPTSTYSRKLETLCRTNHILCCQLNPRVVPHLRQVSRGRSKTDSSDAELLYRYGIERGHNEASELRQDSLSESIQARLACYRVAQKARVAYQGLHEALENDPATPRTLLAEIKAEISALKNREERYLVAAQRNAEEDEQTGRRLVALLSIPGIGPITALTLLALFRKYPGATRSQIVALAGLDPIQFQSGTSVHGKTRISKRGNRELRKRLYQATLSAARYNPSVKALHRRLKEQGKPDKVARIAAARKLLLIAHAIYKSGEEFRSPTEEVT

SEQ ID NO: 284377 - protein, 366 aa, unidentified
MKKTSTVQALKSEIFKEQKLTIGVDLGDCWSFYCVLDEAGQVILEQKLPTTPEAMKQTFGKIPRSLIALETGTHSPWVSRLLTLLGHEVIVAHAQKVQLITKSNRKDDRHDARTLARLARIDPALSGPVRHRSVQAQLHLTVIRARAELVSARTALVNAARGLVKSYGQRLPKCGTYQVSERLAEGLSAELREVLVPLFKEIESLNERIKEYDERMEKIAKEVYPEVSLLKQVKGVGTQIALTYVLTIEDPYRFPKSRQVGCFLGLRPGRRNSGESEPQKGISKEGDRYLRTMMVQGAHYILGPFGEDSDLRRWGRKLAERGGKNAKKRAVVAVARKLAVLLHRLWVGGEVYEPLRNSQKAMREVA

SEQ ID NO: 284378 - protein, 425 aa, unidentified
MEVMHERVAGLDVHKETVVACVRIVAGGKVSRECRTFETTTAGLEALLAWLMQSGCTHVAMEATGVYWKPVWNILSDGKFELILANAAHIKNVPGRKTDVNDATWIADLAAFGLIAGSFVPEEKIQELRSLMRTRKQLLREQTRHVQRIQKTLEEANIKLGSVISNIVGVSGRRIIEAIIAGVRNPQKLAQLADRRIKASPKALYEALHGRLTGHHRFMLQLHLGQYDALASSIEQIDAQVETAIRTKIDDEAASGQPPFHSLTGLLCTIPGIASLAATSILSEIGSDMSRFATDGHLVSWAGLCPGQNESAGKRKSSRLRKGAPWLKTLLVQCAWAAVKKKDSYYKAQFNRLKSRGGPKKAICAVAASMLTAVYHMLKNGVEHRDLGAGYFDRRPAAQKAKGLVAQLAKLGFKAELHPLGPVRQ

SEQ ID NO: 284379 - protein, 342 aa, unidentified
MQKVSIIGLDLAKRVFQVHGAHADGSVSFRKKLSRERLLAFLKEQPRCVVAMEACGSAHHWGRAIRDLGHEARLIPPIYVKPFVKRQKNDAADAEAIAEAAIRPTMRFVAIKTEEQQARAMLFRTRDLLVRQRTQLINALRGHLAEHGIVAPQGPTNVKVLEQAIEDEATSLPLLITELARVYLEQIDQLSERIGALEKTVAHEAKCGATTRRLRTMPGVGPITAMAIETFAPPMGVFRRGRDFAAWLGLVPVQHSTGGKQVLGRTSKMGQRDTRRLLNSGAMVFVRWACRKGTPEGSWLHRMLARKPRMLVAIAIANKMARSIWAMLTKGEDYRVPVAVAA

SEQ ID NO: 284380 - protein, 391 aa, unidentified
MTILVGIDVAKDKHDCFIMNSEGEVLAKPFTIFNNKEGFDFLYEKIQSVSSSDNIKVGLEATGHYSYNIIGFLLNKGLATFILNPLHTNLYRKSLSLRKTKTDKIDSKTIAMMLLSEVSLKSYSDISYHNEDLKSLTRYRFSKVEERAKLKTSFSRLAQILFPELEKLVPTLHMTSIYQLLEEFPSASAIASVHLTRLTNLLSKASKGHYDRETAIKIRDAAKNSIGSNMPAKSLELKHTIKLICALTIDIDEIEAEISKMMDKIASPITTIPGIGCNMGAMIISEIGDFSRFSSPDKILAYAGFSPSIYQSGKLDNCYAHMEKRGSRYLRYALFHAAKLVCHWDKTFADYLAKKRAEGKHYYVAISHAVKKLVRVIFHIEKTKQAFLKAS

SEQ ID NO: 284381 - protein, 360 aa, unidentified
MSFNGTSVGLDVHALSVVAHAVDEETGRVERARLCPDHGEILAWLDRLRGPVRVAYEAGPTGFGLARALAAAEIDCVVAAPSKLIRPAGDRVKTDARDAAHLTRLLRLGEITAVTVPEADVEAVRDLVRAREDARADLMRVRYRLSKLLLRHGRVYCGGQAWNGVHETWLRRQRFDDSHTMAAFDHHFDAVLTATAARDRLDQQIVTVAASPRWADPVNRLGCLRGISALTGLALSVEIGDWTRFTGASIGAYVGLVPTEYSSGASRVQGSITKAGNAHVRRLLIEAAWHHRAAYRNPGPTMRARWAKVDPALKDRGHAGNRRLHQQWCRFNERKKHHVVANVAIARELAGWCWSLATLN

SEQ ID NO: 284382 - protein, 400 aa, unidentified
MRAVFGIDVSKASSEVAILVNGDKVHSYTMTNDAIGFSRLLGDLETVHQPEIVFEATGGYSRRLQSFLENKGYAYTRLNPLEAKKQLDHLRVRKTDKIDAEKLAASQFVLNRKSSYVQEPVYQELRDLSRFYQNLTEDSVRAKNRLHKVLQVTFPNLETILSTPTGEQYWNLVSTFPSKDFVLDLNKDELSNSIRQSTSKRISEKRVAALADKMLELTKQSYSAVKKTSPILEEVRYYAQEWLRLSERRQALLDDMVQLAQPLPEYDILLSIPGIAETTATSIIGELGDIRRFQSANQINAFIGIDLRHYESGNFLAQEYITKRGNPYARKILFKCIHNIASASHTNPCHIADFYEKRKRQSQTTSTKPHTIASIHRLIRTMYYLITHNQLYDYTSTQNR

SEQ ID NO: 284383 - protein, 406 aa, unidentified
MRFYIGLDWADAEHAVWVEDENATKIVGRIVPHTAEGLSEWGRWLDERRAEGIELWAAIEKPEGRIVDFLLDHGVLVFPVNPKALDRARDRFRISGAKSDPFDARVLATFLRTDHGHLAPLRPSSEAAQELKGLTRDHARQVRQQTRLLNQLTATLKAYYPRALEVCDDLKSQWARAFLREYSTPAALAALTARQWQRWTREHRLGAERTAELWAILQGPQLPVPAHVVRVNARLVGALLAQLEATVTAVEAYREAITDFFASMPAAEWATSLPGGRSGTTVPQLYAELGDAAGRWQTFRHLQGHAGSVPVTDRSGKQVSVQFRFACNMHLRQAVHQFAFQSLGKSEWARAYYDRGRKRGHSHHHAVRALAAKWLKIIFVLWTRQVAYDETYHLATMARQHLRQTA

SEQ ID NO: 284384 - protein, 344 aa, unidentified
MEPTTLAVDLAKTVFQVAVSRRPGVTAETHRLRRSQIAAFFAGYPSSRIVMEACGSANYWGRKFMSMGHDVVLLPPSQVHPYVRRNKTDSADAKALLEAVRNDAIRPVPIKSVAQQVLTSLHRFRAGWMTQRTARINTIRGVLRELGILIPVGAAKVVPAVTALVEDADSEVPYALRHTLWEACREIRELERRIKEVSNQIKSVGKQFPAYPRLRTIPGIGPLTATALIGFVGDARRFATGRHFGSYLGITPTEHSSGLKRHLGRISKRGDVYLRTLLVHGARSVLLSSRRRRNPERLRLWAMTVEKRTGFNKAAVALANKLARIVWAVWRVDDGVYVPRPNTE

SEQ ID NO: 284385 - protein, 458 aa, unidentified
MHQAPPKGSSTNVSTLNSAEEKPFYAARIGLDWADQKHFWTMLTAEGKRTRGELKHTPEAIEIWAVELARSFGGRPIALALEQKRGALVAILSKYAHVHLFPLHPTNLSHYRSSVCASGAKSDPSDADLILDYLVKHPEWLRGLRPDTVETRSLQFLVEERRKLVNQHTSQLQILIYWLKQIFPQMLGWFDDMSTPLVGDLLLRWPQLPALKKASQNTLRKFFVQHNCRSEERIQQRLDEIGQAVPATTDAALLNTADLWIRLAVQVLAAQRAGIAEFDRQIEAIYEAHPDRFIMASLPGAGPALEPRLIAALGTNRERFESASGMACCFGIAPVTESSGKSCWVHWRWACSKFVRQTLHEWANCSIRSCGWAREHYDKQRGKGKGHHASVRSVAFKWIRILFRCWRDRVPYCEERYLKALRMHGGAVAAVVGQPMPVPPAVQWESCGGFSKIVELSS

SEQ ID NO: 284386 - protein, 465 aa, unidentified
MEGESVRLTLGIDIACRAAHRASLADARGEFLWVAKAFRTSVADLEALWAAMPDEAEVTVIMEPTRNAWVPLAAWFRRRGARVVLVPPERSADLRAYYAKHTKSDQLDSRLLARLPLLHPEGLHPEHGLGPGEPLRRATKLHSTLVHRRSQALARLDALLEIMGPGWHAALGGDLAAMTVLRFLAAGYADPDVVRRLGRARLTRFLYRHSRGMWGEARAGDLLAVAAETAALWDDGLDHPALAEDIALEARMALTLSAEIKELDERIIVLVDEADPSGIVRSAPGVGPITGAAILGRLGDPARFSSLAGVRAFSGLVPRLDASGLSGQHGGPTKRGDAVLREALYMAADHARRIDPTLAARYHRLMTESGKHHVSALCHIAPTLLTRIVACWRQGERYVLRDVDGRIVDVAEARTIIAARYTVPATVRARGRTVGGNRTGRRSEGSRSAPSPSPSLAHASTVVMA

SEQ ID NO: 284387 - protein, 462 aa, unidentified
MTIDKKLWRNRKERKELARRLRSEDPGLAIVHPHAAGIDVGNGAHYVAVPPDCDLQPVRRFECFTADLHRLADWLKNCGVKTVALQSTGVYWIPLYDILEERGLEVYLVNARHTKNLPGRKSDVQESQWLLKLHTYGLLNNSFQPTSEIRVLRTYWRQRAEHVRGVTMCIQRMQKAFTQMNVQLANVISDLSGVTGQMIVRAIVAGERDPWKLAELSHPRIRASKEEIAKSLEGNWRQELLFVLQQELQMFDTYQQRIAECDHELQKHLARLANSVPPPAKNEAKKSKPNKHHPQFHLADELQRISGVDLTRIDGIDVMVAQTLLSEIGLDMDRWKTEAHFASWLGLCPDNRVSGDKVLGRGTRHVVNRAATALRMAATTLLKSQTYLGAQYRRLRSKLGAPKAITAMAHRLARLVYRMLKYGQQYVDKGAAYYEQRNRQQQIEFLRKKAAQLGLQVTTTHS

SEQ ID NO: 284388 - protein, 394 aa, unidentified
MKLIGIDIGKNKHFFCVMDQQTGEIISQPVSFSNDKEGFDFLVQKIKSYPKDSILIGMEDTGHYHFALLKYLLDLQYTVALINPKTTDFNRKMQGGITKNDKLDTINICDVLDTPERKKQYRITKVNSFDLYEQKQLTRHHHNLKEEENVYKNRLQKCIDIVFPEFNKLFNSKYGIVYMNILKMFGSAENIANTDIRTIRKCFEIEGRGNRISLTPERLKECARSSIGISSSAEVIQIKHLTAQIELIEEQLTEIDKKIEEFSIQNNSPILSIPGISHFSGTSILAELGDISNYSKPSQIIKFAGVAPLHYESSQFNAQHTSITKKGSKYLRKTLYQIILPVIKHNPVFYKYYQLKISQGKGHRCAQGHCVRKLLRIIYHLLKTNQQFDHQLLR

SEQ ID NO: 284389 - protein, 388 aa, unidentified
MKKNSTTAKKSPKQALAKGQKKQIRQLAAEQRLTIGLDLGDRTTHYCILNEAGEVVSEDQLQTTKTGLESLFAKMPASRIALEVGTHSPWISRHLAAMGHEVIVANAHKVKLITQSVRKNDRIDARQLARLARVDPQLLSPIRHRGEEAQMDLAVIRGRAELMEARTKLINSARGLVKPMGERLKGCDADQVGVGLAEGLREEARRAIEPLLKAVEAISEQIGKCDEQIAEITKRYPEVKVLQQVYGVGPLIAATYVLTLEDAERFAHSRDVGPYLGLTRKQRDSGDSQPELGISKAGDGLLRSLLVEGAHCILRKGAPESDLRAWGMGKMGKGGKRAKKRALVAVARKLAVLLHHLWATGEVYDPQYNRKAAEAAKAKWKGKAEAAA

SEQ ID NO: 284390 - protein, 343 aa, unidentified
MKYIGLDLHKKSIFATVLDGDGKILSKTKIGPKSRDICYYLKSQGAKGELSVAMEASYNWPYYYRAAEEAADTIVLAHPLKTRIIGEAKIKTDKIDSAVLAYMLKADMLPAAYVPSKATMENKLLLRSRISLVRIRTQIKNKIHAIVDRNTDSYLGLENMTDIFTKTGIKILQDTKICPIDHKILAGYLDLISEIDKKIKDIESQIDKKSIEDKDIELLKTIPGIGTFTAFLIKSEIDDIKRFSSKEKLSSYAGLIPSTHSSGQRLYHGRIVKQGNKFLRWALTEAAQTSIRCSEYFRYHYSKIRSRKNGNSATIAIARRMLEVIYVMLKESREYIEKPVDIK

SEQ ID NO: 284391 - protein, 369 aa, unidentified
MNSQYPVVIGLDVGKTGHHACALDPDGSKLFDKPLPQHEAKLRELFMGLQKLGDVLMIVDQPNTIGALPIAVARDCGCAVAYVPGLTIRKAADLYPGRSKTDARDAFIIADTARTMPHTLRQVDRDSEVLSAVKVLAGFDEDLAHETTRALNRIRSLLTQIHPALERVFTGGSLSTALVLDLLEKFGGPTRLKTAGRGKVLRFARSHSRRDPEPLVDRIFTALGEQTVIVPATAAVELVIPRVAGQIKELKAQQATVARKVEGMLEDFPLAAALRSMPGIGLKTAAQILLAIGDGSAFQTPGHLAAYAGITPVTRRSGTSIRSEFPARSGNKRLKTPCSTLPGSPRTTTRSRRPTTTTNAPRASATTPP

SEQ ID NO: 284392 - protein, 552 aa, unidentified
MKMGSGRLPTPIVSWVCEPADKLGAGARPRRVTHCRFEHAGQNFGSLDRGPRAAHPMEWYGFDWRASEVGARKTKQKPAMVEPVEIPDAEHELVIERAAAIDVAKAAGKVCVRLPGKSGRRFSRVWDVPARTGAITELAEQLVKLGIDKLTVESTSDYWRIWYYLLEDAGLDVQLVNSRDVKNVPGRPKTDKLDAVWLAKLTEKGLLRPSFVPPAPIRVLRDYTRLREDLIRECTRYWQRLEKLLEDAAIKVSAVASKLDTLSTRDMVEALIAGERDPRRLADLARGRMKAKRSDLITALDGRFDDHHAELARLLLGQIDALTAQIGALSARIEQLIDAMDESDHHTGDRGGSGGAVPPATGEQTTALGPPTTTAIGVDSDTATVVEALRLTAVERLDEITGVGQRAAQTIIAEIGLDMTRFPTPEHLVSWAKLCPRTIQSGPVIRGGKTGKGNPYLKGALGEAAAAAARTDTFLGERYRRLVKRRGRLKALVAVARSILVIAWQLLSDPTARFHDLGPDYHTSRVVTERKIRNHIAHLTAMGFHVTLQPAA

SEQ ID NO: 284393 - protein, 299 aa, unidentified
MQIRSVGIDLGKTTFHLVTLGDGGKVLFKKKFTQKQLITFTANLQTSLIGMEACSGAHFLGRALREQGHDVRLIPAQFVKPFVKSNKNDFLDAEAIAEAVDRKNMRFVPIKTDDQLDLQAVHRVRDRLMTRRTSVINQIRAFLLERGVVFAKSPIRLRERIPEVLENADENLTPRMRNLLSWLWEEWKDLELQLHVLNLEVQQIASNDSACRRLRQIPGIGPLIATAIVAAIGNGAAFHKGREFAAWMGLVPKQHSTGGKSKLLGISKRGNQYLRKILIHGARSVVLNSKRDQVQMGNG

SEQ ID NO: 284394 - protein, 293 aa, unidentified
MYRNKDMLLTADYHAQNTEIRWLNCHTGEERRLNIPTTREEILRLVEKAQAEAARVGGEVIWIMESTTGWARVKELIGSRTRFILANVLQMPLPPKAYRRKSDKIDTGRMQREFLNGSLPPSYQPTAWWREVRRLVDSRQDLVERQTAVKNWITHFLHHETWVDRSGLWTQKGLARLRGLKLSESDRMVLDIKLQELEQIAELLSKVETAMQAVYDQWPEAQKVDEVRGIGMVTALSILAYIGPIERFASAEALISYAGLAPGHRQSDKTHHNGQIGGGGTDSHLRYLLIESM

SEQ ID NO: 284395 - protein, 355 aa, unidentified
MDREKYIAMDVHQASISVAVRDAAGKLIVESIIETKAATILAFIRGIQGSLWITFEEGTSAAWLYDLLKPHVTKVIVCDPRKNALLNAGNKNDRVDARKLSDLLRAGLVTPVYHGENGVRTLRELCRGYLTINKDLTRVMNRLKALYRSWAIPCAGDKVYSPRHRNTWLEKLSEAGVRRRAEQLYQQLDALVQIRREARRELLAESQKHSATPLLRQIPRLGPIRVALLIALIQTPHRFRTKRQLWAYCGLALQTRTSGEYRFTGGEPQHSKRLPALRGLNVNHNHDLKNVFKSAATHVSTSTDPLGDFYRSLLAKGMKPTMARLTLARKMAAIVLSVWKKGARFDPGELKQQAA

SEQ ID NO: 284396 - protein, 414 aa, unidentified
MESSYKIAGRDVHKKMLAVVIRDVAQVGEFRFERRKFATGAMELPALAKWLAEQEVREAVMESTAQYWKPVGQALEGQCRRQLAQAHSNRAPKGRKRDFADAERLVRRQVAGELILSFVPDPEQRLWRTLTRTKQQWTRDRVRLQNQLEGLLEEARIKLSSQVSDLLGLSGRRMLQALADGENDPVQIAKLAAPGLRASQKQLADAMSAAATLSPLHRQIMKLFLQRLKLIETPMDALESRVAEPLRPFQDAVKRLAEVPGLGADSAQQIMAEVGPRAATFPSPDQRASWVGCCPGREESAEVSTSDSSPKGNKHMRRLLSQAANAAVKAKGSVFEILYRRLAPRRGHFKAIWAVAHRLCRIIWKILHEGVDYEERGYRTNPHAVQKRTNRLVRELRRLGYQVQLTSSKAGAPA

SEQ ID NO: 284397 - protein, 428 aa, unidentified
MLKINPLSTLYVGIDVSSKSNFVCALDFYKNKYINSSFANNQPGAEELAKKILECLKEHPDLNTIVAALESTSVYSIHIANFLSSCEELMHFKPYVFVLNPKCTANYKKSYIGLGKSDPIDAFVIADYARAGNIETEPWRGSQFLALKRLTRHRLHLVECMTREKTYLVSNLYLKFSELQMLEGDGQPFCDIYGAASSSVLTEYLSPEEIIDSSEESLINFLAEKSRNRIKDISKTAELLKKAARDSYRLDKALYEPLNVSIASSFNCIETFKKEIKLIDTAIEREIKGLNPNAFIILQSIDGIGPVFAGGIVAEIGDISAFHSSDALAKYAGLMWKSNQSGDFNGEDTPMSKAGNRYLRYYLGEAANSMRKHNVEYGAYYRRKYNEVPKHQHKRALALTSRKFVRLVYGLLARNQLYSGVSLDTSNE

SEQ ID NO: 284398 - protein, 392 aa, unidentified
MVVSVGIDVSKDKHDCFIVSAEGKVLADVFTVPNNMDGFHCLLQRIRDCTAPQDKIKVGLEATGHYSCNLLGFLLDNGLTTCVLNPLRTNLYRKSLSLRKTKTDRVDARTIATMLLSDVGLKPYTSTAYHNEELKSLTRYRFDKVKERAKLKSSVSRLVCILFPELEKLVPSLHLASVYALLEEFPGAKQVASAHLTRLKALLETASKGRYKRDMALEIRDAARNSIGSRMPAKSLELQHTIRLIRELDNEIAEIEGQIQAIMDELHSPITTIPGLGFRMAAMILAEVGDFTRFDSPDKLLAYAGMSPSTYQSGQLKNCYPHMEKRGSRYLRYALYNATKYVCHWDPAFADYLAKKRAEGKHYNVALSHAAKKLVRLIFAMERSQKPYFPTS

SEQ ID NO: 284399 - protein, 346 aa, unidentified
MEQISRIGMDTSKRFFQLHGVNAAETVVLRKKLRRKEMVGFFEKIAPTVVGIEACGASHHWARLLQSFGHTVKLIPAQLVKPYVKRGKNDMADAEALCEAMSRPTMRFVPIKTAEQQAALMLVGLRDRLIRNRTQLCNAIRGYAAEFGFTAAKGVANVRPLLERIQADEGVPALARELFAAQAEEYAQLEEQIAEISGKLMAWHKADECSRRLAKIPGIGPIGAALLMMKTPAPELFRSGRQFAAWIGLTPRDHSTAGKVKLGVITRAGDEALRAVLVSGATAVIKHAVGCKGRASPWLIDLLKRKPPKLAAVALANKLARIAWKLMVTGEAYAATSTPIASASAV

SEQ ID NO: 284400 - protein, 347 aa, unidentified
MVTVGSDSHKQSHTLVAVDGNGRQLACRTVSATSLGHLQALRWARRWPQRKWALEDCRHLSRRLEADLLRAGEVVVRVAPRLMAAARAQGRERGKSDPIDAAAVARVALREPHLPQAQLEGREREVKLLLDHREDLVAERTRMQNRLRWHLHELEPGIDVAPGALDRKRVLAGIEERLARHENLVAELATEVVVRIGELTIRINQLERRLAGLMVEFSPRLLELPGCAALTAAKIVGETADIGRFRSRAAYAMNNGTAPIPVWSGNHQRFRLNRGGNRQLNAAMHRIAITQLGLNGAGRIYLDAKVAGGATKKEALRALRRRVSDEVYRRLRADRLERIPGTPQLAA

SEQ ID NO: 284401 - protein, 405 aa, unidentified
MLLVGIDWADAEHVYCVMDEAGATLASGSIPHSPEGLAALVAAIRTHARAPEEVAVALETSQGLLVGALLDQGFVVYAINPKAVDRHRERFRVAGGKSDLRDAWVLATLLRTDRALYHPLLPDSEPAQELRVLTRDRAELGRTRTMLSNQLTACLKAYFPAFLDLFDDPDRPVALAVLQQWPTPAALRSASGKRLEAFLRQHHQPEAAAKARDIQTRLTQPAFQVAPVILRTKARLAQTLGHQLRALAEEIAAYDAEIRRVLKTHPDGELYLSLPGAGDLLAARMVGELGDNRDRYRDPAIAQSAAGTAPVTRASGTTCIVHVRRACIHPLRETMWHFAFCSTTHCAWAKAYYRAARSRGKRHAEAIRMLSNVWLRIIIAMRRNHRPYDQAVFLNAREAHLATAS

SEQ ID NO: 284402 - protein, 397 aa, unidentified
MPFGRRAAGPGGRDFIGTCANRCLFTVVSARPAQSPLARKEDRTSMAPRELVVVGGVDCHSEFHHAVALDERGRWLGELRFAATRAGYGRAVRWFTALGHVEAVGVESSGSYGAGLARALTQAGVRVVEVNRPHPHLRHLRGKSDAIDAETAARKVLAGEATAVPKDTTGVVEAIRELKAARESAVKARAAALVQLRDLIFTAPTGLREALGGKSLRAQAGLCRRLRPDRTRIHEPAEAAKFALRSLARRIASLDAEVAELDRELDVLVRRAAPRTVELVGLGVIHAAQLLVTAGQNIGRIRTEASFAHLCGADPIPASSGKTTRHRLNPGGDRAANSALHMIAVVRLRHCERTRAYVARRIQEGRGKREIIRCLKRYIAREVYRSLQADLGALAMN

SEQ ID NO: 284403 - protein, 347 aa, unidentified
MGKSITDLSSVTTVGLDLAKHVFQVHAIGAFGRVIVAKALRRKDVLAFFAQLPECLVGMEACGSAHHWARELIKLGHDARMMPPAYVKPYVRRQKNDAADAAGICEAVTRPSMRFTGVRTLENQAALMHHKAREMLVAQRTQLINALRGHLAEIGVIAAQGPKNARELAGVVMAEGDETIPACVRAALAPLVRQLHALDQEIARSDRTIAAMARGDEMARRLMTIPGLGPVTALAMAASVQDVSAFSGPREFAAFLGLTPKQNSSGGKERLGRISKMGNRYLRKLLVVGAHAVLYHRKPHEDALRSWAKKLMQTKPFKLVAVALANKMARIAFAIMRGRTTYSAAPV

SEQ ID NO: 284404 - protein, 466 aa, unidentified
MENNYILYVGMDSSKGKADAAILKVSDRRSVKPKFLRKKLSFKFVKSEVASFLETVRSYSDVNCTSICFALEVTGIYSTNVYDYIKANLYENESIKFLNTDFVNQWRIAHNIAKSDPLDAQTISTIIGTDLDVQYVNDNVFENKNGYQDLKALVHRHYQIKKIYSQEINRLIAQCDCLFPELQYVFEPKSAAFIAVLSSYPTTHDIINASRVEVFDVVYEATKHRCSMDKVDKLFELCQDTLVPDDISSYGKSIILDLVENIKNIKGQLKSIERYIKDIASLNPAYKLLLTITGCGPITAATVIAETGNIRRFKNADCFVSYSGTSPRNKRSGTSVETMGKISKKGSRYLRHAIYMIAEFARRHNPVLKHQFERIKNGNKKRHKLANIAIANKIARYIYSIMKNKSSFVILHDHIMRLPEETRDTFFNSISLDFPKNTRKQIYQYSDINGELHRFVYIKTDEMIPA

SEQ ID NO: 284405 - protein, 423 aa, unidentified
MENTAARKRKQVPEGYLIIGIDPHKKRHAAVAITQDFTIRDKFKFDNTREGLETMLRRTRTEMVKADCRGVMFAIETGGHYWRNIAYFLDEQGIPFRFINQFTLKRRREGKDLNHKKNDYRDSEVAAQLLCTGEFTESTIPQGVYAELRTAHNAYRRLVKERTRITNLVKGLLDGLFPEFTQVFKDPCGLTALSVLSACAIPGVIAGMTEEEFVATIEAKHLGRLMRKKLRELHYIARASIGIAAGARSVSSEISFLVEKFELIRRHICIIERTLVSLVDETEEGKYLLSIRGLNYIAVAGLLAELGCFKSYRTAKQMIKMAGSNPTESESAGKKGTHTPMSKQGRPVLRYCAWTSVIPMLRFNSDFRAWAKQRRERPAHANPLNGREVVGAALNRLLRLAFAMVKNRTYYQISKPELTLVAV

SEQ ID NO: 284406 - protein, 337 aa, unidentified
MTLYCGIDLHANNSVVAVLDEDDQRVYEKRLPNDLATITEVLNIYQAELAACVVESTYNWYWLVDGLMAAGFPVQLAHTSALPQYEGLKYTNDFSDARQLAHLLRLGILPTGYIYPKEERALRDLLRRRLLLVRQRTMHHLSLQSLIARHSGQRLNAYQIKTLSQPQIADYLSGLALLSGEITHQAWAWLDGAIRRIEQELQQQIQPRQDYQLLQSVPGIGSVLGTTIALETGTIQRFASAGNYASYARCVKSEKISNGKRKGQGNKKNGNKYLAWAFMEAGHYSAIWNPRVKRYYQRKKARVHILVAKKAVANKLARACYHMLKRGEKFDVTRAFS

SEQ ID NO: 284407 - protein, 370 aa, unidentified
MSTSVVYVGLDVHKDSIVIAVAREARQEASKWKTIPYDAVRLVKALKTLLKEGEVLKVCYEAGPTGFGLCRRLREVGIDCIVVAPSLVPGKPGDRVKTDRRDAAKLAHFLRSGDLTEVCVPDAAVEAIRDLERARDDAKCAERVARNQLSKFLLRHDRHWEGNTWTSRHRDWIRVQKFDFPAQQRVLEDYLKSVEDLAERVARLTSQVEELVQETVLAPLVKALQAFRGISVVSAVTIAAEVGNFKRFRTANQFMSYVGLVPSERSTGKWRRQGPITRCGNAHLRRILVEAAWHYRHVPVLSKELRRRNQGVAAGVRQMAWEAQKRLNKRLYHLIHAGKSAQKSITAVARELAGFIWSVGQEETLLAKAS

SEQ ID NO: 284408 - protein, 406 aa, unidentified
MTYRVFVGIDWGSQEHAVAVLTRDGTGAQERKVAHTGMAIAALVDALITLADGAPESVAVALEVPRGSLVEACLERGFHVYALNPKQLDRFRDRYTVAGAKDDRRDARVLASALITDVGAFRRLDPEDARLIQLRELTRLEEDLDTERRRLSNRLREQLYRVAPGLLTLCPGADEPWLWTLLTRASTPAGAAHLPRAAVARVLHQHRIRRLTPDDLLAVLRAPRVPAAPGVLRAVEDHLAVLLPRLRLAAEQQQTCATRLEQLLDELGQTQEHRDVAILRSLPGVGRKISATMLAEASRPLAARDYHALRTQAGSAPITKQSGQRRRVTMRRGCNPRLRNAVHYWAQVSAGHDAVSAALYARLRARGCSHGRALRGVADRLLAVLVAMLRHQTLYDPERRRISAAA

SEQ ID NO: 284409 - protein, 364 aa, unidentified
MKKVTTAATNKVQKSRRVTIGLDLGDRSSHYCVLDETGRILVESKICTSPDAMKGVFGSMPHSRIALETGVHSPWVSRLLSGEGHEVIVAHARSVRLIGESRRKDDRLDAQTLARLARIDPQLLCPVKHRSAKAQAHLTVIRARAGLVRARTALVNTARGLAKSYGERLRGCNVRNMNPEKADALSPELQMALQPLLAGIEVLSEQIREYNERIETLAQKSYPPVELLKQVKGVGTLIALTFLLTLEDPHRFPKSRDVGCYLGLQPGRRNSGQSEPQMHISKEGDPYLRTLLVQGAQHILGPFGPDSDLRRWGLKLAERGGRNAKKRAIIATARKLAVLLHHLWISGEVYEPLHNSQRALTAAA

SEQ ID NO: 284410 - protein, 343 aa, unidentified
MNEVITIGVDLAKNVFQVHGIDAEGAVIVRRQLRRSQMLPFFKKQPPCLVGMEACATGHHWARQLVALGHAVKLMPPKYVKPYVKRNKNDMADAEAICEAVTRPTMRFAAIKTVDQQSVLLLHRTRQLFVRQRPSLINALRAHLAEFGIVAGVGRNGLERLLQVIEDGDDERVPPTARDCLLALRDQLEMVKHQILGADRHILAWHRSSEVSQRLDDIPGVGPLIASALVASVPDPHAFKSGRDLAAWIGLVPKQNSTGGKDRLGHISKAGNRYLRTMLVVGALSVIRRAKQLGYTRRPWLTKLLERRSTKIAAIALANKNARTAWAMMAHGTFYEEPQSEAV

SEQ ID NO: 284411 - protein, 395 aa, unidentified
MISVGIDVSKGKSTVCLLKPYGEIVCKPFEVQHTEKDLEELANLLQKLDGEIKIVMEATGIYHLPILTFLLEKGFFVSVINPLMMKRFSKDNSLRGAKNDRLDSVMIASYGIEKWYKLKKYEVNDRIYTELRLLGRQYYRFMQTHVKHVQELTHLLDYTAPGLKAMFNSWNEHRNRDKLSDFVERFWHFDLITSLSREEFVEQYLLWAKEKKYHQSRSKAEKVYDLASNGIPTLSSHTPSTQMMIQGAINVLRIVNNSLYYILSRMKELAKSTVRSMGGEGDSLAPRLIAEIGNVKRLRNGHALVALAGIDPPPYESGQFVGTHRRISKRGSPILRKIGFEVMRVLKSHKEPEDNAVYNYILKKEAEVKNKKLSKIAGLNKFLRIYYVRVMEVYQ

SEQ ID NO: 284412 - protein, 350 aa, unidentified
MVTIGIDAHKRSHTVIIVDEQGRKLATRTVGTTTADHLSLLSWAKQHADEIVWAVEDCRHLSRRLERDLLAAGEIIVRVPPKLMANMRDSARSFGKSDPIDALAVARAALREPDLPVARLDGPEREVRLLVDHREDLVGERTRMISRLRWHLHELDPGNEPALRTLNHPRNLDRLAERLAGVEGTVARIARDLVDRCRTLTTEINQFEREITALVEKLAPALLAMCGCGALTAAKILAETAGIERFKSSDAYARHNGSAPLPVWSSNRSRHRLSRSGNRQLNAALHRIALTQARLHPGARALLARRRANGDGGLEALRVLKRRLSDVVYRALLADAHAATATYTRNLTVP

SEQ ID NO: 284413 - protein, 363 aa, unidentified
MQNSITWVGMDVHAENNVLAAVRGSSEAIVFRAEFPNTPKGRERLAGKLAEHAPVRCVYEAGPCGYELRRFLEDRGIECVVAAPALIPRKPGDRVKTDRKDAEKLARLHRLGELATVFVPTPAQEALRDLLRTREDAREDLLRRRHRLSKFLLRQGRRYTEGVRWTTRHWDWIRAQTFTDHNTETVFREYIVAIEQEVERIRRIEQQIVEESRSPEVGKAIARLRALRGVDTITAMTIVTEAIDLNRFRSPRELMAYIGVVPRERSSGGRERRGSITKTGNAHIRRVLIESAWHYQRLPAGTPKTILVRREGQPPEVIEIARKAELRLHRKFMKLLGRGKPKGIAAVAVARELAGFIWALGRG

SEQ ID NO: 284414 - protein, 462 aa, unidentified
MKRKKLASKEEKPRRRKVDWKALEIVHPHAAGIDVGGREHWVAISPERDEDPVRRFDCFTADLEQMAKWLVEKGVRSVAMQSTGVYWMPVYEVLEQSGLEVYLVNARHTKNLPGRKSDIQECQWLLKLHTFGLLNNSFQPTDEIRVARTLWRHRSNLVAQASSAIQRMQKALTEMNVQIHNVLSDLSGVSGMAILKAILRGERDPWSLAALANPAVKASPADIAKSLHGNWREELLLVLRQEMELYQTYQDKIAECDHQLRRHLQSLAPKVDLQAQPLGPRPKGKKIPRGNAPKFDLRSELYRITGVDWAQVNGMDVQVAQTVITEVGVDLSCFPSEHHFTSWLGLCPMNEQSGGRILNRRTPKVVNRATVAFRLAAQGLLRSQSYLGAQYRRLRTRLGAPKAITAMARKLACLFYRLLRHGQPFVDKGAQYYETRYREQQIRSLVKRARKLGLELVQPEAA

SEQ ID NO: 284415 - protein, 441 aa, unidentified
MKENKEVVEFEVVNFHGAGIDIGSREIYVSTDGVQVVSFPTFTDDYRRCCNYLKDQGILSVAMEATGVYWMSLYDMLERSGIHVCLVHPREVQQVKGRKTDVKDSQWIQRLYSAGLLRESIVAEGLLKELRMLVRERVDLIGMGSTYVNKMQKYLELMNIKLRNVIAEIHGESGLKIIRAILNGERDEEKLLLLCHTSIRKNKGTEVKKALRGNYNSRYLLLLKENLRLWEEHQQSIKNIEKQIEELLDEMNKDHLDISVDSPSNPSRHHNPQINDLHTKMVQLFDGVNLSTIAGINDSTMLRLLGEVGSDMSRFPTVKHFVSWLGLSPKNKQSGKMKKRVKSSKDNCAGEIFRQSAQSLSNSKHNAIGAFIRRLKGRKGSPVAIKAGARKLAVAFYNAITKGMDYVEEGAIRYNEQWILRERRALSNLALKYNFKLVEQQ

SEQ ID NO: 284416 - protein, 355 aa, unidentified
MSEITRVGADLAKNVIQVHAVDAAGKVVSNRPLARDKFMAWCAQLPAGCMVAMEASSSAHHWARKLVAMGLDARIIAAHLVAPYRLQGKSGKNDANDAGAICEAASRPQMHFVPIKTIDQQSMLCVHRLREGFKTDRTACVNRIRGLLAEFGLVFGKSAKVLRAVLTDVLEDADNELAGVARLCIERAKEQWAELDAHIQWCDERIAAHLKQNEQVRQAEQLAGVGPVTASAVVATVGDFKQFKDGAQFGAWLGLTPRQNSSGGKNNLGSITKRGDMYLRMLLIQGAKSAVMTAHLRDDPISKWAHQLREKSGWQKAAVALANKNARILWAVFVRGNPFDARHVSVKPGATVAAA

SEQ ID NO: 284417 - protein, 364 aa, unidentified
MMRFYREQRRFYCGIDLHASKMYVCVLDDQGTVVLHRNMRTEPDALKRALAPYRESVVVGAECMFSWYWVADWCREEGVEFVLGHALYMKAIHGGKAKNDRIDSEKIARLLRGGTFPLAHVYPKEMRGTRDLLRRRNLFVRRRAELLAHVQNTFTQYNVPTASGKGRDRVREGDVGSSFEDPSVQVMLDADVEVIEQLDETIVDLETHVLKHAKVHDAARLHLLQTIPGVGKVLSLVMLYEIQDVNRFENIGQFASYARLVACAKESAGKKQGSGGRKIGNAHLKWAFSEAAALMIRSSPEAKAFMEKMTRQRGKARAVALVAAKIGRVAYWIMKRKQPFDARQFWKNSLPKGMPTVEGAAMTP

SEQ ID NO: 284418 - protein, 425 aa, unidentified
MARKKKLHENVSGIDIDKLWLWCCVIVATSTGTRVHHNQFSNDPSGISKLIRWLKKKKVTRVAFESTGVYWIMLYDKLHGKFKVTVGNPRQMKPMRGYKTDRGDGKWIANLLRVEAIKPSFIPPKLVRKLRLYTRQYRSLVEDRTRIKNRITKCLRQAGITLDARISDLFCVSGRNMIKALIERKGPEEVAGLGARLDASKDELMEALDAAPLSRQFRNVIGRWWRMLLHYDAEIERLWEKELEPAARPFEKQVQRLDTVHGVARNSAICLIGEIGVDMSVWGSIKRLASWAGVCPGNNASGGKRKRGTAPKGNKYVRGILGEVAWAAIRTKGSSFRDWYYSNRKRLGHKNKAAFAVGHKVLGAIFSVLDQDKDFEDACIEEVQKRARRVRNSLREATDDELEEEVGRRHRRRDREAQIATPLPV

SEQ ID NO: 284419 - protein, 343 aa, unidentified
MAEITTVGLDLAKNWFQVHAADAQGRLVMRKKLARSKVIEFFANLPPCLVGMEACGGAHHWARELIKLGHEVRLMPPQYVKPYVKTNKHDAADAEAICEAVTRPSMRFVPVKTVEQQTMAQLHRIRQLLVKQRTMHVNALRGHLAELGIVRGQGRGKAGELVRLIEAAADDGIPAKVRHQLRHLVELLRDLERRLAELDRELGELAREDPVARRLATIPGVGPITATALAMTIGDIGRFRSGRHLAAYLGLVPKQHASGGKERLGRISKRGDTYLRSLLTHGARAVVRVVRARPDPSPGWIGRLLQRRPVNVAVVAQANRTARIVWALLTEGEDYRRPTAAST

SEQ ID NO: 284420 - protein, 377 aa, unidentified
MKAPSTRPAAVLGLDVGKSSHWACLIDRDGEVLASAPVRNREAELDALFASAPAGTLVVVDQFRNIGSLAVRRARAAGLGVAHLPGLAASRAAGLFAGEAKTDERDAAVIARTALGVPDSLSGVPGRGEALEAARALSSQRDHVVACATRDKNRLRAVLLESCPALEAAVDLSDRRWLELLAGFGGAWGISRSGAEGPRAEAAGEAAAASTAPPPALVEAENRQVRFLAARISEALDEAGALEAETAALLEGDETYACLLTVPGIGPRTAAQLAVSVDIGRFPDHDHLASYCGIAPRVRSSGTSVRSVRASRRGDARLKSLLIFSCNSLVRSSGRYGEYYRACRARGMGHGRALKAVARKRLRAIYAVMRDRVPYRE

SEQ ID NO: 284421 - protein, 315 aa, unidentified
MSETSINVGIDVSKDTLDAALSTGEGFSRANDEKGILALVEQLKGFQPERIVLEATGGYEQALVAELAVNALPVTVVNPRQVRDFAKALGRLAKTDSMDAEVLMLFAQAVKPESRALPDEKTRELQALVVRRRQLLGIVLAERQRLAKAPAVVRRDIRAHVAWLIKRLKDIDQQLGAALRASPLWREREQLFKPVKGVGRVLLSTLCASLPELGRLNRRQIASLVGVAPFNCDSGKFKGKRHCWGGRADVRAVLYMAALSAKRFNPAIRVFYERLIVAGKPKKVALTACMRKLLSILNAIARDHTPWNPNLHLST

SEQ ID NO: 284422 - protein, 438 aa, unidentified
MRKRLEIAFPNAAGVDVGASSHFVAVPADRAEEAVRQFEVYTADLQALGDWLHECGVDTVAMESTGVYWIALYEVLERRGFKVHLVNTRHVKNVPGRKSDVLDCQWLQQLMSFGLLSGAYRPADEVCVLRAVTRHRDALLRAQAREIQRMQKALVQMNLQLTEVLSDVMGATGQAIIRAIVAGERDPLRLARLRDHRVRADEAQIAKALHGNWREEHLFALEQSLALFDAYQVQLSGCDAKLQSLLGRMARHSSTPSDKPRAKSLAKNAPKFDLRTALYQWCGVDLTRIDGLEVTTVLKVLAEIGTDLSRFASVKHFCSWMTLCPGTKISGGKRLSGRTTPSINRAKLALKMAASNLIRSRSAMGAYYRRLCARMDKPRAITATAHKLARLIYLMLTRGQEYVDRGEAYYEERHKQRVIASLRRKAASLGMQLTPAAA

SEQ ID NO: 284423 - protein, 394 aa, unidentified
MFIVGIDIAKRSHEAIITEDGQVVRKAFSFRNNCTGYNLLLEQVRRLTLVKSQIVFAMESTAHYWLALYARLLKDGYTVMVLNPIQSHSLRELYIRKAKTDARDSLIIADLVRFDRCKASNVPQDKILALRELCRSRAYLVDMAADLKRKLIALLDRIFPEYESLFDSVFSKASIAVLSKYSTPQKVKNANLRKLTDILMESSNGHFGEWKAHQLKEAACSSFGIDDSGGVYSTLLGMFLEQILSLTAQADSLEKQISVFFQEFNNPLTSIPGVGTVLAATILSEIGDITRFSSADKLLAYAGLDPSVKQSGEFKNNQNRMSKRGSPYLRRAIWLASTVAVHRDPMFQTYYEKKISEGLHYMNVIGHVSRKMTAVIFAVLRDGQPYQPILQSAG

SEQ ID NO: 284424 - protein, 413 aa, unidentified
MDTIYRNVAGLDVHQKTIVACVRAALPGGRSKEEVREFGTMTSDLLQMSEWLASKGVTHVALESTGVLWKPVWNILDGRFELLLVNPRHLKGVPGRKTDVIDCQWIAQLLQCGLLRSSFVPSRPQRELRDLTRQRKQLIREQTRTVNRIHKTLEDANIKLGSVAADILGKSGRAMLHALVSGERDPAQLADLAKRRMRGKIPVLKEALHGHLTDHHVFLLRSLLNHLRYLEGEIENFDQRIAEGLASFVDPDQMQRLDLIPGVNRRTIECVVAEIGTDMRQFPSEHHLSSWAGMCPGVEQSAGKRKSSRTTKGNSWLRSALTEAAWAAGRTKNSYLGAMYRRMAARRGKKRALVAVGHVLLVIFYHMLKSTVEYHDLGPDFFDKLKPEQYRRYLVKRLESLGYTVELQPKNAA

SEQ ID NO: 284425 - protein, 311 aa, unidentified
MLTNEAIVYCGNDVSKDHLDLVVPGHRPVRCPNTSAGCRALIRHLPPGAQVVLEPSGGYERPLRRALHAGGVALSLVNARQVRDFARARGQLAKTDALDAAVLAAYGACMQPRPTPAPDPAVEHLAALVQRRHQLVQLRVAEEGRLATIGDAVVEKLIRTHLRHLEKTVAALEMQMAQALETHPPLRERAACLRQIIGIGPIVAATLLATLPELGTLNRREIAALAGLAPYNCDSGQWRGQRHVQGGRPGAREALYQAALVAARFDPISKAWYESLLARGKPPKLALTGLARKILIHANAKLKNMSPPTPN

SEQ ID NO: 284426 - protein, 443 aa, unidentified
MKELPVLDSRAAFCDVGSEHMHVSIAGGLPKVFGTFTSQLHELRDWLLGEGVHSIAMEATGVYWLSLYGVLEAAGLEVVMVNGRQTRNLPGRKTDMKDCQWGATLHAHGLLKAGFVPPSHIRKLQDYQRLRTDHIASAASHVQHMQKALERMNIKLHNVISSLMGVSGLAIVHAILDGERDPAKLLELCYSTIRHKKAKEVIEALRGTWEPEHLFALRQALQSWEHYHRQIAECDQQIQLLLQEITFNDTQGGGIGEKPKATAGKHPSANAPQISGLHRMLIDLCQGKDLSILPAHTDYSILQIISEVGTDLSKWPTEKHFTAWLGLAPGTSQSGKRKSNVKHSRSRVGRYFCVMARSLARSKDMALGGFYRRLAARRGGLIANIALARKLAALFWRVMVKGTEFVEEGLAAYEAKFLEGKKRSLRRLARELGQTVSPIPVTV

SEQ ID NO: 284427 - protein, 342 aa, unidentified
MSAAFIGLDLAKSVFQVHGVDVHGKVVVTKRLRRDAVLAFFANLAPCVVGMEACAGSHFWAREIARLGHTVRLMAPQYVKPYVKRHKNDRADAEAICEAVQRPSMRFVAVKTEQQQSILVIHRVRETLVAQKTQLINALRAHLAEFGIVAPQGAGKVSQLTAVVADPEDTRIPGLARQVLQNLVDQLRDTERRVEEFDARLAEQAREDEICQRLTTIPGIGPITATALVATIGDATVFESGRHLAAWLGLVPRQNSSGGKERLGGISKAGDGYLRRLLVHGARAVMRWQGKTSPWLADLLKRRPVNVAVVALANKLARIAWAVMARGEDYRKPDAAAEPAQG

SEQ ID NO: 284428 - protein, 425 aa, unidentified
MKGTQNEKISQIKFETLVVGIDIGKETHYARAFDYRGIELARLLKFSNTDQGFQRLEQWMRDICKQQEKTEIIAGFEPTGHYWFTLGDHLKRQGYKLAIVNPFHVKRTKELDDNSPTKNDRKDPKTIAMLVKDGRYREVYIPDDIYQELREAVSERERLQEQLTSIYNRVVRWLDIRFPEFTTVFKDWRRNAALITLRSFPTPEKVVKMGVDAIIETWRKQMKRASLKRAERLVKAASRSVGRTSGKVASEASLQNLLAEYDLYCQQYDKLEQLMQELLMQVPNADKLLDIKGVGLITAATFVGEVGDISRFQDPRQIQKLAGLNLVENSSGKHKGKTTISRRGRRRLRHSLFFSMIAMLGKNREFRLLHQRNLMRENNPLNKMQSIIALCGKLIRVFFAILTKGVDYSPEKMLRDMEQSIKVAA

SEQ ID NO: 284429 - protein, 332 aa, unidentified
MKARTTAETARLAVIGVDIGKEVFHLVAFDTDGKIALRKKIRRLSFADTFEQLPRCIVGMEACLSAHFVSRKLRALGHEPRIIPAIYVKPFLKGQKNDYNDAEAIAEAALRPNLRMVQEKSQDQLDLQASHRVRSRLVSRRTATINQIRAFLIEQGIAVRSGPRALRNSLFAILENRKDEISPRMASLIVGLYEDWCRLDERIETITSEIEELSRVEAKCRRLMSVPGIGPVISTGIVAAIGTGEAFERGRDFGAWLGLVPRQHSTGGRSILGRISKRGSKYLRMLLIQAAKVLLMRPHNWPPDLSVIADRFSPRCPSPTSRGAWRLLAACA

SEQ ID NO: 284430 - protein, 347 aa, unidentified
MSTTIAIDVAKSVFEIAVSHRPGRVAKRERLSREQFARFLATHRPATVLMEACGMAHFWGRHAAAAGHRVVLLPPHAVSPYVPRNKTDRADATALLEAARNEAIHPVPVKSVPQQTLTALHRLRSAWLATRTARLNTVRGLLREFGVIIPLGARQVVPRITALLAAEDSAVPAGLRPALAAVVTEIRELEDRIRTVEQQLKALARATPLVGRLRTIPGIGLLTGTALVGFVSEAHRFPSARHFASSLGLTPRERSSGLRRRLGAISKRGDPYLRMLLIHGARAVLCHAKKAARPGRLQLWALQLERRCGHNKAAVALANKLARIAWAVWTTGTAFRDHIAPHLASAV

SEQ ID NO: 284431 - protein, 356 aa, unidentified
MSTLETVRSGHVVIGVDTHKHIHVAAVLDTIGGILATLTVPTDTGGFEQLLTWADSFGKVLAFGIEGTGSYGATLTSFLRRHGHKVVEAGRPDRRQRRLNGKSDTLDAENAARSVLAGFATVIPKTADSSVEMIRQLKIAHDSAVTDRSAAMISMKAMLVHADDTLRRETNRMTPIKLARHLAALRPRNLETPADSLRHALRSLARRWQHLDSEAKELRASIEALVIRTAPQLLEQFGIGVDTAAEILIVAGDNPERIHSEAAFAKLAGISPVPTGSGMTSGRHRINHGGHRQLNAAIYRTVIVRMRFHEPTIAYVARRTAEGKSKRDIIRCLKRYVIREVYQLIKVNPRTGEIAG

SEQ ID NO: 284432 - protein, 422 aa, unidentified
MMNATTDWQQWTHFAGFDWASEHHDVVVVDREGRIVLQFRISDDAEGWQRLREKLGTFPAVAVAIETSQGAAVERLLAAELAVYPVNPKAAKQYRGRKAPSGTKTDFVDAWSLADALRVDGAAWRRLKPADPLLIELRLLCRDEIHLIEQRTALVNQLRQALREYYPAALEAFDDWTLPAAWAFVERFPTSAALAKAGRRRWEKFLHTHKLARPQTYRRRLDIFARAGEFCGSPAVANAKSLLAVALAKQLHLLESQLRQYRARIEALFGKHPDHDLFGSLPGAGDKLAPRLLSECGDDRDRFDRPEALQCYAGTAPVSFQSGQIQKVRFRRACNKQLRAAVHLWANLSRAQCAWAEAYYQKKREQGKSHACALRCLGQRWLKILWNMWQDRTSYDEQMHTRNQVRHGSWVIALTPHSSDTG

SEQ ID NO: 284433 - protein, 496 aa, unidentified
MNNCAAEQNDGGKRPALARSRSSESYRKTVSERLPVEPAALARTSNRKKPLEGHNISLVDSRAKRRKTQKDQNSMNEPQPWLHQHRAFGAVDWASEKHCVLVVNQAGKIIEDFEIEHSALGWKKFREKLQPYGSIPFAIETSRGVAVEQLLEAGMTVYPLNPKSAQAYRERKAPSGVKDDRLDAWSFADALRMEGQDWKALRAEQPLIKELRLLCRDEVSLIEQRTAFVQQLRHALAEYYPAALEAFEDWTSVSAWMFLQRFPTPEALAQAGKRKWQNFLHSRRLWGSAEGPRRMEVFARATQFAGTPATVKAKSLLALSLVDMLFAVEKHLALYRQRIEELFARHPDHDLFGSLPGAGPKIAPRLLAEIGEDRERFDGDAQNLQCLAGTAPVTRRSGKRRKYWPVHQRWACNKHLRHAIHLFSEQSLSRCVWAQRYYQHHRQKDQSHASALRRLGHRWLKIIYKLWTDRTAYNAELHHRNQLRHGSWIFQLQPTS

SEQ ID NO: 284434 - protein, 369 aa, unidentified
MGEYSGAFVAFDVAKTKHAVAVAESGRGGEVRFLGEVENTPARIERLIKKLAARHRKLQVCFEAGPTGYGLYRQIRELGHDCIVVAPALIPKRAGERVKTNRRDAVTLARLYRAGELTAVWVPDAVHEAIRDLVRAREAAMEDLRRKRQQLLSFLLRQGRIYSGGGHWTLAHRRWLARQAFAHPAQQIVFQEGIDAIDDAAQRLRRLEEQVAAIVPTWSLAPAVQAYQAMRGASFLVAVTFAAEVGDVRRFDTPRQLMSFLGLVPGERSTGDTVRRGGLTLTGNRRARRALIEAAWTYRFPARVSERLQTRLEGASKPVRDIAWKGQVRLCARYRRLSAAGKKLPVVVAAIAREMAAFLWAIGREVAPA

SEQ ID NO: 284435 - protein, 422 aa, unidentified
MKNSTAKKLKQVPEGYLIIGVDPHKKKHAVVVMTQGAIVQTKFKFNNSRNGFEEVLQRARAEMLKTDSRGVIFAIETASHYWRNLAYFLDDHGIPFRLVNPFTLKRRREGEDINRRKNDFRDAEMAAELLRTGKFTETRLLYGVYAQLRATYNAYRRLVKERTRYTNLLKGLLDGLFPEFTQVFKNPCGKTALAVISLCAVPEFIAGMKLEDFVDNIRKEFKGRAPKVQKLHAIHSIAGTSIGIGAAAESVSVELSLLVQRIRLNTEQIERIEDILVKLVSSIGDSRYLLSIRGLSYITVAGLLAELGPLSYYQNAKQLIKMAGTNPTESESAGKRGSRTPMSKKGRPGLRWCIWTAALSLLRHNPDFHYWAEQRQERPVQSHPLKKREVIGATANRLLRLAYALVRKQILYQVPQMTGVTA

SEQ ID NO: 284436 - protein, 342 aa, unidentified
MDIKVLGIDLGKTVCSLAGLDEAGAVVFRKRLQRHRLLDFLTTLPPCVVAMEACGGAHHIGRFCLEKGHEPRLMSPLYVRPYVKVHKNDDRDAEAIAEAATRPTMSFVAIKSEEQLDLQALHRARERLVSDRTRLINQGRGFLMERGIRVGTGRHVFQKELARLAAEGASDLSPRMRLLVTDMASELGVINERVAAIDTEIKALARTDADMQRLMEIPGIGPTIATALVAAVGTGSSFGKGRDLAAWLGLVPRQVTTGGKAKLIGISKHGNRYLRKLFIHGARTVLHLVRDRTSPITAWADALKGRAHVNVAAVAMANKMARIAWAVLTKGERYRPNAMSGL

SEQ ID NO: 284437 - protein, 423 aa, unidentified
MDVMHERVGSLDVHQAMVVACVRVQQGGVASRECQTFGTTTAGLLALLAWLQAAGCTHVAMEATGVYWKPVWAILSDGNFELILANAAHIKNLPGRKTDINDAMWIADLLASGLIRGSFVPDEPTAELRTLLRTRTQLVREQNRHTQRIQKTLETANIKLTSVVTDIMGLSGRRMIEAMIGGLRTPAKLAELADRRLKASPKELYDALHGRLSDHHRFLLRLHLQQYDALKAAIAEIDAELDAAISRMETEVAEGQATFRSLATLLCTIPGVGAHSATVILSEIGMDMNRFPSAGHLVAWAGLCPGQNESAGKRKSSRLRKGAPWLKTMLVQCAWAATRKKLSYYRAQFHRLRARSGAKQAICAVAASMLVAIYHMLKDGTEHRDLGAGHFDRLPTEIKANRLVARLAKLGYEVELKPLQQAA

SEQ ID NO: 284438 - protein, 456 aa, unidentified
MAPRNARVSRVSRKPGQSRAALTITHPNAAGIDIGSAAHFVAVPPDRDDEPVREFPSFTVDLNALADWLRACGVDTIAMESTGVYWIPLFELLESRGFTVLLVNARHVKNVSGRKSDVLDCQWLQQLMTYGLLSGAFRPTEQVCVLRALWRQRGMLLKSQARHVQHMQKALTQMNIQLTNVISDVVGETGQKILRAIVAGERDGQVLGAMKNARIQASLEEIAKSLQGNWRAEHLFALKQALDAFDFIGTQLAECDQEIEAQLQRLQVHDGEPAKGKKRGRARNAPKFDLRTQLFKMCGVDLTRIDGIDVTTALAVISETGADMSRFPTVGHFASWMGLCPGTKITGGKVMSGKTKRCANRAAQALRLAAAALRTSRSALGAYFRRMCSRMDKPKAVTAAAHKLARLIYTMLTKGEEYTDQGQDYYEERYRERVLRQLSQRAQKLGMQLVATEQPA

SEQ ID NO: 284439 - protein, 394 aa, unidentified
MKLVGIDVGKNSHHFCVMDKETGEFNVAPSSFSNNKEGFDFLINSLKPYSKKSILIGMEDTGHYHVALLKFLLSNGYTVALINPKTTDLTRKMEGGITKNDKLDTITICDVLDTPERKKQYRITKVDRFDFYEQRQLTRHHHDLKEELNVYCNRLQKSIDLVFPEFNTLFSSKYGVVYMNLLKTFGNAEIIASTDIRTIRKCFEIKGRGNRISLTPEKLKECAKNSIGISSEVETIQIKHLVSQITLIKEQIAEIDKKIEEFSITNNSPILSIPGISHFSGTSILAELGDIGNYSKPSQIIKFAGVAPYHYESSQYNAQHTGITKKGSKYLRKTLYQIILPVIKYNPVFKKYYLLKISQGKGHRCAQGHCIRKLLRIIYHLLETGQSFDPALLR

SEQ ID NO: 284440 - protein, 337 aa, unidentified
MLYVGLDVHSRQSSLCILNSSGGVVNRCEVKGPRAAVVDRLRRLNEPFSLCYEASCGYGHLYEQVRPLAHHVAVAHPAKLRLIFGSKRKNNRFDAEKLAKLLLLNVVPQVHVPDVDVRAWRSLIQLRQRLLSQRVMAKNQIRAVLREHDLAGAKWLWSKKRIAWLESLDLHPSAKLRLELNIEELKSLKVKMDRVEKELAAYADKHPAVRLLMTIPGVGIRTAETFLAWVDDITRFRRTSQLGCYFGLVPCQDASADKNRLGHITRDGPPVMRKLITEAAWTAIKKCPAFKRFFERVMAGKADRKKIALIATAHRLIRVMGAMLRSGAAYDATYAGA

SEQ ID NO: 284441 - protein, 355 aa, unidentified
MPSKTDTAVAHTIGIDTGKNTLHMIGLDEKGAIVLREKVSRIRIAARFVNVPPCLIGIEAGMASHHIARELTALGHEVKQVPPAYSKPFRQGHKNDFRDAHAVAEAVERPSTLCVPIKTDGQLDLQALHRVRSRLVGNRTAVINQIRGFLLEHGIPVRQGHRFLRQQLPQILATRADVLSPRMIRIIGDLIEDWRYLDERIETVTDEIEALARADEGCQQLITVPGVGPIISSAMVAAIGNGAAFCKGRDFAAWLGLVPKQMSTGDRTILGRITKRGNRYLRTLFIQGARAVLLHPTSWARHSFGPWLTTAARRMHRNVLTVALANKLARIAWTVLAQGRRYEARVEPRIEPAAA

SEQ ID NO: 284442 - protein, 321 aa, unidentified
MSQPNQHCIGIDIAKLSLDIAGTEDFSPFSASNDEDGFIAILKELKERKISLILMEATGGLEASVACYLQAAGYEVVVINPRQARDFARSMGYLAKTDKLDATMLAQLAQVIDRHPDRSRYIRALPDEARAVLTAMVVRRRQLNNMLVAEHNRRYPSHPQSRKSIDNIIDALESELDRINEDMKQHVKVFFMEQARLIGSVKGVGDVTIASLIAELPELGKLNRREISALTGVAPMNRDSGKMRGKRTTFGGRAGVRATLYMAALVATQFNPAIKIFYQQLLAAGKPKKLALVACMRKLITVLNAIMKHSKPWDPAYYQRT

SEQ ID NO: 284443 - protein, 346 aa, unidentified
MMIIGCDFHPSWQQISWVDVETGDTGERKLVHASGDAKRFYEQLAPPVLIGMEATGNSQWFIELVEDLGHEIWIGDAAQIRASYVRKQKTDKRDAAHILKLVVEGRFPKLWTPDREQRDLRQLVLHRHKLVEIRSRVKNELQHLSMNKGMQKKRTLWSREGQQMLRELPLKPWASCRREDLLGLLEMLNQQVGALDVAVQKAAEENPQAKLLMTQPGVGPNTALAFVLTIGDVSRFPRGKQIASYLGLIPREESSGGRQKLGAITKQGNRMLRSLLVEAAQVAVRYDPGYRKEYAHRCHQKPKGVAKVAAARKLAVRLYWMLRTNVAYPEIVRIESSPRLPLVGAS

SEQ ID NO: 284444 - protein, 411 aa, unidentified
MLEVKVEKCAGIDVGKKFLAVCILIGLANQKPVGEVRRFGTSVKELERLRTWLLESGCTEAVMESTGSYWKPVFNILEGSLKIILANPEQVKALRGKKTDPNDSRWLASLLRHGLVQGSFIPPRDIRELRDLTRRRRTLVGEGAAERNRVQKILEDANVKIGNVLSDVFGTSGQRMLEALLENKQSAAEIAQLGHWSLAPKIPQIIEAVEGHRMTDHHRYMIRQSLRHMRDIEEMIEELDKEIAVRLKPYEQHIRLACTVPGIKPTSAASILAETGMDMSPEGPFPDCHHLASWATVCPGNNESAGKRKSGRTRQGNRWLRATLTQTGWAGAADKKSLFQRRFQRVKLRRGGQRAVMAIAHAQLIAIYWALRNGTPYPEQVQSMEQDRREAQIRYHLQRLTKLGYESDIHA

SEQ ID NO: 284445 - protein, 376 aa, unidentified
MSNVRFIGLDVHAETIAVAVAEPDGAVRSLGVIPNRSESIRKLVKKLGPAGQMRVCYEAGPTGYVVYWELTALGVKCEVIAPTLVPVKAGDRVKTDRRDALKLARSYRAGDLTAVWVPDAAHEALRDLVRAREAAKKDQLRARHRLGKFLLRQGRRPPTTMKAWTQKHLRWVKTVHFAHAAQEATLLDYLHEVEHMAERIGRLERAIDEAVKTAPERMKAVIEALQALRGIALVSAVTIAAEVGELSRFAKPRQLMGYSGAVSREDSTGRRIRRGAITKTGNAHLRRVVIEAAWAYRYRPAVGAPLRKRQASVSQEVKAIAWKAQHRLYARYRHLTAQGKCKQQTVTAIGRELLGFIWAIGVHVESETSRLKSIAA

SEQ ID NO: 284446 - protein, 346 aa, unidentified
MDHYAGIDVSLECSSVCVVDASGKIVREGKVASEPEALISWFISLGYELSRIGLEAGPLSQWLFAAMREAGLAVELLETRHVRKAFEAMPVKADRNDARGIAQLMRLGWFRPVHCKSIGAQETRTLLTARKLVQSKLRDVENSLRGILRGFGLKVGKTTERSFAGRIRELASGHPSLETITEGLLAVHAVLLREFNSFEKQVRRVARSDTRTRLLMSIPCVGPVVALTYGSAIDDPARFKSSKQVGAHFGMTPKKYQSGETDYTGRISKIGDAWVRTALYEAAHIMLTKPVKGCSELKSWAMRIARRAGMSKAKVALARRLAVIMHRMLVDGTLFNPASKQIAAAA

SEQ ID NO: 284447 - protein, 367 aa, unidentified
MSKSVSYVGLDVHKDTIVIAMAMGKQRAVVVSKIANDWAKLLRTLGGLGAAERQRVCYEAGPTGYDLARRLNSIGVCCIVVAPSLIPVQVGRRVKTDRRDARRLAELLRAGELVEVKIPAAETEAMRDVERTRDDAKNAERAARHQLDKFLLRHGRIWSQGTKWSQRHWGWIERQEFPVEALRRVLADYCRAVHEATARVDRLEQDIEELVETWAMKPLVRALQALRGVGLLTAVILAAEIGDYTRFRTAAELMSYLGMVPSEASSGQRRRQGRITRTGNGHVRRILVEAGWNYRFRPRPSRAISKRREAVSAAVRQIAEKGEERLSRRYQYLVDKGKAPQKAVMAVARELAGFVWAIAQEVALKAA

SEQ ID NO: 284448 - protein, 344 aa, unidentified
MYYVGCDLHKCSTYFYVVDAQGKCIVNKSIPNEVDLLHGFLRSLPKPFELAVEATYNWYFFIDIVAEHTDKYYLTNPLYLKAFARRNKKTDKIDAKLIANILRVGYLPAVYIVDKNIRIQREVLRQRMKVIQDRCRIIFRLKALLDKLGEDSGGDFATIKRLQAIETSHLPEEYQHIIDEYRKQMIELLQSEHRIDRIVRKLVNADHEAGLLTTIAGVGEFSALLIKSEIADITRFKKFDSLCSYAGLAPRVYQSGNKCITGSLSKNRRKHLQWILLEISHFFIQRNERYKAKFEKLKEIKGYNKVKVVLARDLLKIIYRVLKTKKPYYEEDIRTMAPYAVCGV

SEQ ID NO: 284449 - protein, 427 aa, unidentified
MGAMSESEVQELQFAALVGIDWADQKHAWCLQAADTTHRENGEVEHTPEAIEAWVGQLCRRFANRPIAVAVEQVKGALVFMLSKYGFLHLFPVPPTMSAKMREALYPSGSKDDPRDADLLLELLLQHRDKLRRLSPDSEATRRVQNLVDERRNLVDEKTAQINRLTHQLKIYFPQMLEWFEQLDTELVCVLLERWPTLEELQKVPPQRLRTFFHKQRCRYPELIERRLVGIRQAIPAIRDRAVIEAKSTVVKVSAQVIRSLVRGITDLDRKIEEAAAAHPDFFIFESLPGAGAVLAPRLLAAFGSRRERYTSAEEVQTYSGIAPVMKRSGKKKWVHFRWACPKFVRQSFHEWAGHSIAHSQWARSYYQQQRKRGKGHHAAVRGLAFKWIRIVFRCWKDRAVYDESRYLMTLAKRNSPLAAVHGGTML

SEQ ID NO: 284450 - protein, 395 aa, unidentified
MRQIWAGIDAGKTHHHCVVIDAAGSRVLSRRVANDEPELLRLLTDVLELGEVTWAIDLADGAAALLIAVLVGQDQPLLYISGRTVNRASGAYRGQGKTDARDAAIIADQARMRRDLNPLRPGDNITVELKLLTARRTDLVCDRTRVINRLRAQLTGIFPALEGALDLTNTGPLVLLTGYQTPAALRRTGQARLQTWLRNRKVRSAAELAQAAIRAAERQHTTLPGQQLAAELIATQAREVMALDEQIKQTDQLIEGRFHRHELADVITSLPGIATILGAELLAITGGDMNLFGTPDRLAGLAGLAPTPWDSGRIRGNLHRPQHYHRGLQRVFYQSALISIRTCPESRQFYDRKRAEGKRHSQAVLALARRRVNVLWALLRDRRCYQPTPPVVNAA

SEQ ID NO: 284451 - protein, 380 aa, unidentified
MRHTANKFLVPFRLQVPIRILSNWLIKGISKATLPVKKQLIMSKFTKKKAFIGVDISKDTLDFSILLDSDPQSFEDKQVPNSFSGFSKIEKWLSSKPFALNECLFCMEHTGTYGLLLFAWLSQLEVDYVVEPALRIKRSMGMARGKNDRVDARRIADYAYTNRTKLKPFVMPSSLLLQIKQLLTYRDQLTRMSTSLKNSLKNHREYEQVIGSTSITESITGQIDDIQTKKEDIDRQIKELIQSDKELNKNYNLVKSVKGIGLMIAAYMLVTTHNFTSFENGRKYACYSGIAPFEHTSGSSIRGQTRVSHLANKRIKTLLSNGANSACKWDPDLRAYYKRKTGEGKDHNLVINSISCKLVNRVFAVIKRQTPYVTMYAQNF

SEQ ID NO: 284452 - protein, 359 aa, unidentified
MTENPNKESPALWIGVDVSKKTFAAAARLPWEEKAVYPKASAEFENNRAGARRLCKWIGELEKEYGGPFGVAMEATGPFSLKLHGNLQKTRPGLHVAICNPLSVSYYMRSLGTNKTDKADAAGIARYAAHIRPCKYREPSKDEAELKRLTRDRTFMVDSRTQYKNRLGSEGDARSRERIRRLIGALDREIDGIDKEIAEYLATKASAECRSEIELMKSVPGVGTSSAAVIYGELGPLSGYTRKQLSAMSGICPATRQSGTSLHKGGLSKRGSKWLRRILYLDSMQTILGSPAMSAFHEKMLKKPDSSKMGARVACMRKLLLILRGIVVSGKKFDKDHVSVRPDVLEKNMKNPEKTEMTA

SEQ ID NO: 284453 - protein, 330 aa, unidentified
MHFVGVDLHKRFLVVRAEDDRGVRTGSGRFDSQDRTGILEFFEKMKPFRCVIEASCSYRWFHELVSPLGDVVLAHPLRLRAIVAGRAKTDKLDAALLARLLRAGLIPEAYIPPRGYQELRDLARARARLSQQASSTACELHALLTRENIRMPFANVFSKSAQRWLAGLDLSEVDGFLRDELLARMRHYRDEMAKLDVLLEEMSVRFPEHEALTMLHGIGLYSALLIIAELGEPERFGDARQVGAYAGLTARVSQSGEQSRHGHITHQGSPWLRWILVEAAMKLVRRDRQLGNLYQRIRKRSGAKIARVAAARKLAGICWSRLMRWQRRAA

SEQ ID NO: 284454 - protein, 416 aa, unidentified
MNNQTLYVGCDVSSDNNYYCFLLGCGATIRKTSLPNNAKGSNQLVDLILEDLEGYDLSKLIFGLEATNNFHFHILNFLALHEKLENYDVILYRINAKLIKNFKDGYPDKSKTDKYDAFIIADKLRFGRLPEPFTPFNEFVSLKRLTRTRFHIVKQLEREMNYFLSNLYIKFSEYKKLPFSNTFGTTSIALVTEFDIEEITQISNEKLIDFLIEKGKNHFTDPKAYAKEIKKIARNCYRIDRSVNKTINLILEVSLSTIKALKESLSRIDIAINREISKFKHTLESIPGIGPVLSAGILAEITDINLFENDSKLAKYAGLTWLHKQSNQYKSEETHMNKSGNKYLRYYFIQAAESARKNCDEYRDYYNKKYRESTKHKHRRALVLSARKLVRLIFVLLCKNTLYDPSRYLKNRGGGC

SEQ ID NO: 284455 - protein, 414 aa, unidentified
MRVNSRTPIALSTAVVGLDIAKNKFVAVTLLGDGTQSKPRSFNVTAAGLADFYDFVERTTAGASGYVVGYEPTGHYGEPLLERLHDDEVPLYLVQPHQTKRAKDLYGRNGRKTDAKDAFLVAKIVREGAARPWAPLQQPFSTLRILGRQREQLVVRRGGIRNRLHRHLDVVFPELVGLFGKLDSPSCLYIVKTAPTPSELLAIPEEELTAGLFKASHRNLGADRVRQLREVAEVSVGARANTVPHQLAIAQCLEELEFLGAHIVSVESEMRSLLHQVDYAKRLLTVPRLGELTVAILLGELGNLRSYRHARQVTAMAGLDLSEHSSGKSLGTRHISRRGRRYLRQTLYLAALRMGWEAFSEHRRRLVEENKLKKIKATVANMRRLLRVLHAMVRDDTDFDATLHAAEPVQAMAA

SEQ ID NO: 284456 - protein, 409 aa, unidentified
MRYYLGVDWADQTHAVWVVDERGTKVAMRTVPHTAEGLSEWGRELDEWRAQGTELWAAIERPEGRVVDFLLDHGVVVYPVNPKALDRARDRFRQSAAKSDPFDARVLADFLRTDHARLRALRPSSEAAQELKLLTDDYQRQIRQQTRLVNQLTMTLKAYYPRALEVAELPTALARDFLQAYPTPAALTALTERQWQRWARAHRMHEARTQELWAVLQRPQLPVPAHVVRAKARLMQSLVAQLTLVVEVVGTYREAIEDFFAQIPAAQWIRTLPIGDHGITAPTLWARLGDAPGRWESFRHLQAQAGTVPVTIRSGKQQVVRFRFACDKSLRYVIDHVAFLSLRWSEWARAYYAGQRARGHSYHQALRALSAKWLKIIFVMWERQVPYDEQYHLATMTRQQLRLRQKQIA

SEQ ID NO: 284457 - protein, 409 aa, unidentified
METIVERPAALDVHKAQVTACVRTPGAGRTREQHFAEFQTTVAGLLTLRDWLAAHGVTQVTMEATGVYWKPVWAILEDDFELLLVNARHVKNVPGRKTDMSDSAWLCQLAEAGLLRASFVPPKPIRALRNLTRYRKTQIQERAREANRLHKALEDTGIKLDCVASDILGVSGRKMLDALVAGTTDPEVLADLAKGRLRQKLPALREALQGRFDRLHAVWIGAILNHLDFLDEQTASLTEAIAEQIAPFEKAVELLCTIPGVQRRTAETIIAEIGVDMTVFPSAKELASWAGLCPGNDQSAGRRRSGKTRKGSKWLDWGLEEAALAATRSKDTYLAAQYARLRPRRGHKKALGAVKHSIIVACWHMLSTGELYNDLGGNYFQRRDPDKTTKRLVAQLERLGHTVTLQEAA

SEQ ID NO: 284458 - protein, 443 aa, unidentified
MSRKKRTHLRGERGQAFADKIRGIPLDQILCVSLDIHKYFHVVIIHNALGEIVTPTFEIDIFQTGYEQLCQAVDEAVVRTDAKVVLTGMEPSSHYFENLARHLHERPQPVTLINSFAVKKNRDQQMMQYEKDDEIDTAAIGDLLRRGEGSPFNPPTGIYLQLQHLDRVRISKVKIRTMLQNQIIGHLDRIFPGLVIIGDEAKDRYEPLFATDFWECQTMQHLIRVCPDPRKLAAMFPHELIEAFHAHNYAMGPVRAAKIIAYAQKVLLPDPELVAIRCQLLPHDLALLEQVEHHIAQLEDDLRALLAETPYQVWIKLKGVSDIQVVSLAAAIGDPANYKYAAQVFRRSGLVPGRNDSGTRQRKGKGKKVVKVGDVYLRRALMNALATLILHQIVLRDYYNKLKVSKPAGVARVATARRAIGILWAILRDQHSETLILKKGAEM

SEQ ID NO: 284459 - protein, 348 aa, unidentified
MMIIGCDYHPSWQQICWLDTATGETEEKKLEHASGEAEKFYRQLPGPALIGMESTGNCQWFVEMATTLGHEVWIGDAAKIRASEVRQQKHDRRDAALILKLMLEKRFPRIWAPSGEEKDLRQLLIHRYKLVRIRAQVKNELQHLAMNQGVTKKKKLWSKAGEQVLRALPLKPWASRRREDLFQVREMLDEQIAPLDQAVAEVAEKNQKARLADDAAGRGPITSMAFVLTMGDVSRFQRGKQVASYLGLIPREYSSGGHQRLGSISKQGNRFLRMLLVEAAQVAVRYDPGFRNEYLHRCHTKAKGVAKVAAARKLAIRLYWMLRTNRGYPEVVRVESRSRVPVVVRHDG

SEQ ID NO: 284460 - protein, 312 aa, unidentified
MTKTICGVDISKKHLDARIAPGEAFARFTNDAAGIAKLAAFCGEHKVELVVMEATGGYERLAFTLLWEEGAACAIANPRSVRQYAEAMGFLEKTDRIDAFVIARFAHSKGLKPTPPSSKIQCRLKGLVVRLRQLTDDLVINKQRRHQVEDEEIRATFDDIIALIKRQSRRLEGEIASLIDDDPLWAVLDKTFRTVKGVADRTVARIMAELPEIGTYDNKAISKLVGLAPLAHDSGKKNGKRSIRGGRSGVRSILFLVADIARRYDPSLADFHRRLVAAGKPKMVVRVALAHKLLVRLNAKARDARVQYANAT

SEQ ID NO: 284461 - protein, 324 aa, unidentified
MMTPALGIDVSKDRLDVEIAACGKPRSKYFANSPDGWRHLIAWLKELKIKRVHACLEATGRYSLGIALALWEAGHIVSIVNPAQIRDLARTKLGRNKTDAVDAGHIREYAEIFKPQPWTPPSPAMQRLGELQTIRAGIVSSLTEWKNRCGSGLADDTALALVKATITHFAAQLAEVDKAIAGTIDNDSDLSAKRDLLLSISGVGEVLAGLVLSELPGADVLRSSAQAVAYVGLNPRSHRSGSSIDRPTRISKIGNATLRSALYMPALSAMQHNPVVAALAKRLKAQGRLKGKQIAVAAMRKLLVLCFGVLKSGKPFDPALAMPN

SEQ ID NO: 284462 - protein, 338 aa, unidentified
MKLYGGMDLHSNNCVIALLDEDDRPVYRKRLGNDLAMILEALAPYQANIEGLVVESTYNWYWLVDGLMESGYQVHLANTAAIVQYEGLKYTNDDSDARWLAKLLRLGLLPEGYIYPKEERAVRDLLRKRSQLVRQRTSNLLSVQNLLARNRGDSLSANAIKQLTLDAVDELLPEPHLALAVKCNLKVMQALDEQIQALETVIKAHARPRPEFQSLRTVSGIGDLLGLTILLETGSIQRFPRVGDYASYCRCVGSEKLSNGKRKGRGNTKNGNRYLAWAFVEAAHFAVRYDPQIKRYYQRKLSRSSGIVAIKTVAHKLARACYYVLRDRVPFDVRKAFA

SEQ ID NO: 284463 - protein, 458 aa, unidentified
MWALQCRFEHADQISVVPCGPRGPPLVGVLDGEGVMVLEEDRHSEEIIARVAALDIGKAEVMCCIRIPGETSSGRRLQEVRPYSTMTRSLLVMVDRLAELTVTRVVMEATSEYWKPVFYLLEAHGFETWLVNARDVKHLPGRPKTDKLDAVWLCKVAERQMLRPSFVPPPQIRRLRDVSRYRTDLVEARAAEKQRVEKLLEDAQIKLSVVASDIFGVSGREMMNALISGQRDPKVLAAMARGRMRAKRSQLEEAFTGYFTDHHRLLLVKMLARIDALSADIAELETVIGEMIAPFVDAVARLDEIPGIGPTAAAVVIAEIGVDMSRFPTPGHLGSWAKFTPGVKESAGKRKGKGATGHGNRYLAKVLGEAAVTAGRTDTFLGERYRRIARRRGKKTAIVAVGRSMLVNIWHLLSDPEAHFIDLGPDFHDTHIDTERKKRTHIRQLEALGYRVTLEPTA

SEQ ID NO: 284464 - protein, 330 aa, unidentified
MGTAATHFAGIDVSKDTLDAALLGPDGRNRPKRFPNSPAGFAALRAWAERHAAGAAVHYCLEATGPYSEGVAAYLHAAGLLVSVVNPARVKAHAKACGQANKTDPADARAIATFCRERRPRPWVPPSPAVRQVQALVRRRDDLRRMAAAQKNRLAAPDLTPAARKSIARTVRFLAKEAERVQAEAEAVIAATPELAADLALLESVRGIGRQTATTVLAELPPVEHLPGAQSAAAYCGLAPSEFTSGKTVKRYTRLSKAGNARLRTALDLPTLTAIRFNPVLKAFFERLVAAGKPRMQAVGACRRKRVMICFGVLKNRAPFDPAWASRKIS

SEQ ID NO: 284465 - protein, 344 aa, unidentified
MQYFVGIDVSLENSSICVIDERGVIIKEGQATSEPEAIGRFIRHRGRKVEHVGLETGSLSQWLHAGLVKQGFRVSVMEARHVHAAFAAMQVKTDRNDARGIAQLVRLGWFKSVHVKTLSAQETRALLNARQFVVDKVTGIENSMRANLRNFGLKVGIVSRRTWPSRARELAAGIPALEMLVESMLKIRDVLLQELRLLDRKLLETARADPVVQMLMTAPGVGAIVALTFRNAVDDPERFKRSKDVGPWLGLTPSRYQSGQVDRSGHVTKAGDASVRTALYEAATTLLGRVVKWSALKNWGLRVARRSGMKKARVAVARKLAVILHSMWRSQCPFKWATEKEAFA

SEQ ID NO: 284466 - protein, 352 aa, unidentified
MLIIGCDFHPGFQQVAIFDNRTGEVEEKRLQHRAEAEQFYRSLAGQEVRVGMEACGHYPWFERLLAELSIELWVGDAARVRASVVRKQKTDRRDAEHLMDLLRENRFPRIWVPSLEVRDVRQLLVHRHKQVQARTRTKNQLQAMALSHGVQKKHKLWTEAGRAELEQLPLLPYAAERRKKLLQALDELEPEIRELDRRVAEEARQRPEAVLLMTHPGVGPVTSLAMVLTLGPAERFESAKQVGSYFGLIPSEDSSGGKQRLGRISKQGSSFLRFLLVEAGQTAARYDPQLKRFYRRLATRKNRGVAKVAVARKLATRMYLMLREGWTYAQLNQAVMSVSPSHPVVEQQKPTV

SEQ ID NO: 284467 - protein, 326 aa, unidentified
MYKKVMKAQVSFSQVVSRGCGIDVHKKLVVATIGGEGVKSETREFGTFTRSLTELKDWLLENGITHVAMESTGVYWKPVYHVLEPTSMKVWIVNARHIKYVPGHKTDKQDSAWICKLLLAGLLKPSFVPPRQQRELRDLTRYRRKLVQRVASEKNRIIRVLEDCNVKLSSVLSNTQGVVGTKLIDKLCEGKAITMSDIDQVYHRKLGASKEELYEACQGILGSHHIYLLQTIRQNIHSTESAIDSLDRRIKEMLSEYEHVQEKLKAIPGLNTKTVEDLVAEIGLDMNAFPSEKHLASWAGMCPGNNESAGKKKADAPSTATNRSRQ

SEQ ID NO: 284468 - protein, 362 aa, unidentified
MTESTTIIAFDQHARSVVAAVLAPRETEPALHPLASDLPTIERFVSRVAKRGPVRCCYEAGPCGLALQRFLTAHRVSCDVIAPALIPRRSGDRIKTDRRDARQLAVLYRAGALTTIHIPSEQEEAIRDLLRCREDLRADLLRARHRLSKFLLRHDRRYTQTKTAWNRRHTAWVRQLQWPLRALEHTCGAYMRAIDDVSARLTAVEDDVRTYFTSEPFAEPVRRLRCFRGISDLTALTVAAELGDPRRFPSAPRVMGFVGLVPSEHSSGTRRGRGAITKTGNAHLRRVLLEAAWHYRHHPHVGPKLHERQRDAPAHAIAHAWAAQHRLYRTYRRLTARGRPPQVAATAVARELAGFIWATLTH

SEQ ID NO: 284469 - protein, 399 aa, unidentified
MNDGYGVYLGLDVGKGDHHAVGLAPDGRRLHDAALPNTEARLRQLFDTLARHGRVLVVVDQPASIGALPVAVARACGHQVAYLPGLAMRRIADLHPGSAKTDARDAYVIADAARTLPHTLRRVDTGDEALAELEVLVGFDDDLAGEATRVSNRIRGLLTQIHPTLERVLGPKVHHKAVLELLSRCGGPAGLRKAGRRKLLSIAVAHAPRMGQRLVEQIMTALDEQTVTVPGTQAAETILPRLADSLRDVLRQRDQVATQVEGMLDAHPLAPVLTSMPGIGVRTAARILLEVGDGTAFATPGHLAAYAGLAPVTRRSGSSIRGEHPPRGGNKRLKRAFFLAAFAALTDPVSRAYYDRKRAEGKRHNAALICLARRRCDVLFAMLRDKIPYQPRPTSPIPA

SEQ ID NO: 284470 - protein, 409 aa, unidentified
MSEETPEVVYVGLDWAAAVHAVCVMSVTGKVLAQFTIEHTADGIASLIGKLAKYGQPEVVQIGIERPNGRLVDLLLEAGHPVIPVSPNAIKTWRDGEVISGAKSDAGDALVIAEYLRLRHHRLNPVQPYSSQTKALRTVVRTRDDIVDMRVRATNQLDALLDAYWPGAKAIFADTESPISLAFLRHYPTPAAAAHLGDKRLAAFLTKHGYSGRRPASQLLARLQHAPKGTSDPVLTEAVHDAVLALVTVLEALHTAGKNLDRSVVAHLGEHPDAEVFTSLPRSGQINAAQVLAEWGDSRAAYDGPDSVAALAGVTPVTKASGKQHAVHFRWACNKRFRQAITTFADNSRHQSPWAASIYANARARGHDHPHAIRILARAWIRVIYRCWHEHQPYNPNLHGGAQKVANAA

SEQ ID NO: 284471 - protein, 449 aa, unidentified
MDERKGKKMEPLKVKRPNSAGVDVGSQTHYVAVPPDRTEEAVRHFGCLTPDLHEMARWLKACGVQTVAMESTGVYWIPVAQVLEDHGLEVCLVDARHVKNVSGRKTDVKDCQWLQELHSYGLLGEAFRPTREMGPLRSYWRQRSALVEGCSQQIHLMHKALEQMNLQLHKVISDVTGVTGLKIIRAIVAGERDPGILAQMRTEKMKSSEETLVKSLTGHWREEHLFLLKQAVELYDVYQGKVKECDREVERYMATLGPKNDDGTPPTNRKRRKNEPHFNLGAELQRMTGVDLTRIDGISALTAQTVITEQGFDMSPFATEKHFASHLGLCPNNQITGGRVKKRRSRRVTSRAATALRVAALSLHRSKTALGAYFRRMKAKLGAPKAVTATAHRLAVLIYRMLKYGQNYVDVGQIRYEEAYKRHVADNLKRQAKRLGYTLVVAGTGEIVS

SEQ ID NO: 284472 - protein, 350 aa, unidentified
MTTLPLRITAGVDTHLDVHVVAALDDTGGLLGIDSFATTTAGYRRLLAWLRGFGQVELVGVEGTGSYGAGLTRLLLSESVRVVEIDRPNRQRRRRRGKSDPQDAIAAARSAQSGDACGEAKTRDGNVEAMRVLRVARFSARKARTQALNQMRSLISTAPEPIREELRHLRAGPMLDCASAYRPGTKRDLVSLTKFSLRLLARRAIVLETEVAELDALLVPLVAMTAPELVAVMGLGTDTASALLVAAGDNPERLRSEATFAHLCGVSPLDTSSGKNERHRLNRGGDRQANSALWRIVVTRMVCGARTRDYIERRTKEGLTKKEAFRCLKRYIAREVYNHLPRAELALDNP

SEQ ID NO: 284473 - protein, 358 aa, unidentified
MVQRKELNFEGQNIYIGIDVHLKTWHVSILTESGCLKKHSQQSSAQALFEHLKKHYPNGNYLSAYEAGFSGFSTYYSLLDFGIECLPVHAADIPTGQYESVMKTDAIDSTKIARALKSGLLRGIYIPKKEVLDDRNVMRLRITLKRQLSGYKSRVKHLLYNNGVIYPECFQNSKSHWSKRYLKWVHEDVQLLSESRNSLDLLLRQVELFRKSLLEITRLVRTLSRNGRYGEAYENIVSIPGIGMITGMCLLTEIGDIHRFRNERQFASYLGLVPTSHSSGEKTSHGEMTFRGNKRLGPLLVESALVAIRQDRALAAAYREYCKRMLLQEAIIRITRKLSNRILIILKSGKKYEHDRCY

SEQ ID NO: 284474 - protein, 414 aa, unidentified
MSLEVMYERCAGIDVHQRFVVVCLTLMEGGKRRQEIRTFRNETADLLALRAWLLQERCTHVGMESTGVYWMPVYRRLEGFFELVVANAQHIKAVPGRKTDVQDAEWIASLLQHGLFNPSFVPSQEQQDLRDLTRLRVSLVRERTRLVNRVHKVLEEAGIKLATVLSDIMGLSGRAILQALCEGERDPQQLAKRVHPSVHASQQEIRAALTGEIREHHRFLLRELLSLIAVQDRSIAHLEEQIERHLHPFEEQITRCEKINGVSRHVLYVLMAEVGTDLERFPDAEHLSSWAGVCPGQKESAGKRLSGKCKKGNRYVREVLVQAAHGVRRSRTYLGERYRRLKKRRGSKRAALAIGHDILVIYCQMMKTGQEYQEKGEAFFQQRDRSKVEHQLVQRLERMGYQLTRQPPPAASGE

SEQ ID NO: 284475 - protein, 409 aa, unidentified
MKLFVGIDASLKNNQCCFVDDKGKKIMQLNVSNNLSGAKELETKIDQKALELNIEEIKVATEASSLYDFHILEFLAESEILARHNIKLYRFNPRLVKAFKPSLKIKDKTDPQDAYAIAEYLRFREETAEEYRAKMDHLPLQRLTRFRCHLVTQLVRERNYFLNQLFLKFSAFGKGLPFSDTFGATATAVIEEFMTPDAIANADDEQLVEFVIKHGKNRFPNPEEIVKELKYVARESYRLRPQLADSVHRILCLCLSNIRALKASLKELDDTIAKQLNAFSITLTSIKGIGEVYAAGIFAEIGDINCFPSEAQIARLAGLAWIRHQSGNFEAETTRLDKQSNAYLRYYLVEAADSLRRHNPEFTAYYKKKYAEVTKYQHKRALVLTARKVVRLIDCLLRTNKLYQPNTLS

SEQ ID NO: 284476 - protein, 409 aa, unidentified
MRYYVGVDWADQTHAVWVVDERGTKVAMRTVPHTAEGLSEWGRELDEWRAQGIELWAAIERPEGRVVDFLLDHGVVVYPVNPKALDRARDRFRQSAAKSDPFDARVLAEFLRTDHAHLRALRPSSEAAQELKLLTDDYQRQIRQQTRLVNQLTTTLKAYYPRGLEVAELTTALAREFLQAYPTPATLTALTARQWQRWARAHRLSETRTQELWAVLQRPQLPVPAHVVRAKARMMQSLVAQLTVVMEGVGAYREAIENFFARLPAAQWIRTLPIGDHGITAPTLWARLGDAPGRWQSFRHLQAQAGTVPVTIRSGKQQVVRFRFACDKSLRYIIDHVAFLSLRWSEWAHAYYAGQRARGHSYRQALRALSAKWLKIIFVMWERQIPYDEQYHLAMMTRQQLRQRQEKVA

SEQ ID NO: 284477 - protein, 347 aa, unidentified
MQFTATLPVIGMDIAKHVFQLHVVDAQTGEVTRHKLRRDRVTSFFANRQKSLVAMEACGGAHHWARTLQTLGHEVKLLPAKHVRAFVLRDKTDARDAQAIWVAAQQPHIKAVPVKNEQQQACLTLHRMRAQLMKVRIMQTNALRGLLCEFGIVLPEGHRALLKLVQDALAKAQEQQLPEVVVVSIQDQLRRIDSLQCDIDQLDKRLASMVKQNQHMLALQAIPGIGPLTATALVSTATDLSSFESGRQFAAWLGLTPRQTGTGGKTRQLGISKRGDPYVRTMLMHGARAVIARSQRSGWIERLLLRRPYSVVVAALANKLARTVWAVLVKGKAFDQVKWNPVDLAAA

SEQ ID NO: 284478 - protein, 341 aa, unidentified
MKQYVGLDVSMEETSVCVLDDAGTVVFVGSAPSRPEALTKLLRAQAQHAERIALETGSLSSWLWCELKAVGLPVVCLDARHAKAALSMRINKTDRNDARGLAELIRMGWYREAKVKSMESRQIRAALAARAKLVDLRRDLENQMRGLLKSLGLVIGKAGVRALPSRIATLLRQAPHLRPLIDPLMAAHSTLAKQVAKYDAQIRELAKADQTIQRLMTVPGVGPVTALAFASTIDDPHRFARATDVGAYLGLTPRRYQSGELDRNGRISKRGDRLARYYLFEAANVLLTVVRRPSSLKSWATKLVKRVGSKKAKVAVARKLAVILHCIWTDGTEFDWGRTAA

SEQ ID NO: 284479 - protein, 664 aa, unidentified
MGGLPLQEVASSMKVMYERVAGIDVHKDMIKVAIRSPGDKPWTRNTEILEYRTFYGVLQQMAADLRRRGVTHVVMEASGVYTEPVYYALCEQDFTEIAVINPAHARALKGHKTDAKDSARLAELFECGLLRGSCIPAPELKEVRDLTRYRVKTVQARTSEIQRLGKALESAGIKLGSVASDITGKSATAMIEALIDGERRGGVLAELAIGRMRAAGKLTDLSMALAGRFTGHHALLCRLHLDRITVFDAAVAGLEDQITAKAKPWQRETGLLKTLPGFGDAVAQAWLGEIGPAPHLHFATHEKLASWVTLCPGNNISARKRKHGRTGDAGTYIKPMLVQAAWSAIRVRGRLQARYNRLVRRFGGDKNPAAKKKAITAIAHTLLKIAYQVLKSGTPYQDPGADFYTRRESPGQKQAHLERQLQKLHPGCTITITISPPEAALPPGPQAPLTLPARSRRRSAPRPTRRTNQRHRQALAAAPARVRCRAPTGDPVFVSAVALLGEADALALRGDRDVLVSVQQHLGAERGMPGHLDRQVPPLPVHDVEAVVIHIGALPGQVADHRAVRGPVHIPHHRRGPGDQDHEHSRSHRMGAQILLRDQVLAFPRRAVDHRDGVAGGPGPYPPREPPRQAHQVSVVQHRIRLRVTPPIMRRHQVRNPPAVFPIG

SEQ ID NO: 284480 - protein, 341 aa, unidentified
MQITTIGLDIAKNVFQVHGIDAAENVVVRKQLRRGQLMKFFEVLAPCLVGMEACATAHHWARELTKLGHEVRLMPAKDVKAYVKRNKNDAADAEAICEAVRRPTMRFVVVKSPEQQGRLMQHRVRDLLMRQRTQLINALRAHLAELGMAAAQGRDGVKELLAIVAQDGDSRLPVDAHASLIVLAAQLQAVQTTIGSIEKRVVRQHRSNEESKRLETIPGIGFLGATAIAATVPDPKIFRSGRDFAAWIGLVPRQDSTGGKQKLGPISEQGDRYLRRILVVGACSVLRRARQQPEKYPWLIQLLARRPFKVVAVALANKMARVAWALLAKGGTYQAPRLTAA

SEQ ID NO: 284481 - protein, 418 aa, unidentified
MKSNKTEKITSINKKTLIAAMDIGKKVHYGYFRDSSGHDIKPFGFHNTREGFDKFWTRLCKFKEKQMLEEIVIGFESTGPYAEPICHYLRKKSVNLVQVNPMHTKRIKELTGNSPNKTDKKDPRVIADVMSLGHSLTVIVPEGAAAHLRRLTQARERAMERRTAMNNQLQHLVFLIFPEFVHIIKPSTKTGMYLIKHYADPKKLLFAGIDKLNAIIKKVSRGKLGTDRAKQLHEAAKKTVGIKEGKESILVETNYLVSKIAAEDHYIKDLEKQMSVYLKKIPYSHIILSIKGIGPVTTAGLIGEVGDFRNFKTISEVLKLAGLDLYEISSGNHQGCRRISKRGRVLMRKLLYLAAINTTRKNGILHSTYQRHLAKGMPRIKALIAIARKLLGIIFALVRDHSNYIADYSEQLMLKKAA

SEQ ID NO: 284482 - protein, 374 aa, unidentified
MTIHNTPTTKRSNPMTTVGLDIGDKYLHLHELTPFGEVLEQARFKNDPKKLESFFKDRDPSRIVLEVGSQSRWITLQLRSYGHDVLMADPRQLKLISGSLFKNDKRDAEMLALLGTQTAHLIKTVEVREDKHQHALTMVRARAAAVEARTKLVNTIRGLLKPYAVKIPKEGRSGAFVEYARENVEQEYAVMLEPLLQSVEQLNKSIHSYDDMAEKMLPEVAPDAQNLLTIHGVGVLTVLYFAALIGDPNRFSKSRNVGAYLGLTRSQADSGETVSDRGISHAGDAYMRALLANCASYILGPFGKDSDLRRWGLAKITQISGGAPPKSKKARIAKKKVKVALARKLSVLMLTLWKTGHDYDPDHHSKRQAPKQAA

SEQ ID NO: 284483 - protein, 369 aa, unidentified
MNTIYIGVDFHARQQTICYLTTEGGEVVFHQLQHHDKTAVRNFYAQFTGRVIVGLEAMGYSPWFEQLLAELGHEVWLGNAKEIRRRARSRHKNDRRDAELILDLMLHDHFPRLYVLALQSREVLRMLRYRQKLIKMRTMVKNSLQALALQSGLANRSHLFSKAGKRELQTAPMSPAMQWQRDEWLQLLEPLNERLLQTMLWLKQQSADDDRVSRLRTHQSADDDRVSRLRTHPGIGLLTALCLVHALEPVNRFRNSRHVVGYAGMDPLEDSSAERIRFGAISKAGPRVLRYLLVEAAHSSVKSDADLKRFYKRLAERRGRAKAKTAVARKLLVRAYIMLRDEIDYAEFQRRAVAARLARQNGGTPCPSS

SEQ ID NO: 284484 - protein, 369 aa, unidentified
MGDYSEVFVGIDVAKARNAIAIADGKRGGEVRFVGEVDASEASMRRAVKRIVAQHDRVHFCYEAGPTGYGLHRLITSLGQSCIVVAPSLVPRKPGDQVKTNRRDAIALAKLLRAGELTAVWVPDEDHEAMRDLVRARASAVETLRVHRQQVSAFMLKHGRIFPRKKGWTMRYLRWLQEQTFEHPAHQIALQEMVEAVRLSKERVERLERTIEEFVPSWPLAPVVRALQSLRGIDLIVAVTFATEIGDVRRFENPRQLMGFLGLVPSERSTGATVRRGGITKAGNGRVRHMLVESAWTYRHPPRIGAKKLYRLEQVPPAVRDIAWKAQTRLTARYRAMSGRGKKTTVVCTAIARELVGFMWAVAREAQTA

SEQ ID NO: 284485 - protein, 345 aa, unidentified
MQTMYYIGLDVHKRTISYCVKDGSGVIHAEGTIPATRLNLDLWMKTLPQPWTAAMEATVFTGWIYDHLQPHAAALKVAHPLMLRAIAAAKKKNDRIDAKKICDCLRCDFLPECYMASTAIRERRRTLRYRNLLVRQMVQMKNKISMLLMEAGVSYSKQRLHKAGYFRELLATNPDIPEGLRSLLRLCRETVVRLQKTESALVRSLEQDSLLMDRVERLMTIPAVGPITALTWALEVGDVKRFSSIKKAISYCGLCGAEKSSGNTIQRTPLSKQRNKHLQTTLIEAAKMAPRNSPALAMLYDREKQKGNANRATLAVARKLVAYLMAVDRGQRNFQMMETNNCIAA

SEQ ID NO: 284486 - protein, 413 aa, unidentified
MIPIEKMYVGIDVSKRSLMAHAMDQDGKDIFHSFNIKNNKPGCNKLIDFIYKHANQSDFESIKIAMEATNVYWEHSYRLINNSEKLNSNFKLSTHILNPKVVRNFKDAYNSLPKTDSIDAWVIADKIRFNRVPEPAIPEEVYRPLRELTRFRYKLIKNIRSEKNRALSLVFLKFSNLEEEAPFDVFSEASMTILESFTLEEIADKDLKNLAAFLYENSNNRLAGSASLNEIITDLKKAARNSYRLKPKRNQAITQTLSMTFDNIRFLQRQLKRSKKVLKRELKAIPQTLDTVDGIGVVLTSGIIAEIGDIDRFDNQAALASYAGLTWTKHQSGSFVAEETSMTKTGNKYLRYYLVEAANSLRVHNDEYRKYYYKKYYESQKHKHKRALVLTARKFVRLVFALLSKGEIYQPRR

SEQ ID NO: 284487 - protein, 373 aa, unidentified
MKKISRLRVEKSKKKEESASKVYTIGLDLGDKKSQYCVLDGTGEIVGEGSVSTSRMALEQQFKSYAGSVVALEAGTHSGWVSRVLKQMGLETVVANPRKVRLIAESTQKSDPEDARMLARLARVDRKLLFEIHHRSEAAQLDLTVIRARAGLVEARTKLVNSLRGLTKTLGSRLRKCDAGGITVEVLEGLPEAVKEALTPLVVQIQSLTVGIEEYDQRIAAGGKQYPEIERLKQVRGVGDVIALTYVLTLGDKARFERSRDVGCYLGMVSKRRNSSESQPELSISKEGDTYLRSLLVQGAHYILSRRGPDTDLKRWGLRLAQRGDQKSKGKKAKRRAVVAVARKLGVLLHRLWVSGEKYEPLRQARQQEQQAA

SEQ ID NO: 284488 - protein, 322 aa, unidentified
MIKPSLGIDVSKLDLSLSLLIDNKHYQTKIDNNQHGFKSFEKWIKKHNIQHVKACMEATGSYGRSFAHYLYNNQHDVHIVNPLCINAFAKSKLSRHKTDKVDSKLIAEFAQQNDLPLYSPREKNLQVLQDLYRCLQNLKHQAKQVQNYLENKKHLANSVCKAYARLAKSISKETIAVEAEINTLIDKTEDIKNKVTHMQTIPGIGKLTAVAILAEAPCLDNFTNARELAAYAGLTPKHKTSGTSVRGRSTISKMGSSTVKKALYFPAIVAKKHNPIFVKLNQKLASKGKPTKLILIAIMRKLLHIIFGVVKHNKPFDPNFCS

SEQ ID NO: 284489 - protein, 321 aa, unidentified
MTGIICGVDIGSSSLAARIGQDGAAATFANTPEGIAELAAFCKTHQVALIAMEATGGYEQRAFAQLCGHGLPVAVVNPRAVRQFAQSMGWLEKTDAIDAGMIAWYAQTKKSQPLCLAPPTQLELRARVTRLRQLTEVRTAQLNQQRLVTNEAVQKSFGAMLTFLAGQIRELEQAIAALIQADPLWRELNQAFRTIKGVADRTVARIMAEMPEIGTLSNKTISKLAGLAPLANDSGKHQGKRAVRGGRAAVRDILFLVGSVVARYEPDFLCFQQRLRAAGKPPKVVRIAVAHKLLVRLNAKAREVRQQSAHTQLSCSASQQP

SEQ ID NO: 284490 - protein, 350 aa, unidentified
MSVNHPNKQLILGVDTHLDLHVAVLINTLGQVICTAEFATNSTGYVKLLRWCQSFGHLTKAGVEGTGTYGAGLRRFLSNHQITVYEVNRPNRARRRLRGKSDPTDAENAARAVLADEAKAIPKTQNGSVEAMRFLLIARRSAVKARTQAINQIRAILITAPDDIRLKYLKSSQSACIEGCANMTAMDGSILLETLSISLNLLAKRWLNLTEELRKIDKNLKKITRTTAPTLMSQYGVGSYVAATLLVTAGDNPERLKKESSFAALCGVSPIEASSGKTVRHRLNRGGSRIANNAIWTITLIRMRSDPCTQQYIARRTKEGMSLKEIQRCLKRYIIRGLFPIILNDLSLSA

SEQ ID NO: 284491 - protein, 368 aa, unidentified
MLSIGIDVSKGKSTVCGMKPGGEIVYAPFEVQHTREGMSELVSLLHNSGEEVRAVLESTGSYHCPVVAALLENGIFVSVVNSLRMKRFCSQSIRKVKTDRIDAMQIALYGLAYWQELQLTKLPEDTYRELQLLARQYYQMTSLLIKAKVDFNAICDQVLPGMQELMSDHAGRHKLSDFVLRYCHTTHILEMGETRFRKDYCKWAEKKGYRNCERMAALIFATAQNGIPVLPNAPSTQIVITEAIRVLHTVEASRDAILTQMQALAKTLPEYSLVREMPCIGDTLAPRLVAEIGDVRRFRSKRALIAYAGIDAPPYQSGKFCANNRHISKRGNRYLRKTGYEVMQSYVMHKPANDPICRLCFAILFFCR

SEQ ID NO: 284492 - protein, 370 aa, unidentified
MNSITYVGLDVHKTTIAVAVAKGGRSGEVRQLGIYANRADVLRKMVERLARGRSQLSFCYEAGPCGYGLHRFLLGLGHTCSVVAPSLIPIKAGERIKTNGRDAVTLARLHRAGELTEVWVPDAAHEAMRDLVRARTTAAKVLSKARQHLSGFLLRHGKIYSGVRSWTQAYRRWLTTVRFDHPGQQVVLQDYIDAVITAEQRVARLTRQIIELMPTWSMAPVATAIQAMRGVALINAVTIVAEVGDFARFGNPRQLMAYLGLVPSEHSSGIRVRRGGITKAGNAQARRALIEGAWTYRMQARVSRKLHDRLEALPQNIRDIAWKAQVRLCSRWRRLAASGKPKVVVTTAIAREMAGFIWAIARQVQPQTTG

SEQ ID NO: 284493 - protein, 344 aa, unidentified
MVTIGIDAHKRSHTAVVVDEHGLKLAQRTSGTTSPEHLELVAWAATHARERVWAVEDCRHLSRRLERDLIASGERILRVPPKLMANARDGARTYGKSDPIDALAVARAALREPLLPVARLDGADRELRLLVDHRDDLVCERTRMINRLRWHLHELDPACEPAPGSLKRVRTLERLAAALEGMEGLVARLARELVERCEKLTLEIRSLEHEITARVSTLAPSLLAICGCGPLTAAKIVGETAGVERFRSAAAYARHNGTAPLLVSSANRSRHRLSRTGNRQLNAAIYRIALTQSHWHPEAKVMMARRKAQGDSGREALRVLKRRLSDVVYRALKADAAAQLPLAA

SEQ ID NO: 284494 - protein, 335 aa, unidentified
MKKLLETLGVDVSKKTLDAYLHVADTHQQFDNNLEGFRAMIHWAIQTGCVRLSELLICFEHTGIYGMQLAAYLEKRKMFYCMVPALEIKRSLGMVRGKDDKVDARRIAQYAHLRRDTIKQTKLPSLLLQKLKQLLSLRGNMVTQRAGYKAKFGELNRVYKKSELKVLLETQENLIRELSRSIDKVEAEIMALINSNPEVKRVYKLITSIKGIGPIVAANLIVVTQCFTTFENSRKLACYCGVAPFKKRSGSSLKSRSRVSHYANKKLKSLLNLAASSATQAKGEMKTYYDRRIEAGKSKMSTLNIVRNKLLHRVFAVVKRGTPYVEIYGSGMKKC

SEQ ID NO: 284495 - protein, 464 aa, unidentified
MAVLNIGVDLGVTAKHHAEIKNSEGIEVCSPVTFAGTKKGFDMVSKHALKNVDEGAKLRFICEPTSMSWFPLAVYAKRNGHEIMRVKAQKSHDLRKYYSRHTKSDKLDAKALAMMPIVDRESIEEVYLPDKVTNSLDRRCRQREKISKEIASIKTRIKSLYHWVMPGLTDCFEDPYGKRAKAFYKKYTNPFKVKHLGISRLHRVLEKAGRQQSSEGLAERVYKAAIRGCELYDHCGEYIDFDELQKEVECELQLLESHEKVQKEVDEAINRLYKQVHPTKNIETIPGIGETLGPVFFGIIGNSERFSSQSKARGYSGMIPRQKDSGESSKKGLNITKDGPSRYRRALYLASDTGRQWDPQLAKVYYDQMVHKGNCHNQAVCAVSTHLIGRIIRVLKDKRPYERRDLEGKPITKREAKILIKKELTVPEETRKRTRSRRKTKGYKRNQIRGIAQKQSSRSALYPS

SEQ ID NO: 284496 - protein, 355 aa, unidentified
MNQEKYIGMDVHQATISVAVMDSAGKLIMECILETKAATILEFLDGLRGSLSVTFEEGTSAAWLHDLLKPHVSRLVVCDPRKNALLKDGSKSDRIDARKLAELLRGNQLHPVYHGEHGVRTLKELGRSYQTLTQDGTRVMTRIKALYRSWAIPCSGATVYAPRHRADWLAKIPQPGVRLRAERLYQQLDLLQPVRQEARRDLLSESRKHPAVKLLRQIPAIGPIRAALLVALLQTPHRFRTKRQLWAYSGFAIETHDSGEYRYVRGKLQRNRERITVRGLNGNHNHDLKNLFKGAALSASTRPGPLYDFYVALLEKGMRPTMARLTLARKIAAISLTIWKKGVAFDAKQLHRQAA

SEQ ID NO: 284497 - protein, 415 aa, unidentified
MDVTVFCGIDWAESHHDVALVDDAGQLLAKRRISDDAAGYRILLDLLADHGDTPEEPIPVAIETSRGLLVAALRTGKRPVYAINPLAAARYRDRHGVSRKKSDPGDALVLANILRTDMHAHRPLPDDSDQARAIAVLARAQQDAVWNRQQLVNQVRSLLREYYPAALDAFQGKQHGLARAEARAVLAAAPTPARAARMSLAQLRAALKRAGRQRGIDAEAERLREVFRDRDHARQPGAVEDAMGHQLTALIRQLEAACLAADELAEVVEAHFRQHPDAEIILSFPGLGAQLGARMLAEIGDDRNRFTNARGLKAYAGSAPITRASGKKRYVGRRFIKNNRLINAGFLWAFAALTASPGANAHYRRRRDRGDWHAQAQRHLFNRLIGQLYHCLHSKQLFDEEHAFTSCSADLTVAT

SEQ ID NO: 284498 - protein, 407 aa, unidentified
MRPIYERCCGLDVHKKTVVACRRTPEGSQTRSFGTMTDELVRLREWLLEAGVTHVAMESTGVYWKPVFNLLEDHGMELLVVNARHVKAVPGRKTDIKDAEWLAELLQHGLLKASFIPDRESRERRELVRYRRSLVEQRAHLVQRIQKLLEGANIKLGDVASDVMGVSGRAMLEALAEGVDDPAAVAGMAKTALRNKIPELERALTGSVRHHQRFLLRSQFRLLESIEAEIASLDEEVAERMRPFQVALDRLDEIPGIGRRAAEQILVETGTDMSRFTTSAHFASWARVCPGNNESAGKRQYASIGGGNRWLRNALLEAAWTVSHSRKQTFFTARYRRIAARRGSKRAAIAIAHSLLVAVYHVLKDGVVFQDLGPNHFERRNSDAIARRSLRRLELLGYKVSIDSRPA

SEQ ID NO: 284499 - protein, 400 aa, unidentified
MYDSDEIGVFLGLDVGKSAHHGLGLTPAGKRVFDKQLPNTEPRLRAVFDKLKAKFGTVLVIVDQPASIGALPLTVARDAGCKVAYLPGLAMRRIADLYPGEAKTDAKDAAVIADAARTMPHTLRSLELTDEITAELTVLVGFDQDLAAEATRTSNRIRGLLTQFHPSLERVLGPRLDHQAVTWLLERYGSPAALRKAGRRRLVELIRPKAPRMAKRLIDDVFDALDEQTVVVPGTGTLDIVIPSLARSLGAVHEQRRATEAQITALLEDHPLSKVLTSLPGVGVRTAATLLVTVGDGTSFPTAAHLASYAGLAPTTKSSGTSIHGEHAPRGGNRQLKRAMFLSAFASLHDPASRTYYDKCRSRGKTHTQALLRLARQRINVLFAMLRDGTFYEPRTPRLA

SEQ ID NO: 284500 - protein, 331 aa, unidentified
MALAIVEARAITGGVDTHADTHVAAALDPVGGLLGVREFPATPAGYAGLLGWLGGFGTVCLVGIEGTGSYGAGLTRHVTAAGVRVVEVDRSDRQDRRRQGKSDPLDAVSAARAAQSGRARGAPKGRDGTVEAVRALMVAKRSAGSERTQTINQARSLILTGPDDLRTRFARHTVAALVAETASLRPRPGNVVGHAVRVALRELGRRAEFPGGQLQRPGELIVPLVTAHAPGLLALYGIGPSTAALLLIAAGDHPERLRSEAAWAHLCGAAPIPASSGKTVRHRLNPAGDRQANHALWRSRNALCASVRKAYYRGYSSGPWQLHPQMLRMWR

SEQ ID NO: 284501 - protein, 427 aa, unidentified
MNNTQNEKIAQVTNETMVIGIDIGSTKHWARAFDNRGMELSKKAFWFMNTAEGFASFEVWYESQRRAAGLKRIMVGLEPTGHYWFNLNQFLDEKGIRVVLVAPQHVKHSKELDDNTQRKDDLKDPRVIAKLVTEGRYFLPYRPTGVYADLRDGFNRRCGIIESMTQAKNRLNRWFCINFPEYLNAYGSVAAKTGLMVLKKAPLPKDIVELGVDGIVKIWRDAKVRGAGIKRATTLVTLAEQSIGEKTANEAARLELWQLLEDYEHYAHQYEVIEEMLEHKIHKVPHADKLLQIPGIGYFTVIGFFAEVGAIDRFNDPKQIQKLAGLSVVENSSGKRKGLPGISKRGRDRLRLVLFQAAMSAVRSNQEFKEIHLYFTTREDNPLKKMQSLMAVAAKIIRVFYGMVKNGTEYDPERLLRDIRRPEKAAA

SEQ ID NO: 284502 - protein, 312 aa, unidentified
MDATVVGIDVAKDRLDVCVRPGGDIFVVDRTAAGIEDLAERLKKLAPRVVAIEATGGFETVVAAGLASAGLPVLVVNPAQVRAFAVALGKRAKTDPIDAAVIAHFVEATKAVPRPLPDETTRLLADLVARRRQIVEMMAAEGQRERRLTNKRLQKSIARLRKALEKELAEINGEIDDHVRGSPVWAEKEDLLASVPGVGPVVARTLIAELPELGSLDRRKVAALVGLAPWTRQSGQWRGKSFIGGGRKNVRKVLFVAAMVAARHNPLLKTFRDKLVAAGKPKLVALIAVARKLLTILNAILRDKRPWQPKTA

SEQ ID NO: 284503 - protein, 353 aa, unidentified
MITIGVDAHKRVHVALGLDDAGQELGQWEGTNNAAGWQRIAQWGASLGSPRQWGIEGAWGYGRNLAQHLVASGETVYEVNARWTAAGRRGARKPGKTDRLDARAVALLVRQEASTLPRVHPEDDTAILDLLTSEREATVAEATRLRNQIHALLTQTDPDYRRYLPTLKSRAALDVLETYDPSVDNPLQVQRAAAVRRLAARLRLALLQAEELAEQIKVLAARRFSPLTRVCGVNLITAGTLAGILGPGNRFASDAQLAAYAGVAPLEASSAGLVRHRLNRGGNRRLNAVFYRIVLTQAHHSPQARAYIDRRVSEGKSRREAHRALRRFVARAIWRLWQECQPAEATNAVQEAA

SEQ ID NO: 284504 - protein, 429 aa, unidentified
MSETKSIELRVSVDVGYRSHSVAIGLPNGEVLEEFEIAHRPEGFREFFSRIEKHQRERECGVAVAMEGYNGYARPLDSLVRSRGYRLYNINNLKLARFKEIFPGAAKKDRIDARKGLELFQLSDHLPLAKEVLQEVRGTPKENEVLKRLTRRRRRLVNERVRVVNNLQADLQAVCPGLLEITTEAGNQWFLNFLLSADSLPQLARLRKATLLKIPAVGRKYASLIQDWQKRAHFSEEAVWVSEMIQEDAKRCLELDEKVKTLETKIREVAKDSKIAKLLLSIPGFGPVCTTELAGEIGTVERFSKEGSLALYLGMSTLDNSSGKYQGTKAPKHVNTRAKAAMMIALDRHRKNVPESQTYYEKKRAQGKKHNQAIRALGRHLCRIIYKMLKEEREYQLRSEKGDTQAKVRSRSCVKTKIRRPKTLPNRQK

SEQ ID NO: 284505 - protein, 464 aa, unidentified
MKDNKRRRQMKQRRISSHLEQVNLFAAGIDIGSQSHYVAVPEELDSEPVREFSCFTGDLNRMADWLVEIGIQTVAMESTGVYWIPAFEILEERGLVVLLVNARHVKNVPGRKSDVQDCQWLQQLHTYGLLEGAFRPPEETVALRAYTRQREMLVQRASDHIRHMQKALRQMNLLLDNVVSDINGMTGMKIIRAILAGERDPTVLAKLRDKRCKHDDKTIAASLEGHYREEHLFALKQSVELYDVYQQQIANCDETIQAQLDRMESRGDKDDLPPTKKRKTKSSPDFDLRGELYRMTGVDLTRIDGLNETRVLQVLSETGVDITPWPTEKHFAAWLGLSPGNKITGGKILTSKTKPSANRAAAAFRIAAYGLFNSKSALGAYYRRQRARLGSPKAITATAHKLARTFYSMLKHGTEYVDQGQDYYEKQYRDRVTKNLKKRATSLGFHLVPNKEDENMPDTVLSTT

SEQ ID NO: 284506 - protein, 350 aa, unidentified
MISLSEIAEIVIGVDTHVHTHSAAAVDARTGGVLGELTVEATPRGYQALVDFADAYSQLRAWAVEGTGGHGAGLARLLARRYELVVELDRPERARRRNGAKSDPLDAIRAAREALSRAKLGTPRSAGQRQALAVLLAARRSAVQAGTDAQRQLFSLVIAAPEQLRARFRGRKLAAMVRLAARLRISPRWDAETATTARVLRDLARRALTLGSEATRHEKDILAIVRSWRPDLLTQPGIGPIVAATVLCAWSHPGRVRSEAAFAMLAGAAPIPASSGQTTTRHRLNRYGDRQLNRALHTAVLARLRYDPTTQAYTQRRTSEGKTPREIKRCLKRYLARDLYRLLENPPQPT

SEQ ID NO: 284507 - protein, 341 aa, unidentified
MQDRTLNAQPSYELPGASTPANAIIGVDVAKAALMVARHGANASQAVANSAPAIRAWLKALPAGACIAMESTGRYHLELASQARAAGFDVYVLNAMDVHHYAKAMGQRGKTDPLDAHLIAQYVAHQLLGQGRKRLRPWQPTPRLLGELRDLLRARVQLADSCARLTMALEHVAALEEEGQAFRAHFKQLMTQIDAKVATLMASDKQLAQGCKRLQTITGVGPQGAALLATLLTRIGFAKSDAVVAYAGLDPRPEDSGSKRGKRRLSKKGDPHLRRQLYLCAMAATRSALFRPMYEALKGRGLPSTAALVVLARKLLRIAFAVWRSGQAFEPSKLLVNAKPA

SEQ ID NO: 284508 - protein, 356 aa, unidentified
MNNRKYIGMDVHQASISIAVSDAAGKVLMECIIETKAATVLEFIQGLRGSLWVTFEEGTSAAWLYDLLKPHVTKVVVCDPRKNALLKAGNKNDRVDARKLGELLRAELLTPVYHGESGVRTMRELSRGYLAVSKDLTRVMNRLKAIYRSWAIPCAGQQVYSPRHRAAWLEKLREAGVRRRAEQTYQQLDFLMEIRKETRKELLAESRKHPARKLLEQIPRLGPIRVALLIALLQTPHRFRTKRQLWNYCGLGLRTRSSGEYRYTGGQLQHARKPPALRGLNVNHNHDLKHLFKSAATQAGACKDDPLGEFYQNLLAKGMQPPMARLTLARKIAAIALKIWKKGERFDPAKLKQQAA

SEQ ID NO: 284509 - protein, 345 aa, unidentified
MQTVTTIGLDIAKSVFQVHGVDAQGKVIVRRQLKRRYVLAFFQKLPPCLIGIEACASSHYWSRELQALGHTVRLMPPAYVKPYVKRQKNDCADAEAICEAVTRASMRFVATKTVEQQSCLMIHRTRHLLIRQQTAVINAIRAHFAEFGIVAPVGRTGVEELLKVASDGNDKRLPDVARVCIAALGAQLQMLKARILEFDRLIMAWHRSNQVSKRLDELPGVGPALATALVGSIADPKAFRSGRDFSAWIGLVPKQHSSGGREKLGGISKQGDRYLRSLFVAGALAVIRYAKKRGSKHRPWLAALLARKPTKVAAIALANKIARMAWAMMAKGERYKQPVALAAAW

SEQ ID NO: 284510 - protein, 332 aa, unidentified
MRYFLGLDVAKDTFAAALLDETGQLVGSTSLTNDAAGFIALLAWLPAAAQTIAVCEPTGVYNQRLKQTLATSFESLHEINSQTLKQYAFSQVRTKTDQADALTIADAARTLFLSKPETLVKTRVSWSPERENLALWLAEYDRLRKAIATLRQQIGDLDHHAAGDAAKVQRRRRQELQRLLAQQKQVKQQIEQAFAQLDDAQARLIDSIPGLGPISTAATLVVVRNVARFRSADALKAYLGIYPRRNQSGKRERRSHLAHHGNALMRHVLWNAAKAAVIVKHEANPFRLLFERLLAKGRNYSYAIGAVCRKLVQVIYGVLKSQTPFQFPASTP

SEQ ID NO: 284511 - protein, 423 aa, unidentified
MEVMHRRVAGLDVHKETVVACVRVMTGRRPTRECRTFTTTTQGLLELLGWLTASRVTHVAMEATGVYWIPVWKILSEGDFTLIVANAAHIKQVPGRKTDMNDAMWIADLLACGLLKASFVPPEEIQELRSLMRTRKQLVREQTRHVQRIEKTLEEANIKLGAVLSDLMGASGRRMIEAMIGGERDPHRLAALAERSVKASPTALHDALHGRLREHHRFLLQLHLRQWDALDAAIRQIDEQVADQIERVDEEAADGQPPFRELIARLCAIPGVSLLSATAILAEIGRDMSRFPTAGHLIAWAGLCPGQNESAGKRKSSRLRKGAPWLKTMLVQCAWAAKRAKRSYYSAQFHRLCGRRGPQKAICAVAASLLTAIYHMVQSGTSHRDLGADYFDRRTPKAKAKRLVAQLARLGFAAQLQPLAEAA

SEQ ID NO: 284512 - protein, 352 aa, unidentified
MKELSKESVIKYVGIDLAKRSFHLYAVDGEGRAVLSRKLTRARLSAVVAQLPACTIAMEACGSAHHWARVFRTFGHEVRLIAPQFVKPYVKSNKNDAADAEAICEAAQRPGMRFVAVKTVEQQDIQAIHRMRSLAVQQRTAQINQIRGLLLEYGIEVAQGRAALQRRLPEILEDADNGLSARFRAELHGLAEELRHLNERVAHYDEQLERIAQGDAQARALMTIPGLGAKGATALLAAVGEDPRLLKNGRGLAAWLGLVPRQHSTGGRDRLLGISKRGDVYLRNLLIHGARAVLRVVAGQEDPTSRWATALKARRHTNVAAVAMANKIARVAYAVIITGKPYDPARAALAHG

SEQ ID NO: 284513 - protein, 376 aa, unidentified
MNSVAVVPLDIHKKFSKAVEMGEGGEVLGEARVSHAGRDEMKKYFSRFPAGTDVVMEATFNWPWIADAAEEAGLRPHLAHPMRAREMAKGMAKSDRKDAIFLGKLWLAGDIFPESYLAPPEVRRMRGLFRLRLTLVSMRTALKNAIHGQLHRQGILISECSDLFGKSGLAILEKLPMKEHERWQLDTKLSVLGDIGLYVKEMEQKIRRELKTDPRAQLLMSLPGVGEITAYSMLAEIGEIERFHNSRALASYAGLLPLDNESAEKDFGKRTGAHCNRFLRWAMIEAVTGAVTASGRMKSLYMRVKNRNKDKPQKARIAVARELIELSHLLLTRKVKYEEKRPPRPGSKEVGDGTRPNRASQSTLCARSPQASQAAL

SEQ ID NO: 284514 - protein, 605 aa, unidentified
MTGRGLRALRASVSRPVTRAVEARDRRGCFAAFVRPLAETGCEWGRLARRTPRAGSRDAMPEAVESSTPKRWSRWSNRWASQHRGGSSAGVFLGRAQRVLHLRWQFLEARRDGRARARLDESAVEPNTIMPTHTKNARSSRARAKPCAAGPSPAKSANASPRGSGADGTFESPVSSAPTPSSPSKASGRSRSKKLTDLPPTGCPADTPTRSDGAVEPGAKGRSVMRSVALDLGVKKIAYCEVSAGEVVDRRMVNSLSSLEPTLGPGAKPARVAIEACREAWFVHATLTAWGNEVLVVDTTRSRKLGIGQHRRKNDRIDAEVMARAVESGGIPMAHVLSPHRQELRRQLSVRRTLVETRSQYVTTMRGLACALGARLPSCDTEQFSAKMRKAPLNPDVRTAIEPLLALLSPLQEQLAMVEQGLEELCALEPVVAQLRTVPGVGPIVAAQFVSVIDEAKRFRTAHEVESYLGLVPSEDTTGGKRRLGAITKHGNTYLRALLVQSAWSMFRQPGRTDPLQKWALAVAERRGKRIAIVALARRLAGVLWAMWRDDTVYDAELAMRSGVRGLRNAAQSIEFRAQALERAAAKLRQHRARPAKITEVTSSN

SEQ ID NO: 284515 - protein, 320 aa, unidentified
MTQTIEAYIIGVDVSKNTLDIYVSATDQSCSIANDSESIEHWLARQVGPIRLAIEPTNTYHLAIATAAHVRGHQVYLIDPYRLAHYREGVGQRVKADHQDAQLLARYLQREIGELRVWTPPKQGPQRFWHLLKRRASLVQTVVRMKQSLTDLGALQADVDALIKQAQQTIRKIDQALRAQAKALGWATQVRRCQGIPGVGPLTALAMVATYHRGQFRNDDAFIAFMGMDVRVRESGLYRGRRKLSKKGDPELRRLLFNAAMQGRRNAHWEPYYLALRERGLSSTAAFVALGRKLARLCFVLLRKEADFDPNFCSGGCMAS

SEQ ID NO: 284516 - protein, 356 aa, unidentified
MVQGRGAGTPAYTQEAIVDKTDHAGIEVSKEELLVALRRGEQTLPVKSFPNTGEGHRALARYLARKSRVVRACLESTGVYGLDLALLLQKRPGVEVMVANPRAVRHFAQALMQRSKTDPLDARVLLEFAARMPFQPWQPPSAAALHLCALARRIEAVTDLCAAEKNRLHAASSAAALPAAIRPEIRRSIAFQESALQRLTQQALQLIAANAVWQERFGYLDSVPGIGATSAIALLAELSLLSPDLDVRQWVAASGLDPREYSSGSSVHKKTRISKAGNRHLRRALYMPALVAVRYDPHLGAFYQHLLGKGKAKMQALVAVMRKLLHAIFGMWKHQQAYDGSQLFALLAEPCIAEVA

SEQ ID NO: 284517 - protein, 317 aa, unidentified
MALQRIFVGIDVSKEWLDLWLEPQKRFERTSNDAAGWTATIGLLRSLGSAAGLVVAFEATGGYEIGLRQAMLEAGFEVRRLNPLRVRLYAKSLGRNAKNDRIDARVIARYAEAADTMPETLDPARERLAELVTHRRRLVDERVALGNQTNMLRCRVLEAQNRKRLALIERQLEETDALILEAVGETPSFLAKLQLLKTLKGVKDVTAVTLLALLPELGRISRRAIAALVGVAPFDHDSGVLKGTRSIAGGRSAARTALYMAARAAARSKSPLGTFYKRLIAAGKTPKIATVALMRKMLVTLNAILRDSQPWKHAKAC

SEQ ID NO: 284518 - protein, 316 aa, unidentified
MASFLGIDVSSLSLDVAVRPQGIKMHLSNDPTGFEALLESLRKLSIRRVLLEATGGYERDVMRFLQDAGYKVIRVNPRRARSFADSLGIKAKTDAIDAEVLAHYAEVIPDQPSLQISPERALLRELLQQRDRLVQQRDDDLRRLKQVQSTAVANYLNANLKHFKAQIKLVEHEIEQQTAMLNDERVTQLIKVKGIGMVTAGKLIALLPELGRVESREIASLVGVAPFNHDSGKSMGKRSISGGRFEVRRSLYMACLVAMKYNPALKARYQSLRERGKLPKVAIVACMRTFIVRLNAMLRTGTSWLDLVLPQPESTT

SEQ ID NO: 284519 - protein, 323 aa, unidentified
MTRTICGVDISSQSLDARVGREGAYAQFSNTAEGIASLACFCHAHQVDLVAMEATGGYEQRALALLSEQGLPVAILNPRAVRQFAQSMGQLEKTDRLDAGMIAFFAETKKSQPVSLSSASQQQLRALVTRLRQLTEVRTAQLNQARLVADPAVQGFFKRLLDLVNEQIEELETAIAAMIAEDPLWHQLDQAFRTIKGVADRTVARLMAEMPEIGSLSNKTVSKLAGVAPLASDSGKHQGKRSVRGGRASVREILFIVASVVGRYEPDFIAFQQRLSAAGKPRKVIRIALAHKLLVRLNAKAREVRQQWAALQPDRMALPTGSK

SEQ ID NO: 284520 - protein, 444 aa, unidentified
MTRGDRNRNRKLEALREAVARDRAVLAVDLGEDKQVAVVMDHECRVLARKVVKAKAHQLAGLLDWGADRAVKAGFAGLTVACEPAGHRWKALMGLADGAGHGFCCVQSLAVHRAREGDDYTLGKTDHRDAYLIGKLAVRLECYLPERADEAWARLRHLGARRFALVADVTSCMQQAGDLLGCAWPAPLGAAARPLESVTWLAGMAVITGRCCGQPRRLRKLGYDRFLAAVRRELPRWGGKYVRHSIVRGLWDALADAGGVAAQRPGALERVHLLLGDWRELRTRLAGTEERMVAVRGKLGLAELVASIDGVSALSGAVILAEAGDLQRFTSGRAVVKHAGLNPSERTSATINGQTRISRRGRPGLRAAAWRAVWGALRHNPVLQAKHAHLTGRHANRLADGQARTACAAALLRWLWAVVITGQAWDARIAAGQIPARPVTTAAA

SEQ ID NO: 284521 - protein, 349 aa, unidentified
MLADEVDYVIGVDTHRDQHTLAVVAAPTGAVVAQTVIRATGRGYAQALRFAERHAGGVRAWAIEGAGHYGAGLARYLAERGEAVLEIGRHTRVERRLRGKDDPLDAIRTARAGLAAETPTLPRAGEHQEALRVLLLARRSAVDVRRVALVQLRSVIVTAPEQLRDELRRLPLTQLIRRCSHFRRSHSRTADELAVVLALRTLARRIEAATAEADELEREIRQHVRALAPELLDEPGVGPIVAAQLIVTWSHKDRVRSEAAFARLAGVAPLPASSGQTIRHRLSRGGDRQLNRALHTVILHRRQHDPATRDYIARRVAEGKTTREATRILKRYLARHLYRVMQNATPLTT

SEQ ID NO: 284522 - protein, 532 aa, unidentified
MNQAGRRACEAPRTRLFITLPLRTFLLQKRMDSGLMKLETRVTTATNTLPIHAMNGERGSSGSDALAITTNTQDVGRHQASSIRFSQIPSSRVSINTIMEDRRMSKTEAVTETAEYAALIGLDWATEKHDVWVWDTRTGEGRHRVVEHTPEALSEWLTELQTRYPGQRLAVCLEQSRGALISALMGHAFLTLYPVNPATLARYREAFTPSRAKDDPNDAQLLAEILRLHRDKLAVWKPDDIQTRTLTFLNEERRKAIDLRTKLTLRLQAALTLYFPQAIEWVGVHLYTPLACDWLLKWPTLAAIQKAKPQTIRAFYYAHNCRRPDQVEDHLQTIARAQPLTQDAAVISAYQLTVQMLAKQLRTLHHSIAEYDRQIAQLFAHHPDAPIFNSLPGAGPVLAPRLLSALGTNRDRYLSVQHLQTYSGIAPVIERSGKECWTHWRWNCPKFIRQTFHEFAKNSIPYSAWAKAYYESQKKKGKGHNAAIRALAFKWIRILYRCWKDRIPYDEGRYLKMLKQRGSELANVIAQQPQMA

SEQ ID NO: 284523 - protein, 382 aa, unidentified
MLAGIDTHKDTLAIAVIDAAGRPLVVTDLANTEAGFDELEALLAEHHVDRIGIEGSGSYGRGAAVRLVLAGGIDVVEVPPSLTSRERSSRPGQGKTDPVDALAIARITARETTLPPVRLAVGQAADLRAMVDYRGQLVHERTGLANRTHAELHGLLPGYHATVPRLTAPTFIAAAQQLLAGDTRVRAGLTRRRLDRLAELTVEIKELTALITATMDTVDTGLTGLYGVGPVGAATILGEVADIRRYRSRHAFAAANGTAPIPASSGRTSRHRLNRAGNRTLNRVLYTMAITQIRADTEGRAYYQRKRAEGKTGREALRCLKRRLSDLIYKTMHADIAGTQITATAAIGTAAIETVDAATAQDTTNGRSQLRDRASSPHPALR

SEQ ID NO: 284524 - protein, 330 aa, unidentified
MKNYSDVIGIDVSKLTLDAHIHNRVVHRVFSNTPKGYKALLSWTETYLKEQVYFFCFENTGHYSTNLSVYLSENDLDYVEESPLAINRSSGVVRGKTDKLDSAMIARYAWLYKEELVLSSPKEQDIQELGRLLSFRDQLVRDRTGKMSSLKEMQTLLSSPSTDDCCNIIKKTIHYLTKQIIALENHIKNLMSKDESLQKNYELLNTLKGVGLVLSCQLLYHTSNFKRFDSWRQFSSYCGVAPFEHSSGTSIHRKNRIHHIGDRKMKTLLTLASVSAIQCDQELKQYYNKKVSEGKPKMVAINNVRNKILSRAFAVVKRGTPYVVLQKFVA

SEQ ID NO: 284525 - protein, 366 aa, unidentified
MAQDTQVRYVGIDAHQETLSISVLVGDAKEPLAAQTIANRAPQVRRFFRKLLERGAVVATYEAGSLGFVLYRLLMDLGVQCVVAAPSHLPKIPGDHRKTDRLDAQRLASFLRAGQIVAVTPPTPEIEALRTLTHTRDAMRLDVGRARHRILKLCLARGVIYSEGTNWTPKHMAWLRSAELSVADDRETLDFLIDELEHRTGALARLDLRIEDRSRRSDIAESVRSLMAFRGVQELTAMCVLAELADPLRFKNARQVAAYCGLIPSEHSSGTRIRRGAITRSGNARLRRILVEASQHFSRPFGGKSAVLRRRALAPPKAQRIATRAEERLRRRYKMLSARKHSNVAKTAVARELVGFLWAALHPRMA

SEQ ID NO: 284526 - protein, 472 aa, unidentified
MSKGSGGNGMTRGDRRRNARRERLRAMLPRDGAVIGIDLAEDKQALAVIDHDVRVLARKTVRVKAFRLGQTLDLMVGQARAKGFTHVAVACEPTGPRWLQVQRLCAERGLPLVCIQPLVSHIAREQQDYTTHKTDEADCVLIGRLATELHCYIPEELDETWAHLRHLGRRRAQLITAATASGQRILDFLSVAWPTVTETCADPLKSVTWLTALQVVTALCGADPGKLAAMGRQAFTTLVRGAIADWGGKRAYGPVCVRIFGALTSTEGVVVASRRGLLRRVADELGDLQRTRAQLRAVEADMVAVLAELGLSRLAGIPALSAVGAAAILAETGDPRRYDSSSSLVKHAGMSPSDNASGAFLGDAHISRRGRPGLRLTVWRAVWPMLRFNPVMAAKYAAMTQAADAAAAAAGTGSRQAGAAAATARARHAKARVACAASLLRWIYCLVVHGTSWDPDAASGPASGRPALAEAA

SEQ ID NO: 284527 - protein, 355 aa, unidentified
MTSTKYIGMDVHKESISIAVRNAAGKIVMECVIETKASMILQFIDGLRGDLQVTFEEGTSAAWLYDLLKPHVTKLVVCDPRKNKSMREGNQSDKIDARRLAELLRLDHLTPVYHGEHGLRTLKELVRSYLTVTKDLARVMSRVKAIYRSWAIPCTGKQVYAPRHRAEWLGKINEPGVRQRAEFYYQQLDALRVLRREVRRGLLAESKKHKAWKQLCEIPAIGPIRAAVLLGILQTPHRFRTKRPLWNYGGLAIEMHSSADHRSVDGQLQRSRKNVLVRGLNRNCNHDLKNLFKGAAAVASSKPGPFAEFYAALVAKGMRPEMARLTLARKIATIVLIVWKKGVRFDAQHLKPQTA

SEQ ID NO: 284528 - protein, 355 aa, unidentified
MNSVRYIGLDVHRDTVSVAVRNSEGKLLMESVLATRAAAILDFMGGIKGTLNVTFEEGTHSAWLYDLLVRRVCKLVVCNPRQNALLKSGNKNDRIDARKLSELLRGGLLSPVYHGEHSAFEVQHRARSYTMLTEDTTRVMGRLKAVYRSQAIACGGKKLYGKRSREQYVAQLPAGSLQQRAECLYEELDALQPLRRKARRELITASRKYRASAWLQSIPFVGPIRAAVLLGRVQTPHRFRTKRQFWSYCGLALETRSSAEYHLVQGQIERKHKPVLIRGLNWNHNHELKNLFKGAATTASIREGVWREFYLALLAKGMKPELARLTLARKIAAIALVLWKKGEHFDPKYLKPEAA

SEQ ID NO: 284529 - protein, 339 aa, unidentified
MGPTCVLLNPNGCLGPEPEPTRMGWKMMPQEPAYVAVDVSKATLEIGEPELDRTWSLSNEPKGWRKLIAWIEKLGRPVVVGLEPSGGYERGLVEALLEARIDVRWCDPARVRALAKALGAPAKTDRIDVGMIRRFLSQIGGRPVRRDRERDALRASLSARRAAQEAAQALEAQAQALPEGPARQALAALAAQARLTMKAQERAAIALIRASQALCPTWRRLQTAPGVGPLVAAELLAHMPELGAVGGKAIAKLAGLAPFIRRSGQWQGRAVCSGGRPRPRQLLYLAVITCLRGSSQTKAAYQHLVAAGKPPKLAITACMRRLLVTLNAMIRDQADWRPA

SEQ ID NO: 284530 - protein, 423 aa, unidentified
MTHTADARVLVGIDISKHRHEVLIAAPGKQRRRKLTITNTIEDFRRLISILSEFGLPVRVGFEATGNYHRALMHHLGDAGFDLKLVSSVALARTREALHNSWDKNDPKDAQVILHMLEIGAVQVFHDPMVAGTNDIQELSKTHEVVSRAKTELWHRILTHYLPLYFPEAERFHRSSRTDWFLAFLEAFPSPHMITALPKESFVEAAWPVLGRRVGKSELLSDIYETSKASVALPVLPDSEAIRMFRLVLAEGRSLTRQRNEIEDRAVSLLSDLPDFRLLTTIPGIGPINAMTILAEAGDLRRFRHHRQFLKFCGMDLATVQSGMFRGQSKISKYGNARLRRVLWMAGQTAVLQRANSFRDKFERYISQDRHNPHLRRKACTAVAAKMARTIHAVVKYGEPYRPFFEGASPGGRTPLSKGRGGA

SEQ ID NO: 284531 - protein, 341 aa, unidentified
MQITTIGLDIAKNVFQVHGIDATEKVVVRKQLRRGQVIAFFKALAPCLIGMEACATAHYWARELMKLGHQVRLMPAKDVKAYVKRNKNDAADAEAICEAVRRPTMRFVAIKSAEQQARLMQHRARDLLMRQRTQLINALRAHLAELGITAVQGREGIKELLAIVAQNGDTRLPVDAHASLMVLAAQLQAVQTMIGSIEKRVVVQHRSNEESKRLETIPGIGVIGATAIAATVPDPKVFRSGRDFAAWIGIVPREDSTGGKQKLGPISKRGDQYLRRILVVGACSVLRRARQQPEKYPWLTQLLARRPFKVVAVALANKMARIAWALLAKGGTYRLPQLAAA

SEQ ID NO: 284532 - protein, 344 aa, unidentified
MKVSVLGIDLGKNVCSIVGLDASGAVVLRRRVKRETLIGLVAKLPASIIAMEACCGAHYLGRLFADQGHDVRLMSPEYVRPYIKAQKNDDRDAEGIAEAATRPTMRFVELKSQEQLDMQTLHRSRDRLVAERTSLINQLRAILLERGIVVPQGKHRLERYLISLMDEQRTEGLSSRIRALIADARAQWLELDRRIAVLTKEFGAFSKQNEDARRLATIPGVGVMIASALIAAIGKAEAFEHGRDLAAWLGLVPRQSTTGGKSKLLGISKRGNKYLRKLLIHGARAALPHIAARDTSLGRWAKQLLARVHKNVAIVAFANKLARIAWSVLQRGERFTAKGSPLVA

SEQ ID NO: 284533 - protein, 370 aa, unidentified
MGDDWAEDHHDVELQDQAGRRLGRARLPEGVVGITRLHELVAGQLGEDDGPDQVVVGIETDRGPWVQALVAAGYQVFPVNPRQVARYRERHGTSGAKSDATDAHALADMVRTDRHQLRAAAGDSDRAEAVKLLARAHQTLVWDRQRQVLRLRAALQEFFPAAVAAFPDLAAADALALLQAAPDPTSAARLSRTQVVAALERAGRRGVQAKAAGVQQALRAEQLTQPTTVVAAYAAVVRAAVAVIGTLNAEIQALGEQVEAQFGKHPDAEVYLSQPGLGGVLGARVLGEFGDDPGRYRDARARRNYAGTSPVTKQSGKKKVVLARFVRNDRLADPLHQQAFCALTASTTKRPRGHTALPTQPLDTKAHGVS

SEQ ID NO: 284534 - protein, 351 aa, unidentified
MDATTVGVDLAKNLFVACMADCAGRIVERREFNRAGFLTWLGTLPAGTLIGMEACGSAHHWGRTAERLGLAPRLMAAEFVRPYRKRQSVKNDRADAEAILVALRAPGMRFIPVKTEAQQQRLAWHSLRIGWVEERTALLNRIRGLLAEFGLIVDPGPKHLRALLAEREFDTALSPALRGLIQSVRDQLDALDARIGECDRQIMAQQANDPLAKRARDLPGVGLITADAVTASVGDASMFRNGRQFAAWLGLTPSQSGSGGKTKLGRITRRGDDYLRTLLVQGARSVLAATLRKQRRESPEKLTRLQQWIVALNGRIGYHKTLVAIANKHARQLWAVLAKGESYNPQAWQRA

SEQ ID NO: 284535 - protein, 410 aa, unidentified
MSHRVAGMDVHKKVLMVVVIDSQDAGWSAKRKRFGTVCSELRLLSEWLREQGVEEAVMESTAQYWKPVWYELESQMRLHLAQAFSNRAPKGRKHDFRDAERLVRRLLAGELTLSLVPTGEQRSWRTMTRMKTQLTEDQSRLHAQIESLLEEMRIKLSSVVSDLLGVSGLRILTALAAGQRDARKLAGLRDERLRASEETLVDALSGHFEPYQQQLLGFYLQRYQLIQQQIEQLHAMIGRAMEQHQQAVRRLAQVPGFGVNSAQQVIAEVGVQASTFASAAHLASWVGTCPGKEESAEKNRTSRSAKGNRYLRRILNQVAHAAVKKQGSRFQIVFRRLLPRLGYKGAIWAVAHRLCRLVWKILHHQIDYIETGSEPNPKAKQQRVRKLLHALRKLGYDVTIPNLHPAGAES

SEQ ID NO: 284536 - protein, 347 aa, unidentified
MKFYTKQHKFYCGIDLHTKKMYVCILDAEGQIRLHQNIRTDPEAFLSTLAPFREDIVVAVECMFTWYWIADLCVQENISFVLGHALYMKAIHGGKAKNDKIDSHKIATLLRGGMLPQAYVYPARMRATRDLLRRRNHFMRKRAELFAHIQNTRSQYNLPDFLGCIAKPHNREGIVERFDDPSVQKSMAINLEMIKAYDRLLTQLEHDIIASAKEHDLRSYALLQTIPGVGRILALVILYEIESIERFPSVQDFVSYCRLIKSIKESNGKKYGSSGKKIGNAHLKWAFSEAAVLFLKGNEPGKKFLERLTRKHGKAKALSILAHKLGRAVYFMLKNKEAFNQKKFLGL

SEQ ID NO: 284537 - protein, 314 aa, unidentified
MNTTNEINVGIDTSKTQLDIYIRPLDEFFSVDNTIPGVKQAIKRLKAVCPTRIVIEATGRLELPFVVAAQKAGLLVTVANPMHVRRFASAAGQLAKSDKLDAQTIAHFGEALKPGPTELKPEKTRLISDLLARRSQLLNMSTMEKNRLSILPKPLHTSLKRHIKHLQAEVKRIELQLDKLIDQTPLWQERRDLLMSVNGVGKVLAYTLLSDLPELGQLNRREIAALVGVAPMNRESGNYKGKRCIRGGRARVRTVLFMAIMSAVQSNPKLKRKYLQLKAAGKPPKVALVACMRKLLTILNVMMKTGTHWDPEMA

SEQ ID NO: 284538 - protein, 366 aa, unidentified
MKRVMAGMDLHGNNVMIGIVDADGTRLRHRRLACDLEEVIAFLNPYKPFLDRVAVESTFNWYWLVDGLKAAGFPVVLANPAKIDQYEGIKHADDKNDAYFLAELLRLGILPTGYIYDPESRPVRDLFRRRMGLMRLRTTLLLSSKSLHHRTTGHSLAVGQLKALSPADLAAFYSHPANRLTAEIQKELIEALNQCIRRIEKMVASEALKKPYYKRLQTLPGIGVILGLVISMEVGEIERFAEPGRFASYCRTVDSNRVSNGKKKGSNNEKCGNKYLAWAFVEAAHAARRYDAHCRRWFDRKSAKKGTTIATKALACKLAKAAWHVMAEAVDYDPAKMFPELAAGRIEQISGRQTSASKGVGPEPED

SEQ ID NO: 284539 - protein, 371 aa, unidentified
MKSILSVGMDVHKNSFSLCAYDGYTGEIVSESTFASDVKLVIKFIEALKSRYENDVEIKCGYEAGCLGYSLYKLLTARGVDCVILAPTTMQVSAKNKMVKNDRMDALNIAKNLASGSYKTVYIPDEEDVEIKEYIRMIHDFKKELQRVKQEICAFVLRHGYQYDGKSKWTIRYMNWIRELEMSEIQRETLNEYIAEMENLNDKIDRFMNRINEIYQSERYHEKVSKLRCFKGIETFAAMTIQVETADFERFPNAKAYASYTGLTTGEHSSGDKNNRIGITKQGNTVIRKTLVECAQALVKGNVYAKKSQRLKSRQKGMDVNIIVYADKATERLKKKYQKLIERNVPRNKAIVAIARELACFIWGMETGNIH

SEQ ID NO: 284540 - protein, 434 aa, unidentified
MQEVSDEPLYRDRACGIDIGKAGMVATIRVPSDKNPARRAAETRSFGTTKREVLALADWLRSWQVPAVVMEATSDYWKGPFYRLEAEGFECVLADAKQVRHLPGRPKHDPGDSKWLAACFERGAVTSCFVATPEFRIIRLHTRYRRDLTTERTREKQRAEKLLESAAIKLSSVITDLHGVTGRDIMNHLIAGETSPKALAQLARARARRKIPELEASLEGAEFFTPAHAALLAAMLARIDQLSTQIEQLTAVIDELLAPYEEQLQQAGSMPGWGRLSAQDALAETGPDMSRFPTGAHLASWAGRTPLDNSSGKRAGRAKSKKGNRYLGAVTGETAVAAGKTQTREGARYRRLSRRRGKAKAQVALGNTQMKVYHKLLSNPGLRYHDLGPDYYDHQASTRRQIAHHVGKLGALGFEVTLCRLPEPEPAPPATQAA

SEQ ID NO: 284541 - protein, 455 aa, unidentified
MEKQTLKDYEKMKVIHSNAAGIDVGSKSHFVAIGQQKDEVREFGCYTNELHGLCRWLKEKSVDTVALESTGSYWQSLFVMLQDYGLNPILVNGKFTRNVKGRKSDVLDCQWIQKLHMLGLLEGSFIPDIFTETLRQYCRHRQTLLEDAAGYIKKMQKALRLTNIRLDVALRDVTGVSGKAMIEAILNGEREPEKLAALAHFNVRKSREEIALALTGDWREEHLFELKQSYEVYNYFHEKISECDQQIEKLLNHKVEDNEKQDGEARLEYKGKGKKINKNDPKIDLQKLSFQLTGGIDLSCIEGIGRSTLMNILSETGIDLSAFPTAKHFTSWLRLSPNNKISGGKVLSHRTNKGKNRLADSLRHVANVIGNSVKQGSLHQFFKRIAYKKGQLAAITATARKLAVIIWTMLTKKQNYEPLDQTRYLTKIRTAQVKSMQRKINQLKVMPQELVFGIN

SEQ ID NO: 284542 - protein, 355 aa, unidentified
MSKRKSKDLSKLAVVGVDIGKDVFHLVGFDDGGNLVLRQKIKRLALTATFEEMPRCVVGMEACLSAHFVSRTLRSLGFEPRIIPAIYVRPFIKGQKNDYNDAEAIAEAALRPNLKTVTEKNQDQLDLQALHRVRSRLVSRRTATINQIRAFLIEQGITVRKGPHALKRSFLPILEERQDEISPRMRTILTGLYGDWLWLDERIETIAKEIEDISRTEENCANVMTIPGIGPLISTAMVAAVGRGEVFDRGRDFAAWIGLIPRQYSTGGRTVLGRISKRGSRYLRMLFVQAANVVLMRPHRWPDFSFGDWLARASSRMHRNKLAIALANTLARIAWSVLRHGTPFDAQGDEVMAGV

SEQ ID NO: 284543 - protein, 372 aa, unidentified
MQQDSAVFVGLDASKMKISVALAEEGRQGEVRFLGDIDHTPEAVRRLVTKLVGRYGRLLFCYEAGPTGYGLQRQISALGHDCAVIAPSLIPKRPGERVKTNRRDAITLARLHRAGELTRIWVPDPGHEAVRELVRAREAAMADLRTKRQHLQSFLLRHGRIYRGSRPWTQVHARWLSNLSFEHPAQSLVLREYRQAIDDAETRLERLTQQVAEVVCSWSMAPVVEAYQALRGVAFLTAVTFVAEIGDVRRFETPRQLMAYLGLVPSERSTGEQVWRGSITKAGNPRARRVLVEGAWTYRYPARLSRTLQVRQERLSTVVRAIAWKAQLRLCARYRRLIAAGKRQTVVTTAIAREMAAFLWAIGHTVEPRPAA

SEQ ID NO: 284544 - protein, 356 aa, unidentified
MPSSRQLADTADQVVIAVDPHKASWTAVAVDARLQPLGAVRAPVSKAGYRQLQRFAQAWPQARWAIEGARGLGAPLTARLAEDGITVLDVPAKLARRVRLLSTGHGRKTDEADALSVGIAAQTATGLHVARLDESIAALRALIEHREDLVRTRTQTINRLHALLTKLVPAGLPRKLTADIAARTLRGVRPRADLGRTLRALAVDLVTEIRRLDRRITAVADQICAAVAESGTTLTELHGIGDLLAAKILARTAGVDRFRSAAAFASYCGVAPLDASSGDVKRHRLSRGGDRQLNCALHIMAITQIRRQTAGRDFYQRKRAEGKSHKEALRCLKRRLCDVVYRTMIKDTDTSLLAAA

SEQ ID NO: 284545 - protein, 347 aa, unidentified
MALTIVETPITGGVDTHADVHVAAALDPVGGLLGVAEFPVTPAGYARLLGWLGEFGTVCLVGIEGTGSYGAGLARHVTAAGIRVAGVDRSDRQDRRRQGKSGPLDAVSAARAAQSGRASGAPKGRDGSVEAIRALMVAKRSARAERTQTINQARSLIVTGPDDLRARFARHTVAALVAETASLRPRPGGTVGYATRIALRELGRRAEFLDGQLERLDELIVPLVTAHAPGLLALYGIGPGTAALLLIAAGDHPGRLRSEAAWAHLCAAAPIPASSGKRTRHRLNPGGDRQANHALWRIVITRMSSHPPTRAYVERRTAGGLSKTEIIRCLKRYVAREIYPRLRAAAD

SEQ ID NO: 284546 - protein, 431 aa, unidentified
MLIYCGIDWAERTHDVALVDDTGQLLAKRHITDDAAGYRNLMDLLAEYGDTEETPIPVAIETSRGLLVAVLRAGKRKVFAINPMAAARYRDRHAVSRKKSDPGDALVLANILRTDVHAHRPLPNDSDLARAIAVLARAQQDAVWNRQQVANQLRSLLREYYPAALEAFAKWDNGLCRPEARELMKLAPTPAKAASLTRTQITAALKRAGRKRGNESDVERLREAVRTDWARQPELVDDALGKQTLALLKQLTAACTAADDLAQAVEEAFPQHPDSEIILSFPGLGIQLAARVLAEIGDDRTRFADARGLKAYAGASPVTRASGKKSNITRRWVKNNRLNHAGYLWAFSAITASPGAKAHYRRRRDDYGDWHAAGQRNLFNRMLGQLHHCLKSRRLFDEHTAFPAPQALALAVAYVVPPTTHCPPEVAPQRA

SEQ ID NO: 284547 - protein, 413 aa, unidentified
MEAFIERCCGLDVHQATVVACLLIGVAGQKPQKEVRTFGTMQDDLKQLCQWLLQHGCTHVAMESTGVYWMPVYEALEGHFQLVVGNAQHIKNVPGRKTDVKDSEWIADLLRHGLIAKSFVPPEAIRELRDLTRYRRKLTEAQAAERNRLQRLLETADVKLASVASDVLGVSGRLMLRALIEGQSTPAQMAELARGMLRRKLPELGRALCGRLTDNDRFLLKMQLDRVEQIEADISKLDERIEQQLKPYQEQHERLTQIPGVDRVTAAVMLAELGADMNVFPTAQHAAAWAGLAPGNNESAGKRKGGKSRKGNVHLKTALVQAAVAASRKKGSYLKAKYWKVKARRGAKRAAMTVAHKILVVGYHMLLHGTDYADLGESYQDDKVLSRTRRSLVRQLEGLGFQVTLNKKQQLAA

SEQ ID NO: 284548 - protein, 399 aa, unidentified
MKYVGWDWASQSHDVTVIDDAGMVVDRWALSHTEKGLITTLQRMARHGQPGHLPVIIERTSGLVVDRLLLAGHPVAPVHPTAFHAARPRWGASGAKSDPGDSFKLADYLRTDGHRLRKLAPVEPGLRELQAMVRLRDDQVRTRTATTNQLTALLDAYWPGPKELFCSLASPIALAFLSDYPTPTSASRLGETRMAAFCRRHSYRGGKSPAELLSRLRGAPSAPMTLPPETLAAMITAQVQLLRCLQQTITDIEGLIRDRVHANPRAKLLAGLPGVGTINLAQLLAEVGPILERVDTAEQAAAECGATPVTRASGKTSGVYFRWAANTRARKAMTSFAHNSRMQSPWAAELYSDARSRGKRNPHATRIVARAWLRVIWACWQNGTPYDPKVHQAAQRRTA

SEQ ID NO: 284549 - protein, 345 aa, unidentified
MKNTIQLQILPEVFLGIDVGKAELFCHLLSQSATSSAKFTNSPAGIKKLIDWLKKHFDLSQISACLEQTGHYGKLVSKALYQARLDAVYLVNPRRIKAYGNQKLRRNKSDTADAKLIANFLRSEYHDLIAWIPQSIDREEITELSRYADSLTQDAARLKTKREAVSSKPVLRSLIRRIKFLEKELADIRKRINVLINKSEGLSSQKTLLSSIPSVGEITQHILIAELPDIHLFKNARQLAAWSGLPPQHYESGTSGRTQTPITKVGSSALRKALFMPAMTARTNNPLLKEFGDRLQKNGKKPKQIIIAIMRKLLHQIYGILKSNQPFNPNKKGFITAPKLEEIRA

SEQ ID NO: 284550 - protein, 343 aa, unidentified
MKLFVGLDVSLAKTAICVVSEHGKIMKEAQVASEPEELVRWVREQEGTIAAIGLEAGPLSQWLHRGMSAAGLDVVLMETRQVKGALKAMPIKTDRRDAEGIARLLHMGWFRPVHCKSVSAQEVRAALGARKAIQQAMLSLEMSLRGLLRNFGLKVGAISRGRYEHRIRELAVGNPMLEAATGPMLRARASLRQELARLERHVRQLAQDDPVCRRLMSMPGVGAVVALTYRSAVDDPSRFTSSKKVGPWVGMTPSRNQSGERDVSGGITKAGDVNLRRALCQAATVMMHRGRSTWLRTWAVHVARRRGSKRAMVALARRISVILHRMWIDNADLRSDTAPLHVA

SEQ ID NO: 284551 - protein, 402 aa, unidentified
MNCVGIDVSKGKSMIAVMRPFGEVVVSPFEVRHTASELSELARLLKNLDGETRVVMESTGNYHAPVAWLLHGAGLYVSVVNAMLVHDYGNNSLRRGKTDKKDAVKLANYGLDHWLTLPRYIPEEDTRLMLKTCYRQYQQYSKVQTMLKNNLISLLDTAFPDANRLFTSPPRTDGSEKWVDFVATFWHCECVCGLSKKAFTAKYQKWCRKHGYNFSQDKALDIYASACGRFGVMPKTNTAKLLVEQAISQLQTTSAALAALKQEMQSLAASLPEYPVVMGMFGVGPTLGPQLIAEIGDVRRFHSKKALVAFAGIDAPPYQSGQIDVRSRSISKRGSASLRRTLFLVMGVLLQCAPMDEPVYQFMNKKRSEGKPYRVYMMASANKFLRIYYASVKAYLDSLEHD

SEQ ID NO: 284552 - protein, 423 aa, unidentified
MDKNDDSRLAEFRQLKREIRGSTQHLVVGIDIAKERHYAFFGTPAGKTLLHRLVFDNTKEGFEKLCFQTEILKTQHSLTKVVFGMEPTGDYHKPLGEYLIRQGHTVVLVAGTAVKNNRELLDGRWDRNDTKDAANVADLVTQGKCLFYEFASPSLRELRSLLSLQRRLKKQEQGYRVRTRNHLIARYFPELDPYFGYSEGPAIVKWCPDPHEIRSLPFDEFVRMVSSTIGGEKQRRRLEEIRKKAASSIGCEAHPSVAFEGRVLVEEVRHFQDLLRETQARIRQVCLHFPEYFFLLTIPGFGPDISAKVLEAIGDPYRFENHRQVLKLAGLDLSADRSGKKQDVTPVLSKKGKADLRYGLYQAAFIASTRNKQFMTYFTNRLKGREREKGIGTKMRVKLAAKMLVIAWTLMKKQEKFDPGCIA

SEQ ID NO: 284553 - protein, 426 aa, unidentified
MDYPYSKVAGIDVHSQIHVVTVMDHKGSRTTQQFYNSPASLAVLRDWIVSEGCEVVAFESTGDYWRPLYETLSPFVDVIVAHPRDIKKKYSGKKTDKIDSEWIAYLTLHNMVPRSRIPSGKELEMRILTRERESLTNQRTRHQNKVNHILVRNGINLKKFVSKPFGKAGVSLIKLISTYGSVDKIIEHLPKKLRKHEERISSCLPTGLSVNDRLILQAELHQIDALNNSIASIESRITSVSRKFKREISLLTTIPGIGYITAWTIIGEVGIVKDFVKSANLASWAGLTPWVNQSAGKMRMGNITKRGSTHLRRVLIQAAHAAARSGNNYMRVFFERVKKHSSYKKAIIALARKILTIAWNVLIRDEPYNDDKARGIQKKPSSKSQRNNNSQILSVHDAYRILEEAGEITKLEGDEGYIWHGPAASI

SEQ ID NO: 284554 - protein, 388 aa, unidentified
MYYLGIDIGKKFHEACLVSQEGEIVIAPFRFSNSRSGFNFLREKISAFPAKDCSVGLEATGHYWLNLYAELKRDYQVKVINPLQSDSLRNLYLRKVKTDKKDCLIVADLLRIGQLEETVVLDPKLKELRQLSRFRYELISQLKAQKQRIVGILDIVFPEYQGLFCSPFVKNSRRLLKKWSSPEELERVSPKQLERFLNKLPGRHLPRERIKDFLKEAKQSIGQTEILDASTLQLKLLLEQLEFIEKQVKVVEEQIKKILVQIPQKLITIPGIGEVLAGAMLGEIGDISRFSSKKKLVAYAGLDASVRESGQFVGTRNHISKRGSPYLRKAIWQAAVVSCRFNPKLREFYQKKLKEGKKPMVAQGAIARRLTHIIYAVLKTNQDYNPNL

SEQ ID NO: 284555 - protein, 339 aa, unidentified
MQLTPVGVDIAKSVFQVHHVDPETGEIVNKAIKRAGFLEYFANRLPCLIGMEACGGAQHWARELVKLGHEVKLMPARLVKAFNIGNKSDAADAKAIWLAVQQPCKAVAVKTEDQQAVLAMHRVRQQLVKIRTMQINALRGLLTEYGEVMGASRAALNKGMPGALEKLADRLPAMLIETLRERYSELAKLDEQIGRIEQRLKVWMRRDKACQAIAEIPGVGLLTATTAVATMGDAKVFRSGREFAAYIGLVPRQSGSGGKVNLLGISKRGDTYLRTLLTHGARSVLAHAKESGAWVEQIRKRRPPNVVTVALANKMARTIWAVLAHERKYDKGYVSAAAA

SEQ ID NO: 284556 - protein, 370 aa, unidentified
MKKISTFIGLDVHKNSIDIGIADEGREGEVRHYGTIGGDILSLEKVVRKLQSKGGTLHFVYEAGPCGYEIYRYLTSRGFDCIVVAPSMVPKKSGNRVKTDRRDSIELARLHRAGELTSVYVPRLEDEAIRDMTRARQDAKSNELKSRQQLKAFLLRNGIRYHGKTSWTAAHMRWLAEIKLPNTAQQIVFQEYVDAVNTASERVTRLTDQIRKEVEMWRMRPVVEAYEALRGVQLVVAATVVAELGDLTRFDKPGQLMAFLGLVPSEHSSGDRQRRGSITKTGNGHARRVLVEAAWQYRFPARITPIIRKRQEHLPKEVREIAWNAQLRLCRRFRYLSTQGKSKQTTVVAIARELSGFMWAISRAVGPAST

SEQ ID NO: 284557 - protein, 532 aa, unidentified
MATRFKSRRSKGVAPALLGKPNGVIQARVQKAGPERFGVVAVDCAKARSKWMLCDFYGRVLISPTVVEHRRTALQLATVQLREACERHGLRDHIVAVEMTGTYHRPVQRAFRDAGSETRLVHPFASRHYRLPASADTKTDDKDLEAIFRAAVNGFGLLEPTWNELHLHLQVLARQRRDLVEKRSILQCQIREHLHRCLPGYAALFPNDDLWSRPTPLHVARRGASADAIRAAGVKGLTQWLHEVEFRFQARTVEKIVAWAGNAADADPLAPQFSRVWQMLHDDWLVKTQQIRQIERELAGILVKTPYILLLSHPGINVVSAADLAAETGPIEHYAHAKAITGRAGLFPSRYQSDEVDRANGPLAQFRNARLRAAWLRVADNLIKCNAHFRGKFALWKQRGVDARDIRCRVANRAVRTVYQMVSGRQLYHHASRLDRQYVLDKLITFHQEHGTPPHEILRDLQHAADYIPKHEQAAEADPLRERYQRCRRSRQAGPQHIGRILLAVLARYGLGELQSELEAQGSHADESDAST

SEQ ID NO: 284558 - protein, 359 aa, unidentified
MKAVPLRFGNTKNGSEELMGARNYFVGVDLHRNQFTYCVRYSNGEEKVGKEPIEDLERFARRLGNHASVAVEATGNTWMFCQVLKQYAGRLVVVNPNQFKVISHSVKKTDKNDAKVLAEFLEKDLLPEVRMKNELQAKVASLTQTREKLVQLRTVLKNKINNLFASRFINLKREELSSEKGLLKVLSYHFDAISDVELRVMVDQIRSLNRSIEELDKAIEDSGSKMDGFDNLTSVKGIGAKGASTLLSVIGNVNDFRSAKQLAAYIGIVPRVSDSNETVHHGRITKLGSKIARTTLVQCSLIAKRYNPYLHAFHERIKARRGGAKANIALARKFLEIIYRVLKNKLVFEDFTTFKLKTT

SEQ ID NO: 284559 - protein, 321 aa, unidentified
MPEDKVYVGIDVAKASMDVAVHQSQQRWSFSNDDEGISKAVCCLRELAPALIVMEATGGIELPIAAALAAAGLPVAVVNPRQMRDFARATGKLAKTDAIDAKVIAHFAAAVKPTPHPLPGAQAQEFDAILTRRRQVVEMLTAEKNRLSSAPSKAVREHIKAHIGWLERELANINSDLGRRVRQSPVWREKDALLRSVPGVGPVLSFTFLADLPELGALDRKQIAALVGVAPLNQDSGTMRGKRAIWGGRATVRATLYMSALAATRYNPVIRAFYRRLCAAGKAKKVALTACMRKLLTILNAIVKHQTPWEYGGSPIMGPCH

SEQ ID NO: 284560 - protein, 341 aa, unidentified
MKNLFIGIDFSKEKVDVAIIFAERLSETASRVFNEFKTTVSGYKQLVKWVKQNSYGIDSSLWLFCGENTGDYSKGLCKFLYGNGYDIWLENAKNIKDASGLRRLKSDRADASMIAEYAMRNYDKAIMYEPLSESLEQLRELFLYRQIVVRHRCSFQVRRGEKRLTMEKSSVKTMISQSGRHIVSELNKEIEKIDKRIAELIKSDEELTEVFTIVTSVPGIGTQNAVCMIVYTDNFRRFNYDSRKIACYYGVAPFGKDSGTSVHSDPRVHYMANRQIKAMLTQAALAAVNFNPIMAGYYMRLVERGKKKQVALNNVKNKLIHLVTAMVRNRQLFSPEYKILV

SEQ ID NO: 284561 - protein, 363 aa, unidentified
MTKQRLSSTQLLDFIGVDEKPPVWIGLDVHKKSYHVALRRADGVCQSWVSPADPIVLARQLCAISQRISLIVYEAGPTGYCLERVLKVNGYKVAVVAPSRIPRPVTNQAKTDKLDCLKLAEYAAKGMIEAITTPSEQESAERSVLRRRNQLVDSRRKTKQRIKSFLLFHGIEEESGLRYWSQSAKSKLSKLPLQSDLKFVLKSLLRQLSYEEEELAKITNRLTRIAKRKPHWEVVKNLKTVPGVGDIVACAFRTELFRPERFRRAEEVCSFLGLAPAIRQSGEKRQGGWLMRSGQTRLKSLLIEAAWMWQAKDPWARKKYRTHLSRCGIAQKAITALARRLAVILWRLSVENRSYVMLKVDIA

SEQ ID NO: 284562 - protein, 431 aa, unidentified
MNDVDRFIQFSQFKTQIRGSMAHLIVGIDIAKDKHHAFFGTANGKTLWRRLIFSNDLLGYTRLIEQTQVLSSQYQLGEVVFGLEPTSNYHKPLAYWLIKQQYLVVMVAGKAVKDNRELLDGRWDKNDIKDSANVADLISQGKCQFYEQPDEDIVGVRNLLVIRKQLKREDHRLRMRIRNGLIAKYFPEMDRFWGHRLEENLAIVRWYLDPRKISDTEFEEFVRHVTTTNRGVRQMQRLRAIHQAAGESVGMPMDEAAGYEAQLLVERLRQVKEQISQTMQHLESKCQNLSGYQLLLTIPGFGPYIAALVLGALASPFRFTSRKQVIRLAGLDLNASRSGKKSQDSVPKISKRGNADLRYALYQAALIASYHNDGFRRLYHRTLEGRHGERGIKTKARVKLSAKMLVVAWTMLKNNEPFDARRLLGESVQQR

SEQ ID NO: 284563 - protein, 404 aa, unidentified
MYNAVGIDVSKGKSTIAVLQPGGVIVRKPFDVFHTSQSLKELSNYLASLEGDTRIVMECTGRYHESMANSLSNAGFFVTVVNPHLIKNFGNNTLRKVKSDPADAKKIARYTLDNWAELRQYSCMDNTRNQLKTLNSQFSFFMKQKVAAKANLTALLDNTYPGVNKLFNSPAREDGSEKWVDYAYSFWHVDCVRKTGLKAFTVRYEAFCRKHHYIYQPSKPEELFNASKELVAVFPKETSYKLLIQQSIQQLNLASAHIEQLRREMNALASTLPEYEVVMGMYGVGKTYGPQLIAEIGDVSRFTHREAITAFAGVDPGVEQSGQHNSKSNKASKCGTGRLRKTLFQVMTTLLQNAPENEPVYQFLNRKRSEGKPYYVYMTAGANKFLRIYYGKVKAHLRSLEQNE

SEQ ID NO: 284564 - protein, 421 aa, unidentified
MENTAARKRKQVPEGYLIIGIDPHKKRHAAVAITQDFTIRDKFKFDNTREGLETMLRRTRTEMVKADCRGVMFAIETGGHYWRNIAYFLDEQGIPFRFINQYTLKRRREGKDLNHKKNDYRDSEVAAQLLCTGEFTESTIPQGVYAELRTAHNAYRRLVKERTRITNLVKGLLDGLFPEFTQVFKDPCGLTSLSVLSACAIPGVIAGMMEDEFVAAIEAKHQGRLMRKKLRELHYKAKASIGIAAGARSVSSEISFLVEKHELIRRHICIIERTLVSLVDETEEGKYLLSIRGLNYIAVAGLLAELGCFKSYRSAKQMIKMAGSNPTESESAGKRGAHTPMSKQGRPVLRYCAWTSVIPMLRFNSDFRAWAKQRRERPAHANPLNGREVVGAALNRLFRLAFAMVKNQTYYLSPQLVQVTG

SEQ ID NO: 284565 - protein, 351 aa, unidentified
MMIIGVDYHPSFQQIAFLMKETGEYDEQQLNHSEGEAERFYRDLHQRGIRVRVGMEATGFSRWFERLLAELGFELWIGDPAEIQAKRVKKRKTDREDARLLLKLMLEDRFPRIWVPSPENRDLRQLLWHRHRLVQMRTRIMNQLQALAMNEGKQWKSKLWSAPGRAAFEKLGLAPWASRRRKELLELLDRLNPSIQELTAAAEREARKRPDVLRLMTHPGVGALTALAYVLMLGTPERFHRGKQIGTYVGMVPSEDSSARKQRLGHITKEGNCLLRFLLVEAAQAAVRTNPHWRRRYIHLAMRRHKSIAKVAMGRRMATRLYWMWRNRCDYSPSFEFGSYAGQPETSHGVK

SEQ ID NO: 284566 - protein, 425 aa, unidentified
MQAALGTERAVWEAVLERCCGLDVHKKTVTACLLVGALDHQPQESLGTFPTTTKGLLELRDWLEQNGCTHVAIESTGIYWRPVFHILEDAATVLLVNAYHMKQIPGRKTDLKDAQWIARLLRWGLLKPSLIPPKPIRELRDLCRYRKKLTEQASAEKNRIQKVLEDANIKLASVATDMFGVSGRTMLDALLAGDMSPDEMAELARGKMRPKIPQLVDALEGWLSDHHRFLIRMHLEHLGYLEQAIAQLHQRIDEKIRPYQHQIDLIRSTPGFDTTSAQQVFVEIGGDIKLFPSEGHLASWAGLCPGNNESAGKRKSGRTTKGNRWLRGALVQTAHAASRAKGTYLKSFYHRVAARRGKNRAAVAVAHKQLASIYGELQCDRPYQELGGNFFDLINQKALEERLVQRLQGLGYRVQLHPQTAAATP

SEQ ID NO: 284567 - protein, 428 aa, unidentified
MSATLFAGIDISLKTATVCLLNQDGNLVGKIFEVDNNTAGFEKLKDRIESIIPAGGFSLVCMGMEATGMYGFHLLDYFSSTTFKYGVEVKVYQVNAKYISRFKKAFSEKEKTDVVDCQVIAEYLRFGRLPAEYKPESLFLPLRRLVRYRYHLVKHLEREKQLYLANLFLKFPGWVQNRPVSTLGKTTLNLTEEYTADQLCEMTLEQLAGVVAQAGNNRSPDPVAVAEEIQKAARESYRIRPELACSVTFILASISRTIYALKENLKQLDKVIAEQSKGFINPLISVKGIGPVYAAGILACIGDIKRFSSHDRLARYAGLVWKRKQTGKTESEEKHIVQECDKYLRYYLVEAANSLRVHNEEYRSYYQKKYQEVTKHKHKRALLLTARKLVRLVFALHSKNQLYSQFRDSQSPRLTEVNPDCQRANNQV

SEQ ID NO: 284568 - protein, 346 aa, unidentified
MNLFIGLDVSLASTAICVLNSHGKVVKEETVASEPEALVAFLRSLCSDIAVIGLEAGPLSQWLHRHLTEAQFEAVLMETRQVKGALKAMPIKTDRRDALGIARLLQMGWFRPVHCKSVSAQEMRAVLTARKSIQQACINLELSVRGVLRNFGLKIGKVLRGNFDFRVRELTDGNSMLMAAADPILKARTALRNELAALEKLTRDHAKSDPVCRLMMTMPGVGAVVALTVKSAIDDPGRFRSSKDVGPWVGLTPRRDQSGERDITGQITRAGDQILRTALYQAATIMLHRGRPSWLTAWALRVAQRRGKKRATVGLARRIGVVLHRMWRDGTEFRFTKQPIDTAGMA

SEQ ID NO: 284569 - protein, 357 aa, unidentified
MKIVGCDLHARQQTIAMVDTETGEFTEKTLSHEGDAVRAFYAALEGPVAVGIEATGSMQWFLELLEELGIQCRVGHPAEIRAKETRKQKHDRRDARLIWELLIEDRFPEIWMPSSKERDLRTLLRDRHQWVKMRARLQHTLQAIALNHALRQGHALWSAAGQRALEALPLPPYTRQRRDELLALYAQLQKRIQELDKEVEAQARQRPQARRLLTHPGVGPVTALATDVFLGDPSRFATGNQVASYIGMIPCEHTSGKRQRLGKMSKQGNALLRYLWTEAAMSTVRKDPELQRFYRRKLIQKGMGKARIATARKLGIRLWIMMRDQIDYEEFCRRGKLRQTGKAHAGMPDFNSGPAQQ

SEQ ID NO: 284570 - protein, 418 aa, unidentified
MEVIHERVAGLDVHKKTVVACVRLQSSSKVRRESRTFETTTAGLEMLLAWLTEMGCTHVAMEATGVYWKPVWTILSEGDFELILANASHIKNVPGRKTDMKDAEWIADLLACGLIRASFVPDRVIQDLRSLMRTRKQFVREQTRQVQRIQKTLEEGNIKLDAVISDILGANGRRMIEAMIAGESNPQKLAALADRRLKASPTELRDALHGRLTDTHRFLLQTHLKQWDELDATIAGIDRQVDVVISGMAQPMVFRALIVLLCTIPGVGKLAAITILAEIGPDMSRFRTAGHLVAWSGLCPGQNQSAGKRKPSRLRKGAPWLKTMLVQCAWAAKRQKNSYYRAQFYRLAGRRGPQKAICAVAASILTAVYHMLKDGTPHADLGADYFDRRPTEAKARRLVAQLNKLGYEVQIQPIAAAA

SEQ ID NO: 284571 - protein, 342 aa, unidentified
MDQITRIFIDTSKSVFQLHGVDAQERVVLRRKIRRSQLLEFFAQLPPTVVGLEACGASHYWARELRALGHEVRLVAPQHVKAYLKRNKNDARDAEAGCEAMSRPTMQFVPVKSAERQAALMLAKRREGLVRDQTRLANRIRGFAAEFGFVAPKGLGAIAPLLARIAHAPHVPGLARELFADLGAELAQAQAAVAKVDDQLKAWHRQDPVSQTLAQVPGVGPIGAALLVLKTPEPNLFPSARHFAAWLGLTPTDHSTAGKVRLGVITRAGDEMLRSVLVTGATAIVANARRGRGKGVSPWLLQLVARKPPKLAAVALANKIARIAWAIMARGELYDPARALRA

SEQ ID NO: 284572 - protein, 406 aa, unidentified
MLFVGDDWAEDHHDVEVQDETGRRLAKARLPEGISGIARLHALVGRFLPEDDNAAAVKIGIETDRGPWVAALVASGYQVYAVNPLQSARARQGNGVSGAKSDAGDAHVLADLVRTGCHQLRTIAGDSEQAGAVKVLTRMHQTLVWDRTRQVLRLRSSLREFFPAALEAYEDLASPDVLELLTKAPEPHSAAALTRAQITAVLKRARRRDRDAKTTAILAALRAEHLTQPSLIAAAYGATVRALAAMITTSNEQITALEGPVEASFGQHPDAEIYLSQPGLGPILGARVLAEFGDDPTRYTGARARKNYAGTSPITRASGKKKVVLARYVRNKRLADALHRQAFCALRRSLGARAYYDALRDRDIGYNAALRQLGNRLVGILHGCLKTHTLYDEAVAWNELAQQVAA

SEQ ID NO: 284573 - protein, 340 aa, unidentified
MIIGCDFHPRFQQIAFVDEETGEYGERRLNHPAEAEAFYRAMAGRQVRIGLEATGNFRWFRRLIQELGFVFLLGDPQEIRARDPRRQKHDKRDARHILKLLLDQQFPVIWQPPAENEALRQLLFHRCRMVRLRVRIKNQLDGMAKNEGLLDAKGWSSKRRKQVEALPLSGWDAQRRADLLRLHDQLDQQIEPLERAVQEAAENHPQCCLLMTHPGVGPVVSLAYVLIIGDWGRFECSRKLSSYLGLIPSEDSSGDKRRLGHISKQGNTMLRWLLVQAALKAQPKDARWHRQYLRLSLNKHHGVAKVAIARKLAVRLYWMLRSGQNYTQMMERGSHAGQSV

SEQ ID NO: 284574 - protein, 326 aa, unidentified
MKSSSLKETHVGVDVSKRTLDVCILPAGAGAPEGESLVAANDQAGVEEILSRIQDAKPKLVVMEATGRYERLCATSIAAAGIPVAVVNPRQARDFAKAIGRLAKTDKIDAFVLARFARAVEPEASAIPDEEGMALQSILARRRQLIEMLVSENNRLKMAREETLAKRIRAHMRWLEKEIERTDGDLDGAIEANAAFKANEALLRSVPGVGRVLSRTLLAELPELGRLTHKRLCALVGVAPFNRDSGHRRGKRETWGGRAPVRAALYMGTLVATRHNPTLKEFYERLLAAGKPKKVALVACMRKLLSILNALMRDRAIWRCPHVLTP

SEQ ID NO: 284575 - protein, 306 aa, unidentified
MNEHATCVVGIDVSKRKLDIALLANSKIKSKVFDNTVTGHSELVQWLLERGAEQQRTHICMEATGPYSEAVAIALVESGWHISVVNPARIKGFAQGELARNKTDRADASLLARFCAAMRPSLWTPPSAEWRELRGWVDRLQALKDMHQQESNRLEAHTATGQASLIESVQTHLDWLAQQIGALEHDINDHIIRHPELKHDAELLHSIPGIGSTTVAKVLAYAGDVRRFANAKALAAFIGVTPRQRLSGSSVKGRTMMSRTGHANLRRALYMPGLVARRHNPVLRAFGDRLSNTGLAPNSISNSIKH

SEQ ID NO: 284576 - protein, 339 aa, unidentified
MSSCKKPEQSPGPVEESESTSEGYLVVPDEIFVGIDVSEEKLDVHVLPKGLSISCRNNAKGIDGLVKQLKKSPPSIIVMEATGGLERLPAAELGSSGFAVAVVNPRQVRDFARGIGKLAKTDSIDAYVLARFAETTRPIPKALESHEEALLKDLVKRRRQLVDLRTGEKNRLRRARSQAIQQSILMLIQALEDQIRKIDLDLDDNLRKSPLWREKEELLKSFTGVGTVTARTLLALLPELGKAHRGQIASLAGLAPRNKDSGKMRGPRKISGGRANVRKTLYMAALTAISHNSTIRTYHERLIAAGKPFKVAITGCMRKILVILNAMVKSNRRFEELFS

SEQ ID NO: 284577 - protein, 454 aa, unidentified
MKRKVPHSKIDALTGEVSKSKIQEVPEMNNTQNEKIAQVTNDTMVIGIDIGSQKHWARAFDNRGMELSKKAFGFNNTAAGFAGFEVWYEGQRRAAGLKRVMVGLEPTGHYWFNLNQFLAGNGIKVVLVAPQHVKHSKELDDNTQRKDDLKDPRVIAKLVTEGRYFLPYRPTGVYADLRDGFNRRCGIVESMTQAKNRLHRWFCINFPEYLEAYGSVAAKTGLMVLKKAPLPKDIVALGVDGIVKIWRDAKVRGAGKKRATTLVAMAEQSIGEKTANEAARLELWQLLEDYEHYAHQYEVIEEMLERRVHEVPNADKLLQIPGIGYFTVIGFFAEVGSIERFDDPKQIQKLAGLSVVENSSGKRKGLPGISKRGRDRLRWVLFQAAMSAVKNNQTFREIHQYFTTRKDNPLKKMQSLMAVAGKIIRVFYGMARTGSDYDPDRLLRDIRRPEKAAA

SEQ ID NO: 284578 - protein, 407 aa, unidentified
MIFVGVDWAEAHHDVHVQSEDGRRLSGGRLPEGVEGIARFHEMVGVHAQEPDEVVIGMETDRGLFVGALVAAGYQVFAVNPMSTSRYRDRHSTSGAKSDPGDAKVLADMVRTDRHNHRPVAGDSELAEAIKVLARAHQSMIWSRGRQTNFLRSTLREFYPAALVAFDNLTSGDALEVLRVAPTPTLGAGLSRSKIAAALKRGGRLRRVEQRAEEIQEALRTPQLQGSAIVATAMGTSVSATAAVIVTMNVQIAELTKELDAGFEQHPDAEVVRSLPGLGTILSARVLGEFGDEPNRYATAKCRKNYAGTSPITRASGTKRVVLARYARNMRLADAIYQWAFTSLTASPGARTFYDYRRAAGDTHHAALRHLGNRLVGILHGCLIHHTNYDENTAWGHRAEIELARAA

SEQ ID NO: 284579 - protein, 351 aa, unidentified
MTCKKDVAVVRTIGIDTGKNTLHMIGLNEKGAIVLREKVSRDRIAARLVNIPPCLIGIEAGMATHYMSRDLLALGHEVKQVPPAYAKPFRQGHKNDFRDAHAVAEAVQRPSTRCVPIKTDDQLDLQALHRVRSRLIGDRTAVINQVRGFLLEHGIAVRQGPRSLRQQLPQILATRTDVLSPRMLRIIEDIIDDWRYLDDRIERVTDEIEGLARTDVNCGQLISVPGIGPIIASATVAAVGNGTAFAKGRDFAAWLGLVPKQMSTGDRTILGRITKRGNRYLRMLFVQGARAILLRPKSWAKYSFGPWLMAAARRLHRNILTIALANKLARIALTVLVQGRSYESRIVPAAA

SEQ ID NO: 284580 - protein, 393 aa, unidentified
MAIIDEQARVVGRARVSDDAAGFTQLLELLAEHGEGEACSIEIAIESDKGLFVAALVAAGSTVFPINPRAAARYRERYGQAGGKSDPGDAVLLANILRTDRHVHRPLPTDSELARAIKACARQHQEAIWARQQTMNRLRSLLRDYYPQALQAFPNLAHRAAASVLRAAPTPQAAQRLTPSRVMTLLKKAGRRNDEGLAEKISTALRASALRQPTPVEHAFGVAAVGLIDVITAMSNAIAALEAELATVFNRHQQAAVVTSLPGLGPVLGARVLGELGDDPHRFAGTAGLRSFAGTAPITRASGRSRVVTSRRICNRRLGDACHWWAFAALTKSAGARAHYDRRRAAGDTHNAALRNLANKLIAKLWHCLQNNTPYDEATAWSNQTETMEGAAA

SEQ ID NO: 284581 - protein, 407 aa, unidentified
MRHRQRASTPGSQLRVPEEASVRFVGWDWASTSHDVTVLDDQGRVVERWALRHTEQALAEALARLARHGEPAEVPVIIERSAGLVVDRLLAAGHRVVPVHPTAFHAARPRWGAAGAKSDPGDSYKLADYLRTDGHRPRRLQPLDPGLRELQALVRLREDHVRARTAASNQLGALLDAHWPGPKAMFCKLASDIALAFLTDYPTPQSAARLGQARLAGFCRRHAYRGGKPPAELLARLRAAPIPPVGLAPAVLAQLVTTQVQLLRSLQATIGELETAIKQRVAQHPRAKFLRGLPGVGTINLAQLLAEVGPILDRVSTAEQAAAECGAAPVTRASGKTSGVYFRWAANSRARTALTAFAHNARMQSPWAGRLYADARARGKRNPHATPHRRPRLAPRHLGLLADQHAL

SEQ ID NO: 284582 - protein, 409 aa, unidentified
MDVVISCVAGLDVHQATVVATVRVPGNGGGRRVVTETFGTMTADLLALRDWLQAFGVTHVALESTGVYWKPVYYVLEETVTLLLINMQELKRVPGRKTDVKDSEWLAQLLECGLLKASFVPPPPIRELRDLTRYRVQQVKDRSQEVNRLYKVLEDAGLTLTTVISDVMGKSGRAMLEALVAGTTDPLILAELARGRLRKKLPELRRALAGRFRAHHAFLIEQIFAKIDFLDEALDRLTAEIDGRLVPFAPMLTALDTIPGVDRMGAISIVVETGGDMTRFPTAGHLCSWGAMCPGQNESAGKRRSGKTRKGNRYLRGALIQAGLGAMRKNGSALQAKYHRVARHRGHKKAVVAVGHQILEIAFYVMRDGVTYDELGADYFDRRHAEKAVRRHIRQLEALGFHVTVEKAA

SEQ ID NO: 284583 - protein, 314 aa, unidentified
MLGVDVSKAELHGTWRDPETQAIGWQGVVPNSAAGIRQLLRRVPSGAVVVEPTGRYGEALIRATQAAGREVLLATPRKARAFLWAAQPRAKTDRVDSAGLALYGLSGRLRPYLLPSATVDQVRQLLTARRGLSQSLTTLRLQQASLPAAADALAPAITTLADQVKALDDRLAGLVQAAPDLTPAAALRTVPGIGPVTSAALAACLVDKRFTQPDQFVAYVGLDIRVHQSGRRRGRFGLSKHGDAELRRLLYLAAKAATQTKHDQTFARRYAREQAKGLAKTAALNAVARKLAKVAWSIVAHNTTYDPARVDTQA

SEQ ID NO: 284584 - protein, 310 aa, unidentified
MEPIFVGIDVSKDRLDVHVRPGGEAFVVTRDGNGLEELVGRLQELGPTLVAVEATGGFETIVAAAVAGAALPLAVVNPAQIRHFAQAVGKRAKTDPIDAGVIAHFVEAVRPVPRALPDEASRLLAELVGRRRQIIEMMVAERQREKRAANVRVRKSLARHIAMLERELAAIDQDINTLVRGSPVWRVKEDLLASVPSIGKTLARTLLAELPELGSLDRRNIASLAGLAPYARQSGRWRGRSMIGGGRAAVRSATFMAALVASRCNPPLKDFYQRLVSVGKPKMVALIAVARKLLTILNAILRDNRPWQSA

SEQ ID NO: 284585 - protein, 412 aa, unidentified
MSSAYRVTAAIDVHKKWLYVVVAQPDTAEREFSRCRTGSTSQELEVLTKWLHDQGVSTVVMESTAQYWKPVWAALEGEFTLLLAQARSNAAPHGRKSDYADATRLMKRLWADDLRLSFVPEAEQRSWRLLTRTRTQHTREITRLRNRIEGLLEECRIKISGLLSDLLGASGRRMLHALIAGKTTDPQQLAGLADKRLRAAPEELERALNGQVGPVHRLLLGQLLDEIELLEDHMAKLDQCLLDRLESQQEVIRRLCAVPGIGIEAAQLIIAELGPRAVSFPTAAHAASWVGVCPGRNESAGHSTSDASPKGNRQMRRILNQCAWAAVRSKDTYWQHLFRRLTPRLGMNKALWAVAHRILRVIWLILHEGKEYCERGPCAPDPERLRRRIERMLYQLRKRGIHFQLMAVAPSA

SEQ ID NO: 284586 - protein, 408 aa, unidentified
MQVLYTRCAGLDVHKDTIVACVRCVSPPMHQEVRSFGATTTELLALADWLAEHGCTHVAMEATGVYWKPVWHVLEDEFELVLANAAHIKNVPGRKTDVNDAMWIADLLAHGLIRSSFVPPQAIQQLRDLTRTRKQLVREVSQHSLRIQKVLEDANLKLGSVLSDVLGKSGRAMLDAIVAGQTDPEQLAALAQGTARNKTTELREALRGRITEHHRTMLKLHLQVVDALERTLAELDTAVGKALAPIRQRARLLTTMPGVSDLTASVLVAEIGVDMTRFPSAGHLISWAGLCPRSDESAGKRRSTRVRKSGTWIKTTLVTAAWAAVRVKTSYLRAQFLRIKARRGAKKAILAVAASMLTAAFHMLRDGTEYNDLGSDHFDRHDKSKTIRRLLKRLQDLGCVVPELAHAT

SEQ ID NO: 284587 - protein, 347 aa, unidentified
MVTIGIDPHKSSHTAVALDDTGVSLGEIRVLADSSTLATLSAWAARWTRRLWAIEGAGGLGRLLAQQLVVAGETVVDVPSALAARTRVLQSGHGRKTDGIDARSVALVAQHRNDLSRIALDDHSAVLRLLSDRRDELTSERRRVINRLHRLLRDLHPGGAPRQLSADRASRLLSTVRPAGVVEIERKAMARQLLADVRRIDRALVDNRRRCARAVAASGSSLTEIFGISDVLAAKILGHTGDITRFDNADHYASYTGTAPIEVSSGDQRRHRLSRAGNRSLNHALHLAARVQTMHPGPGRTHYQRKQAEHKTPSEALRSLKRQLAKVVYRHLRNDHALQTSPTPGLT

SEQ ID NO: 284588 - protein, 424 aa, unidentified
MATRRRTNKVDINALVDLYERCAGIDVHKETVTVCVIRPGTDGSAQGEMATYGTTTRELRQLSQWLQECGVTHAVMESTGVYWRPVWQILETGGFRLFLANAKQVRNMPGRKTDQADAVWLATLLRKGLIKGSFIAPPQIRALRDLCRSRASLVHDRTRVVQRIEKVLEEANIKLDTVASDLMGVGPRMMLEELIQGETDTTKIAELALGRMRSKIPQLVGALEGYFRPHQTFLLKQLLSQFDDLCRRIERFEQQIEEYSRPFDKQVARLDSVPGIDRLSAAAILSETGVDMDPFPTPQQFCRWATIAPGNNKTAGKQRSGKIGRGNRWLRGSLTQCAWAATHDKNSYFAAQYHRLLHRGKRRALVGVGHSMIAAIWHMLRRDVEYRELGADYFEKQNLEGLKKTYLKKLERLGFKVSLEPVAA

SEQ ID NO: 284589 - protein, 430 aa, unidentified
MKSNTQNAKIEAITEKTLVLGIDVGSETHYARAFDYRGIEYSKKPFKFSNTEVGFTTFKEWILDLKERHEKDKVVPGMEPTGHYWFNLGKFLQDNEMKPVLVNPHHVKKSKELDDNNPTKNDRKDPKVIAGLVREGRYMIPYLPDGVYADLRTASNIRFQLQAELTRIQNRISRWFNIYFPEYKTVYGKPDAKSGMLILKAAPLPEDILTLGIDGVNQIWRDAKLRAVGKARAKTLIEAAEHSIGSKEGTMSARMEIRMLLEDYESKNMRLQEVMVLIEELVKEIPMAEKLLEIKGVGIRTVSGFLAEVGDISRFNNPKELQKLAGLALVENSSGKHKGKTTISRRGRKRLRYLLFEVAMSLVAKNPEFRELHNYYTARRLNPLKKMQSLMAIAAKLIRVFYAMLTKGVDYDPKKMISDIKRPTVYLQAA

SEQ ID NO: 284590 - protein, 327 aa, unidentified
MEEVIIKEDGSLEDSCIFVGIDVSKARLDVAIRPTGEKESVANDEAGIKTLIKRLEKIQPEAIVLEATGGFERLLMHALVSAELRVAVVNPRQVRDFAKATGQLAKTDRIDAGILARFGEAVRPQLHPLPDAVTLELRALTARRRQITEMIVAETNRLALASKGVTKRIKAHIGWLQSELEQVDKDLDRSIRHSPIWKENEDLLRTVPGIGAVISRTLLAELPELGELNRKQISALVGVAPFNRDSGTLKGRRSIWGGRASMRAALYMAALVASRRNTVISAFYTRLRQAGKRPKVALVACMRKLLTILNSMIKHKTRWSETFLQTA

SEQ ID NO: 284591 - protein, 337 aa, unidentified
MKYSGIDLHSNNSVVTVTDEADRVVAEKRMPNDLPKILAFLSPWRAELAGVVVESTFNWYWLVDGLQEAGFKVHLANTTAIKKYDGLKHSGDETDARYLAHLLRLGILPTGTILPPQQRAVRDLARKRMQLVRSRTSHILAVENITARQFGKRITSNQVKRLDGETIKQMHLPDDIALAVQANVAVITTLCTQIDLLEKRLHEKVAPNPDYTLLTTVPGIGQTLATVILLEVGTIERFASAGTFASYARCVDSQHMSNGKKKGEGNTKNGNPYLSWAFIEAANFALRYCAEAKRFYERKKVKTNTILARKALAHKLARACFHMLKEHKPFDITRCFT

SEQ ID NO: 284592 - protein, 355 aa, unidentified
MSKHTVSTLQPSPWPQRAADLGRVFCGIDVSADTLAVAAIEPDQALRQRQFANSRSGHKALLDWLGKMKAPVRVSLEATGIYSMDLALALDAAKGIEVAVLNPKRVSDFAKSLRRSKTDWADAAVLADYSLRMPFVAWQRPSRSALALRAISRHIEALGVEQTRAGNRLHAAQGSVGTPRCVIEDLKRSLAGLQRRIRTLRRQARTHVDSDERMREQFRMLTGVPGIAQTSALQILGELVLLAPDLKARQWVARSGLDPVHQDSGTSVHKPARISRAGSCHLRRALYMPALAAVRWDPHLKAFYQALLTRHKRKLQALMAVARKLLHAIYGIFKTRTPYDGTKLFPTRLAPVPKT

SEQ ID NO: 284593 - protein, 387 aa, unidentified
MIYYIGIDISKFKHDFCIISNAGEVIVENSSFENNKKGFQYFLNQLKPYEKSSVRIAFEATGHYSSNLELFLTNQEYSFMKINPLVVHQFLKARSLRRTKTDKADSLAMANYLMSVPYIPNSRVLYHINSLKSLCRTRELLIKERSKFAVLLTNELDKSFPEIKAFFNNTLSTTLLFILEKYKNAYHISLMKDYDSLRKVSHGRFTYAKFVKLKELAKNSVGYYDDNSDLLISTYISIYNDFNNQIDPIDKQISTIIKELNPRMLSIPGLGEISAASILSEYGDITKFSSPNKMLAFAGLEPSVIQSGTLESNGKMVKHGSGHLRYFIMNTAMIILRYSPTFYDYYLKKRSEGKCHRVALSHVCKKLIRVIYSLEKYNQNFNPSLLK

SEQ ID NO: 284594 - protein, 369 aa, unidentified
MIKTLFVGLDVHKDTIAVAVAEDGRGGELRFYGTIVNSADAMLRLTKTLTKDGDMPSFCYEAGPCGYGIHRHLNKLGFECAVVSPSLIPRKSGDRIKTDRRDAEMLARLWRAVELTPIWTPDEEQEAMRDLIRARKQAVDSMKTAKMQLLSFLLRHGLSYQNCKYWTQRHRRWLAELRRFRFTHQQLVFEEHKRAVAQAEERVATLNCAIEDAIPDWHFAPVVDALRALRGVNTTIAATVVAEIGDITRFDNPRQLMAWLGLVPSEHSSGNTTRRGRLTKTGNALARTMLIEAGWSYRHPPKEGHPYLKRSAHLPQHIKDIGWKAQTRLCKRYRDLSRTGKPQPRVLAATARELAGFIWDIARKTPITA

SEQ ID NO: 284595 - protein, 356 aa, unidentified
MPTMPDQALEVILGVDTDEEEHVAALVDDLGRLLATRSFKATTRGYRGLLAWARTYGPLVRAGVEATGSFGVGLARFLAAEGVDVIEVTRPNRRGRRHLGKTDTVDAEAAARMVLSGEATATAKRRDGAVEAIRVLQIARRSAIKARTQAGQQIRSLIITAPAELNGALAGLTLKRQVTRCARLRRGAGDDASGSPRRALRSLGRRWQQLDDEARELERELATLIKTAAPPLLAEPGVGPDTAGKLLVIASDNADRLRSDAAFAALCGVSPIEASSGKTKRHRLNKGGDRQGNNALWTIANNRLIHHPETRAYAIRRSAEALSRREILRCLKRHLARRLYRLIVADLTAAAALDLT

SEQ ID NO: 284596 - protein, 286 aa, unidentified
MKHYAGLDVSVKETSICIVDEAGRICREMKVVSHPEDLLAVLCDPAWRLERVGLEAGPLSQWLFSGLAEAGVPAICIETRHAKAFLKAQVNKSDRNDARGIAQMMRVGLFQPVHVKTLASQKRRALLAARKILQEKALAIENDIRGLLRNFGLKVGIVGVVGFEQRIHDLVEGVPELADIMEPLLAARRVLREKFAKLHRKVLLLARDNEVCQRLMTIPGVGPVVSLAFISTVDVPARFRNSKAVGPSLGLTPVLNQSGESHRVGRISLCGDEAMRALLYEAARSC

SEQ ID NO: 284597 - protein, 322 aa, unidentified
MKYIGIDVSKATFVVAYSSDKGGEIRTFNNTTTGIKQFIGALPKDGSIHCVMEATGNYSALLLYMLNVAGITVSMENPLKIKNFARAMLSTVKTDKIDARLIALYGEKMNPQPFKIQGEAILRLRQKRTVIRQLTKQITAMSNLRGSLAYLPVPDKGATHTVDETVKFLKKKRDRLQAELTDLVKVEFSRQLALLTTIKGIGITLATALIITTGGFTYFQNAKQVSRYLGICPTYEQSGTSVNIRGHINRNGDAYTRGLLYVAAWTASRFNAKCGETYTRLRQNGKPGKLAMIAVANKLIRQAFAVVAHDKEYVDGFVSNRP

SEQ ID NO: 284598 - protein, 409 aa, unidentified
MEKTEKRYIGLDVHKHYLIALGVDEGLNVVLPARRVELSRLENWMKKTLTKQDEVVLEMTTNTWQLHDELVEYAGSVMVVHPPHLALITRSQVMNDKIAASILARLLAKGLLVGIWVPPQEIREMRGLVAQRRKMTNLATQAKNRLHAVLQRHHLVPPKGNPFRASNQDWWQSLSIGKLEKLNLQSNLETLQFAEKQVDRMTEIMEGMAAEQEPIGRLLHLPGFGVVTAVTVWAAIGDIRRFAEPKYLVGYAGLGTRVHDSGMTLRTGKITKAGRRDLRTVLIEAAQAAASSHPHWKAELARLEPRLGHNKAIVAIARKLLIAVWHVLAENKPDRFLEPEKVSQKLLRFAYEVGKSNRAGQSAAQFVRQRLDDLQIGQELTSIPWGSKKPIPLPPSSLQTERSDVPNTK

SEQ ID NO: 284599 - protein, 411 aa, unidentified
MEVVHARCAGMDISKKDAKVCVRVAGAGRRKTVESVTTWGSMTNQILALRDHLVAEQVTCVVMEATGDYWKPFYYLLEDAGFELLLVNARQVKTLPGRKTDVSDATWLAQLGAHGLVKGSFVPPEPIRQLRDLTRARTAITRERGREAQRLEKLLEDAGIKLSAVASDILGVSGRAMLEALIAGDRDAVGLAELAKRRLRSKIPELTEALTGRFTEHHAFLARVHLDLIDRHTAAIHKLTARIEVMIEPFQGFRDLICTIPGISTLTADVIIAETGADMTRFRTAKHLASWAGTTPGHHESAGKVKSSRTRPGNPYLQGALGAAAMACSQNPRTYLGARYRRIAARRGPKKANVAIQRSMLIAIWHMATTGTLYDDPGADFFTRLHPDRAKKRAIHQLEAIGYRVTLDNAS

SEQ ID NO: 284600 - protein, 393 aa, unidentified
MYIVGVDIAKRSHEAIIINDSGSIIKKAFNFKNDAEGFAKLLAALNSVNTHSSEFIIGMESTSHYWLALYANLKQQGYTVHVLNPIQSNALRGMYIRQVKNDEHDAFIIAEVIRFGRYTQGGMPPSALYELRELCRARFFIVDMVSDLKRKVIALLDQVFPEYETLFSSILGLTSSELLRNCATPEEILAIDTEKLAEIIEVPSRKRFSVAKAEEIKAVAQNSFGIVLGFETMGLLIKQHMTHIQHTEQQIEQLDSKIAELFSCFDTQITTIPGIGPVLGATIFSEIGDVSRFASPAKLAAFAGIDPTVKQSGEFTGTHNHMSKRGSPYLRRALWQASVLTVMHNPDMKSFFQKKRAEGKPYMNVIGHVTRKMTNIIFAVLRDNKPYYSRSEC

SEQ ID NO: 284601 - protein, 314 aa, unidentified
MSPLVFVGIDVSQARLDIAVRPGASFSVTHEESAIATVVEQLCALSPTLIVLEATGGMEIPLTSALATAGLPVVVVNPRQVRDFAKASGHLAKTDALDAQVLAQFAEVMRPQPRPLPDAETRALAALLTRRRQLVEMLTAEKNRLLSAPSPIRTRLRTHITWLERELQSTNTTLAEAIRQSPVWREKEELLQSVPGVGPVVTSTLLASLPELGTLTHKQIAALVGVAPLNRDSGTLRGRRTVWGGRAQVRAVLYMGAIVAARFNPVIRVFYQRLQRAGKAKKVALTACMRKLLTILNAMLKHRTPWRVVEAHYA

SEQ ID NO: 284602 - protein, 345 aa, unidentified
MEDTTIAVDLAKSVFQVAVSHRVGHVTSEHRLRRSQLMPFFAQQPAARVLLEACGSAHHWAREFQRLGHAPRLLPAHDVQRYVRRNKTDRGDAKALLEADRNDEIRAVPVKSIEQQAIVALHVIRATWLSTRTARLNALRGVCREFGISIPVGAKRVIPAVRSQLGPDGPLPPIVHPALEALCAEIVTLEAGIVAIEHQLAALAEQMPDVIRLQTIPGIGLLTASALVARIGDASRFPDGRHFASALGLTAKEESSGLQRRLGGISKRGDSYLRMLLIHGARSVLWNAKTKRDPDPLRAWALRTQDRRGHNIATVALANKLARIVWAVWTRRGDYDRALPRPLTT

SEQ ID NO: 284603 - protein, 354 aa, unidentified
MTAEDRRVIGGVDSHDDTHHAAALDDRGGLLGTEVFDVSGEGYRQLLAWLRSFGGIDRVGVESTGSYAAGLTRHLLAQDIVVLEVNQPHPHTRRRRGKTDAIDAELAARHALGLAAPVAPKETTGIVEAIRQLRVVRESAVKSRSAATIQLGGLIVTAPAELREQLTGPRTLKGKAAACRKLRPDTGRLHAPTNAAKQALRSLARRIALLDEEITDLDTQLEPLVAVAAPRTTQLLGVSTGHAGQLLVTAGQNIERIHSESAFAALCGASPIAIASGKHGRYRLNPGGDRQANRALHMIAVCRLRYCPKTRAYAERRTTEGKTKKDIIRCLKRYIAREIYTTLRQDLNTTPTPT

SEQ ID NO: 284604 - protein, 400 aa, unidentified
MGPHLRVGVDVGAKSHHVGIADREGRILENFVIPHSQEGFARFFSRVEKHSSKLGVPVVVAMEGLNGWSRPLDQMILARGYRLYNVNNLKLARFREIFPGGAKTDALDVRKILELWHLQDHLPVAKDVLQEVPEAPPENQKLKRLTRRRRQLVNEKVRVVNRMQSDLLAVCPELLAITGDATNLWFLRFVASRDDLRELRQTPRNEVLAIRGIGKKYAGVIAQWQKKARFSAEAEYVGPMIVADARRLLEVLREIATLEEAIEGLVASSPLAQRIDSIPGFGAISSGELAGEIGTMDRFHSERSLALYLGMCPLDHQSGEHKGSKRPRQVNRRAKATMMTAVARHMAKVPQSRAYYEKKRAEGKKHNQAVRALGRHLVRVMWAMLTQGRDYELREDSCPG

SEQ ID NO: 284605 - protein, 344 aa, unidentified
MTQIKRIGIDTSKAVFTLHCINQADQPVLRVNLRRAQMLPFFKKHPAAEVAMEACASSHHWARKLTALGHNVRLIPPQYVKPFVKRAKNDRNDAEAICEAAGRPGMRFVLTKSAEQQAQGMVLKVRETLVGQRTQLVNALRGHAAEFGVIAAKGISRVASLLEAIEAETTIPLEAREMLALLGQEIEHLDTRLKEIETKLTAMHKANAISQLLATIPGIGPIIALTLAIEVDPAAFESGRHLAAWIGLTPKEHSTAGKQRMGGISRAGHERLRQLLVTGATAVIKLATRPGNKLATEWLLNLLKHKPRKLVAVALANKMARIAWAMMTRGETYRHQPVADAVSV

SEQ ID NO: 284606 - protein, 310 aa, unidentified
MDATYIGVDVSKDRLDVHVRPSGEAFVVSRDGKGLEELVERLCQLSPALVAVEATGGFETIVAAAIAGAALPLAVVNPAQIRHFAQAVGKRAKTDPVDAAVIAHFAEAVRPAPRPLPDEAARLLGELVGRRRQIIDMIVAERQREKRAANVRVRKSLARHIAVLEKELREIDADIDTLVRGSPVWRAKEDLLASVPGIGKTIARTLIAELPELGTLGRRQIASLAGLAPYTRQSGRWRGKSMIAGGRSSVRSVAFLAALVATRHNPPLKGFYQNLLHIGKPKMVALIAVARKLLTILNAILRDNRPWQNA

SEQ ID NO: 284607 - protein, 341 aa, unidentified
MQVSTIGIDLAKSVFQVHGIDAVGKVTITKQLRRSQVLPLFAKLPRCLIGMEACSTSHHWARELKALGHDVRLMPASYVKAYVKRNKNDAADAAAICEAVTRPTMRFVPIKSPEQQSILMLHRTRDLLVRQRTQLVNAMRAHLAELGLVAPRGGKGLQALIAVVRDGTNELSDLARRALQALLGQLDALARQIGEIERDIQAQHRLSEASRRLETIPGIGIIGATAIAATITDPTIFKSGREFAAWIGLVPRQNSTGGKERLGSISKQGDRYLRRLLIVGATAVIRQARTHPDKHPWLIQLLARRPAKVVAVALANKTARIAWAVLARGGTYRAPVLAARA

SEQ ID NO: 284608 - protein, 338 aa, unidentified
MKLYGAIDLHSTNNVTVLIDEQDEVVYQKRLPNDLPLILQQLSPYASSIQGIVVESTYNWYWLVDGLIEKEHVVHLANTAAIQQYEGLKYTDDHSDARWLAHMLRLGVLPVGYIYPKGERAVRDLLRKRGQLVRQKTANLLSIQNLITRNTGSSISANHIKRLSAEEVEGLLTEADVALAVKANLSVMRSLEAEIATLERVVKERVKLRPAFRYLLSVSGIGPILALTIMLETGDIGRFPAVGNFASYCRCVGSEKLSNGKRKGSGNTKNGNKHLAWAFVEAANFAVRYEPQIRSFYQRKKAKTHRVVAIKAVAHKLARACYHVMRDEVPFDVTKAFA

SEQ ID NO: 284609 - protein, 404 aa, unidentified
MYYVGIDVAKEKHYVCILNDTNGFAIKPFWIYSDILGLRELLKRLSSLSLNNDDFIIGVESTGAFSENLYTYLSDTDYRVILLNSYQTAKYRDFSTIKKIKNDAIDAYVIAELLSSNRYKESHISSEDYHSLKVLGRLKRSLDDKIKGIKREISTVMATVNPEITLVFKNIFTKTALEIIKAYPTAVELQKATPKKLTKLFRHIKGNNFNDEKAKYLITLAKSSIYGGRANESRALMIKTNIKILELLSQEKLEIEEKINALIESGISQELDAPIKNLKSIPGVSDKTIAAILGECGDLRRFTSAKAFIGYLGLYPTQYQSGNSLSVGTLAKRGIPIAKHALYMAAVSSVLHNTELKKIFRDKVSAGKSKKEALIIISKKLATIIYSIFKYNTPYDTKRVLVSL

SEQ ID NO: 284610 - protein, 393 aa, unidentified
MGKAKHSRRRYELSPVHANAAAIDIGATMHMAAVDPDRDPESVRSFGTFTGDLHRLADWFVGCGVKTVVMESTGVYWIPAYEVLDQRGFEVLLVNARDAKHVPGRKTDVSDVQWLRRLHTYGLLRGSFQPKGEIAVLRAYLRQRERLLDYAASHIQHMQKALTQMNLQIHHVVSDITGATGMHIIRAIVGGEHDPAVLASYRDPRCHATRETIGAALSGNDREEHIFALTQALELYDVYQTKVADCDVRIKAVLDRLKAAATEPARKLPPARHTTKQPNEPDFNVRAALHAMLGVDLTQINGLGPALALKLVGECGTDLTAWPTAKHFTSWLCLAPSNKISGGKVLSSRTADPGATYYEERYRQRVLSNLRRRAKAFGYTLQQAPLPEAQGVS

SEQ ID NO: 284611 - protein, 414 aa, unidentified
MELLHERCAALDIGKKDLKACVRAPSPTGKRSRRQDIRSFATTTHALLALREWLVAERVSLVVLEATGDYWRGAFYLLEDDLNVILVNAAHAKGLPGRKTDVCDAAWLCQLGECGLLRASFVPPEPIRHLRDLTRYRTTLTAERSREAQRLEKELEDAGIKLSAVATDILGVSGRAMMTALIDGERDPAVLAEMAKARMRPKIPQLVAALTGNFGEHHAFLCRLHLQRIDQLTAAIAELSARIEQQMRPFARQLEHLATIPGVGQSVAEVIVAETGADMSRFRTAANLASWAGVCPGHHESAGKRRSGKTRHGNRWLSGALGTAAMAAARTKDTTYLGARYRRLVPRLGKKKAIVAVEHSILTAVWHMLTDDVDYHDLGGDYFARLDPERAMHRIVRQANALGFTVRFDPIQAA

SEQ ID NO: 284612 - protein, 413 aa, unidentified
MLKIVYPICCGIDVHKGFIVACIASTNGQGVTTYQSKRFSTFTNDLRRCAVWLAKNNCKDVCMESTGKYWIPVYNILEATCTIVLAHPKYVKAIRGKKTDKKDAKWIADIFKHDLVSGSFIPPADIRQLRDLMRYHWKLTSFTTGEKNRAQNCLTVSNIKLDDVFSDVFGKASSAITTRLLESSEPFDVTPYLTKNIKAPVEKIQAAVEGKMCAEQAEKLRIIRSHMDALELCRLNLQSLILTTAEKYLPQLNIVATAPGIQAFSAIGIISEIGVDMSVFPSSKHLCSWAGLTPQNNESAGKKKTTRISRAGVYIKPLLVQCALASIKAKKKHPEIFNRYNNLKKRRGHKKAIIAIARMLLTAIYNMLKKNEPYNPELYRKADRPPIHREVSVEEAVYILQRQGYLVTAPPTA

SEQ ID NO: 284613 - protein, 310 aa, unidentified
MDAIVIGIDVSKDKLDVHVLPAAQAFAVARNGAGIEELAARLAALAPAVVAIEATGGFETIVAAGLAGAGLPVVVVNPAQIRAYAKAIKQRAKTDPIDAAVIAKFARATRPEVRPLPDEVTRQLADLVARRRQIVEMMAAEGQRGRRVDHKRVARSIARVRKTLEAELAEVDQEIGDQVPGSPLWREKEDLLVSVPGVGPVVARTLLAELPELGRLERREIAALAGLAPFTRQSGRWRGRSFIGGGRATVRTVLFLAAMTAARHNPTLKAFRDRLVAAGKPKMVALIATARKLLTILNAIIRDNRPWQNA

SEQ ID NO: 284614 - protein, 342 aa, unidentified
MEYYAGIDVSLECSSVCVMDGSGKFVREAKVASEPEALIGWFGSLGLGLERIGLEAGPLSQWLYAATREAGLALELLETRHVRDAFKAMPVKSDRNDARGIGQLMRLGWFRPVHCKSMDAQEVRAVLAARKLVQTKLLDVENSLRGILRGFGLKVGKTTPRSFAGRIQELVDGQPNLEAIGEALLSVRAILQREFNAFERRVRAMARLNARTRLLMSTPAVGPIVALTYAAAIDDPARFKSSKQAGSHFGLTPKKYQSGETDRSGRISKIGDASVREALYQAAHVMLTKPVKDCSELKGWAMRIARRAGMNKAKVALARKLAVILHRMLANGTPFNPAAAAA

SEQ ID NO: 284615 - protein, 421 aa, unidentified
MNQLADTLFTAYVGIDWADAKHDICVRSPDGELVEFDCISSRPEAIADWALGLYQRFGGPIAVAVELTKGPIVTALTKYDFMVMFPVNPLMLARYREAFTPSRAKDDPTDAELAVDLITRHPKRFEPLQPQSVEMRKLMALVEHRYKVLCDQRRISNRLSHALKQYYPQVLEWFRQHNTVLFCDFVVQWPTLQQVKRARASRLERFFGAHNMRRKGVIERRLTAIKESTPLTEDTAVIDPYCLQVEVLIDQMRVTITALKRYDNDIDAITEQLPDYDLLFSPLPGAGHILAPRLLAALGEDRERYQRADELQMHSGIAPVTERSGKKTWVRWRWQCPTFMRQTFVEWAAQTINKSAWAGAYYRQQRAKGASYEVAVRALAFKWIRILYRCWKDRKPYDELKYLETLRRKGSPLLKYLADPA

SEQ ID NO: 284616 - protein, 356 aa, unidentified
MSKNITADQAITIGLDLGDKYTQCCSLDDSGEVEEIFRVRSTGPGLSKRFGSLAPCRIILEVGTHSPWVSRLLSKLGHEVIVANPRRVRLISTNDSKNDFVDAELLARLGRADPKLLSPITHRGPQAQKDLVLLRNRDGFVRSRTQLINQARGFAKSLGDRLPSSSSVSFPKRVREAKKGEIFPGLETLLQLIDSLTAAIADMDREIERLCREQYPETKLLRQIQGVGPLTALCFLLTIEDPHRFKKSRSVGAYLGLRPKQHDSGEQQPQLRITKSGDEMLRRYLVSGSQYILGPFGPDSHLRRVGLRLAERGGRAAKKRAIVAVARRLAVLLHRLWVTGEEYQPLGYGSTDLEAA

SEQ ID NO: 284617 - protein, 442 aa, unidentified
MPHATSSAPLEPDWAAFVGLDWGDEKHYWKLRDAHSQQSQEGVLQNTPEALDAWAAELNVRFGGRPIAVCLEQSRGAVVYQLSKYPHLILYPVHPTTSARFREAFYPSGAKSDPQDGDVLLDLVEHHRDRLRRLDPDTPETRLLQMLVEQRRAWVDEKTRHSNRLTGWLKIYFPQVLDWIDDIDSPLGCDLLDRWPTLEELQKSHPGTLHTFFVQHNCRSEKRMQERIQAIYQATPAIRDTAMLEAGPAIVKQIVAVIRALRANIDELDKRIASLVSTHPERALFEALPGVGPALLPRLIVAFGTKRERYTCADQLEAYSGIAPVTQQSGKSKWVHFRWACPKFLRQTLHEFAAHSIAKSVWARAFYDMQIAKGKGHHAAVRSLAFKWIRVLFACWKNHTPYDEQIYLRALQNNGSRLSQILATQLTWKTVGGLQKLCSENA

SEQ ID NO: 284618 - protein, 369 aa, unidentified
MPHVTSIGLDVHARSVAAAAFNPFTGEVVHRDFGTDAAEIAEWALGFEEPRACYESGPTGFHMARELRALGLDCAVAAVSKMQRPAADARRKNDRRDAEFIARMLATHNIVEVPLPDAAVEAARDLDRALDDATVEYRRARQRLNMFLIRLGYVWDERNADGTRKKAWTRAHWRWISEIRLEGPQRDALEYYVTAARCAESDRRQLERRVVALAGADRWRPAVEALSCIKGIDTLTAFRLAAEAGSFSRFRSAPAFASWCGLTPSEHSSGESERRGGITKAGNALARTALIESAWHYSMCSPRPKAPTPGTDVPPAVRSRADDCTARLHRRREALARAGKPACKANAAVARELACWVWEIGCRSEGTIL

SEQ ID NO: 284619 - protein, 394 aa, unidentified
MKLIGIDIGKNKHFFCIMDQQTGEIISQPISFSNDKEGFDFLIQKIKSYSKDSVLIGMEDTGHYHFALLKYLLDLQYTVALINPKTTDFNRKMQGGITKNDKLDTINICDVLDTPERKKQYRISKVNSLDLYEQKQLTRHHHNLKEEENVYKNRLQKCIDIVFPEFNKLFNSKYGTVYMNILKTFGSAENIANTDIRTIRKCFEIEGRGNRISLTPERLKECARSSIGISSSAEVIQIKHLTAQIELIEEQLTEIDKKIEEFSIQNNSPILSIPGISHFSGTSILAELGDISNYSKPSQIIKFAGVAPLHYESSQFNAQHTSITKKGSKYLRKTLYQIILPVIRHNQVFYKYYQLKISQGKGHRCAQGHCVRKLLRIIYHLLKTNQQFDPQLLR

SEQ ID NO: 284620 - protein, 407 aa, unidentified
MKNTVYVGIDIGKRNHEATILNESGKEIGNIKFPNSKKGTQKLLSQISQISQIPDSCEPSLGLEATGHYWLPLYCYLVDQGYRVIVLNPIQSDSLRNLYIRRTKTDKKDSFIIADILRIGRTPESQLANETTLELQTLCRTRVEFLDSVTSLKQRLICILDKIFPEYESIFSSVFIESSKALLKNGPTPEDILEWDISELSSFLKTESRGRFGETKAKELKEAAKESFGITIALEAFRFQMKLLLEQIEFIESQIHQIDLKVKGLMEKMDSSAYITSIKCIGAVLGASILGEIGDISRFSNPKKLVAYVGMDSTVHQSGQFMGTRSKVSKRGSPYLRRAIWSAAALGIRHNPVLSEYYKKKIGEGKHPQVAIGACARKLIHLIYYVLKERKLFDPKYQWSGNIQVEA

SEQ ID NO: 284621 - protein, 349 aa, unidentified
MSKSSSQYVGLDVSLKETSICVIDDAGKIVWRGRTGSTPEAIASAVKRHAPHAVRIGLESGQLSSWLFHELKEAGLPIICVDARHAKAALSLKVNKSDANDAFGLAQIMRVGWYREVTVKGLDCQAVRALLVARAQIVSQITTLKNCVRGILKTFGRVLPKGLRSQFPGRVRAAIDGHPVLGAIIEPTLRVLEAMRAQLLVYDRAVIQRARSDDTARQLMSAPGVGTVVALAYTTGVEDPARFKRSSSVAAYFGMTPRRYQSGEVDHAGRISKCGDGMVRGLLFEAAKVLLSRSARPSALKTWGEALGKRVGAKKATMAVARKLAVILHRMWTTGKTFQWNAEAASPAA

SEQ ID NO: 284622 - protein, 372 aa, unidentified
MNYNTVYVGMDVHKESFSLCAYTIEAEKASHYQRTEADYKKVLNYLEFLRTIYGDDANFICGYEAGCFGYTLYHQLTANNVKCIILAPTTMLEQRSKKRIKTDRRDAEIIAKCLAQHNYSPVHIPTAKDEETKEFLRMRDDHKLALKKVKQQILAFCLRHNYRYDGKSHWTAAHLKWLKALTPEALYKEILDEYLLTYQTLSDKIERLDKRIEELATQDEYKEAVKKLCCFIGVKTHTALSVLVEVGDFKRFASAKHFASYLGLVPGEDSSGDDQNRLGITKAGNRHVRLLLTEASQCYARGQVGFKSKELKSRQSGNTPAVIAYADKANERLRRRYYKMVLNKYKKHNVAKTAIARELACFMWGMMTDNIA

SEQ ID NO: 284623 - protein, 334 aa, unidentified
MLYAGIDIHKAVFQAAVLDPDSGELRESRFEPSRERLNDWAIEWKDRLAAVAIEATTGWRWVARELQAHGFEVHLVDPGRASALRGRRRQPKTDRLDARWLALLLARELLSECEAWLPPAEIQRLRDRTRLRKALAGDRTGWAQRLHALLAHEGWPCSRGRLLTGEGQRWVAALELDPHVRGQVDVIVAVMAALDQQLELVEGELRLLARADRRCQALQTIFGVGPILACHLLAEIGDVRRFKRPRQLVRASGLDPSVTESAESKRRGRLAKQGSRHLRWALVEAANHSHRHSAPDHELYRRTVRRCGRGRARLTVARKIARRSYHVLLATEAA

SEQ ID NO: 284624 - protein, 361 aa, unidentified
MSDATTSEGTKVTVGLDLGDRHIQVCVLDEAGEVIEEARLATKPQALRRRFSGDEHLRIVLEAGTHSPWVSRLLAELGHEVIVANPRKLRLIYQNDSKSDRVDAEYLARVGRLDPALLAPLTHRGAETQADLALLRSRNALVRARTSLISHARGTTKSLGARLPACSTASFVGKAGACVPDELRPALDPVLVVIAGLCDEIRALDERVEEMARQRYPETALLTQVPGVGTLTATVYVLTLEDPERFPRSRSVGSYLGLRPRQRDSGSLQPQLRITKAGDEHLRWLLVGAAHYILGPFGPDTDLRRWGLKLAAQGGRAGKKRAAVAVARKLSVLLLRLWVTGEVYEPLRNARLRGELLPSPA

SEQ ID NO: 284625 - protein, 297 aa, unidentified
MTMVETTRPVTGGVDTHLDVHVAAAVDASGGVLGVQPFATTTAGFVELHAWLETFGSLERVGVEGTGAYGAGLARYLRSRDLEVIEVDRPNRQLRRRAGKSDTIDAIEAARAALSGRASGIAKTADGNVEAIRVLLIAKRSARDTRIKCLNQIRHLGFTAPDELRERLRGVPRGRLAGTAAGLRPTAGSDPVVYATKLALQTLGRRVVDLETTTQRLDATLDQLVCATAPNLVAVAGVGIDTAAILLVAAGDNPERIRSEAAFAHLCGVAPIEAVVAHRVHPHERRRAYPRLRRAPT

SEQ ID NO: 284626 - protein, 355 aa, unidentified
MAEGSWVGLDVHARSVVAGVIDEGSGEVRSLRLPPGEATVAWLQRLPGPVRVVYEAGPTGYGLARACAEAGLNCVVAAPSRVRAAADRVKTDRRDAERLARLLRLGEIAPVRIPTLEEEAARDLVRAREDARGDLMRSRHRLSKLLLRHGLVYDATAWTRTHDAWLRRQRFDRGPLAVVFDERYGRMLDAKSRRDTLDKAISELAATPPYVDVVERLVCLRGVSTLTAFALTVELGDWHRFRPASLGPFLGLTPSEYSSGQRRRQGAITKAGNSHVRRLLIEAAWHQRAPSRRSITLERRRAGKPLAVQAQAERSARRLHQRWHALETRGKPRTIVVVAVARELAGHCWAIATMD

SEQ ID NO: 284627 - protein, 350 aa, unidentified
MNVHHYIGFDVHKKTIYYCVKLIDGTIVEEGKLAARRATLRQWASKRTEPWQGAMEATLFSAWIYDTLKPYAAKLEMGHPARMKAIGASKKKNDKLDARTICDLLRCNLLPTCWVAPAEIRELRRMLRYRNLVVGQAVQMKNKIGGLLMESGAEYNKKRLHGAKYFGELMENLEEVPESVKKLLKLSRGSLEAFQATQQQLLAQLRTHPQLAERVERLKSIRGVGDVVALTWALEIGDPKRIPSIDDGVSYCGLTTALVESANKQKRGPISKQRNAHLQVVLIEAAKLAPQWNPQLKAVHDKEIQQGHRNRATLEVARKLVAYLLAVDKSGKPFEVRTNAKPEKEVETAA

SEQ ID NO: 284628 - protein, 467 aa, unidentified
MARKSKNMNSKNGRRVPQSLNVMQPHAAGIDLGSVEHWVAAPPLEDGTSNVEHFGTTTPELYRLAEWLKEQRVVTVAMESTGVYWIPIYEILESRGFEVLLVNARRIANVPGRKTDIIDCQWIQILHACGLLRGSFRPSDEICRLRALIRERNTMVEQRSDWIRRMQKCLDQMNVCVHHAVTDITGVTGMAMIRSIVAGERDPRVLARLRDGRCHKSEAQIAKELTGNWRPEHLFNLRQTLKMYDQLCAVIEEYDSEILSYITAIQPEDAGDKSAPPPVSKAKAKNLAKRGHEPMRQALYRLSGFDLTTIDGIGADTASVIISELGLDFTAFPNESHFVSYLRLAPNLSISAGKKVPRKSKATTCTRIATALRMAALTLRNSRSALGAFYRRVSRRKGASVAVFATARKLAQLVYRLICYGQAYVDVGQEAYEARFNHRRLKIYTKILKNMGFDVQPLTTREVAPVA

SEQ ID NO: 284629 - protein, 430 aa, unidentified
MMPTTTPTEPSLPLVNACCSGIDVHKDTVVACVRTTGPDGRAVNDVRTFGTTTAALLELCDWLAERCVTAVAMESTGVYWKPVWNLLEGRANRDGEPISLMLVNARHMKNVPGRKTDVKDCQWIAQLLAAGLLSPSFVPERPQRELRDLTRQRAQLVGDKTRVANRLQKVLEDANVKLASVASDVLGVSGRDILRAMIEGTQTPAQMAELARGAMRRKIPLLADALKGGVNAHHRFMLKALLEQVEHVERQIAAFDARIEAVMPPLAREAVERLDAIPGIDKRAAQNILAEIGTDMSRFPTAGHLASWAGMCPGNNESAGKRRSGRTTEGDKWLKRTMSQTAWAAARTKGSYFQAQHRRLAKKRGPKRATMAVAHSQLCTIYAMLKNGSTYVDLGGDHFEHRDADRLKGQLVNRLQRLGFKVTIEPAAAA

SEQ ID NO: 284630 - protein, 346 aa, unidentified
MMIIGCDFHPSWQQVSWLDSETGETGERKLVHATGEAKMFYQQLGAPALIGMEATGNSQWFMELVEDLGHAIWIGDAAQIRASYVRRQKTDKRDAAHILKLVVEGRFPRLWTPDREQRDLRQLVLHRHKLVEIRSRVKNELQHLAMNKGMQKKCTLWSQAGQKMLRELPLKPWASCRREDLLGLLGMLNQQVGTLDGAVQKAAEEHAQARLLMTQPGVGPNTALAYVLTIGEVTRFRRGKQVASYLGLIPREDSSGGRQKLGAISKQGNRLLRSLLVEAAQIAVRFDPGFRKQYLHRCHQKPKGVAKVAAARRLAVRLYWMLRTETAYPEIVRIESSPRVPRVGAS

SEQ ID NO: 284631 - protein, 418 aa, unidentified
MVAVMIGIDPHKSSHTAVAIGAGEEPLGELRVQACPSQAEQLQAWAAGWPARAWAIEGAAGLGCLLAQQLVAAGERVLDVPPKLAARVRLLQSGNTSKNDPNDAYSVAIAALRSQAWRPVVAEDHAVVLKIWAKRHRDLARTRNQACCRLHAVLCDLVPGGIRREISAGKAAAILEQVTPSSPAARARCELAAEFLADLRRLDAQLRECNKKLAAAVRASGTCLTGLFGVGPVIAGTVIGDVRQVFRFPDRDHFAAWNGTAPVEVSSGDRKKIYRLSLRGNRRVNHAIHMAAISQIRHKHSDGRAFYDKKVAEGKTHKEALRALKRRISDAIYAALVADARQATSCPKGPGGQPGNHSASRAAGSRPAHRHFGQATPGPATTIRPDLTAGTARMQPNEVLHGRAGRSPATSKKSPTTT

SEQ ID NO: 284632 - protein, 329 aa, unidentified
MSVHQQGRETVAASRPCAGIDVSKAHLDVAWGQRFERLSNDAGEWDALVAKFKADEVDVVLLEASGGYESAAACALQAAGLAVVVINPRQARDFAKSLGRLEKTDRIDAQVLRDFAEVIARHEQRERYIRVLPDAQRAHLAALVMRRRQLLDMRTEETNRLHTAHQAARKSVQAIVKAIDKQLAAVDDDIDRHMQQHYKDLRTWLESASGVAQVTSSTMIALLGELGHLPRRSIAKLVGVAPLAQDSGPRRGSRVIWGGRSEVRNVVYMATVSATKHNPVIRAFYERLIAKGKPPKVALVACMRKLLTILNAMARDHAVWDPAKHIKHA

SEQ ID NO: 284633 - protein, 416 aa, unidentified
MPPSRYAFYVGIDWGSERHQVCVLDPERRLQGERTVEHSGLGLAALADWLVALAPSEPERVAVALEVPRGALVDILLSRGLHVFAINPKQLDRFRDRHSIAGAKDDRRDAWVAAEALRTDGWALRRLEADHPLIIQLREVTRLDADLQQELTRLANRLRDQLLRYYPAVLRLAPAGNELWLWALLELAPTPAVGAQLPRARVARLLERHHLRRHTPDDVLAALRAPALQLTSGTVEAAVNHVTLLLPRLRLVHAQRAECAAHIDRLLAALQTEIPPGPHREHHDVEILCSLPGVGRLVAATVLAEAAPLLAARAYHGLRALAGCAPVTRQSGKFRGVRMRYGCNHRLQHVVYHWARVSAQCDPHSRAHYTTLRQHGHSHPRALRGVADRLLAIFVAMLKTDTLYDAARPRRRELAA

SEQ ID NO: 284634 - protein, 429 aa, unidentified
MNYTQNEKIMQVKNSTLVVGVDIAKSKHAARAFDFRGIEYDKAIFFENNEAGFKKLLHWIKIVSEKEDKTDVIIGMEPTGHYWLALEEYLRRNTDFMRVVVNPAHVNKSKSLDDNSPTKTDRKDAKVIAKLVVEGRYSIPHMPVKEYAEIRVAMTHRERLIKNIINISNKVQQLIDKYFPEYENVFKNWDGKASIAVLKEIFLPESIVDKTEKEIVEIFKKGANRAVGIKRARKLKKAALNSIGIKEGGEFAQLELRNLLEQFELLNKQKELLEEKVEKLLENMEEAKYMESVKGVGLITVAGFIAEVGDINNYSHPKQIQKLAGLNLKEHSSGKHKGQTRITKRGRPKLRALLYRVVMPMLANNQEFKQLHEYYTTRKNNPLKPKQSMIALACKLIRIFFALGQKQVKYDGEKLMSDIERNLNLQEAA

SEQ ID NO: 284635 - protein, 410 aa, unidentified
MEVMVSRGCGLDVHQATVVACLLVGEPGALPRKQVKTFSAMTEGLIELRDWLKSAGCTAVAMEATGIYWKPVYNLLEGYFDLVVANARHIKAVPGRKTDVKDAEWIADLLRHGLLRPSYIPPPELRELRALLRYRVKLVNARSGERNRVTKLLESCNIKLSSVASDVFGLSGRLMLDALKRGQATPEEMAELAKGRMRSKLPLLKLALDGRMEDHHRQLLSMQLDRLDRFDRDLKQMDAKLEAKLKPYERQMELLDGIPGVNWVTAATVIAEIGIKMSQWPTVGHLTSWAGLCPGQNESAGKRGKSNIRPGNPYLRSALVEAAIAATCAKDSYFREKYYRLKARRGHKRAVVAVAHKILTAIYYVLSSNTPYQELGADYLERLEPERLKRNLVRRLERLGYQVNLEPKRA

SEQ ID NO: 284636 - protein, 372 aa, unidentified
MGHHSEAFIGIDTSKLRNAVAIAEGGRGGEVRYLGEFPATEAATRKLVAKLETKYRHLTFCYEAGPTGYRLHRLIENLGHDCMVVAPSLTPKKPGDRVKTNRRDGVSLARLARAGELTAVWVPDERHEAMRDLSRARLAAKKDLQGKRQQISSLMLRLGRYYPGKKTWGPAHMKWLMSQKLEYREQRMVLEELLQGIRQEGERVERLEQAIREAVPEWSLAEVVTALQAMRGIDLIAAVAILAEIGDLSRFQNPRELMGYLGLVPSESSTGDNVKRGGITKAGNGRARRILVEAAWSYRYPPRVGRQKQPKVAAAPRRVREIAWKAQTRLCRRFRSLERKGKLRTVVATAVARELLGFIWAINREVMGTRQV

SEQ ID NO: 284637 - protein, 366 aa, unidentified
MIVIGTDTHKQSHTAAALDGATGGVIAEQTARAKRRSFEDLLLWARQLGPERVWAIEDCRHVSGALERFLLAHGEQVVRVPPKLTAGARSSARERGKSDSIDAVSIARAAIREGLDTLPVAQLAGPELDVRLLVDHRERLIAQRTQLINDLRWSMHDMWPEFEVPARALTASGWQERVASRLARAEQSARVRIARDELRRIRELTRTINALEGELATLIATLAPRLLAEPGCGVLTAAKLIGEIAGISRFATEAQFARITGTAPIAASSGRTERHRLDRGGNRQLNCALHRLAVTRGRMDPDTSGYLARKQAEGKSRREALRSLKRHLARRIWLVLQPPGRDTPPTRHRPAVTIHCNTPYGSFSLT

SEQ ID NO: 284638 - protein, 432 aa, unidentified
MKRKSNTTQNREDAAHAMPNTVLIGIDWADKVHAWHCVDPAGNVSHGELEQSPKEIALWIASIRQQCPDARIEICLETSRGALVNALLEHDVTVYPINPNALANYRKSHAHGGGKSDRVDARLILQFLAERRGSLRPLVQNSPLTRKLAALSQDRRQLVEHRVDLSNELKSTLKTYFPAALELKPAKMYADFMVAFLLKFASLNAAQKAGATKLRKYFFGVGAKAKAQERVELLCEANPLTTDPVVISTCSLKVESICAMLAALNRSIREYDRLLQELVVTHGDYPIVASFPGAATKMQARMIAALGDDRARYTDTVSFQCATGIAPVTTQSGNQKFVSSRWACTKFLKQTFHEYAGLSISRCCWAKAFYESQIAAGKTPQAAKRALAYKWMRIIFRCWQDGTCYDDQKYMQRLRKNGSHLADKLFPAAKVA

SEQ ID NO: 284639 - protein, 467 aa, unidentified
MARKNKDIKNMNRKRQPQSLHTIHPNAAGIDLGSREHWVAGPPLADGSVNVERFGTTTPELLRLGEWLKQQKVNTVAMESTGVYWVPIFEILDSQGMEVLLANSRQIRNVPGRKTDMIDCQWLQLLHACGLLRGSFRPSDDICRLRALIRERNTMVEQRADWVRRMQKNLDQMNICVHHAVSDITGATGMSIIRAIVAGERNPQVLAELRDRRCKKTKEQIAEELTGNWRPEHLFNLRQALKMYDQLCSVIEDYDKEILNYTNSLQSPDTMGLSAPKPASKSKAKELIKKGQEPMRQALYCMSGKDLTVIDGIGVETSSVVISELGLDFSTFPSEDSFVSYLRLAPNIAISAGKKVFGKQKATTCTRVSEALRMAALTLRNSKTALGAYYRRISWRKGASVAVFATARKLAQYVYRLVRYGQAYVDTGAEAYEERFARRRLNSYTKFLNEMGYKVEPLTLQEAVLDS

SEQ ID NO: 284640 - protein, 315 aa, unidentified
MKSNTAVYVGVDVAKATLQVHVQGRQAELKNAPAARAKLCQKLQALPGAHVVCEATGGYERDLVGALHKAKIPVSVVNPAQVRAAAQAQGQRAKTDRIDAAMLTDYGQRYEPQPTPQASQVQRQLVDLTQWLKQLIEAQATAKTQAEHHHNPFVRKQHQTLMDCYQTQIQAVEAKLEALLKKDQVLQQRVEALDAIEGVGSRTALVILAHMPELGQLNRQQAAALAGLAPWTRESGTMKGVRCIGGGRPEVRLALYMSALSATRFNPVLRAFYQRLIAKGKLPKVALTAVMRKLLVYMNHKLKSLTAQPESAAQV

SEQ ID NO: 284641 - protein, 412 aa, unidentified
MKQIRDKVGGLDVHRDNLVACTRVTMPDGSIEVAKQRFPTTQEGLAELTAFLIDAGVSTVAMEATGIYWRPIYYALEGLFEELWLCNAAHVKNVPGRKTDLSDAEWLADVAAHGMVRPSFVPPPDIRELRELTRYRKTQIDARAHEIQRLEKILQDAGVKLTSVASTVWSVSSRAMIEAMIAGERDPVVLADMAKGVMRKKIDRLEVALEGNFGPHHALLCRQIIDHLDFLDRSIATVSAEICSRLVPFEPQVALLTSIPGISLTTAEVIVAETGADMSRFPTAGHLCAWAGVAPASYESAGKKRPAGTRKGSPWLRRTLIEAARSAARTKGSYYSALYARIARRRGPNKAAVAVAHSILETAWHLLSTGALYQDPGADYFERRHDPVVEAKRLQRRIEALGFAVTITEKAA

SEQ ID NO: 284642 - protein, 376 aa, unidentified
MGTPSAQTLDDVGVRESFQELEEVPLMTMVGGLDVHRAQITFDYVDDDGLVHWGQIRPATRKTLRGWLAEHCPDGDAEFALEGCTGWRYVSEELAGAGVGVHLGDPAEIAVLRGPKKRAKTDRADARLLRTLLLQGRFPELWIAPAHVLEIRTLGRLYCTLMDERRAWQQRIHAQLFHQGCPPVRALLSVTGRAALAGAELSAVGGQYVDTALGRIDELSTEIEPLRAQLVNFARHQTGCQALQRHYGIGWLCAAIIWAEIGDARRFSSSDQLVRFAGLDVTVYSSDGKRSPGHLSRQGSPELRWAAFEAAKCAARRGSPDYGYYRKLAAKGDGHNGKNPTLAVERKILRRCHHTLRELGDAAVALPVAEPQEVAA

SEQ ID NO: 284643 - protein, 356 aa, unidentified
MQLHDANRPKLFIGVDIHKKTWSVSIQTDLFFHKTFSIPSEPEMLYRYVMSHFPDHLVNMVYEAGCCGFHAARFFLNLGWEVLVVNPADIKFSDKDRYLKTDAIDSKKLSDQLKKGDLKGIYIPTEEHEQLTSLARHRSQLTRRLRQSKVQIKSMLLYHGIVIPEQHDNNYWTHAFLDWLEDIQMSHLPGNLSLQGKIRVYKFIKLEYQQAANQLRAYCRKHYRTDYYLLKSIPGIGGFLAAVIIAECGDLRRFNTEKQFASFIGLVPGIYSSGASEKSLGLTHRGRPQLRSYLVEAAWIAVRKDPEMQAYYRKHYGKNVKNIIVKVAHKMSRRILAVIKTETPYQVNRALITAKL

SEQ ID NO: 284644 - protein, 473 aa, unidentified
MSRVGEESEDGLLMSLTGSSPNDIEEDVVSKGSGLSRGDKRRNAKLAELRRLVAGDHAILGIDLADEKQVGVVCDHDSRVLARQTVRVKAWNLGSVLEWAARIAHRHGFAGVTVGCEPTGHRWMVLNQLATQRDMTLVCVNPMLVGRAREAEDYTRDKSDDKDAMLIARLVGELHCYVPERADETWARLRQLGARRERLITEATACVHQLRDLLECAWPGVLAAAAKPFESANWCAALAVVLDRCNGHPERVARGDLARFEAAVRRELPRWGGSRRRRNIIAAVFVVLVDPTGVMAQRPGALERARWVLADWRSATTRLAEVESHMVEVLDELELTELVTSIPGVSAVGAAAMLAETGDPTRFDSPRALVKHAGLCPRDNASGTFSGRARISRRGRPRLRLAAWRAVWGALPHNPVMAARYRYLTTRQRNRLTGGQARAAIAAALLRWMHVVVTRRVAWDAATAGAAVMPAAA

SEQ ID NO: 284645 - protein, 363 aa, unidentified
MDRQYVGIDFHRRRSVIVRMSASGEKLSATRVANDPLEIAAAVAEAGPELEVVVEATYGWYWVVDLLQANGARVHLANPQGLNWGQRRVKNDERDAIDLADMLRLGRLPQAWIAPPATRELRELVRYRAKLVALRSGLKAQVHAVMAKEGVLPGQGRMFGPTGNAQLDGMTLGDNYTIRVESLRDLIEVYDREVAMLEGQIHRQLRDHRGYRAIHAINGVGPTIAAILVAEIGDVARFRSAEALCSWAGLTPKHRESDTTVRRGRITKQGSKLVRWAVIEAVARYHGGPRLAADFRRIAERRHQQGAGGGGPQGTHARLLRPTRRRDPLPHAGRGGVRRLGHGQARARDRQDSRTQRRSRLTA

SEQ ID NO: 284646 - protein, 342 aa, unidentified
MDHYAGIDVSLECSSVCVVDASGKIAREGKVASEPEALMAYFGSLRLSVVRVGLEAGPLSQWLYAAMKEAGLAVELLETRHVRRALETMPVKSDRNDARGIAQLIRLGWFRPVHCKSIGAQETRAVLTARKLVQSKLLDVENSVRGILRGFGLKVGKTTNRSFAGRVEDLVVNHASLHMIAAALLSVHAVLLRELKAFDKQVRSMARVDVKAKLLMSAPAVGPIVALTYASAIDDPGRFTSSRRVGAHFGLTPKKYQSGETDYTGRISKIGDATVRTALYEAAHIMLTKPIKGCAPLKSWAMRIARRSGMKKAKVALARKLAVILHRMLANATPFNAAMAAA

SEQ ID NO: 284647 - protein, 450 aa, unidentified
MGNGSGVSRGDRNRNARLARLRVLVPATNAIVGIDLADKKQMVVVTDHDSKVLARKTFRCRAWNLGAALDWAAERAAAKGWAGVTVACEPTGHRWRVLGQLAADRAMPFVCVQPMLTSWARRSEDLTSDKTDEKDAVLIARLTAQLRCYVPEPVDETWGRLRHLGTRREQLVIEMVSQVQQIRALLECVWPAALDTAKQPFRSRTWAAAMTVICGRDGGDLARTRRLGAARFEQAVRREITRRGGCKPALRILRHLFTALTDPTGVTAHRPGALERVAFLLQDWQAAADRLADTETRMTDVLDELKLTELVTSIPGLSAVGAAAILAETGDPNRFATVRALVKHAGLAPREKLSGTFVGRTKLTGQGRPALRLAAWRAVWGAQRGNAVYAARYHHLTTRETNRLTATQAQTVIAAAILRQLHALITTGQAWDPHIATHGANGRRQLALAA

SEQ ID NO: 284648 - protein, 399 aa, unidentified
MNAVGIDVSKGKSMVTILRPFGEIVSSPFEIKHTSSDIHSLIKLIHSIEGESRVVMEHTGRYYEALAHQLSAADLFVSAVNPKLVKDFNNDSLRKIKSDKADSVKIARYALDKWQSLEPYSITDELRAQLKVMNRQFHFYVKQKTAMKNNLIGLIDQTYPNANTYFNSPTRSDGSQKWVDFVSTYWHVDCIRKMSLNAFVEHYQNWCKRKKYAFNKSKAEEIYTKTKELVPVFPKNEITKHIIRQAIDQLNSTSVTVETIRTLMNETASKLPEYSIVMQFKGIGPQLMAEIGDVTRFTHKGALTAFAGVDPGVNESGSYAQKSVPTSKRGSSNLRKTLFQVMDVLIKTMPQDDPVYQFMDRKRTQGKPYYVYMTAGANKFLRIYYGRVKEYLSVFPDPS

SEQ ID NO: 284649 - protein, 409 aa, unidentified
MEVLYPRCAGLDVHKATVVACARMAESGQIQSKVQSFATTMPGLLALSDWLTGHAVTHVAMEATGVYWKPVWHVLGEAFELVLANAAHIRNVPGRKSDVTDAAWIADLLAHGLIRSSFVPPPAVQALRDLTRTRKQLVRELAQHTQRIQKTLEDANIKLGTVISNVVGVSGRAILEALIAGEMDPEALAARGDGRLQCSRDALVEALRGRVTAHHRFVLRQHLQLVDTLQASIAAFEEQIGTAMDPFRHAAERLRTIPGVSTIAAHVLVAEVGIDMTRFPTARHLVSWAGLCPRLDESAGKARSRRVRKGAPWLKTVLVQCAWATTRTKGTYLQAQYHRLKGRRGAKRAVVAVAASILTAAYYILRDAVAYRDLGGDYFTRRDKAKVAQRLARRLKDLGYDVELRPAAA

SEQ ID NO: 284650 - protein, 401 aa, unidentified
MKVGWDWASEIHHVSVIDDAGGLVDAFEVEHTEAGMTAALRHLGRHGAPAELPVAIERPSGLVVERLLAGGHPVVPIHPNAFNAARPRWGASRAKSDPKDSYCLADYLRTDGHRLRVVHQLTREAQGLRALSRLRDDHVEAKVAATNRLASLLEAHWPGAAVVFGRLDSPIALAFLTDYPTPESAVRLAESRMAMFCRRHSYCGRRTPAQLLARLRAAPVAPATLEPKVLAELVRAQVRLLAGLLGTIADLDRALGAALLANPTAELLRELPRIGAINLAQVVAEVGPILERTVDCEHACAEVGAAPVTKKSGKGEAVNFRWAAPAQARKCLATFADNSRHDSAWAADLYRRARARGKRHPHAIRILMRAWMRVIWACWHTNTAYDPTRHGGEVRFAKAVA

SEQ ID NO: 284651 - protein, 359 aa, unidentified
MFNNSTFFIGLDLGDKQSHIFVLDPKGEVIEESRLPTNPTSLQRKFASLPRSRVAMEVGAHSRWASQLLKDLGHEVLVANARKLRAIYSNPRKGDRADAETLARLARLDPNLLSPIHHRSPQAQADLAILRSRDALVRSRTLLINHVRSVAKSSGARLPSCSADSFSNKAAASIPQPLCPALLPLLETIASLTQQIHAYDHRIRTLGETRYPETQPLRRIDGVGPITALAFVLTLEDPSRFQKSREVGPAIGLVPRTDQSGDRDPQLRITKTGNSYLRRLLVNSAQYMLGPFGPECELRTWGLMLAERGGKNAKKRAVVAVARKLAILLHRLWKNGEIYDPFYRSRSNAGQPVIASAAA

SEQ ID NO: 284652 - protein, 328 aa, unidentified
MTVFYGIDVAKERLNCAVVVQGRERPIGQKAFPNTLDGIERAVAWVAKTSKTELVEVHAVLEPTAAYHELAARLLAAKGMTVSLVNPAQIRSFGRDMAVLSKTDRIDAVLLARYGCLTRPKAWTPPAEPLVELQALLARLDDLEGDLRREQNRYEQACVRGCSSAIKRSFVSSIRALKAQCKLLQEAITEHFAAHEDLQADLKRLRTIPAVGPKTAMQMLALLRSHPFETARQAAAFLGLVPIERQSRRSVRGRPRLSKAGNSRLRAALYTAAIVATKLNPDIKAQQQRLLGRGKATMSSLGAAMRKLVHICSGALKSRDSYRLPVAQ

SEQ ID NO: 284653 - protein, 408 aa, unidentified
MARYYLGVDWADQSHQLYVSDESGRKIRELEVQQTADGLAELGRWLEESRGQGIELWAAIEKPEGRVVDFLLDHGVVVYPVNPKALDRARDRFRMSPSKSDGFDAYVLAEFLRTDHAHLRALEPNSAEGQELKMLTRDHQRLGRQKTRLLNQIGITLKEYYPVPLEVFESLDTKIALDFLKAYPTPQALSKLTRRGWKRFAKRDHHLSEARCSELWDKLNKPQLAVPTHVVRAKAKLLAALVMQLETSVKAVDSYSQEVQSFFAAMPAAEIAKTLPGGKSGTTVASIWAELGDVPKRWNSFRHLQAEGGAVPVTKASGKSRMVQFRFACNKHLRQAMYWFSFNSLQRSEWAKKYYRNQRAKGHSKHESLRALGAKWLKIIFVMWRDHKPYDENYHLANIARQMMRQAA

SEQ ID NO: 284654 - protein, 339 aa, unidentified
MELCCGMDLHSSNTVIGMIDEKRKHVIDRKLPNDPELIRSFLKPYKSDLKGIVVESTYNWYWLADLLQEEGYRVHLSHPVANEQYNGLKHSNDKHEAFWLAELLSLGILKEGYIYPRQVRSVRDVLRKRAHLVRVRTALIVSLQHMISRNCAVKVKTGDIKRLTADVISPCLEKEEALLLAGKTSKEVIDCLTRQIDKIEGWALKRLRREEVFNRLVTLPGVGDILGMTILLETGPISRFRAVGNYASYCRKVSSQWTSNDKVKGRGNIRNGNRYLAWSFSEAAAHARQTNEACRRFYDRKLRQTNTKVAHNALAHKLTRAAYYIIRDHVSYQEEKMFS

SEQ ID NO: 284655 - protein, 331 aa, unidentified
MYFSQFIGVDISKDTLDAAVYPAKDKKMDFLHFDNTQKGLTVMMSWLKRRGIKTTEMVICAEHTGVYTNPLIEFADKKGLALSLNSPLDIKHSMGIARGKNDVIDASRIAEYAYSHKDKLKLYEKPSDNIKKLQYLLTERRQYMRQRTALINLDCAMGKYGTSETRSRSESAKKHCEKLVKKVEDQMLAIIYSDPDVKRNYDLISSVKGIGLINAINTIVYTNNFKSFETPRRYACYIGVAPFDHTSGTSVKGRTQVSKICRTQQKAELSMAARSAIVSDPGLRKYYLRKMKEKGGGKNAHGVVLNAVKFKIILRMFAVVRSGEPYKVLNY

SEQ ID NO: 284656 - protein, 262 aa, unidentified
MNQDGDIEKEFFFENNTNGIQYLTSLLTSDDKVVMESTANLWLNLYETLESKHVKVVFANPMQTKVIAYSKIKTDKIDAKILAHLLRSDLVAESYVPPKQMREIRALIRHRLSLTKMRTMIKNKIHALIDKYGYHCEFSDMFGASGLKWLKTLELGKLDLLIFENHLVLIEAINLQIEITDKAILECVCEDGDVRLLLSLSGVDVRTALLLKSEFGPIGRFETYKWLVSWVGLVPRVYQSGNILRYGGITHEGFGYFVVGYG

SEQ ID NO: 284657 - protein, 398 aa, unidentified
MFYIGIDIGKRHHEAGLINDKGDHVGKTIRFANSKDGSQKLLQFINQYKLTPDNSVVGLEATGHYWLSIFSFLHKLGFKTTVFNPLQSDALRHFYIRKTKTDVSDAYLIAQVIRIDSPDETPFLEEDLLELRHLERLRFSFVDQCSDLKRKVISLLDQVFPEYEKIFTDVFGMSSTEVLLHSPLPEDLLHIDTKKLADLLNRVSKGRYGEDRAFTKANQIQESASDSFGITVGSDVFKLQIKLLLEQIKLIENHLKKIEKAMIEISNRQTHFLTTITGISDVTACVILGEIGSISRFERPEQLVAFAGLDASVHQSGDFNSNRTRLSKRGSPYLRRALWQAAFVASNHDPALSLHYQKLRKRGKAHGTAVGAVARKLTHIVFAILRDKKPYEPRPTLE

SEQ ID NO: 284658 - protein, 314 aa, unidentified
MEALRTHVAGVDVHKEILAITVLIGAHAEKPEATQLECSTYTDDLMACGLKLKAMGVTEVAMESTGVYWKPVFNVWDSLGLKVIVGNAHHIKNVPGRKTDMNDSHWIAQLHRFGLIRASFIPDGEFQRMRLLSRHRTNLVDDLARVRNRVQKVLEDGNIKLGSAVSDVFGVAGLAILAEIAKGYTSPEVLVAAVTTKVKRMEDVKKAMTNCLTKEHCFVISELMEQFYFLRERINATEQELFARIQPYKHLVEKLDEIPGIDVILAMGIISEASTQMDAFKDERSFAAWAGVAAGNNESAGKKKDPSAAMAIHT

SEQ ID NO: 284659 - protein, 394 aa, unidentified
MKLVGIDVGKNSHHFCVMDKETGEFNVTPTSFSNNKEGFDFLINSLKPYSKKSILLGMEDTGHYHVALLKFLLSNGYTVALINPKTTDLTRKMEGGITKNDKLDTITICDVLDTPERKKQYRITKVDRFDFYEQRQLTRHHHDLKEELNVYCNRLQKSIDLVFPEFNTLFSSKYGVVYMNLLKTFGNAEIIASTDIRTIRKCFEIKGRGNRISLTPEKLKECAKNSIGISSEVETIQIKHLVSQIMLIKEQIAEIDKKIEEFSITNNSPILSIPGISHFSGTSILAELGDIGNYSKPSQIIKFAGVAPYHYESSQYNAQHTVITKKGSKYLRKTLYQIILPVIKYNPVFKKYYLLKISQGKGHRCAQGHCIRKLLRIIYHLLETGQSFDPALLR

SEQ ID NO: 284660 - protein, 345 aa, unidentified
MEHYAGIDVSLESASLCVVDATGRIIHEAKVASEPEILIEWFRGLGFAVARIGLEAGPLSQWLYAGMRDAGLPVELLETRHVRDAFKAMPVKTDRKDARGIAQLMRLGWFRPVHCKSLPAQEVRALLTARKLLQTKNHDVEMSLRGVLRGFGLKVGPTTPRTFAGRIRDLVAGHATLSTIAEALLAARGTLFEQWQQLEKRLRSLAREDRRVRLLMTAPGVGAIVGLTYASAIDDPGRFKSSKAVGAHFGLTPKRYQSGETDITGRISKIGDGSVRTALYEAANVILTRPVKGSTLKSWGMRVAARAGMRKAKVALARKLAVVLHRMLADGTEFLADKAAAVPTR

SEQ ID NO: 284661 - protein, 397 aa, unidentified
MLYVGIDLHGKQMTVCVRNEAGNAVLRRQVSTRPERVAEFLGELQALSDGKYVVVLEVCGFHDWLVNRLKSDPSCSDVLLIQPEQTSKQKTDRRDASRLSELLWVNRQRLLAGQPVKGLRRVYIPSDEERQERQITSVRMRLGRQRTRMINQIRHILRRNNLEWQRPTKTFQTKKVKQWLKTLELDETDRLEMDQLLEQWDLWERHIQQSEEHIAKRFEQNAAAQILATIVGVNCYAALAIASRIGDIRRFAHGRSLANFFGLTPGSRSSGEKERLGSITKQGSRIVRFLLGQLVMHVLRKDSKLRAWYRGIKKRRGAKIARVAVMRRLTGIMQRMISKQEAYRYDGITEPRRRRDPAVPGEACVMPDRAAIIAAYLARATEGPGEREVPVPLLCGE

SEQ ID NO: 284662 - protein, 419 aa, unidentified
MSFKILKNNCCGLDVHKTWIYACIGITDSLKRTEYKEARFSSFTKGLNELCDWLSKYNCTDVCMESTGKYWIPVFNVLEKNNIRVTLSHPKYTKPQKGNKTDRKDAKWICDLYMCGMVKPSFIPPADIRELRDLVRYRFKLTCMITGEKNRAHNCLTVSNLKLDDVFSDIFGKSSRSITEQILQHPGETFDVAPFVDGRCKTPVEEIQAAVDGAISKEQAVKLRQCLNHIDELEMHKAEIEREIFRLSDKYESVLSLIRTVPGFDKTPMTAIQVLSKIGGDMSVFPTAKNLVSWAGCCPRNDQSNHKIKSTRISRAGSYFKPVLVQIANALIKSKKHPEFTTRYRRIKARRGHKKAIIAICRMILTAIWHILTDLKPYTPEGFLESRPVNESKILTTSQALNLMKQRGYIIKDDVVPVT

SEQ ID NO: 284663 - protein, 375 aa, unidentified
MKEKVRFLGMDVHAETIAVAVAEPDGEVRSLGTIANREESIRKLIKKLGPAEHLRACYEAGPTGYVLYWQLTQLGVECAVVAPTLVPSKAGDRVKTDRRDALKLARSHRSNDLTAVWVPDGDSEALRDLVRAREAAKQDQLRARHRLSKFLLRMGRRPAVGMKTWTEPYMAWVRQVRFERPAQQATLLDYLHEVDHMAARVKRLEQAITEVVKLASPQVQEVVKGLQALRGIAEISAVTIVAELGNIARFDTPRQLMGYSGAVPSEDSSGKRKRQGNITKTGNAHLRRIVVEAAWSYRHRPAIGPRLRKRQERVPEPIKEIAWKAQVRLSKRYARLAAAGKDQRKIVTAVGRELLGFIWAIGVRAEADSKLRMAA

SEQ ID NO: 284664 - protein, 338 aa, unidentified
MNNSHIIGIDLGKNSFHLVGHDQHGHQLFKKKFTRQKLLEFLSFHEPVIVAMESCGGAHWLARKCVELGHTPKLIPPQYVKPYVKTNKNDFIDADAIAEAASRPTMRFSSAKTESAQVVSTIRKIRSGYIRERTACMNRIGSILLEFGISFPKGHAGMKGLFQWLVDKNQYLPPLIIFELSELHEHYLNLNERINSQADKVEKILADNEQVKQLQTVPGIGPVIASACISTVSNPSDFKNGRNFAAWIGLVPVQYSTGGKSTLLGISKRGNKELRTLFIHAARSILWRDKSVERYFGSWLVELKKRKPFNIAVVALANKIARIAWAILVNKKPFEIRI

SEQ ID NO: 284665 - protein, 344 aa, unidentified
MDYFAGLDVSVKATSVCIVDDTGKTIREVKVASEPEALLAVLNTPAYHFKRIGLEAGPLSQWLFSALAEAGLPVICVETRHMRAVLKAQINKTDRNDARGIAQMMRVGLYRPVHVKTLRSQKLRMLLVHRKLLQSKSIAIENDLRGTLRNFGLKVGVAGTTKFEARIKELVENLPDLAALVEPLLVVRRVLREQIAVLHRRLLAIVRNDEVCRRLMTTPGVGPVVALTYRATIDVPARFRNSRAVGAVMGLTPCKYQSGQSDRTGAISKCGDEMLRVMLYEAAQILLMRSTKWSWLKAWAMQVARRRGMKKAIVALARRLAVILHRIWVDGTEFRWTKQQAAAA

SEQ ID NO: 284666 - protein, 342 aa, unidentified
MKIIGCDFHPSFQQIAMVDTETGEYTERKLTPDEARQFYAELKGPVLVGMEACGNTLWFERLLAWLGIELWLGDAGKIRAMEVRKQKTDRRDAQLLLQLLLENRFPRIWVPTPEQRDARQLLLHRHKLVQMRRQVKNELQHLALNQGVQQKRKLWSAAGRQRLEELPLTGWTAQRREDSLQLLDELSGRIAKLDQAAQQEADRDAVAHLWQTHPGVGPITALAFSLTLGTIERFGRSRQVVRYLGLNPAEHSSGGRQRLGAISKQGNPLLRSLLVEAGPSAARSVPELKRAYQRLKHRKHSGVGKVMVARKLAVRLFWMWKTQQPYSAARTQGNPSHHVVAV

SEQ ID NO: 284667 - protein, 448 aa, unidentified
MKKTKSKLEIMNPNAAGIDVGSAIHYVCVPEGSDEQHIQKFSCFTEDLHNIAKWLKKCEVTTVAMESTGVYWIPLFQVLESYGLEVKLANARHVKNVPGRKSDVQDCQWLQQLHSYGLIEGSFRPDNQMCVLRSYVRQRKNLIENAATHINRMQKVLVQMNIHLHKVISDITGVTGMQIIKAIVEGEKNPEKLAEFRSVNMKNDKATIAKALTGDYREEHLFVLKQEYTAYTFFQEQITECDKSIENYYKTFETKSDESKELGKEKNKSRKGRPNFTLREKLYRITGIDFTKIPGFDILTVQTIISEVGINHNKWQSEKHFTSWLVLSPANKITGEKVFGTKTRKVINRATNALRMAAYAVGNSTSALGAYCRRLKRRLGAIKAITATARKLACIFYQMLKYGQEYVEKGMSYYETRYKEKIVKNLIKKAQEFGYTLVQQEELINGVS

SEQ ID NO: 284668 - protein, 414 aa, unidentified
MDVVHYRCAGLDVSKRDAKVCVRVQPPTRAKASSTVTTWGAMTNDILALREHLIDQGVTLVVMEATSSYWKPFYYVLEDGPFEVMLVNPRHVKNLPGRKTDVSDAAWLAQLGAHGLVRGSFVPPEPIRQLRDLTRARSAIVHERSREIQRLEKFLEDAGIKLSSVATDITGVSGRAMLEALVAGERDSDVLADLAKRRLRSKIPQLTQALNGRFNDHHAFLVKVHLDLIDQSTRTIDDVTVQIEVMMEPFRSARELMITIPGISTTVADVIIAETGADMSRFPTAGHLASWAGTCPGSNESAGRVKSTHTRPGNPYLKGALGIAALSAARSNGTYFSAKYRRIASRRGPIKAVVAIEHAMLVVIWNMLATGETYSDPGGDYFTKRRPERAKQRALDQLRDLGYSVTLELDHAVA

SEQ ID NO: 284669 - protein, 337 aa, unidentified
MNYIGIDLHKKTISICVVNQEREILDRKRFYCSEPERIVAFFESMKPFQAVVEATASYEWLFKRIEPLSERMILAHPGKLRVIAESTRKSDKLDAQVLAEFLAMDMIPPAHRPTPRQREHRRLVRRRNQIKQQITRVRTRIRFLLADYNADRKDLFSSSGLTYLRKVPVSDADRCVLDQLIAEWAFHADQLKAIEKALRDFAESAGAEEQEARAILDSIPYVGTVTVDVVCSELGDVRRFRSNKRATSYAGLAPGYRESSGKRQDLGITKKGSGLLRWALIESAWRLVFHTARWRTVYEALAKRRGRKRAITAVARRLLGVMVSMLKSGRRYQPAMV

SEQ ID NO: 284670 - protein, 388 aa, unidentified
MNVVADKSEPLTAIHTDLGAIFVSLELSRSSWLITSLSPGGGEKMSKHSVPGGDFAGLMERFAQLQKKARLRTGQSFRNIVIQEAGLDGFWIHRALQNEGIESHVVDPASIATSRRRRRAKTDKIDGETLVRTLLADKRGEPRVCAMVKVPTPGEEDRRQLCRERKALTAERVRHVNRIKGLLFSQGISGYQPLRSDRRQRLEELRTGDGRAFPPHLNALVNRELDRLELLLRQIKTVEAARDALLAMEQTAKPATAAMLLDIRGIGPEFAAGLWSEGLFRHFENRRQIAAYAGLAPTPWQSGMVDREQGVSKAGNPRLRTTLIQLAWLWLRNQPRSALSVWFHERVSRNGGRLRKTAIVALARKLLVALWKYVTAGVVIEGVTMKVA

SEQ ID NO: 284671 - protein, 385 aa, unidentified
MKNRYGSVACGGMDVHYKSSHVTFRNAAGRVVAREQLDHTNRKGLREQLARWPKGIPIVLEASFGWGWLSDLLEEVGLDPQLSNCTKVDGMRKARGWVKTNQKDADLLSLLPQEAEPWWQVWRAPADVRDRREWMRYRADMVGLTTGTKNRIHAVFHRHGIFFEEKTDLFGGLGRRFLDQLSQDGRHAGGVLPDGARQALCGLVNLHTYLRGQLLEVAKTLHGQLERDELARRLDGIPGIGLILSHTLRAEIGDIGRFKNDRKLAAYACLAPRSDDTGEAHPERAPLGRHLGGRGNRTLKWTFIEAAHGAVKHGGKWRVMFDRATDGGKKNRGRGYIKVARELVKVVYIVWSRNVAYREAPPRQPGNGRKTRRPRKDSRPGTGQP

SEQ ID NO: 284672 - protein, 367 aa, unidentified
MRDSVRRKNKADSAKQITGLPIVQHNVAGIDLGSERHWVCAPTLEEGGREVADFGATTCELNRMAKWLNARKIESVAMESTGVYWIAPHEVLEAEGLKVMLVDTRQLAGVPGRDKKSDPFDCEWIQRLHGCGLLMGSFRPKEAVCMLRTLVRDKGNLVAEAGDWLRRMQKSLDQMNVRVHRAVSDIDGVTGMAILRAIVDGERDARQLAKLRDGRCHKSEEEIAEQLSGHWREDHLFSLRQALKMYDAIQERISDYEKEILQKLAEMEREECRGQEVPKSNNPQKGRAIRRRGEEPLRQALYRMSGVDLTGIDAIGVETVQVVLSEYGPDLSRFPTEKQFVSHITLTPHKPTSAGKPVKKKKRNSHP

SEQ ID NO: 284673 - protein, 418 aa, unidentified
MNEQHSTMTHFGGLDWADDHHDVVILNCEGDIVADFRFAHSPAGWEKFREQVKSFPALAFAVETQHGLVVDQLIVSGCTVYPINPVSAASYRKRKAPSGVKDDQLDAWALAAALRTEGQDWKVIAPNDPLTEQLRLWCRDEVHLIEQRTALVNQLEAALKEYYPAALEAFDKWMLPATWDFILQFPTPQLLTQAGQHRWEKFLHTHLLWRPETVARRLEIFARADQFCGRAPVTAAKSQLAISLAKVLRTLQAQIDQYHEQIQNLFRQHADHPLFDSLPGAGPLLAPRLLAELSVNPERFPDPQTLQCIAGTAPVSFQSGQVHKVHLRRHCDKHLRAVIHLWANGSRQTCAWAAVYYQQKRTEGKSHACALRCLGQRWLKIIWKMLRTHQPYDSNLHQRNQLKHGSWVLNLIHHTKAA

SEQ ID NO: 284674 - protein, 424 aa, unidentified
MKVTYQTCCGVDVHKSFLVATIVKTTGGIEPSYQKKRFSTFNNSILEFKQWLLDNHCHDVCMESTGKYWVPVFNLLEDKINVVIANPKWVKAVKGNKDDTKDSKWIGDLFRLGLVKGSYIPCKKVRILREYTRYRYKLVSCRSSEKNRYQNALTVCNVALDSIVSDIFGKSSTSIIDYLLEQSGTSINHEEIASKLLRSLKSKEDAVIESVEGYQMTDAQKYRMRLVRAHMDYITAEINDVDKMIENMISSNPDFENAVQFLCTIPGVKRDSAITIISETGTDMSQFSSSKRLCCWAGLTPGSNESAGKKKSVRITRAGVYLKPALVQCAHAAVKSDKSPYYKKKYESLVKRRGKKRAIIAIARMILTAIYQMLSTGEQWNPSDLYKIDMPVTLVEKQKAKAIKQAKKLLQREGLLPPDEPLAS

SEQ ID NO: 284675 - protein, 343 aa, unidentified
MGEVSTIGLDIAKSVFQVHGVDDAGVVVMRKRVGRSKVLQLFGGLSPCLVGIEACPSAHYWSRELQALGHTVKLMPPSYVKAYLKRSKNDANDAAAICEAVTRPSMRFVPIKTQEQQTGLMLHRTRQLLVRQRTMLSNAIRGHMAEFGIISAKGRNGTAELLQIIGNVSDDRIPPVARFCLELLARQYLTLNAEVSSIDKRIHAWHRSCEQSRRLEQIPGIGPIVATALVAEIGDWRAFRSGRSLAAWIGLVPTQHSTGGKERLGSITKQGNRYLRWLLVAGAMAVIRYARAHGTKRPWLTRIIDRRPAKVAAVALANKIARMAWAIMVRGERYTEPKPLLAA

SEQ ID NO: 284676 - protein, 354 aa, unidentified
MQQFVGIDWATRRARWCALAPVGAVIDEGWTPADEDGLARLVGHLGPEAVACLEMMSGAAWVRDRLRAAGWTVQLADARKAKAVGSLAAKTDKLDARVLAELARRDLVPQVYVPTFTDRELKERLGRRMHMIRLRTSAMNRAHGVLSQFGVKLAFDRLREPDALEMLADRGVPEVWRRSVGEAVAIVRVLDERLIPLEQELRPIARADPRARLLVTIPGVGDLLGLTIASEIGDISRFASARKLVGYSRLTPRVYQSGEKSRTGKLSRSGSTMLRWAAIEAAQQAWRPNNPWHELYLDVKARCGGKGNPAKAAVARKVLIAAWHVLALQQPFTPSRPRGAHAPVPANSSCVLAD

SEQ ID NO: 284677 - protein, 344 aa, unidentified
MGEVATIGLDIAKSVFQVHGVDAQGVVVVQRRLTRSRVLPFFEKLAPCLVGIEACATAHHWARQLRALGYEVRLMPPAYVRPYVKRQKNDAADAEAICEAVTRPSMRFVEVKTLEQQSVLVLHRTRQVLVRQRTQISNAIRGHMGEFGLVAPIGRNGLQTLVEIIGNEADRRVPEAARECLIMLVDQLRLVGAQILETSRRIMASARATDVGRRLMDIPGVGPLLASALVAIIPDPHAFRSGRNLAAWIGLVPKQNSSGGKERLGGISKQGDRYLRQMLVVGAFAVIRYAKRHGSRRPWLVQLMARRTTKVAAVALANKTARVIWAIMTSGQPYREPQLATAQH

SEQ ID NO: 284678 - protein, 324 aa, unidentified
MSSIVGIDIAKHSFDIATVQANGKHRTKAKLPNDMSGFQVLQEWLSKHSEPGAWIVMEATGTYHEVLAEHLHGLGYQVCVMNPAQIAYYARSQLQRVKTDQVDAKLIASYGERHRNELRAWQPEPIAIRRLRALMRRLQDLKEIEQMERNRLEVADASVKESIRAVLQRVEEQIAETLNAIRNHIDDDPDLRAKRDLLISIDGIGEQTAALLLAELGDPLHFESARAITAFAGLNPKLQDSGTHKGHVRISRTGSARLRAGLYMPAITSMTYNPAINALAKRLRGRGKAGKQIVCAAMRKLLHIVYGVLKSGQPFDPQLALARG

SEQ ID NO: 284679 - protein, 380 aa, unidentified
MKKLYIGMDAHKNTNSIALAFNDMKTPEFYGKISADLDRTLTALRKVLKKYELEKSEVKICYEAGPTGFVLARRLIGLNFDCEVIAPSLIPKKSGERKKTDKRDARKLAGLSRAGELTAVHIPDVEDEVIRDVCRGRSDAVQALARTKKQLKSFLLRNGYHYSGKANWSEPHMRYLRELVMPAPAQKMILEEYIQRMDALSGQIKRIEDQMRQLLETWKRRPLVEGLMGMRGFQMVAAMVIVSEIGHFGRFKHPKQLMAYLGLVPSEESSGDTRRMGSITKSGNAHARWMLIESAGHYDMPPKISKALSKRQEGLSNEVKAVSWHAQNRLNKRWCKLAFRGVHRNKICTAIARELSSYIWDIAMLIEQQQPSAHSSAITA

SEQ ID NO: 284680 - protein, 355 aa, unidentified
MSQEKYIGMDVHQATISVAVTDSRGKLIMESILETKAATILEFLQGLHGSLSVTFEEGTSAAWLHDLLKPHVTRLVVCDPRKNALLKDGSKSDRIDARKLAELLRGNQLTSVYHGEHGMRTLKELGRSYVTITKDLARVMSRIKALYRSWAIACSGTSVYAPRHRAEWLGKIPEPGVRLRAERFFQQLDLLQPVRQQARRDLLSESRKHHAVKLLRQIPSIGPIRAALLVAQLQTPHRFRTKRQLWAYSGFALETHDSGEYRYVRGKLQRNRERMTVRGLSDNHNPDVKNLFKGAAISASTHPGPLYDFYVALLEKGMRPTMARLTLARKIASITLTIWKKGVDFDATQLHRQEA

SEQ ID NO: 284681 - protein, 341 aa, unidentified
MDYYAGIDVSLEASSICIVDAAGKIVKEAKVLSEREELIAWFKALPFTLTRIGLEAGPLSQWLYAGLKGAGFAVELLETRHVRDAFTSMPVKTDRNDARGIAQLMRLGWFRPVHCKSTSAQETRALLTARKLVQAKLHDVAMSLRGILRGFGLKVGPVTPAGFARRIKELTEHHPALSAIATALLAVHEVLLRELNGFERQVRQQARSDARVKLVMTAPGVGAIVGLTYVAAIDDPARFTSSKTVGAHFGMTPKKYQSGETDITGRISKTGDNGVRTALYEAAHVILTMPVKGGALKSWAARLAKRAGMRRAKVALARKLAVILHRMLADGAPFDAAKAAA

SEQ ID NO: 284682 - protein, 350 aa, unidentified
MSIVAETVEHVVGIDTHARTHTYCLVHTRTGAVVDTATFPTSKSGNARAISWIHRRSPGSVLAAVEGTSSYGAGITAALLEQGFDVAEVRPAARSAHAHVGKSDLLDAEAAARSAIGRDYNTLARPRQTGARAALRVLLASRSIIDQQRTANRNALTALLRSVDLDVDARKPLTDAQIRVIAAWRFGRGATAAAASVIARREARRLAVTVLEQTELLKDNHRQLHQLTEQLAPGLQDLPGLGPVTAAIIVCAYSHHGRVRSEAAFAALGGIAPLPASSGNTSRHRLSRSGDRQLNRAFDIAVRTRMSYDPATRAYITRRRTEGRTNREIRRCLKRYVCRSVFRQLQASMA

SEQ ID NO: 284683 - protein, 323 aa, unidentified
MSKHSMVCAGIDTGKYKLDVALKGSAEQLQIDNTVDGHAALSAWLKRHKVQRVGIEASGGYEQEVVARLRGDKFVVVVFQPAQVRAYAKFLLQRAKNDKIDAALIAACTAATKKIHAPPDPRLAPLAERMTLIDQLTDAIAGFKNRREGSRDPRIRQFWKEQIAHFNKLLRTELKELVAAIRQHRDLAERLALIESVDGIGLKTAVAILVRMPEIGRLTREQAASLSGLAPFDDDSGTHAGIRHIAGGRERLRGSLYKAALSAAFHWNPQLIALYQRLIAAGKLHKVALIACARKLLIFVNTVVERGTPWVSNGSPSAVRTAA

SEQ ID NO: 284684 - protein, 336 aa, unidentified
MVKLTHFIGIDISKETVDVALISAEQPQKAILNVSLTNNKKGATLLKRHLKQLSINTEDVLVCMEYTGLYSRCFARFLLTLGFQVWLEMAYQIKHSSGLKREKTDKADAMAIAQYCFRFKDKLKLYSEKHEEFEKLQTLLTCRELLIQKKTDLNKYLSELESMGFKEESKLVVTAIKKANDGLDKAILKAELNIDHFIAESEQIANQLALLTSIPSVGKITALTFIAITRGFTKMKDGKALASYSGVAPFKNSSGTSIRGKTKVNFMANKKLKSLLHLCAMRLIQKEGHFKAYYQRKVGEGKNKMLVLNALRNKIVLRMFAVIKNQKSYSENLVLS

SEQ ID NO: 284685 - protein, 347 aa, unidentified
MNYNTQHKFYCGVDLHARSMYVHIVDHKGKSVFDRDLTADPDEFLDAIKPYRKNIVVGCECMFAWYWLADLCEDQRLPFALGHALAMKHIHGGKAKSDKIDAGKLANMLRGGLFPLAYAYPRAKRQTRDLLRRRSFFVRQRGQLIAHIVNTNSQFNLPPLPKKLRYAKNRTPELLDRFTDPSTRLMIGADLNLIDHYGEQIAELESYLIRSAKVDDAVTFGLLRTIPGIGPILGLILLYEIDQIARFPEAGNFLSYSRLVRCEHSSAGKVKGSGGKKMGNAHLKWACSEAACLMIRSVPAVKSWLQRQEKKRGKRKALSVLEAKIGRAVYHLWRKQVPFDAKRFLKG

SEQ ID NO: 284686 - protein, 338 aa, unidentified
MTVVTVGIDLAKNVFAVHGVNAAGKAVLVKPLVRRAKLLELIATLPACLIGIEACTGAHFWAREFQKMGHTVRIMAPQLVSPYRMGGRHGKNDAADAAAICEAVTRPNMRFVPIKSVEQQGQLFVHRAHQGYVSERTALINRIRGLLSELGIVLPQAFKAFLSGGAQVLEDLPGYCNQVIGDLLNELYHIEEKIKNSEKLIQQLARDNSAAQLLMQFRGIGPMTATAIVASIGNGHDFKNGRQFSAWLGLTPRQQSSGGKARLGRITKAGDSYLRTLLVLGARSVLLGAAKNDDPVSRWALQLKERRGYGRALVAIAAKNARMCWAMLHLRDEFRFPA

SEQ ID NO: 284687 - protein, 361 aa, unidentified
MNNLETYKVRKKKFNWFIGIDVSKNELDYAIVSGGQMLFHEEHQNNTPAVIGFCEGLKEKIPGFSLKKALFCMEQSGLYCNPSLMAFRKLKVNVVCENALRIKRSLGLVRGKDDKTDAIRIAVYAEKNQLHLKLWQPRRPIIEELMYLNTLRTRISSMSMSVVNRLKEQEKYIGIGLHQKIKKLCKNSDEALKLDFLEINNSIQNLIKGDERLSRLHQIITSVKSVGNVTAIQVILSTNEFRDITCPKKFACYAGVAPFKTESGLMKKKTRVSHVANKKMKALLHICALNALRCDTEMKRYYERKTKTDGKPKMAVVNAIRYKLILRIFACLKQDRLYQLEFHSPRIQTAGESMHLVNSQV

SEQ ID NO: 284688 - protein, 339 aa, unidentified
MSVIVTIGIDLAKNVFAVHGIDATGKPVLVRPNVPRAKLLELMASLPPCLIGMEACSGAHHWAREFARFGHTVRLMAPKFVIPYRLSGKHGKNDAADAAAICEAVTRPNMRFVPIKSLEQQGQLMVHRARQGFVEQRTATLNRIRGLLSEFGIVMPLKAAVVRREAMRHLEDLPGWTNTVIGDLLSEVTRLDERIAQYDQHISTLARHSTEVKQLMQLPGVGPTTATALLSTIGHGRDFKCGRQLSAWLGLTPGQYSSGGKSRLGHITKAGDPYLRSLLVLGARSVLQTAKNRSDPISRWACALAERRGYWRAVVAIAAKNARMCWAVLNQGEAFRLAA

SEQ ID NO: 284689 - protein, 339 aa, unidentified
MKKRHMGVDLHRNCFTVYTRLEDGSGESREWSIRSLKAFARTVRASDEVAVEATGNVRLFCAALKERGCRIVVVNPHQFQVISRSVKKTDEHDAKVLAEFLSKGMLPEVRMKGEVHARVASLAQTRDKLVKLRTTLKNKVNNLLAARGILIEKESLSSEKGLAEVLGAPVSDLERMELEILVGEIRHLNESIKKLESLLRDQGPKLPGWDNLTSIKGIGDTGASILLSTIGNIEDFADEGKLAAYFGIVPRVSNSNETERSGRITKRGCKLGRTALVQCALIAARYSPYLQAFYRRIAAARGTGKAIIALARKFLGIIFKTLKNNWIFEDFPRFVLANG

SEQ ID NO: 284690 - protein, 462 aa, unidentified
MKGKAVKSKRARRPRSPLALVNPDAAGIDCGLAEHYVAVPQDRDPEHVRRFRTFTEDLHRLADWLVSCGIKTVAMEATGVFWIPVYEILEARGLQVLLVNARHVKNVPGRKSDVADCEWLQQLHSVGLLRGSFRPAADIAALRSYLRHRESLVQAASTALQRMQKALVQMNLQLQVVITDISGTTGLRIIRDIIAGQTDPRQLAKHRNARCNSSEAEIAAALTGNYRPEHVFVLQQNLEIFDALQRQIESCDKRVEAHLQQLTAKAPHASKPIPAARPRRRSRGEPSFDLRIPLHQLTGADLSQIDGIGPYNAVRLVSEIGTDMSRWATDRHFTSWLTLAPNNKISGGRLLSSRTQPSTNRAAAILRVAAMSLSRTDTALGAFYRRLAGRIGKAKAITATARKLATLVYRCLKGDIVYKDPGAPAYDRHHRDSILRRLRHRAASLGFTLVNQQTGEILEGVS

SEQ ID NO: 284691 - protein, 365 aa, unidentified
MRKSSTVAAASNKNFERKLTIGLDLGDRSSWYCVLDEAGEVLSEQKLGTTPKAMKGVFATMPRSRIALETGMHSPWVSRLLSELGHEVIVAHARNVRLIGESRRKDDRFDAMTLARLARIDPQLLSPVKHRSAQAQADLTVIRARASLVRARTALVNAARGLTKSYGERLRGCNPRNMDMEKAQSLSPELQAARGPLLQALESLSERIAEYNQQIEAIAQQRYPQTALLKQIKGVGTLIALTYMLTLEDPHRFRKSRDAGCYVGLQPGRRNSGQSEPQMHISKEGDPYLRTLLVQGAHHILGPFGADSDLRRWGLKLAERGGKAGKKRAIIATARKLAVLLHRLWVSGEVYEPLRNTKRAMSVAA

SEQ ID NO: 284692 - protein, 421 aa, unidentified
MNMTSKSAQFAALIGIDWASQRHALCLYDCATAKRESSILEHTPEAIAQWARGLQERFKGKKIALCLEQSKGPLIYALLEYPFFVLYPINPATAARYRMAFKTSRAKDDPSDAQVCLELVLHHREKLNPWLPNDAPTRELSCLLQHRRAAVDLRTLLTNMLRDALKSYYPQALELAGQDLFAPLGCQFLLKWPSLQELHKARKESVRKFYYAHNCRRMDVIEKRLDAIAQMTPLCRDRALLEPAMVQVRMLARQLLQLGGALKEYDSKIEQLFAQHSDALIWESFPGAGPTLAPRLACAFGTQRSRYQSAVAIQQYSGTAPVTEKSGKNQHWVHRRWARPHFTHQSFFEYASQSVLHCSWAKLYLKEQMARGKAYPTAIRALAFKWQRIMFVCWRDRVPYDETIYRQSLQRRGSHLARKLN

SEQ ID NO: 284693 - protein, 358 aa, unidentified
MSTLAQLVDGVIGVDSHRDTLAAAALSPVGGLLGQTAARADTAGYRELLDFARGHVPGRRCWAIEGAGSYGAGLAVFLGANGEQLVEAARPKRPPRRSRAKTDAIDAVRAARDALGQEPHELAAPRQRGDREALRVLLTTRRTAMAARTAAVNQLKALLVGAPEELRAELRSLPTRRQIAVCGALRDRPTRSLEHQMTVRVLRSTARRIQALQAEAEELHGQLQRLIAAIAPWLLELFGVGPVSAAQLLVSWSHAGRFRSEAAFAALAGASPIPASSGKVTRHRLNRGGDRQLNQALHTIALVRLRDDLETRAYATRRTTEGKSPRDVKRCLKRIIARQLFRLLERYDQPGVEVLRAA

SEQ ID NO: 284694 - protein, 403 aa, unidentified
MNSNTNQKINQVSENTLVIGIDIAKHKHFACTVDDRGRVLQKSFPIMQSRCGFEGFYERLLALKATHEKQEILVGFEPTGHYWMNLAAFLTHYGIPFVMVNPMHVNRSKELDDNLQTKNDQKDALVIARLMRDGRFSYPRILDGVEAELRNGATLRSKIQEDLNALQNRIIRWLDRFFPEFTHVFKSFGKMAYAVLEMTPLPSDIKGRTPEELLFLYRQVDGMKSPQLPKAKQLVEVAQNSIGLTDGVVMAKLEIATLLSRVKLMQAQLDELTAQLIELAKQMTDYEYLASVPGIGDVTIVDLLSEVGSLTQYAHPRQLIKLAGLTLRENSSGQQKGQKRISKRGRRKLRALLFRVMMPIILHNPAFKQLHEYYTTRTKNPLRKKQSIVVLCGKLLKVTSKNS

SEQ ID NO: 284695 - protein, 451 aa, unidentified
MARNTNRFEEVRRFVAGVDLAGHADHYVCGPRKDDGTHDIEHFGTTTNELLRMVAWMKERKVESAAMESTSVYWIPVYDMLDSSGIEVVLVDTRTVKMVPGRKSDIKDCQWLQRLHSCGLLHGAFRPPEGFNAVRSVIRERGNVLQMRTQAIQSAQKSLDQMNIRLHHAVSDIDGVTGMRILGAIVDGERNPITLAKLRDKRCRKSETEIAEELTGNWRDEHLFNLKQSYRTLCFLDERIAEYDRQIRDMYAKIAETFPPTDPSPNGGGKKPKDKTDAKAKADLVRICGGFDMTKIGGIGYDSAAAILSELGPDLSAFPTEKHFVSYIGLAPALGKSAGKNVSTRKKHKNTSRVGLILKMSASALFRSESALGARIRCVRSRTCSRTAIKDVAREMGKQIYRGLKYGQAYVDEGEQAYMDRTRERTIKSMKKKISKLGISAEELGIFSIAV

SEQ ID NO: 284696 - protein, 412 aa, unidentified
MEVIIERCCGVDVHQETVVACVLIGAPGERPRKEIRTFRTMTRDLEALRDWLQELGVTHVGMESTGVYWRPVYAVLEGCFELIVGNARHIRNVPGRKTDVKDAEWIADLVRHGLIAKSFVPPAPQRELRELLRYRRKLVESQAAERNRLLKLLETANIKLASVASDVFGVSGRAMLKALIEGGASAEAMADLARGQLRRKRDDLVLALEGRMEEHHRFLLAMQLRRLEAIEADIAALDLRIDERLEPYRAPHTLLMQIPGVDWVVAAVLIAEIGVDMSVFLSVYHLSAWAGVCPGNHESAGKQKSGRARKGNVHLRTMLVGAAISAARTKGSYLKDKYHRLKARRGALRAALAIAHKILVSAYHMLAKNLPYRDLGEAYLDQISQTRTVANLKRRLERLGYNVTLEPKAVPA

SEQ ID NO: 284697 - protein, 461 aa, unidentified
MPRKRKSKSKKVIAATALPILRPDVAGIALGSTEHWVCGPQRQQDTQANVQVFGTTTPQLEQLADWLTEQGVGSVAMESTHVYWIPIYELLESRGFEVLLVNARQISHVPGRKTDMQDCQWLQLLHSCGLLRGSFRPIEAICRLRALQRQCANLVAERTRAVQWMQKALDQMNVQVHRAVSDLTGKTGMAIVRAIIDGERDPARLAELRDCRCRKSLDEIAERLTGTWRQEHLFNLSMALRFYDEIQDMIASYETRLREEMEALQPPEREAQSMPAHPNPSKEKAIRRRGDQQLRQSLWRLSGFDLTRIDGISSGAAQVVLTEVGLDLNAFPSEKHFVSWLRLAPNCPISGGKQLRKKTKGFGATRVAGVLRMSALSLQRSKTALGAAFRRVARHKGGAVAIFATARKIATLVFRMLRFGQDYLDVGEKAYEARFHQRRLNGLKMSAKSLGYELVPDVASG

SEQ ID NO: 284698 - protein, 400 aa, unidentified
MKTPTCGLDVASSSACACLLSAEAAVIATGTFTTSPADLQKLLKLLPPKTPVFLESTGRYHQFWARELTAAGHPVYLLNALLAKRLQPAASALRQNKTDPGDARNLAETGRLHGDQLVSSLWREDPANDATRVLARTRARQRALLTQTLQAAQDLLGRILPEGTFLNLAQSERLTSFLLTIRNLSHLRGLRLATLEKHLGTHAEALHRLLRNPLNAAASFDHLLPALHEELRQIESLRAGQKRLDEAIEESTTASGRAEQVRQARTIPGIGLKTAPVLVAALPRDLRVLGPKREAQRKIQALLGCDPRTRESGQFRGRKRMTKRGDPVARTALFQAASCAIIHDEKLKAHYQREKAQGKAHRVAVSHVMRRVLWRLVAVLYEAKDFIQTTDEITPSATQN

SEQ ID NO: 284699 - protein, 454 aa, unidentified
MGCAPKVSTQAAEVDVLTVIHPNAAGIDMGMDDMWVSVRADRDAEPVRRFGMNTPDLMAAADWLAGCGVETVALESTGVYWIALYEVLEARGFQVYLVNARHAKNLPGRKKDETDCQWLRRLHAFGLLNNSLRPEAEMCAVRAYLRHRADLIEHRAAHIQHMQKALHQMNVRLSPTVKDITGVTGMAIIRAILAGERDPVQLARLRDARCAQPEAEFVKALTGHYREEHVFALKQAVALYAAYTQQIVECDQELERQFSALKPVHDDDLPPLDPSDKRNTHSKNAPAYDGRSWLYQLLGIDLVAVNGLNEVTAPIIISEIGTDMRRWPDEKHFCSWLGWAPHNDMSGGKLVRSRTLKTHNRAGQAFRLAAQAVSKTETAYGAFFRRMRAMHGPKKAIVATAHKIARAVYFMLRDHKPFHDISAQAYHHREREREITRLKTRAAKLGFTLAQASA

SEQ ID NO: 284700 - protein, 347 aa, unidentified
MSHKTAATGAHTIGIDTGKNTLHLIGLDDKGAIVLREKSARGRIVARFANVPRCLIGIEAGMATHYVARELIALGHDVKQVPPAYAKPFRQGHKNDFRDAHAIAEAVQRPSTRCVPVKTDDQLDLQALHRVRSRLVGQRTAVINQIRGFLLEHGIAVRQGLRFLRQQLPDILAKRGDVLSPRMIRIIEDLSGDWRRLDERIQHITEEIEVLAHGSESCRQLMTAPGIGPLIASAMVAAIGNGAAFAKGRDFAAWLGLVPKQMSTGDRTILGRITKRGNRYLRTMLMQGARVILLRPANWAKHSFGLWLTAAAQRLHHNVLATALANKLARIAWTLLAQGRSYEARVN

SEQ ID NO: 284701 - protein, 345 aa, unidentified
MENMYYIGLDVHKKTISYCVKDGSGRIHAEGKIPATRFDLDRWMKTLPQPWTVAMEATIFTGWIYDHLRPHAAAVKVAHPLMLRAIAAAKKKNDRIDAKKIADGLRCNFLPEGYMAPTAIRERRRTLRYRNLLVRQTVQLKNRISGLLMEAGVNYNKEKLHKVGYFRELLKSNPDIDERLRPLLQLCRETLVRLQKTESALIRSLARDRFLVERVEHLMTIPAVGPITALTWALEVGEVSRFSSIKKAISYCGLCGAEQSSGEHVKRTPISRQRNKHLQCVLVAAAHMAPRLSPELALLYDREKQKGNANRATLAVARKLVAYLVAIDRSQRDFLLVEKENQAAA

SEQ ID NO: 284702 - protein, 470 aa, unidentified
MKNVFIGIDVSKGYVDIATLDENGQKILNPFRLDDTAKGHSTFQEYLEDLYSDLSVSQMYAGVESTGGFEDNWLRSLQSFSSTLPVKSARLNPAGVKQYVKANGSRNITDEISAISIAEYMKAHKDKILFDRKVGMLEHIRPAWAALLLLKKQHGQLVNQLHSLLYRSLPSAEIYCRRGIPPWLQSILEKYPTAEKLSRAHVSSLCKFPYVTEKKARRLIQGAKNDLRLDPDMAVCITLSVLLGQLTELTKSISKLEKQLKKIGSKDERVKLICSFKGIGEISAIGLLLNMPAFETMKDASSLACYWGLHPVLRESGDGQRLPRMSKAGRVQPRAILFMCALSAVTCNPLIRKLYKRLVYKKGMAKMAALGVCMHKICRIVYGMLRTNTNFDPIIDKNNQKKRIVEDPKEAKRALEKRKCRYQSPDPDAPISKREKKRREKVNGSQNAVSVEYGLSADPSFQKYKVLIKE

SEQ ID NO: 284703 - protein, 404 aa, unidentified
MSDRFAGVDWASEEHAVCVVDERGRIVEGKRYRHNEPGLRALCARLLRLGVALVALERPDGLLIERLLDAGLRVVAVHPNQVKAMRPRFSVAGGKSDGFDSFVLAELARTDSHRFRVLEPDSDQTKALRSMTRARDSLVHTRVGLANQLRDQLQTFWPGAGKVFCSVDTKIALAFLRRYPTPVDARGLGEQRLAAFLKRHAYPGRKPARELLARLREGAEGRAGELETQARRQIVLALVSALEPVVKRISELTIEIRHALEAHPDAATFRSLFIAHDSWLCAATMLAEIGDCRDRYPTYRSLAADAGQAPVAVESGKSKHAQFRWACDHRLRQAICTLADASRRHNPWAADIYQRARARGASHTHATRILGRAWSQIIWRLWHDHDTYDPLRHTALQRVIAAGG

SEQ ID NO: 284704 - protein, 406 aa, unidentified
MKGSIVTVDVSKGTCHYQPFIEKGKPFRKPKVLHDTVEGFADLSNCIQKLKEKTGAEIVPVVFEATGVYHRCLQKYLDDYEMPYYIISPLLSAKYRQTNLHGNKTDDMDCTHIANAFYGDERLLPYFKQDDRFERMRTLNRDYETELTHLKMRKVSFRSQLDIIYPLLDKCFKGNGSLYDPVPMEILKKYPHPSLLIKHRKETIIKTIEKKTDHKSDFITRVVDRMYECALHCYSGADQDSIEVLRFPKMIEELQSQMELCDDILQQLISEAREVSYFPCIMSIVGIGANLAARLIAELGDMSRFKSRRAIAAYAGLNPKIRQSGDVDGIHLAIEKKGNRHLRCLLYLGASCNYRMKKNDQIYLFNQKKRQQSISPLKSKAANIAAAHKLLVIIYALSKSGELYRS

SEQ ID NO: 284705 - protein, 411 aa, unidentified
MAGRRQEVKAVGERMAGVDWASRTHAVCVLEARGSIRARFEVSNTGKSFAGLIQRLVKLGVAGVAIERPDGPLVEAMLDAGLEVFVIAPRMLKAIRQRYGATGAKSDLGDAYMLADMLRTDGHRLRPMRADSPETKVLRALTRTRKDLVEARVGLVNQLRAQLELCFPGAIGLFKDLDSAVSIAFLRRYPTAAAAARLTEARLGAFLRRIGYCGRTPVTELLARVKEAPAAGLGEVELGGRTVCVGALVDAIEVVNARARDLQAEIVERLEFHADAQIFTSLPRAGRGVRAASLLAEIGDVRERFPDEESLAALAGVAPVTKASGKLHSVGFRWACDKKLRNAVIDFADDSRHASPWAQKVYTDAIARGKRHPHAVRILARAWIRVIWRMWQDGETYDVSRHGGAAMLEAA

SEQ ID NO: 284706 - protein, 359 aa, unidentified
MSEFTFIGLDVHARSVWAGVLDGSTGEVSSKAVPARSDELVSWLRTQGESISVAYEAGPTGFGLARACAAAGIPCLVAAPSRIARAPGERVKTDRRDALRLARLLRLGELVAVRVPSACQEGARDLVRAREDARGDLMRARHRLSKLLLRQGLVWERKAWTQVHERWLATQCFGERGLQIAYAEAVATVESVRARREALDAAIAEEAAKEPWAGTVGRLACLRGVSTLTAFGLAAEVGDWERFDGRSIGAYLGLTPSESSSGERRRQGAITKTGNSHARRLLVEAAWHQRRPSSRPSRELVRRREGQPALVRVRAEAAGRRLHQRWQRFDARGKRSTVAAVAVARELAGWCWSLATMDA

SEQ ID NO: 284707 - protein, 317 aa, unidentified
MAEVTFPQLVQRACGIDVHLKVVVATIDGVGLQRETRSFKTFTSSLNELKEWLLSNGVTHVAMESTGVYWKPVYKVLEGSIPNVWIVNARHIKNVPGHKTDKMDSEWICKLLLAGLLKPSYIPPKEQRQLRDLTRYRNKLIQQIASEKNRMMRILEDCNIKLSSVVSSTSGATATSLIDMLCEGRKLTLDDIKSVYHGKLSASPEELLEACTGFVEEHHVYLLQMIRKDIDQTQILVDELSQRIKALLSKYENVLELLKEIPGFSTKVVEDLVSEIGLDMSHFPSEKHLSSWAGLSPGNNESAGKKKAQESLTETNR

SEQ ID NO: 284708 - protein, 513 aa, unidentified
MLRCRIGVWPDSVQVPGGRLSLRLPTQLNDVALFRSAARRAPLTRRGSRRDCPARSSTARPVVPYRHERRREQQHAAQRTRHHRVDPHKLSATIEVVDHHERCLGSGRFSTDRAGYTAMRTYAKAWPERVWAVEGANGAGRPLAQRLLEAGENVVDVPAKLAARVRLFDTGHNRKTDALDAHSIAVVAVRIQGLRVLQVDGELEALRMLTDRREALTRRRIQTVNRLQALLADPLPGQAKKDITALQAKAMLATVRPRDLTGKTRRRIAAEELAELIAVDTKITEATAELKTIVLSRGSHLMDLHGVGPVVAARVLADVGDVTRFADRNRFASWTGTAPLDASSGEQNRHRLSRAGNRRMNHTIHIAAITQIRLDTDGRTYYRRKRAEGKKPLEALRCLKRRISDALHRQLLADHQPTADLERRAGPGGHCRASQESSAVDPPPHIDTSDQPLPRPAPQTLPAAATRANPRPGSAPQPTRRRAGAVKVERPTGRTTLTVTSAGAHFKEPIPAS

SEQ ID NO: 284709 - protein, 512 aa, unidentified
MEESERVVVAIFPILGEPTAAVEPGDGTLNDPALGLDHKAFSVIKAFDDVDLQTAHRFGGSVVEDRACIGAISEQFAQQWELSEQSGQQQDTTVAVLNVGGSHQGVQHQAQRVDQDMALLALDQLAGIKAVWVDARAPCILALPTSKQSASLSVDGSPEAPRVNEPEKKRGAPSIGSAANPNSRLGRKPSPHLQGRVMERLAASPSFVGIDVSKDRLDVNVRPSGQAFAVVRDGKGLDQLVIELRSLAPALIVLEATGGFEITVAAALASAGLPLAVVNPRQIRDFARATGRLAKTDVLDAQVIALFAERIRPEPRPLADADSQSLTELIARRRQVVEMIGMETNRLYQARNSRVLRMLRTTLKTLKVQLAELDRDIDDTIKRSPIWRAADDLLTSVPGVGDVTAHTLIADLPELGQLDRRRVAALVGVAPVNRDSGQMRGKRTIAGGRTDVRNALYMATLSAIRWNPVISKHYKCLVDRGRPKKVALVACMRRLLGILNAIMRTRTPWQCA

SEQ ID NO: 284710 - protein, 335 aa, unidentified
MNNESNSTNPNHTPISRTGYQRVIGVDVAKDKLDLHDSQGTLTRTIDNDAPSIQTKLLDKLDRGCRNLILCESTASYHLLMVDMAHEESIDVAVVNARQVRDFARGHGRIEKTDPIDAGMICQFGQDVSVHLTARRTEQQKHHTALVHRRESLLKMRTQENLRLEHTVDKETRKLIEQMLGSIQKQLKDVEKRLGEILKELAKEDPKVNILLSHVGVGKVTTSVLLTQLPELGRLNRKQIAKLVGVSPIANQSGTKDGKRSVRGGRQSVRNAMYMAANSARQHDERTKAFYNRLRNHGKPFKVAMVACMRKMLSTLNQMVRNEETFQASRYASMV

SEQ ID NO: 284711 - protein, 333 aa, unidentified
MKQATQIGVDVDSEELVCATKHAGQLSPATFANTAAGHKKFIRWATKGGHPARVCLEATGIYSLEFALALHHAKNVEVMVVNPRAIKDFIRACMQRAKTDAVDAGGILEYLERMPFVAWQPPATEVLELQAINRRIVQLNTELTREKNRRHATEFAGTSGDAIAHDIEVNIRHLERRIERMHDSGVKLVRGVPMLATKLAHLVSTKGIGEASAMRLLAELLVLPDDLAAPQWVAHAGLDPRPYESGTSVHRPRRISKVGNRYLRAALYMPALVAIQHEPNVKAFYNKLVTAGKKPMQAVVAVMRKLLHAIWGMLKHDQDFDGNKFFKIAAKTA

SEQ ID NO: 284712 - protein, 422 aa, unidentified
MQPEPEFVAYVGIDWADQKHVWCLQAANSAQQEDGELEHKPEVVEAWVSELCRRFGHGPIAVAVEQVKGALVYMLRKYECLHLYPVPSTMTAKMREALYPSGAKDDPRDADLLLELLVLHRDKLRRLTPDNEATRRVQNLVEERRKLVEEKTAQLNRLTGYLKVYFPQMLEWFAKLDSKLVCDLLERWPSLEELQAVRAGEVKKFFRHRRGRHGELTEWRMQGISQATPAIRDRAVIEAKQTVVQVIAQLLRNLLEGIATLDRKIAEAAEVHPDFFIFQSLPGAGAALAPRLLAAFGSQRDRYSSAEEVQKYSGIAPVTERSGKKKWVHFRWACSKFLRQSFHEWAGHSIAQSVWARAYYQRQRERGKEHHAAVRALAFKWIRVVFRCWQDRVAYDETRYLAALARRGSHLTSAFAATAASM

SEQ ID NO: 284713 - protein, 348 aa, unidentified
MRFYTKQHRYYCGIDLHARSMYVCILNQAGEIVAHRNMEATPEAFLRVIAPYRDDLVVAIECIFTWYWLADLCAGEKIPFVLGHALYMKAIHGGKAKNDRIDAHKIAVLLRGGMIPMAYVYPPEMRATRDLLRRRMHLVRKRAELLAHIQNTNSQYNLPEFGKKIAYRANREGLAECFTEPSVHKSIEVDLRLIDHYDPLIRELELHILRHAKEHDPQAYQRLRTVPGIGEILALVILYEVHDIGRFEQVGDFVSYSRLVKCAKESAGKHYGFSGKKIGNAHLKWAFSEAAVLFLRKNPQGQKFFARLERKHGKGKALTVLAHKIARAVYYMLKRHTAFEIGRFLSAA

SEQ ID NO: 284714 - protein, 343 aa, unidentified
MDHFAGLDVSVKETSICIVDDAGKIVREVKVASEPEALLAVLKNLAYHFKRIGLEAGPLSQWLFSALAEAGLPVICVETRHMQAVLKAQINKTDRNDARGMAQMMRAGLYRPVHVKTLRSQKLRMLLTHRKLLQSKAIAVENDLRGTLRNFGLKVGMAGKLKFEARIRELVENLPDLAVLVEPLLIVRRVLREQIAVLHRRLLAIVQDDAVCRRLMTIPGVGPVVALTYRATVDVPARFRNSKAVGAVFGLTPSKYQSGEIDRTGGISGCGDEMMRVMLYEAAQSMLHSKRWSWLKAWAMQIARRRGMKKAIVALARRLAVVMHRIWIDGTTFRWTREEALAA

SEQ ID NO: 284715 - protein, 417 aa, unidentified
MTLEGVVGESLSSPAAAHGECGVWGGAQGVPRRLLHGCCGKEFGRPGIARRASGTSSPWESTWHVWLPVCLNTEQLLVGACRKAVTSYLQGWPEMNASELIFVGIDVAKETLEVAVDDKSKTRCIANAGREIEALVKELIPLSERIGVVLLEATGGFERQAAAALCAAGLAVMVVNPRQARDFSKSMGYLSKTDAIDARVLSHFARTLHQSAQRERLLMKLPDANQEALEALLIRHHQLVGMRVAEGNRLAQSHPSQHKSIKAVLKMLDRQMASVDNDMSGMLKAHFADKLALLKDFKGIGPCTQASLMGALPELGQLSHAQIGKLVGVAPLNADSGRHKGKRITWGGRTAVRSALYMAALSAVRYNPVIKAFHQRLIAKGKPKKVALVACMHKILTILNALVKSGSPWNPEHHKSA

SEQ ID NO: 284716 - protein, 479 aa, unidentified
MEAGQVSRRLVGIDLGIASRHSVRVLEADGQAVCRSSCVPTVASLAAVERAALAGAPEGTTLAVVFEPTGPAWMPIAVFFARRGHAVYRVSSAKASDLRRFLRRHAKSNGIDAETLARMPLADPGGLQPLELPGANMAALDRRVRACGRLTQAASEHKTRIKDLVRQLMPMTPLTGDIGKADLAVLERYADPRALMAAGIAELTPLIAAVSNHQQGQERAGQWRAAAAAAVELYGDHPAVPYAELAAEVSTEIRLLRAIQAELALHATAREQHYLQADPSQLARSLPGFAEISAPVLAAGMGRPGRFRTGARFKSYVGLTPRAKETGETDRKGQPMSKAGPSLLRSAFVRAADTARRQDPQLARIYYLQMTERGATHLKACCIVASHLAERAWTVLNRGTPYVICDTNGSPVTAAEAKQIIAAKWTVTEDVRKRRRSRKTAGKAPQAATTGPDRRGGPPRPRSSRPYSHAVKPTAAHQP

SEQ ID NO: 284717 - protein, 424 aa, unidentified
MKFKMHNKQNQLIERISDKHLVVGVDIAQQFHVARAVNFRGIVVGDPLAFENNEEGFASLLIWIKNLQKLNNLDTVIVGMEPTGHYWINLSRWLSKQNIEVVTVNPHLVKRNKENRDNSQSKSDKKDALVIADMVKNGYYSYVRYTSESFEKLRVLMSNRDVVVKRLVSSINQLNRWVDIVFPELRQVFKEVTAKGAIATLRLFPSPLELSIMEPSEIIVGWKSIMKRQPGLKKAQLLLQAARKSVGTRQALDAYKFHLEQLLEEYDLAVTQLERVEKQVSDVLNKIPFAKKLLTIKGISEISLAGILGEAGDLSGFSHGNSLLRHAGLHLAEASSGKWKGQIVISKRGRSRLRRFLYLATMSLVMNNQEFKAIHSHNVKVKKMKKMKSIMKLIGKLARIFVGIAKRNESYCPEKLQHLTSLAA

SEQ ID NO: 284718 - protein, 341 aa, unidentified
MEQATIIGIDLAKRVFQVHGVASDGRPVLRKKVSRAHLLSLLALQPRALVAMEACATAHFWGRTIGELGHEVRLIPPIYVKPFVRRQKNDAADAEAIAEAASRPSMRFVSVKTQDQQARSMIFRTRDLLVRQRTQLVNALRGHLAEHGIIAAQGLAQVKVLAAALDQETTLPPIVRDLGHRYLDHIARLDAEISALDKQLRRYTKEDETAARLQTMPGIGPIAAAAIEAFAPPMATFKRGRDFAAWLGLVPRQHSSGGKPRLGRTSKMGQRDIRRLLIIGAMAIIGWAARKGAAKGSWLERQMAKKPRLVVAIALANKMARSVWAMLTRGEDYRGSALAAA

SEQ ID NO: 284719 - protein, 354 aa, unidentified
MNTTQVFEKRKIAVAIGIDLAKDHCDVVAYNADNKICFTKANWAYPHLMEWLANAQPAVVLMESCKGCHVRARDIADLGHDTRLVKGADVKALRNVCQKNDIRDADYIARLLYVPGTKFVFVKNQRQQSLQFLQNEYKSIQELRIQVGNQIHAGLEEFGCPGPKSKKFIQSRMMAHLEKNAELIPDEVMSSFLRRREMWLNLFEQEEDAKKRMEEIAKTDDDAQRIMTVPGVGAQTAVGMLVHIGGDIGRFKNSGQFAASIGLVPKQNSTGGNTTLNGITKCGPKRLRANLVQCGQVILMHAEKLKGNFGDWVRKLRDSGKKRGVIVCAIAAKIARIVYRLMKDKVDYTPVPSR

SEQ ID NO: 284720 - protein, 451 aa, unidentified
MIQKKRQKRDALEVRNPNAAGIDIGSRQHWVAVAAHQDEEPVRAFGTTTNDLLRLAEWLRQCGVTTVAMESTGVYWVPLYEVLEEAGFEVLLVNATHARNVSGRKSDTKDCQWIQQLHTYGLLRASFRPTASLVELRSYMRHRDMLIASAARHIQHIQKALMLMNVQIHHAVADVTGVTGMRIVRAIVAGEHDPVALAKHRDPRCRVSEAKLVDALRGNYKPEHLFSLKQALRLYDTYLQVIAESDSRIERVLNALAERCAPPAAPPPAPKRRNRPRGTQPTFEIRQPLHRLCGGADITQLDGIAPLTALQFLSEVGTDPTRWPTAKHFTSWLNLAPATKITGGKPLRTHRPTLKNRAGALLRMAAVSVGRTSTALGAFYRRIAANRGKGKAVVATARKLAVIIYHLLRGEPYRPAALAVYEQRYRDHALRRLRSRAKSLGFELTALPTET

SEQ ID NO: 284721 - protein, 418 aa, unidentified
MTRTLAKKLAHIQPGTLFVGVDLGRDRNVAVVITERGQRLAKFRFPHNREGYAYFRRRLKALQERHQAPAVLIGMEPTNYFWKLLAAELERHDMAYRLVNAYTVKKHREGDQLDRAKDDVRDAFTIADLLRTGKFTETRLLHGRYAELRHYAALYDQLRREVGRYKNNLHNAVGQLFPEATQEFKNLTGLTALAMLRHHAAASIIHTLSEEDFIAAVRADFEGQRLCVPKLRRAYTLAARSVGMQEGVQALQLMARQQIEAWAMVQKQWNKVRQALIDTFLAMPESRYLLSVHGLGLVTAAIILAEIGDPKNYRHGRQLVKLAGTQPVPNTSGRKSRSRTPMSHKGRPRLRTALFFAVMRLVQVDDAFARVYLRFQQRDKNPLTKMEALGALMNKLLRVLWALMRHQTYYNPALIDAG

SEQ ID NO: 284722 - protein, 407 aa, unidentified
MDVLHPKCAGLDVHQQTVVACARTGAGKAVTYDVRTFGTTTAELLALSDWLTAHGCTHVAMESSGVYWKPVWHVLEGHFELVLANAMHIRNIPGRKSDVNDAPWIADLLAHGLIRGSFVPPEPIQELRDLTRTRKQLVREIAQHTLRIQKTLENANINLTAVLADVLGSSGRAILRALARGERDPARLAELASDRVKASRAELVAALHGRVTPHHRFMLTLHLTQIEALEAAVREVEARLGDALAPFRAALDRLITMPGVSETVARVIVAEIGFDMTRFPSAGHLVSWAGLCPRLHESAGKRLSNRTRSSNPWLTTTLVQAAWAAARKKDSYCRAQFLRIKSRRGPKKAVLAVAASMLTAAYYMLKHGVHYRDLGADHFDRRDKAKLAKRLIARLHDLGLTVEVRAA

SEQ ID NO: 284723 - protein, 428 aa, unidentified
MTSSQERITRITPETIIVGIDVAKEIHWARVTDYRGIDLTKPFKVHNSIDGFESLLAKVGKIRDKHGCGKLIVGMEPSGHYWRALGWYLKLHESKPDLVGVNPYHTYQAKELDDNSQTKSDPKDAQVIAHLIRDGRYFDTYLPESEYAELRQLNTERQRLMKQINREGNTLIALLDEFFPEYSTIWDNVICQTSLNLLKIYAFPSDVLTATQGQLLADVRGASNGVTGTKLAEEMRRAASDSAGVKEGLRAARLRMLNLIDEIEQYEKKKSALEAELEAVMGSLQLGEVLQSMLGVGPIISAAFMGEVGDISRFSDWKQVRSLAGLNLVENSSGQHKGKTKISKRGRPYLRHMMYMAGGNGRMHNPEMRAFYQYLRNRKSNPLNEYQALVATGLKVMRIMFHLAKTGERYDPEKALGAARLQQIASLS

SEQ ID NO: 284724 - protein, 346 aa, unidentified
MEHYVGLDVSLKLTAICIVDRTGKIRREGTVHSDPEAIAAFIKSNAPHVARIGLEAGATSTWLWTELKKLGMPVICIDARHAKAVLKMQINKSDRNDAIGIARIMQCGWYKEVCVKDLDSHVVKALLASRALLVKIKRDLENQVRGLLKNLGLVIGPARMNVFALRAAELIEDRPALAVAVAPLLSARMAIEQQIADLDRKVMKLARNNAQARQFMTVPGIGPVTALCFLATIDDPGRFKTSRSVGAYVGLTTRRYASGEIDWTGRISKCGDKMLRGYLYEAANVLLTRVAKWSALKAWGIRLAKRSGLRKAKVAVARKLAVILHRMWIEGTEFRWSSKETAMQTA

SEQ ID NO: 284725 - protein, 301 aa, unidentified
MRTLFVGLDVHKETIAVAAAEDGRNGEVRSYGTIESTPDHVSKLLKRLAAHGESLVFSYEAGPCGYGLYRQIIDAGHCCIVAAPSAIPRKPGERVKTDRLDAIKLARLLRAGDLTPVWVPDAAHEAMRDLVRARGVARQHLKTAKQQLLAFLLRQGRTFDGQKHWSRTDFKWLADQKFVHPAHQIVFQDYINAVHDGEQRCRQLVGMIEKTIPEWSMKPLFDALCTMRGIDMIAAATILCATGDLRRFPTPGKLSAYFGHWCLRSIPATGASGARGSREPATRKCGASLISAHGVIGSRPV

SEQ ID NO: 284726 - protein, 401 aa, unidentified
MESPIVSIDVSNGNSHYMCFIKNNKRFGKVKKIDHDIEGFKRLLEDIQKLEAETNEKVCAVFEATGVYTKPLERFLSKNSIKTYIINPLESARKRKEEIHNKKTDKLDPISISKVYYDKEKMMELKKKDETYNWLRKKNRLYEDQLNHLRKYKVTFQNQLSICFPGYLDLFKDGYSDIPMTILKKYPHPDLLKNKKAETVARYLEKNTCHTHKVSLEYALKIIEFAKKTYPGCEKDDVEVEIFKILLDKVIETQRECEKTLNEMITVASTLEEYRYISSIDGIGPNLAARIIAEIGDIEEFKSREALVAYAGLDPHIYQSGDQDGKHLKISKKGNKYLRCLLFLAVGCSIRGAKDNPVNRFYQKKKQQSNPLNSKAAKTACTAKLLKIIYGICKNKTTYER

SEQ ID NO: 284727 - protein, 335 aa, unidentified
MIIVGCDFHPSFQQIAMLDTETGATEEHKLMHTSGEAEGFYRKLASPALVGIETVGNDQWFVQLLQKLGHEVCVGDAAQIRASYVRKQKTDRRDAKHILKLLVEGRFPRIWIPDTEMRDHRQLLMHRHKLVQIRTRGKNELQHLMLNQGMQKKQKLWSTEGRAALASLPLEPWTDRRRKDLLNLLAMLDAQLESLNDAVTRVAKEYPGVALLTSQPGVGAVTALAFVLTLGDVHRFPRGKQVASYLGLIPREHSSGGKQRMGGISKQGNRLLRFLLVEAANIAVRFDPELRKEYCTAAIKNTSPSPRWRRLVSLRYGCIGCFVHRHRTHRFFHRG

SEQ ID NO: 284728 - protein, 412 aa, unidentified
MNKRKEDLIYVGIDLHKDSHTAVILDCWNTKLGEITFANTPAEFPKLVRKVQKYCIENKEPVYGLENAYGYGRGLAVWLIAKGLMVKDVNTSLAHRQAKCRAMYKKSDSDDAEAIALATINLLDSLPDACPNDAYWSLSQMVNRRDNIMTQRIRLKNQLHEQLCIAYPSYKQFFEDISRKTALFFWEHYPSEKYLRGKTPESLAEEMKDVGHNSFSVKRCKLILDAVKRDHTKAKEYQGYRDAITRGLVKDLQHYDEQLKAVDKELEQLYHDLGCTLATMPGLNITTAVKIMSEIGDVNRFPTPAKLAQFAGIAPIKLSSAGKGKDKASKQGNRRLQATLYFLAIQMIQVSTKGKARNPIFRDYYDRKLAEGKNAKLVLVSIARRLVNIIFGMLKNKTEYRLPCLETGEVAE

SEQ ID NO: 284729 - protein, 438 aa, unidentified
MTTNCNQPASPAQQSTAALSQIVSTNNFVYFAGIDWGSEKHRVCLMDRSGAILGERWAEHSGSGLADMAQWLREKSRDAPHTLAAAIEIPRGAIVETLAEHGFHVFSLNPKQLDRFRDRHFPAGSKDDSRDAFVLADSLRTDLCCFHPVRLDSPAVIRLRELSRLEDELLSEFNRAANRLREQFHRFFPQLLQLSPAADDPWLWTLFETAPSPARAAKLTEAKIARLLQQHRIRRIDGSQVRAVLKCKPLTLAPGAAEAAAEHALLLLPRLRLLHQQRVDLARRIQTVLDELTAPSEQDPQEHRDAAILLSLPGLGRKVAATMLSEAAQAIAERDYHALRSFSGAAPITRQSGKKKVVSMRYGCNLRLRNALYYWAQKSIPNDARSRKHYTELRARGKSHGGALRVMADRWLKVLVAMLRSRTLFDSQLRPETSLSAA

SEQ ID NO: 284730 - protein, 343 aa, unidentified
MDEYIGLDVSMKETAVAIRRDGVRVWRGKCASDPHIIAELIRKRAPTVKRVVFETGPLSVWFYHALRAEDLPVICIDARHAKAALDMATNKTDANDADGLAHLAEVGFFREVRVKGFDSMLARTLIAARTRLVHMTTELSNQIRGIMKTFGLVVPAGKGSVFEKNVRDLVSSHHDLAHIVLPLLDAWKGLRARAADLGRQLVADARQSQACRILMSIPGVGAITATSFATAIEEPGNFKKSRSVGAWIGLTTRRYQSGEVDYDGHISRRGDRHLRGLLYEAASVILTRSAKQSSLRTWGLQLRERIGFKRAAVAVARKLAVIMHTMLKTGELFNPTAGVTVAA

SEQ ID NO: 284731 - protein, 427 aa, unidentified
MSERDCSKQVERRQKISKRTLIVGLDIGSEFNALALMNEAGEVLGRYPKIYNSREGFEYFKKGIEQVKKKAGFKEVLIGLEPTGHYWRKIAYYAKEQGYEVRFIRTTALRHQRELDESSSAKTDMRDAVTIANVMREGKYIDTVIEDGIYRQLRMLAHVRENIQRYNVGTKHRLAAILDDYFPELKAIFWSMTAKGLWAVLEECPFPEDVIKKSVEQIAELIGKSSKRKGKAVEKAKQVYQGARESIGLKYVTEADRYRLQTCLAEIRKYEGQLEEVGEQMQRLLKQTPAAEILMSIRGVGIITTAVFLGELGDPKNFSDAKQIIKYAGYDPQEDDSGKSVGRKRISKKGRWLLRKYLYFMGMRVLYRNAFFRKYYERKLKKQNRWGQLLKKKEAICAVVIKLIKVIFALLRDGRKFTVARPAPVMV

SEQ ID NO: 284732 - protein, 457 aa, unidentified
MMETKRRREQRSMLPVHPDAAAIDIGATVHVAAVGPARDPEPVRSFGTFTGDLHRLADWFAQCGIKTVVMESTGVYWIPIYEILEQRGFEVRVVNARDAKHVPGRKTDVSDAAWLQRLHEFGLLRGSFRPQGAIAALRAYLRQRERLLDYAAAHIQHMQKALTQMNLQIHHVISDITGATGMRIIRAIVAGERDPDTLASYRDIRCHSSVETVRQALIGNYREEHLFALAQAVELYEVYQAKVATCDEKIEGVLERLKQPCRAPAKPLRAARHKTRQPNAPAFDARGALYAVLGVDLTQIHGLGPYLALKLISECGTDLSAWPSAKHFTSWLSLAPGNKISGGKILSSRTRPSGNRAAALLRLAATTVGRTETALGAFYRRLSARIGKAKAVTATARKIAVLFYNAVRHGMDYADPGASYYEERYRRRVLTNLQRRAKAFGYVLQPTEIKVVPMAVS

SEQ ID NO: 284733 - protein, 337 aa, unidentified
MEYFAGLDVSMEETHVCVMNREGVIAHEEKTVTTPEAIAASLAKAPACRLVVFETGRMAPMLYHGLIARNVPVVCIESRHAYLALKSLATHKTDRNDARGLAHLSRTGFFKPVHVKSLSAHAIRALIIARKKLVGQRVMLENQIRGLAVVFGIRLPRALTAGFVKQALEASEGVIGLAAAMRGLVEARSTVLSAITAIDREMKRLARASEACRRLMTIPGVGPITALAFCAAVDVPERFKRSREIGAYFGLVPRRHQSGEIDYSGSISKCGDRRVRTLLYEAANVMLTRYKGPLKLKEWALAIGKRSTMRKARIALARRLAIVMHAMLRHKTEFRPA

SEQ ID NO: 284734 - protein, 338 aa, unidentified
MSHAAQSFAAPASVGVDVSKAELVVAERHEDRIHQRTLANTAEAAEALACELVARGFRGKLLAEATGAYHWPLVLAAAEQGLDVRLINPLQSAKHRQGRVRKCKTDRVDAAVLADMALTERELPPPFRLDRAGLRLRQHLSLIASLEHTLQALQGTLRGHREAAAFAGVAPVAPLTELEAAVKRLKGEHRRLQREADRLARQLDERGSRQRWSALPGITEELGALLGAVLDGRGRSVKSWVAFAGLDVSVRESGTFVGRGKLSKRGSPYLRKRLYQAAWGAAMNHPQARAYYDMLKARGRAHREALIIIARKLVRAGFALAQNPDREVDVDRLFRLPA

SEQ ID NO: 284735 - protein, 353 aa, unidentified
MRILGVDLGQSKSAWACLDNTSGELHQGWVVPAEAAWLRLLERCRPEQVVIESGPLAARVHDLLVAQKVKVLVADPTREAWNWKNVKRKTDPDDALKLVRLALVGQINPVHVPAPAVRQLRALLEYRRALVAEQTRCKNRIRATLVCHAGVRLAGSSKAWSVTARAALAAQMAPLSACGPDELWRGLVHSELEHLAEVLQRLAALDTQLNALARANRAVARVDGLPGVGPRTAQVIVAVLDQPRRFASRRQVAAYAGLTPRRFQSGQMDRSGRISKRGSSLLRWALNQAAWVAVRFSPEFRAFFLRLGGGTKKRRKQAIVAVMRKLLVVAWAVLRDGATYQARRLAAPAKTAA

SEQ ID NO: 284736 - protein, 316 aa, unidentified
MNKKNHTEVNIGIDTSQTQLDIYVRPCGDYFSVENTPKGAKEAAYRLRSYQPTRVLIEATGRLEMHFVCAAHKARLPVVVCNAGQVRQFAKASGRLAKTDRLDAQDIAHFGEALQPALTELKPEKLRQISDLIAVRSQCLEMSTMQKHRLHRMPQSVHKPIQRILKAVQTEVERIDKQLDKLVEAIPQWRDQRDLLMSAKGVGKVVAYTLMSELPELGKLNRKEIAALAGVAPMNRDSGSYRGKRRIYGGRRKVRTVLYVSMLSAIQYDPKIKSMYERLVAAGKPKKVAIVACMRKQLTVLNTMMKNGTHWDEKLA

SEQ ID NO: 284737 - protein, 344 aa, unidentified
MDQITRIGMDTSKHIFQLHGVNAAEAPVLCKKLRRKDMVMLFEKLAPTVIAIEACGASHHTARLLQSLGHTVKLIAPQLVKPYVKRGKNDAADAQALCEAMSRPTMRFVPVKTAEQQAALMLVGIRDRLIRNRTQLANAIRGYAAEFGLNAAKGMAHLVPLLERIEADESLPALARELFAVQAKEFVQLQAQIEEVDAKLTAWHRADECSRRLVKIPSVGPIGATLLRMKTPDPTQFESGRQFAAWIGLTPKDHSTAGKVRLGVITRAGDEALRSVLVVGATAVIRQAQRSGKASPWLAALLKRKSPKLAAVALANKTARIAWKMMLTGEEYIVKSAVSAGGAV

SEQ ID NO: 284738 - protein, 328 aa, unidentified
MNNSNEVHDVLGIDISKAKFDVALIQGNTKIKSKVFANNPEGFAELQAWLSLQNVTNLHSCMEATSTYGNALARFLVEAGYKVSIVNPSRPKAFGKSELSRTKTDRADAKVIARFCAALKPAPWTPPALEIEQLQALVHRLDSLTAMQQQEQNRLATADPILVEAINAHIDFLKEQIEMTKKLIRLHFDQHPHLKSQRDLLTSIPGIAELTATVLLAEIRDISAFDTADQLAAFAGLTPREFSSGSSIHGKPRLSKIGNSRLRKALFMPAIVARRYNSPITAFCDRLTAKGKSKMSVIGAVMHKLLRQVFGVLKSQRSFDPNFVRISS

SEQ ID NO: 284739 - protein, 416 aa, unidentified
MSKSNVVPTPPEPTSLRYVVGIDIGSQTCAMCCLTPEKRQVFKPTTFANTREGFDWLFEKLASLKSDPSSMLVGLEATSRYAENLSQALLKAGYRLCLLHPAQVHAFAQQRGLRAKTDQLDAGTIARVLLSGEARFGYLPDEQIGTYRELLRLQQQLSEDVVRYKNELHALLVVLFPEFVQVFADPTRPTALAVLKRYPSAQAVVGAGIEPLSRLLHELAPHHYGHQTAQALVALAQTSIASEVAVMARSKSLSIVCDQLEHTLLNLAQLEQEIEQLLSNDPQAKRLLAVAEFGPLTVAVLRAELGDVQRFAHMDQVVAYVGLDIQVKQSGKWKGQRKLSKRGSGRVRRLLYLAALRSLHEKHSPFKDYYQRLVDHGLKKGTALVAVMRKMIIVVVHLLKTQDLYDANKVGIQWVS

SEQ ID NO: 284740 - protein, 331 aa, unidentified
MQYAEVKLGIDISKASFDGYVINEGQGKHKVFSNDPNGFEVLNSWLNKLGFERVHACMEATGRYGEALAEYLICQGHQVSMVNAYLIKQYREGHLHLNKTDRGDAQLIAEYCLREGTNLRLWVPLDEKQKHLRALVRRLDELKEERTREENRLESIIDDAFVDRNIKAHLDYLNVQIRLLQDEIGTFIDQDSDLQAKQKLLKSIPGVGEQSAQRFMAELADTNQYENSGQVVAHFGLNPRIFQSGTSVRKQSRISKQGQSQMRASLYMPAVVATRCNPVIIDLSQRMTKTGHCKMEIIVAAMRKLLTLMYGVLKSGLPFDPDFGKKLNFAP

SEQ ID NO: 284741 - protein, 335 aa, unidentified
MEYVGIDWATRRAAWCALDGRGEIVGEGALPADLDGLLRLVAAAGREVTATLEMMSGAAWVAETLQAAGWRVQVADSRRARALAPLAAKTDRIDARALAELARRDLVPAVWVPPFADRALLEQLLRRAHLVRLRTSAKNRIFGILSQWGVRVPLRRLRKADGLALLERRGIPEVWRESVREALQAIDYLDERVAELDKRLRPLAHADERARLLQTIPGIGPVLALTIASVIGEISRFPSAKKLVGYSGLVPRVQQSGESSRTGRLSKAGSPLLRWAAVEAAQQAWRPQNPWHRLYVDVRSRQGNWHVLARNQPFKPAAGSAAPIVSASSSSSLAA

SEQ ID NO: 284742 - protein, 349 aa, unidentified
MLIIGCDFHSRFQQIAMVDTETGELIERRLEHGNGEAKKFYAELQQPGRVGMEATGYAQWFEGMLAKLGHELWVGDAAEIRAAMVRKQKTDSRDALHILDLLLTNRFPRIWIASPEERDVRQLLRHRHKLVCLRTSLRNQLQALAMGQGVCRKKKLWASSGRAELEALGLDPWARRRRQELLEILDRLDSSLAELDRAVAQEAEHRPAARYLMQQPGVGPVTALMFVLTIGPIERFQRSKQVVSYLGLNPRESSSGGRQRLGAISKQGNSLARFLLVEAAQTASRYDEGLRRDYQRLKFRRGSAVAKVAIARKLAVRRYWKLREYSSPAPSTRTQGSPETSVVGASLSS

SEQ ID NO: 284743 - protein, 337 aa, unidentified
MSYLGIDLHTNSFTVCKRTKQGKNSIRTFQIVRIADFRKTLRKRDLVAVEATGNTAWFVSQIKDRVKKVTVVNPFQFEVIRRSVKKTDKNDSKTLALFLSKDMLPEARMKTKENAQLHSLATTRDKLVKQRTALINKIHNVLNSYGIKFKKESLGSEKGLSSVWAYKWDIIVKIELEVLVEQIRSLNKSIKTLDKEMTDHGQKLKGHKSLTSIKGIAGRSATVLLTVIGDVNDFADENKLAAYFGIVPRVSDSNETVRHGRITKHGSKLGRTTLVQCTLVAKRYSPYLRQYYERIKSHRGTGKAIIATARKFLGIIYNTLKNGWIFEDFPNFVIANS

SEQ ID NO: 284744 - protein, 419 aa, unidentified
MEGSKSKVCGIDVHKQFLVATIIERNGHKKTEKFSNNLEQLLELKDWIITEQCQAVAFESTGEYWVSLHDVLLGYVEIIVANPYHIKWIPGKKTDTIDSEWIAELALNDLISPSRILSKDKRDTRALTRLREKLVNERTNHKNRVHKVLDSACIRLSAYYKDLFGKSGLNILKCILSGVPPEEIVRKLPKRLQGKSDAILEAIRTQLSAHQLIQLQTSVKMIEFLTGKIKELERTILNDLQKERRKLQILMSIPGIGPVGATTILAEIGDVKDFSSPDKLTKWAGITPRVYQSANKLYTGSITKQGSKHLRWILVEIAHSCIRTKNTAFRIFFERIFNRAGYKKAIVALARKILKLVWHLLTNDELYQEKNTIVTKSSRLPISCEMESISVSAAIELLVKAGFQIIDGEDHSDKRVLGT

SEQ ID NO: 284745 - protein, 370 aa, unidentified
MKKRITFVGLDTHKNSIEVALADEGANSEVRLYGSIGGDLDSLDKMIRKLRIPGAELRFVYEAGPCGYEIYRHLRAQGLHCDVVAPSMVPRRSGDRIKNDRRDACNLARLYRAGELTAVYVPHEDDEAMRDLVRGRQDAINAQRKARQQLGGFLLRHGVRYPGKCLWSLAHGRWLAGIKMPHPAQQIMMQEYIHTVEECTQRVIRLNEQIQQLLPDWRMHPLVAALQALRGVAPVVAATVVVEIGPMGRFKNPRQLMAYLGLVPSERSSGGSVRRGAITKTGNGHARRALIEAAHSYRHPARISRTILKRQETLTEPVRQIAWKAQLRLCARFRRLIARGKSRNRVVAAVARELSGFMWAIAKQVPVPQG

SEQ ID NO: 284746 - protein, 550 aa, unidentified
MCGKAYHGLVLLFLSEVKLIITPDPQTPDYGVNTLAVLAEGEKLYIGIDVGKESHHAGLISRSLLDKHKRFDKCPVTNFPNTREGFEALLEAVKAYAPLERCIVLKERTGHYGHALGEYLQKQGITVYTMHVYKRGLKNKTDKRDALNLANTAYTQLELGQQPGDSMKAIRHEVLASEAARKLRVLVQRHAELSKDITIRRNRLTSIADEIFPELTQVFVDPNKATALNIRSKFPTPADIAAASLDDLCACRESKRPSKENLKRLKDELALQSIGIKDSSRLYGLILEQTQLITELRIMQGHLETLKTEIEQIISESREGKILMSIPGIGVFGAAGIVASIGSIAKFESPARLRAYCGWSPKSTQTGKTKDAMTLAKGGNKILKQAIFFATFQAIKEDTELKAKYDKLVVRKCNLDMRTGKYTGKMKCVGRIAGDIVTLIYVLLRKDYDLLQSLPPGATPPEPTLYDRELHKKHCLRGKEDETPSVVATKRSEKTDRIYELLEQNPAIKVGELAEMAGCSRKTAGVARKQWREENLLKQQPAEAAEEGGA

SEQ ID NO: 284747 - protein, 478 aa, unidentified
MNFTALTATVQPNLDVNYIGMDVHSDNVVVCVRRNTINSSGQLVGKTIKTKKVVIKSSQEPLVELLSKYADGQQHIMTAESTFNWYWLADIAEDRGWNFRLADPCTVSQANIKAANDETDAEYLADRLRTGSLKSTSVLPRKLRGVRDLMRHRLRVMQEVSDKKVRLSNLYHNHCAHPMHGKLLTALQDAYDEISVDAVLESGICNNGSELIIGDLLTGLREAEARLAKIEAAVYERIDEVDEYKAERLLLKTSMKGCGDVLSAIIVTEIGDISRFRTMGDFVSYCRLAPTSKLSNGKSKGQSNAKNGNAYLSWALTELATLMARFNEPIRRYLERKQNKTGLRVVAVRALAAKLARCVYQVLRKNESFDLALAFGGKPAAEVVQSPQEPEVPPITTAPEPHLQAPLSEAPIVVKEPSPVKAKRGARKKAVSPASSAPAVTAEGRQTARKADRVKARCALTATPPSCAGTSCVKSRRE

SEQ ID NO: 284748 - protein, 358 aa, unidentified
MKAQVKKIDFTDQNIYAGFDAHLKSWKVTVMAEGTVYKTFTQPPKPEVLFNYLQENFPGGTYHTAYEAGFCGYWIHDKLVSFGIKSIVVNPADIPTTDKERVQKEDKRDSRKIARSLSSGNLTPIYVPSIKTQQDRTLLRTRTMLVRDMARYKNRIKSFLYFYGIDIDDSFINPQNHWSNRFMSWLESIDTGETSGKEALNVLITECKNLRSSILRITKQVRQLSQTDPYQEYVILLRSIPGIGLLTSMIILTELETINRFKNIDKMCGYIGLVPSTKSSGEKEKTGDITPRGHSVLRTAIIESSWTAIRNDPSLMRSYLSYRQRMDENKAIVKIAKKLLSRIRYVLINKKPYKCSVV

SEQ ID NO: 284749 - protein, 340 aa, unidentified
MNATTYGLDVAKRVFQLYWVDTHTGEIVNRRFGRDELIGFLAQRPAGRVALEACGSGHWWARKIQALGHEVVLLHAKFIRPFVQTNKTDAADARAIWTAVQQPEMRTVAAKTEDQQAMLALHRMRALLIKFRTMQVNQLRGLLYEFGVTFRAGRAAGLAEIRARMAELEEALPAMLFGGLQDQLNRIDGLEQDIDQLEKRIGTWQKQEAACRAIAEVPGIGRLTATALVAMIGDPKTFKSGREFASFLGLVPRQSGTGGRIRLGSISKRGDPYLRTLLIHGARSVMYHARVPTPWQREIQARRPANVAAVAMAHKMARTAWAILAHGRPYQKDYVSVKPA

SEQ ID NO: 284750 - protein, 409 aa, unidentified
MDVLYRCCCGMDVHKDTVAACVLIWESGRARKEKRIFGTTTQQLLELSDWLHGHEVTHAAMESTGVYWKPIWNILEGQFDITLVNAQHFKSVPGKKTDLKDGEWIGDLLQHGLLRKSFVPDKPIRELRDLTRNRAMLAREKVRLACRIQKVLEDANIKLSSVASDVLGHSGRAMLNAMVKGESDPEVLAEMAKKRLRAKIPQLQIALTGRITDHHRFLLKQWLEMLKMTEEKIAEFDRKIEETGIPFAEAVTTWVTIPGIDRVAAWCVVAEIGTNMDQFGSAQHLCSWAGVCPGNNESAGKKKSGKTRRGSVWLRRVLCEAAWAASHCKRSYFRAQFHRLAGKKGKKRALIAVAHSILAVIYVLRKRGCNYQDLGSDYFEQINQDQLTRYYTKKLQRLGYTVILTTETA

SEQ ID NO: 284751 - protein, 300 aa, unidentified
MPNTLDGVKALLQWVERHSGCTAEHVRAALEPTGVYHEAATLALYEAGVRVYVVNPAQLRDLAKGHAVRTKTDAKDSLVLALCVAQVKKLIAWQPAPAEIRELRALMSRLDAVEGELRAELNRQEKAQIAADPALVLRSIAQAISFWQAERERLQQAIDEHIDRHPGLKSEQERLLSIPAVGQKTANRMLCMLHGGQFRSASQLAAYLGLVPVEHQSGTSIRGRPRLSKAGNARVRAALYMAAVTAIRHNPDVRTLYERLLSRGKAKMSALCAAMRKLVHICFGVFKNAQPYRPQIDQIA

SEQ ID NO: 284752 - protein, 413 aa, unidentified
MVKREKIELVKRQRIFVGIDIAGSKHRARFIDNMGEEQIKPLSFFNDREGLEKLERRVNEIPRIGDDIIFGLEPTGDYWKPVAQYLREKGYPVVLINPYHLKRTKEIIDNSQDKTDDKDSYLIADLTKQSKYFFPVIPEGVYAELREVSINWKRTSQQLARLKCHLSNFLAKYFPEYKGIFSDILGKTSLYILKHFPLPEDIERLGINKLYRVMKKVSKGSIKEGKIQLLYEKARTSIGLKGGSQTAKVLLKEVLSDIEILKKRKEKLTKMMDELLYQSGYLKNLLSIPGVGIVTGSLFLGEIGDPDNYERASQIEKMAGLNLVENSSGAMKGEKKISKRGRSTLRYVGHLVTTVAIGKSPEIKALYRYKVEECKKEKMKALTGLSAKMLRIMFAVCKNKTFYKHEEITRYFR

SEQ ID NO: 284753 - protein, 324 aa, unidentified
MELYGGIDIHKENLAGCIIDKDGNIKRQHIFPSSKKAIEKFLCNIPSSDITIAIEACGMWRGIHKNLTELGYKVKLANPKKTHDIAGNKKMDKIDAKTLADLTRTQYLPEVWIPDEQTLQYRDLTRHKANLTRLRIQVQGKIRGYLLRKGAKYNKLSTEKTLTILAEEDPDIKNLVQVYRCLKEEEREVMRRIKRISQNLKETTMLMSMPGIAEFSSLMILAEIGDIKRFPCAKELVSYAGLCSGIYQTGTTEHPVHNTAVNKWLKWILYECSGRAMMLDPRFQEYYYKIKEKKGFKTARRATARKMLTIIWHMLTNEETYHAS

SEQ ID NO: 284754 - protein, 346 aa, unidentified
MTRPSTAAVATLGIDIGKNVFHLIGLNERGAITLRQRLSRRQLEARLTNMPPCLVGMEACVGAHHLGRQLRALGHDVRLMAAKYVRPYSKGQKNDYRDAEAIAEAVQRPTMKFVAIKTVEQLDLQALHRVRERLVSQRTGIINQIRAFLLERGIAVRQGPRPLRSELPLILTMDKLSPRMLHVIEALAADWRRLDERIEALSSEIAALAEDDASCQRLMTVPGIGPIISSATVAAIGMGDLFSKGRDFGAWLGLVPKQMSTGGRPLLGRISKRGNRYLRVLFVQAARVVLRLRPETWERHGLKRWIEAAATRMHHNKLAIALANKLARIAWSVLHHGRDFQMSKLR

SEQ ID NO: 284755 - protein, 347 aa, unidentified
MGYFAGLDVSLEETAICIVDDAGHIVREVRAASEPEVLVAFFGASGMKMERVGLEACSQTAWLHTALTEAGIPAICIEARQAKAAMGAMPNKTDRNDARGIAQIMRAGWYRAVHVKSPSCRSWRALLTARRMVLNKRRDVENGIRALLREVGLKVGTPSRKDFPARVRELAVDDPVLGQLAESLLSVVEVMTREVERLTKHVLDEVRVEPTCRRLMTVPGVGPLTALAFRATIDQPARFRRSRDVGAHLGLTPRRYQSGETDVQGRISRCGDELARTALYEAAHSLLIRSTKWSALRAWGMNVAKRRGMARARVAVARKLAVILHRMWADGSEFRWGKQAAAPTAAA

SEQ ID NO: 284756 - protein, 392 aa, unidentified
MNRIVYIGMDVHTSNYTLCSLDPGYGVEKDNYFAEVQFTNDFIKNVVNYVTNLKKKLKDCEFVCGYEAGCLGYSTYKDLTKVGIKCVLMASSTMAVQKGGKKVKNDRRDARVIAQCLAYQTYKEVYVLSEHDEAVRGYLRMRDSHNKALKRIKQQIIAFCTGHGLFSPTKSNWTVAHLKWLKDLKFNDPVEQEILNEYLSSLTFLSDKIKAMDVRIEELASEKQYCENVKKLRCIKGIETNVALTLLAEIGDFNRFSKPTDFASYLGLIPGEQSSGDKVRGTGITKAGNSTLRRKLTESAKGYWRGRIGIKSATFKKLEKELPKEVTEYALKANTRLQRKFFNMTHVKGKNMNVAASACAREMACFVWGLITNHYDKAPAVPKTDEELLDLN

SEQ ID NO: 284757 - protein, 428 aa, unidentified
MNCNTQNAKIASITEKTLIVGIDVGSETHYARAFDWRNYEYTRKPLEFSNTEAGFQTFKAWMEDIAAKHGKTAVIPGMEPTGHYWFALGKFLQDSGMRPVHVNPHHVKKSKELDDNNPSKNDRKDPKTIAALVNEGRFSYPYIPAGIYAEIRSLSNLRFQTQEELTRIKNRTARWFAIYFPEYKDVYGDYKAVSGRMVLKEAPLPEDIHKLGAEGVNRIWRDAKLRGAGMKRAKALVSAAGHSVGSKEAPGAARMELKNLLNDMDVYTSRLEELFLKIEEKLKEIPYVDKLMGIKGIGLVTVSGFIAEVGDIGRFDNPKQLQKLAGYGIVANDSGKHNGESRISYRGRKRLRYVLYEAAISLIGKNAEFRAIHEYYRTRKENPLKKMQSVVAVACKVLRVFYTILTKGVDYDAGKLMGDIRRPRIQAA

SEQ ID NO: 284758 - protein, 411 aa, unidentified
MRIIRKRCLGLDLHKKQITAHLRVHRSSDQEPERTDIKFGTMPEELLRLRDWIVEHQVNDVVMESTGVYWMHVYELIEGVTTPAVVNASHVKKVPGRKTDVVDAQWLSELHAHGLLRLSFVPPKEIRELRLMARYRTKLVAMRTSARNRTIRMIELAGIKLSSVACDSFGKTGRALLDALAKGPVDASTVKEAAKAALRKKTAELEAAFRTPFSDSQREMLAMHLRAYDAIDAQVAQTECRLMDRAKPYAEAIDKLDAVPGINPLAAITVLAETGLDMSVYRDAHHLTSLAGLAPGNSISADKRRHIAMPKGNRYLKRICVQIAWAASRKKDSFLRSRFNRLSFRIGRNKAIVATARQILIIVYHLLAGDQQYHDLGPHFYDKRNKDRSIKRHVQKLEQLGFTVALKPTSE

SEQ ID NO: 284759 - protein, 400 aa, unidentified
MRFAGIDIASKTHMVAIVDQAGSVLRKATAFDEDAAGYQKLLALLGDPADLLVAMEATGHYGRNLFAALNHQGFRVALINPLRTRRFAEEDLKRAKNDSIDALGIACFAAQKRPEATPLLDDVTADLRELVRFYDRLAQDYGDRLRQLHRLVALCSPEFTRHVPALDTQRATAILRDYPTARAFDGDGCLTRLARIRYDRQHKIGERLARALVEAAKISVAAHHSAVYGSEVQYVCCDLDGLRHRLADLRSDIEARVAQHPVGSLLTTIRGLGAISVARILAAVGDPARLRHGAALAAYVGVVPRTNQSGLRRLDRTSLSPLGNARLRRALYMTTLAAVRLNPWLGAYYERLKARGKLPKVALLAAERKLLMAIYSVAKTRRPFELRLPQPPESSASSPS

SEQ ID NO: 284760 - protein, 353 aa, unidentified
MKVTMGVDVSKENLAVCLCRLTVDLAKEFEDSFEVSNDVPGFKKLIRWLDKEVVSREDLWIVMESTGIYHEAFVYYLYEAGFKVSVMQSGRVKRYAQSLDQRSKTDALDSRMLAMLGCERALPLWTPPDPVLRELKGLSRERSFLLKEKQIEQNRLHATEHAAYTNKRELKRYQQRLKLIAKQLEEIEKEMKVLINETSDLKRRIKHLESIPGISFVSAATVVGETLGFTGFTNAKQLTSYAGFDVVLKESGAYKGKTRISKKGNKNIRRALYMPAMTAVRCNPTLKKFYERVKPTKAKPMIALVAVERKLLILMYSIWKNEKDYDPKYEQKKTARTEVLAAQDRSNLALTSS

SEQ ID NO: 284761 - protein, 429 aa, unidentified
MTRSDDTPQRLTLVAIDIAKHYHDVLIEPPAPKRRFRLRVANSREEFEHLVGYLRGLKCSVVIGFEATGNYHRPLAYFLHRHGFELRLIPTLALARTREAMHNSWDKNDPKDAQVILHLLRTGLAQTWHDPMVNGINDVQELSKTHFQVTLARVRVWHKLRNHYFSLYFPEIDRFVRSDHSVWLIQLLVNFPTPASITALSEGEFQTRAWNLVGRKVSKRALLAEIYAAAKQSIGVPVALDSAAVAMFRLVLEQYLALNQLRERIAEQAAIRLDDNPDSQRLMTVPGIGPANALTIIAEAGDLRRFRHHRQFLNFCGLNLSTLQSGKSRGQSHISKYGNARLRTALWMAAQTAVRMRENSFRRKFDNYVRRNPFDADLRRKAYTAIAAKLARVIFGLIKSGTDYRPFFEHKFQVEEPSRASAVGAVSTP

SEQ ID NO: 284762 - protein, 344 aa, unidentified
MNSTTIAVDVAKSVFEVAVSEYPGQVRERHRLSRGRFSRFLAEHPPATVVMEACGSAHHWAREAQSRGHRVILVPPHAARPYVLRNKTDRTDAKGLLEAFRNDDLRPVPVKSETQQALAALHRLRSTWVATRTARLNTVRGILREFGVVIPTGAHHVVPHVRALLEDADAGVPGLLRVPLSEAIREIGELEERILAIERQLARTAEPALLIGRLRTIPGIGILTATALVAAVGDVQRFPSGRHFASYLGLTPREHSTGQRRHLGAISKQGDTYLRMLFIHGARSVLHHAKSKTAPATDRLRTWALQVERLRGHNKAAVALANKLARIAWAVWRSGNDFTAAAAV

SEQ ID NO: 284763 - protein, 357 aa, unidentified
MKRRVTDNRINFNGKLVNIGIDVHKMSWRVTAMVEGVVVKAVTIKPSYSVLKKVLFQFKGAQIRVAYEAGPAGFSLYDELTADHIECIVVPPSLIPIESGNRVKTDKKDSTKLAHYLENNLLKRVWVLSKEERAHRQLLRTRRQISHHRSNVMRQIKSLLLFHGIHSPYEGPQIWTKTFVKWLRSINGDEYIVHSLNVLVDLYEYLTQQVNELTEEVIKLARTEKYAHRVQLLTSIPGIGVLSAIELLVELQDVTRFRSADQLSAFIGVTPSQYSSGERVRMGSITHLGNHRVRTLLVESSWTLIRKDPALYKVYESIKKRRGAKRAIIAISRKLVMRMRRILLDGKPYKINHSLAA

SEQ ID NO: 284764 - protein, 406 aa, unidentified
MDVVNTHVCGLDVHKKSVVACVMTPETKEIRTFSTMTDDLMLLVDWVKSNGCTHVAMESTASFWKPIYNLLELEDIQVLVVNAKNIKNVPGRKTDVKDAEWIASLLRHGLLQGSFIPNRDQRELRELIRYRRSLIDERAREVNRVQKVLEGANIKLSSVASDVLGKSGRAMIEAMIAGEENPELLSELAQRRLKSKKADLQRALNGLMGNHQKLMLAAQLRHIDYLDEEIGRLDEEIKRRMLPFEEDLELLDTIPGVARRTAETIVAEIGTNMEQFPSAAHLCSWAGLCPGQHESAGKRKSGKTRKGNKKLRSALVEAARAAGRTKNTYLSSQYHRIAARRGANRAAVAVAHSILMIAYYILKRRQPYMELGATYYEERKRDTIIRQSLKKLESLGLKVTVEFVAS

SEQ ID NO: 284765 - protein, 459 aa, unidentified
MSQRKKTKGKSKGGARMLPVLHPDAAGIDVGAEEVFVAVPPDCATEPVRSFETFTRDLYELADWLQSCGIRSVAMESTGVYWIPLFQILETRGIEVFLVNAQHVKNVPGRKSDVSDCQWLQYLHSVGLLKASFRPPDQICVVRSLWRHRESLVQMAAEHTMHMQKALSQMNLQLHHVLSDITGLSGMRILDAILAGERDPVKLAALCHGRVRSPRATVAKSLEGDYRAEHLFALRQSLAGFRFYRKLIGEVDQELEIVMRQLPRAEGAPDQMPPRTKKCFYQKAGNEPAFDLKAELFRISGVDLTDVPGISTITAHTILIEVGPDLSRFRNASAFASWLGLCPDQKVSGGKVLYTGSRKVKSRVAIALRLGAQCLYHAKNYLGEYYRKMKWRLGAPQALTATAHKLARIVFHMLLTKEPYNESVLVKWDQQANMRAESRLRTQAAKLGFQLAPAAEPEA

SEQ ID NO: 284766 - protein, 343 aa, unidentified
MQTITTIGLDIAKSVFQVHGVDAGGQVVIRRQLKRRYVLAFFQKLPPCLVGIEACASSHHWSRELKALGHNVRLIPPAYVKPYVKRQKNDAADAEAICEAVTRANMRFVETKTLEQQSGMVLHRTRHLCMRQQISVINAIRAHFAEFGIVAAVGRNGVEELLDIVADPSDKRVPEIARTCLAVLGTQLRRLKEQILEFDRMIRAWHRSSEMSMRLDEAPGVGPVLATALVATVADPNAFRSGRNFSAWIGLVPKQHSSGGKNRLGSISKQGDRYLRGLFVIGALAVIRYAKIHGTKHRPWLTALLARKPAKVAAIALANKMARMVWVMMARGERYKQPVALAA

SEQ ID NO: 284767 - protein, 364 aa, unidentified
MQYVSNNTELSSHEETRCQFNGSTGVIKLGIDVHQQFYTVVVQEGGSNPKPPQRFRKEAFLHWAARLKQLGAAVHAVYEACGFGFGLQRQLAALGIACHVVCPQKLDEHNRRVKTDSLDAKALCLKLDRFVQGNQDALALVRVPTEQEEQLRAIHRQREQLVKARKQLEAQGRSLIVNHGIEPVQSWWKLRTFAALPVPAWLKELLANSQPILIALQEKIRVLSLQLQSAAGPDQPRGLGAMSSVVIDREIGNWHRFRNRRQVGSYTGLCPGEHSSGNTRLQSCVTKHGNPRLRAALVELAWRLVRFQPNYRPIVKWNEVLRKGALATGAARKKAIVAVARQLAVDLWRIRTGRVRAETLGLIN

SEQ ID NO: 284768 - protein, 425 aa, unidentified
MPAKTLTHYIGLDVHKDSIAVAIAVENGELRFYGKIGGKAADLDKLIKKLAHPEVELRFCYEAGPTGYVIYRHLKKLGYDCRVVAPSLIPRKASDRVKTDRRDSQTLARLFRAGELTFVHVPLEEDEAVRDLVRARLAAVKDQRRARQRVKGFLLRNGFVYEGKGSWGPAHLNYLARMKMPTAAQQIAFEEYKDAVTVTTDRVQRLSDALEKQLETWRWKNVVLALMTLRGIQTISAMTLIAELGDLSRFDNPNQLMSYLGLVPSEDTTGDSRKLSGITKAGNEPSRRALIEAAHHYRLPARLTRTLQERQHNQTQEVRAIAWKAQGRLHGRYCNLASKGKKTQIIVTAIARELVGFVWAIACTAMGRPPLPKADPPVKRSENSNSKTANKVYRLNPNTKYQPAKNQPGSATNPKPQSEEACVVK

SEQ ID NO: 284769 - protein, 341 aa, unidentified
MSVATVGIDLAKNVFAIHGVDASGKAVLVKPRVMRDQLVALIAQLPPCVIGMEACSGAHHWARIFQQYGHTVKLMAPKLVAPYRMSGKQGKNDAADAAAICEAVTRPSMRFVPVKDEHQQATLCLHRTRQGFVQERTATYNRLRGLLSEFGIVLPQSPEKLRSNIAARLDALPGWANRCIRDMLEHVDRLDERLEEYDRAIGTLAREDERSRRLMQLRGVGPTTASALLATLGAARDFKNGRQVAAWFGLTPSQYSSGGKARLGGITKAGDSYVRTLLVSGARAVMSNLRDKQDRFSRWVRCLVERRGYWRAAIAIAAKNARMAWAVLRYGDDFKYEPVNA

SEQ ID NO: 284770 - protein, 350 aa, unidentified
MAIVGGFDVHRKQITFDYVDNDGLVQWGQIRPATRKTLRSWLAKHCPEGAGEFALEGCTGWRYVSEELTAAGVGVHLGDPAEIAALRGPKKRAKTDRADARLLRTLLVEGRFPESWIPPAHVAEIRALGRLYCALMEERRGWQQRIHAQLFHQGCPPVKALLSEPGREVLVAAELSAAGRQYVDTALRRIDELTAEIDPLRMQLVRFARRQSGCGVLQRHYGVGWLCAAIIWAEVGDPRRFSSSDQLVRFAGLDVTVYSSDGKRAPGHLSRQGSPELRWAAFEAAKCAARRGSPDYAYYHNLAAKHEGRNGKNPTLAVERKILRRCYHTLRELGDAVLAMPIAEAEEVAA

SEQ ID NO: 284771 - protein, 401 aa, unidentified
MGAISNHDMVDVFVGVDVGKGEHHAVALGKSGERFFDKALPNDESRMRELIKELREHGTLLFVVDQPSTIGALPVAVARDEGVLVGYLPGLAMRRIADLHPGEAKTDARDAAIIAEAARSMSHALRSIDLVDERVGELSTLCGFDDDLAGQITAVINRIRGLLTQIHPALERVLGPHIDHPAIIDVLEHYPSPEQLRALGTTRLGNRLNKLPPRMGRKLASEIAAALSEQTVVVLGTGAAVMVLPRLAEQLRTLRRQRDEVAVEVERLVEAHPLHVVLMSMPGVGVRTSARIITELSGKTFATSGHLAAYAGLAPVTRRSGSSIRGEHPSRRGNRVLKRALFLSAFAALKDPDFRVYYDRKRAQGKRHNQAIIALARRRCDVMFAMMRDGALYQVPGSRAA

SEQ ID NO: 284772 - protein, 343 aa, unidentified
MQTVATIGLDIAKSVFQVHGVDAAGQMVIRRQLKRRQVLVFFAKLPPCLIGIEACASSHYWARELQAVGHTVRLIPPAYVKPYVKRQKNDAADAEAICEAVTRPNMRFVPIKTIEQQGCLVLHRTRHLLVRQQTATINSIRAHLAEFGIVAPVGRRGVEHLLEVVADANDTQVPEVARACVAALGVQLQQLKAQILEFDRRILAWHRSSEASRRLNHIPGVGPLLATALVASIADPKAFRSGRDFSAWIGLVPKQNSSGGKDKLGNISKRGDRYLRSLFTAGALAVIRYAKIHGTKHRPWLVALLARRPTKVAAIALANKLARIAWALMTKGSRYRQPAALRV

SEQ ID NO: 284773 - protein, 370 aa, unidentified
MVERFHGIDRHRRSSTVSVLNREGVEEKFVSVIYDFNEYVQTLGPEDVVVMETGAGSFYWADKIEAHGAQCFIIDPYRFRIIKDSWNKTDKRDSRNMSKALWVYMVTGEFGLPLVYKPSALIRELRKLYAQYQVLNKQIRVYKNNIQSVLADNGVVLPRVEKNHLLSEKYGKQMLEELDVSEASNISIEMNLELLWHVLEKKEELVMEILRIGEPLKDQVELLITIRGITPLTALAFLADVGDIRRFKTLRKMNAYLGLVPMLRASGGKSWSGHINRASRKLTRTILTQSLIQVTDASPYFRNYYDDMKSRRGAGRSRIALIRKLCGIMRRMLLDGKAFKYAEVTLYTRKQKQYERTLNQIREDRESKSA

SEQ ID NO: 284774 - protein, 390 aa, unidentified
MKNIIYIGLDVHKEKIQACAFLAAYDFGEDRVLANIELGGNYREIIKFASTLKKKFGKETRFVCGYEAGCLGYSLCRNLQGCDIECHIMAPTTMSKEPGVRIKTDRRDAEMIARCLAYNTYKGVHLLDEEDESVRDYIRMRDDFKQMLKGVKQKILALLLRLGIRCDTCKMPWTQKHLQWLKSVDMGKGLNRETLDEYLKELDHLKDRIDNFDTRIHELCDTERYKENVKKLICFPGIKEHTALSFISEIGDFTRFTKAKSFAAFLGLVPGEQSSGSKVHRTSLTKSGNNHLRRLTTEVAQAAIRSNPSYKSKALKARQEGAPEEVIAYADKARDRIIRKYKKMIRGEDILGGHKAHNVVVAAVAREMSCFICGMMNGWYNGADSDKLQI

SEQ ID NO: 284775 - protein, 494 aa, unidentified
MRFTRRQPREHSPRSESEQSPPRVGAIATGGEYMKSDRKKGGKKNGVLPTTLPAIQPKVAGIDVGSMQHWVCGPAREDGKPNVKVFTTTTDQLNQLADWLIEQGVESAAMESTYVYWIPIYELLELRGIRVLLVNARQLQNVPGRKTDVSDCQWLQLLHSCGLLRGSFRPVGSIARLRALQRQLANLVEERTRCVQWMQKALDQMNVQVHRALADITGVTGMAIVRDIVKGERDPAKLAMHRHPRCHKPVEEIAKYLTGTWREEHLFNLASAVRLFDAIEAEIVSYDARLMKELEVLQPAERQQQQTPSHPNPAKEKAIKNRGEQASRTALWRFSGVDLTRIDGISAGAAQVILTEVGFDLNAFPSEHHFISWLRLCPRTPVSGGKPLKKRRNGQGANRIAGVLRMAATALQRSKSALGASFRRIARYKGGAVAVFATARQLARLVFRTLRFGHAYVDIGESAYEQQFHLRRLAALTENAKQLGFSLVSNVAKT

SEQ ID NO: 284776 - protein, 337 aa, unidentified
MKKPTYFIGVDVSKKTVDLTIFIEGKPYHKVIKNTRPSIQKYVTDLIKNHSFSEADIAVGIENTGNYSLPSLEVFAQTDVKLYLLSPLHISKSMGLIRGKTDCIDSMRIAQFLTKNYNDLAEYTPKREVITELALLLSRRSKLQKLIKSEKSTVEALCCVKKGNATRLIIAQSKADVKYLRKQIKRIEEEILLLIKEDQSLSRQSSLLRSIPGVGKVLTWYLLVKTNEFKSIKAPRKLACFAGVAPFEHSSGSSVRGRTKVSVFADKMLKKILHMAAMRASTLEGEMRVYYLRKVKEGKNKMSVLNALRNKLIHRVIAVINRNQPYQKKYQNHLVLS

SEQ ID NO: 284777 - protein, 368 aa, unidentified
MNSVKFIGMDVHKNSITIAIADQDSRGPARSYGTIRNDLDALNKFCRKMVSTASHLNFVYEAGPCGYNIYRHLTRKGFDCMVAAPSMIPKKSGDRIKNDKRDAKMLARLHRAGELTAVYVPDCEDEAMRDLTRARGDAVNACRKTKQQLKAFLLRHAIVYNGKSSWSKVYFNWLSDIAMAHPAQQVALQEYIDAVRETMARVNRLTDQIRQLVPGWRLGTVAAALQAARGVSMIVAVTILSELGDLSRFENPPQLMAYLGLVPSENSTGNKVKRGGITKTGNGHVRKVLVEAAWAYRMKPRVSRILLKRQQHVAKEVRRISWKAQLRLCTRFRRMAARGKPQQVVATAIARELSGFLWAMAKQVQPVT

SEQ ID NO: 284778 - protein, 315 aa, unidentified
MEAMIERCAGLDVHQETVVACVLYGSLDKKPQKAIETFKTTTKGLLSLSDWLATFKVTDVVMESTGVYWKPVWNILEGTFHLILANAKHVKNVPGRKTDVKDAEWLAQLLRCGLIEGNFVPPEDIRDLRDLTRYRSKLIGHRTSERNRIHKILQDANIKLTSVFTDIFGVSGRRILAAIINGEKIEAKDLEKMVDGRIRASIDDIAEAINGRIRRHHRDMLRYHWEHMAYLEKNIDDIEEQIEQLLTPYRKEMELIKTIPGVNKDSSAVFIAEMGVDMSEFKSAKHLASWAGVSPGNYESAGKKKQVKPHTEIKA

SEQ ID NO: 284779 - protein, 467 aa, unidentified
MAVRRTRTRSRSRAPQFVQKPHGVIHPRVQQVGPEHFGIVTVDGAKARSQFMLCDCYGHVRIPPTEVPHNHNALEAAVAQVRQALVTYDLRDVLVAIERTGRYHQVVQRVFRAAGFEVRIVHPFATKQFRQAQDPGNKTDDTDLVALQRAAINGFALTEASLDPAWQEWQLLIRHRRDLVFKTSTLCRQIGEHLDAAWPGYAARFGMLWDSAIPWCLLRQFESAAALHRAGLAGLRTCLRAHGIQFKQPTLVAVLEWAAQAAPGATPTDLHRRLALALDDERQQKAREIQALERELAGRLARTPYLLLLSFPGVNVVSAADFAGEMGPIGNYASARSITGRAGLYPSRYQSDRVDLANGPLVRCANRRLRAAILGIADNLIRSNHHFRHLAHTWQAAGKDPRLTHVKIGVRFCRIAYQIVAGRQLFRHPSVQQRSYVLDQLIAFHREHETPMAQTLADLMSFDDQVR

SEQ ID NO: 284780 - protein, 392 aa, unidentified
MIVGVDLAKKVFQVCYRIPGTKKIINHQLTRAKFREFLMDPNMPRMLVAMEACGSSHYWGNFCLKYHHEPMIIPAETVHGYQLGNKDDANDARCIWQVAFMPGVKTVRVRTPDNMAMMALLRFRETLKKSKNMLVSGVRAMLYEMGKATPEGAEAVMSKLKEFIEELDREEPDSLRSEVLKLLATNACNRLKAVISSEQTIDDFITGHAGSDKDCRLLMTIPFIGPVAALAIATVMACPDNFGNGRQFADYCGFAPCHTGTGGKVAVLGLPAKGNRCLKRVLYEPAVGMYTRAKLSLPGDDDVPEALSDWIMSMSDRKPMKKVVCAIANKLCRISWAVLKSGSPYEQKKSSLIPPSVQGPDGKVRTCKYGKKSDAKKLKEAIAAAEAVAMRA

SEQ ID NO: 284781 - protein, 350 aa, unidentified
MIIIGVDFHPEFQQIASVDTDTGEFQEKRLTHREEAEKIYRALACAGQKVRVGMEASGHARWFERLLAELQIELLIGDAAEIRTKRVRKQKTDRQDAQLILSLLLEDRFPRIWVPSWENRDLRQLLWHRHRMVQARTRIMNQLQAVALNEGLRCKKRLWREHGREQLESFRLAPWASRRRRDLLELLDRLNMTIAELSQAIQQEVEKCPEARRLMTHPGVGPLTALAFVLIIGEADRFQCGKQVASYLGLVPLEDSSGNRRRLGHITKQGSSMLRFLLVEAAQVTARSLPQWRSKYLHLMMRRGRKTAKVAMARRLAVHLYWMMRQGWDYQQWIKFGSHAGQLGNRHGVQ

SEQ ID NO: 284782 - protein, 339 aa, unidentified
MKVSTLGIDLAKNVFQLHGVGCNGQTVLKKKLTRDKFLPFLMQLEPCLIGMEACASSHHFARVLRQYGHEVKLIPPQYVKPYVKTNKTDAADAEAICEAVARPNMRFVQIKTAEQQAILVLHTERNILIRERTACANSMRTILAEFGIIMPRTLSQLYKKIPEILEEYDNELSPFVRCSVARQLEHLQGVEDQITLIEQELSRWAKTQPACQRVMKIPGVGLMTATYLVASVGNGQQFHSAKQFAAWLGLVPREFSSGGKQRLGRISKRGERYFRYLLVHGARAVAAVIERHKDNMPWLYRLLNKKAYNVAVVAQANKTARILWSMLVHHTEYRTLSVV

SEQ ID NO: 284783 - protein, 421 aa, unidentified
MEPIVERCCGLDVHQATVVACMLVGGAHQKPTKEVRRFGTKTRELMELRDWLRNNGCTHVGMEATGIYWKPVHAVLEDDFEVVVGNAHHIKNVPGRKTDVKDSEWIADLLRHGLITKSFVPPKPIRELRDLLRYRRKLVESRSAERNRLQKLLESANIKLASVASDVFGVSGMAMLKALVRGDATPQEMAQLAKKRLRQKLAELELALEGKVEEHHRFVLDMQLCRLEQLDQHIAKLDERVESKLAPYREPYTRLMAIPGVDRILAAVIVAEVGTDMTVFKSAAHLAAWAGVCPGNNESAGKSKRGQTRRGNVYLMTALVEAAHGASRTKGSFLKDKFFRLKARCGYQRAAVAIAHKILTAVHVMLSTGAEYRDLGAAYLDSIDARRVTGNLIRRLERLGYDVAISRRPVESPQLHTEGLG

SEQ ID NO: 284784 - protein, 494 aa, unidentified
MGKEKTGAAGPTKAGKTAAMANAYRQRRRKVQAKAAAQAEAEVRRVEGLSVLNVHAAGIDIGSRSHWVCVGVSADKDAALIREFSAYTEGLHDIVAYLRQHEVTTVAMESTGIYWIALYELLEANGFEVLLVDPSYTRQVKGRPKTDRLDCQWIYRLHSVGLLAAAFRPDEKTCQLRSYLRQRANVIRYAGRHIQHMEKALEQMNLKLTETISDITGTTGQAIIKAILRGTRDPVKLAKYRDRRIKASEEQIAQALTGSYRDEHLCALKLAFEAWQFYQKQLDQIDAQIEQQLSRMKQDRALPLLKPHKRSGGRKPNHPRFDVRTALYYAVGIDLTEIEGIEEMTALTIVSEIGIEMSQFATVHHFCSWLGLCPLLKKTGGRVKSSRTRPGVNRAAVAFRLAANGLHASKGAIGAFLRRKKAHLGAPKAITAAAHKLARIVYLALKHGMTYVRQTQEEHETRVREQQLKSLHKKARALGMEVIEKPAPATPMTA

SEQ ID NO: 284785 - protein, 349 aa, unidentified
MDKITTIGLDLAKNIFQLHGVDGSDEVIVRKPLRRGQMLTFFGKLSPCRIGMEACATAHHWARTLAELGHDVRLIPPAYVKPYLRRQKNDTADAAAICEAVTRPSMRFVPVKSEEQQATLMLHSARELLVSQRTALINALRGHFAEFGIVVVQGARNVRLLVAIIHDENNLDLSASARLALLPLARALNDIDAQITGLSKSILVAHRSNAVSVRLASIPGIGPITASSLAASIADAGVYKSGRECAAYLGLVPRQHSTGGKPKLGRITKMGNRRLRKLLVIGAHAVLYSIKSGKTNTPLANWARSLLAKKPFKLVAVALANKMARIAWAIMTRNTVYQPLFKGTASQVA

SEQ ID NO: 284786 - protein, 417 aa, unidentified
MSNPLLVGVDVHRKTNTVCLMDGQGQEVAPRFTVENNRPGTEDFVRQVAAAVAAGDYDAIHIAAEATGLYWWHFFQTLAQDPFLNQWPVELYPLNPRLTANFKKTYIDLDKTDPIDAFVIADRLRLGRDLPAPFRYEERYFPLRCLTRYRFHVVHNLAREKAYCLAIIYLKASEYTRQDKRPFSNIFGAASRAILQEFASIEEIAAIPFDELVEFIDLKGKRRFPDPTENARKLRLVAQDSYPLPETLARPVNLILRMSLKHISFLERQEKRLASAIAERMETIPHTLDTIPGFGPVFSGGIIAEIGNLARFDYHQAKVAKYAGFKWRKIGSADFEAEETRLTRTGNRYLRYYFCEAANQVRMRDPEYAAYYERKYREVRKHQHKRAIVLTARKLVRLVVRLLTTNQPYRPRRRRQR

SEQ ID NO: 284787 - protein, 366 aa, unidentified
MKKISTVAMEGIQIFKENQLTIGLDLGDRTSYYCVLNEVGEVIWEDKLPTTPRGIQEVFRRTPRSRIVLETGTHSPWVSRQLSELGHEVIVAHARNVQLIRESSRKDDRLDARTLARLARIDPGLLSPVRHRSAKAQIHLTVIRARATLVSARTALVNAARGLTKSYGARLPKCGSEQMSREIAQGLSEELREALDPLLAEIESLNERIAEYDRRIAKVAKEVYPQVALLQQVKGVGPLIALTYILTLDDPHRFRRSRDAGCFLGLRPGRRNSGMSEPQMHISKEGDGYLRTLLVQGAHYILGPFGQDSDLRRWGLKLAKRGGKNAKKRAVVAVARKLAVLLHKLWVSGEVYEPLRNNHTVVAAVA

SEQ ID NO: 284788 - protein, 441 aa, unidentified
MSSVVVPSASCLPGNPGSRVTRTFAHRQDLIPNAYHFRLPHRPRRRNRHPHRYPHCCRHFGHRPAHRHRHLPATNPGYVAISEFMATYGVTTVGVDGTSSYGAGLTRHLRTQKYSVVEVLRPTRAVRRRDGKSDPVDAVAAARQVLTGEALSIPKDTSGPVESLRGLQITRRQLVMTAAKLMTTIKSLLVTAPDEIRRRYSAMSTLVMVEALSRCRPSADLADPRNGVLLALKTLATTYRDLQKQGTQLEKHISILVEMINPHVTSIFGCGSVVAADLIVSVGDNPGRIHSEAALAHLCGVAPIPASSGRTHRHRLNRGGDRRANSALHRIALVRMHHDQRTRDYVAKRTKEGLSKKEILRCLKRAIVREVYRVLCLGQAVLPTGQVEVDELKARRIERQLSQAQVAEKLGCAPARISDIETGKRPLPELRLAYEELLKSA

SEQ ID NO: 284789 - protein, 381 aa, unidentified
MTTILQEKTIIKKEEAVLFIAFELSNSKWKLCFSNGERRRQKTIDARDLVQLSLEIPKAKEKFGYETCRIISCYEAGRDGFWLHRYLKKSGIENIVIDSSSIEVNRRARRAKTDRIDVESLICLLERYGRGEKPFSVVNVPGAEEEDQRRLHRERERLIKERIGHSNRISSLLILHGIKVELGKVDFLKQLETLRTGDGNYLGSGLKEELKRQYERYELTNKQIKGLEVWQKELIERSKKEETESESLKKVVQLMELKSIGPISAWVMVMEGLGWRQYKNRKEVAASVGLTPTPYSSGDSQREQGISKSGNRRMRTLLIELSWMWLRNQPDSKLSLWFNERFGGGGKRMRRIGIVAMARRLFIDLWRYLEHGLIPEGAVLK

SEQ ID NO: 284790 - protein, 412 aa, unidentified
MDVVVERCAGLDVHRDTVVATTRVPGQRRGSRRTETRTFETTIAGLERLADWLGEQAVTLVGMEATGVYWKPVFAVLETRVECWLLNAQHLHNVPGRKTDVADSAWIAQLVEHGLVRPSFVPPPLVRDLRDLTRLRTAITQERTRAIQRLEKVMQDAGIKLTSVASQAYSKTARAILSALLAGVCDPVELAGLAKGRLRSKNARLVEALANRFRVTHHGVLVARLLAHIDVLDEQLVALDHEITALVAPVGDLVELICTIPGVSTNTAHVLLAECGWDMSVFPTAAHLASWAGICPGNNASGGKRFSGATRPGSRWLRKALTQAAQAAARSKGTYLAAHHAQIRGRRGHAKAIGATRHDILVAFWHIVRDGVPFQELGPDWAARRFSVEHRANRLVRQLQALGMTVTIEPAP

SEQ ID NO: 284791 - protein, 459 aa, unidentified
MMEQALAQRNRSIKLKPGKSRAAALTITHPNAAGVDIGSAAHFVAVPADRDDEPVREFPSFTVDLNAMADWLKACGVDTIAMESTGVYWIPLFELLESRGFTVLLVNARHVKNVSGRKSDVLDCQWLQQLMTYGLLRGAFRPADQVCVLRSLWRQRGMLLRSQARHVQHLQKALTQMNVQLANVISDVVGETGQKILRAIVAGERDGQVLGSMKNARIHASVDEIAKSLHGNWRAEHLFALKQALAAFDFVGTQLTECDREIEIQLQCLQIHDGEPAKGKQRGRARNAPKFDLRLQLFKMCGVDLTRIDGIDVTTALAVISETGADMSRFPSVGHFASWMGLCPGTKITGGRVMSGNTKRCANRAAQALRLAAAALRTSHSALGAYFRRMCSRMDKPKAITAAAHKRARLIYTMLTRGEEYTDQGQDYYEERYRERALRQLSARAQKMGMRLIAAEQPA

SEQ ID NO: 284792 - protein, 398 aa, unidentified
MTESSDYESVQVFIGVDVGKDTHHAVAINRSGKRLFDKALPNDENKLRSLISDLKQHGQILLVVDQPATIGALPVAVARSEGVLVGYLPGLAMRRIADLHAGEAKTDARDAAIIAEAARTLPHALRTLKLADEQIAELSMLCGFDDDLAAQTTQASNRIRGLLTQIHPAPERVLGPRLEHPAVLDLLQRYPSPEKLASLGEKKLAAQLCKLAPRLGKRLAADIAQALAEQTVVVPGTNAAAVVLPRLALQLITLRKQRDEVALEVEQRVLAHPLYPALTSMPGVGVRTAARLLTEVACRAFASAAHLAAYAGLAPVTRRSGSSIRGEHPSRRGNKALKRALFLSAFAALRDPLSRAYYTRKMSQGKRHNQVLIALARRRCDVLFAMMRDGTFYTPQGS

SEQ ID NO: 284793 - protein, 375 aa, unidentified
MSKIRFLGLDVHAGTIAMAVAEPSGEVRSLGVIPNRLESIRKAVAKLGPVKQLKACYEAGPTGYVLDWQLTQLGVSCEVIAPSLVPAKAGDRVKTDRRDAEKLARCYRNGDLTAVWVPDAAHEALRDLVRAREDAKQDQQRARQRLGKFLLRHRAQAPDEVKKKWTAKYMTWLNTHVQFEQPALQATRLDYVHEVHHAGERIARLEKAIDEAVAIAPEQMRSVIAALQALRGVAQMTAVTMVAETGSLSRFQNPRQLMSYSGLVSSEYSSGNRIQRGGITKTGNAHLRRVMVEAAWAYQHKPWVGGFLLKRQQGLEQEIKDIAWKAQWRLCTRYKKLAAAGKNKPQIVTAIARELLGFAWAIAVKTEPQPQRQAA

SEQ ID NO: 284794 - protein, 342 aa, unidentified
MEKVSIIGLDLAKRSFQAHGALAEGGVAFRKKLSREKVLAFFAEQPRCVVAMEACGSAHHWGRAIRDLGHEVRLIPPAYVKPFVKRQKNDAADAEAIAEAASRPTMRFVAVKTQEQQGRAMLFRTRDLLVRQRTQLINALRGHLSEHGVVAAQGPANVKVLAEAVEDQGTSLPLLVVELARVFLDQIEGLSKRISELEKVTVHEAACGETTRRLQTMPGVGPITALAIETFAPPMDVFKRGRDFAAWLGLVPRQHSTGGKQVLGKISKMGQRDIRRLLIIGAMAVVRSALRKGAPEGSWLQRMLARKPKMLVAIALANKMARSIWAMLAKKQNFRVPVVAAS

SEQ ID NO: 284795 - protein, 340 aa, unidentified
MKDIKVLGIDLAKNVFQLHGTNAKGKCVLRKRLSREKLAEFVAQINPCIIGIEACMSAHYWGRVFQNMGHTVRMMSPQFVKPYVLSNKNDANDAKGIAEAVTRPDMKFVAVKNIEQQDILLLHRARELVIKQRTAQANQIRGLLMEYGIIIPQGIYKIKMLPEILEVNKDKLTMRSIAIFSQLYEQFKIYDDQVIIYDKQIEQIAEQNSVCKEIMKIDGIGSITASAITATVSDAKIFKNGREMAAWLGLVPKQNSSGNKVKLSGISKRGDSYVRKLLVHGARSVVNICEKKEDKKSIWIADKKVRRGYNKASVALANKNARVIWAIMATGECYRKPIVN

SEQ ID NO: 284796 - protein, 344 aa, unidentified
MSNHTLVSVDVAKNVLEVAVSYDAGRVSQRKRLSRNQFLKFCVQQKTATFLLEACSSSHYWGRRLQEMGHQVAPLPPHAARPYVTRNKTDRTDAKGLLEAYRNEDIKPVPVKSVEQHAIAAIHRMRSGWKAERTARINCVRGILREFGIILPAGARAVVPKVQELLREPDTPIPGILRPTLDEACDEILELERRSKHAEQQLTVFARSNPQVSRLCSVPGVGLLSATALVAFVGGVQRFRTARHFASYLGITPRERSSGSKRILGRISKRGDVYLRMLLIHGARAVLLSAKRMKHPDPLRTWALSVEARRGHNKAAVAVANKMARIVWAVWLRQDEYNATAKAA

SEQ ID NO: 284797 - protein, 423 aa, unidentified
MTPTQVADFHAAYQHFAGFDWAKDQHDVVVVDHRGQVLEQFQFEDSAQGWCTLRQRIAPYANLAVAIETSCGPAVERLLQIGVAVFPLQPKASARYRERKAPSGVKDNVVDAWALADALRLDGHTWRRLKPEHPLIQELRLLCRDEVALIEARTALVNQLQQAIYEYFPAAREAFDDWTMPATWEFVIQFPTPEQLKRAGRKRWDKFLGQHGLKRPETYEKRLEIFTRADQFRGTAPVTAAKSRLAVAIARQLVTLQEQLEQYRSRIRELFEQHPDHELFGSLPGLGDKLAPRMLAECGDDRERFAAPQELQCVGGTAPVSFSSGQMHCVRLRRACNKHLRAAVHLWANLSRPLCAWAEAYYQQKRSEKMSHARALRCLGQRWLKILWKMWQTRTPYDEALHTLNQTRHGSWVVALLPSTAEA

SEQ ID NO: 284798 - protein, 451 aa, unidentified
MEKKKMELDIINPNCAGIDVGSKSHYVAVGQASEDVKEFGVYADDLVAICLHLLGFGINSVAMESTGNYWQNLYVELERHGIEVTLCNGKFTKNIKGKKTDVQDCQWIQKLHSIGLLTSSFLPDQITEQLRTYCRQRTNMLALAAEASHKMQKYLKLLNFRLDVVVNDICGLTGLAIIADICKGNLDPQKLAELRHGNCRKSEEEIAKALKGNNRVDFLFGLKQEYESYLFYQKQIEGCDKQINSFLKNQINTNPDKKKLQTDDKKHKRINKNTVKGIDLNQASFQYFGGVDLMKIEGLSHSTILTIMSEVGPDGFHKFKTAKEFSSWLRLAPNNKISGGKVLSSKTPKGSNRLKIALRNAANAIGNLKHTHLSDFFRRVAYRKGRTTAVSATARKLAVIIWNMITKKIEYQPPTEYLFVDQKRKLKLVNRIKKQINTFAITNQELGFVTA

SEQ ID NO: 284799 - protein, 352 aa, unidentified
MSDYYVGLDVHKASICIAVLNADGKLVMESVVETSAATILDFLIGLRGHVEVTFEEGTHAAWLYDVLKRTTAKVIVCNPRKNRLLQDGNKSDKVDARKLAQLLRAGLLSPVYHGEHGVRDLKELVRSYEYLVEDSTRVKNRIKSLYRSRAITCAGADVYKPRRREEWLGKLPEAGVRARAARLYSELDHLTGLRREARHAMLVECRRHAASKILRQVPTLGTVRVAQLIAAVATPHRFRSKRQFWSYCGLAVRTRSSADHHFVGGDLRRSAKATTRGLTQDHNRTLKYVFKGAALTASRYEPFKAWYAGLLARGLRPELARVTVARKIAAITLAIWKKGEAFEVDRLIKHAA

SEQ ID NO: 284800 - protein, 357 aa, unidentified
MESQEVKYVGVDCGKKSIEVVRINSENSLERRQFSTTESGINNLLQWLTLNDIVGLEAGSQSFRIAKSILNKGVQVIVLNPGNLATIYQSLKKTDKEDSLKIARLIQRHPIEELPTVPIPNDEEEDNRRLCSEHENWTKQLTQGKNRLHSLFTQAGLTQITKKHLRTKVSREASVTLLSDRYKKEAERILKVLDLVELNLKLIEEEIQETLKKNKAYVQTIMSMPGIGMITSLAIMSYMGDCKRFSSAKQAAYYAGLVPRVDISGDTVRYGRIINRGCHSIRRVIVQAAWSLVRCQHGGKVKEFYQRLYLKKGAKKSIIATSRKMIEVLYVMIRTGKLFDSMPENILNRKLTQCGLM

SEQ ID NO: 284801 - protein, 402 aa, unidentified
MNAVGIDVSKGKSMVAIMRPFGEIVSAPFEIKHTASDIHSLVELINSVEGESRIVMEHTGRYYEVLAHQLSETNLFVSAINPKLIKDFDNDSLRKVKSDKADAVKIARYALDKWQNLKQYSVMDELRNQLKTMNRQFGFYMKHKTAMKNNLIGILDQTYPGVNTYFDSPARSDGSQKWVDFASTYWHVDCVRKMSLNAFIDHYQNWCKRKKYNFSQSKAEEIYGKAKELVPVLPKDDITKLIIKQAVNQLNSASTTIESLRTLMNETASQLPEYPVVMAMKGVGTSLGPQLMAEIGDVSRFTHKGAITAFAGVDPGVNESGSYEQKSVPTSKRGSSDLRKTLFQVMDVLIKTHPQDDPVYQFIDKKRAQGKPYYVYMTAGANKFLRIYYGRVKEYLSSLPES

SEQ ID NO: 284802 - protein, 367 aa, unidentified
MKKISTATAHAIRKVESQRLTIGLDLGDRWSWYCVLDETGEVLLEQKLSTIPKTMREVFGEMPRSRIALETGMHSPWVSRLLSELGHEVIVAHARKVRLIGESRRKDDRLDARTLARLARIDPQLLAPVKHRSAKAQADLTVIRARAGLVRARTSLINTARGLTKSYGERLRGCNSRNMKPEKASGLSPELQAVLEPLLAGIESLSEQIREYNEQIEHLAQESYPQVALLKQVKGVGTLIALTYLLTLEDAHRFRKSRDVCCYLGLQPGRRNSGQSEPQLHISKEGDPYLRTLLVQGAHHILGPFGADSDLRRWGLKLAERGGKNGKKRAIVATARKLAVLLHRLWVSGEVYEPLRNSSQAMLPAAA

SEQ ID NO: 284803 - protein, 351 aa, unidentified
MPRRSTVRAVSTIGIDMGKNTLHMVGLDSLGAIVLRERVSRGRIKSRLANLPPCLIGIEAGMATHYVARELAALGHDVKQVPPAYAKPFRQGHKNDFRDALAVAEAVQRPTTRFVPPKSNEQLDLQALHRVRSRLVSQRTAVINQIRGFLLERGIIVRQGLRFLRQLLPDILAKRTDVLSPRMVRIVSDLAGDWRQLDDRIETVTDEIETLAKADYNCRRVMTVPGIGPIISSAMVAAIGNGSAFAKGRDYSAWLGLVPKQMSTGDRTILGRLSKRGNSYLRMLFIQAARVILVRPANWPKHGFGVWLVRAIQRLHPNVLAAALANKLARIAWTVLAQQRSYEARVTKAEA

SEQ ID NO: 284804 - protein, 423 aa, unidentified
MPYRITGIDVHKKKLAVVVADVEVDDEYQFQRRWYGSNPEQLQLLSDWLVEQQVEEAVMESTAQYWKPVWEALERYWKPARQKREGAGRMSGTLHLAQALSNRGRRGRKKDFRDAERLVKRLVSQELVLSFVPDVAQRLWRTLTRTKYQRTRDKVRLQNQLEALLEEAHIKLSSLVSDLLGLSARRMLKALADGETDPVALAALADQRLHATPAQLRDALGACTELNPVYRRLLKMTLEDLHLIEQQVGQLDQEIASLLRQHQDAVERLAEVPGLGVDSAQQIIAEVGAKAATFASAKNLVSWVGACPGDEESAGRNYNPRSPKGNRHMRRILNQAANAAVKHKGSIFEIVYRRLVPRLGHNKTIGAIAHRLCQLIWIILHNGVRYEERGPAVSEKSRRARTSRMIRTLRTLGYRVEPLGNPV

SEQ ID NO: 284805 - protein, 334 aa, unidentified
MGVDIAKRVFQLHWVEPETGEIVALQLKRERFLEHFANRSTCLIGMEACGGSQHWARSLQKLGHEVRLVSGQMVKPFVVGNKNDSADARGIWMAIQQPGIKAVAVKSEEQQAVLALHRMRGQLVKFRTAQINGLRGLLTEYGEVMPQGRAGIKRDIPGALGRLSERLPAIVIETLREQYARLAELDGQIDQIERRLRQWQRTDSATQRIMAIPGVGLLSATAAMATMGDARAFKSGREFAAWLGLVPRQSGTGGKVRLLGISKRGDKYLRTLLIHGARSVLTHSKSLPEWVTELVKRRPKNVAVVAIANKMARTIWALTAYQRAYEPGYVSRPA

SEQ ID NO: 284806 - protein, 365 aa, unidentified
MADRTLTHPKFTTVQLPTTIGLDLSDRVSHYHVMRGDGTSLATGKVATERRDLTKLFAGWKGCRLVIEAGGHSPWISRLGMACELEVVVANPRRVALISKNDKKSDRSDAETLARLGKSNVELLAPITHRSKEAQEHLSVQRSRNAAVSARTMLINHVRGVLKSHGYRGPSCGAERFATLAIKELPAALEPALEPILRVIQRIDTEIKAFDKKLEHLGREHYPVTQLLQGIPGVGPIVSLSFVLTLDDPTRFKGRDVGAYLGLVPRQRSSGVSDPQLHITKAGDHEMRRLLVIAANYILGRFGPDCDLRRYGLRIAGNGGDKKAKKRARVAVARKLGVLLHHLWKTGEVYDPFHLANKRGDSVPA

SEQ ID NO: 284807 - protein, 353 aa, unidentified
MKVTTIGIDLAKNVIQVHGVDERGKVVLRRQLRRGQVMDFFAQRPGCLVGMEACGSAHAWARRLMKLGYTVKLMAPQFVKPYVKTNKNDAADAEAICEAVTRPNMRFVPVKSEEQQAVLSLHRARQGFVRQRTAQANQIRGLLAEFGIVIPQGIRHIARHLPEILEDAENTLPGAFRQLLRQLGEHLKTLDELVRAMEVQIQQWHGTNEASQRVSAVAGVGALTASAMVASVGDARNFSSGRQLAAWLGLVPRQHSTGGKSKLLGISKRGDVYLRTLLIHGARSVIAAAGRRKQSTVGQPAVQPRADRWLEALIARRNRNIAAVALANKNARIIWALLARGDHYQAFHPLVGA

SEQ ID NO: 284808 - protein, 398 aa, unidentified
MTESSDYESVQVFIGVDVGKDTHHAVAINRSGKRLFDKALPNDENKLRSLISGLKQHGQILLVVDQPATIGALPVAVARSEGVLVGYLPGLAMRRIADLHAGEAKTDARDAAIIAEAARTLPPALRTLKLADEQIAELSMLCGFDDDLAAQTTQASNRIRGLLTQIHPALERVLGPRLDHPAVLDLLQRYPSPEKLASLGEKKLAAQLCKLAPRLGKRLAADIAQALAEQTVVVPGTNAAAVVLPRLALQLITLRKQRDEVALEVEQRVLAHPLYPVLTSMPGVGVRPAARLLTEVACRAFASAAHLAAYAGLAPVTRRSGSSIRGEHPSRRGNKALKRALFLSAFAALRDPLSRAYYTRKMSQGKRHNQALIALARRRCDVLFAMMRDGTFYTPQAS

SEQ ID NO: 284809 - protein, 396 aa, unidentified
MLRTKLQKQNDFTGQDFYMGLDVHKQSWYVTIRSLGIEVGHFSQEPDAAALHQYLQRNFPGGQYHSAYEAGFCGTGAHEQLCKAGIGNMIVHAADIPSTDKQKKSKTDLHDSRAIADHLERGNLHGIYVLSQEQQELRSLFRLRECKVKDTTRANNRLKSFLMYYSIVIPAGVSKRGDLTGRALAWLDIELQSAAGTIVLQEYIAELKYQRKQLFQLTKTLREQVMAHDKQTYVNLITIPGMGSITAIGLMTEMGDFRRFDDPDEYSSYLGLYPWEDSSGDCIKTKGMQPRCNSHLRPLLVEASWHAIRKSRNLFAYYSKHAGGKNGKKAIVKVARKLAMIARGVAISGQPYQEDYQKKDNKHEPAKKMKAGRFSSGITKQHINKQPNYGRMSMPG

SEQ ID NO: 284810 - protein, 338 aa, unidentified
MVYGAIDLHMRDSQIRIVDAEGRELRSGRVRTSAARLVEAFGGFGPMRILLETGTESAWVAQALETAGHTVVVADPNYAPMYGEIRRKVKTDRRDVVALSEANRHGWYRATHRVSRAQRDVRQVLRSRRQLVEMRTGTISLLRALLRQEGYRLPTGGSARVPVRLAALEIPPGLRARLAPLQRVVEMLTTEIATVDDGLATVAHADPVVERLQSVPGVGPVVALTFRAFVDDVGRFAHAGQVSAAIGVVPREDSSAERRHRGHITKAGPRELRSLLVQAAWACWRSPASGTLRVWVERLAGRRGKRIAVVALARRLSRILFALWRDQSVFDAATLATA

SEQ ID NO: 284811 - protein, 419 aa, unidentified
MNKMVKEQELAACVGVDWGDTKHSVHMQAMDGGRVEWLELEQKPDVLHEWVAQLRQRFQGRKVAIAIEQRKGAVIHALMMYDFLVLYPVNPKALARYREAFQTSGAKDDPGDSKLLLDLLSKHRDQLRAWIPDTIQARKLQLLCEQRRKMVHQRVALTNRITSLLKQYFPQALDWVGDIASIQCCDFLMNWPDLAAVQRVRKSTLEKFYRSHNCRKASVIDQRIAEISSACSLTGDPAIVEPLSLCVQIYATQVRTLIGAIQEFDKRIAQLFAQHADHDIFDSFPGAGDVCAPRLAAAFGTDRSRWDSASELQSHSGIAPVTERSGKALWIHHRLGCPKFIKQTFHEFADQSIRFSEWARAYYDQMRARGKDHHAALRALAYKWIRILFRCWKDRKLYDEQHYVQSLRRHGSSLIEKTA

SEQ ID NO: 284812 - protein, 383 aa, unidentified
MKKNTTAKKSPKALSNRKKNQIREAAAKQRLTIGIDLGDRTSRYCILDEAGARVREGALPTSRTGLGGLFAKMPSSRIALEVGTHSPWVSRLLTEMGHEVIVANSHKVKLITQSVHKNDRIDAEQLARLARVDPKLLSPIQHRGPEAQADLAVIRARAELMEARTALINSARGLVKPMGERLKKCDADRVEESLGNELSEAARAVIGPLLKSVEAISQQISEYDRRIEEIAKRYPEVILLTPIYGVGTLIALTYILTLEDAGRFAHSRDVGPYLGLKPKERESGDSHPQLGITKTGDGLLRSLLVQGAHCILRRGAPDSDLRAWGLAKMKSGGRNGKKRAIVAVARKLAVLMHALWSTGEVYDPHYQRQAGQAAGEMKGSAAA

SEQ ID NO: 284813 - protein, 416 aa, unidentified
MTDAAETPSAYVGIDWADSKHDIHVYPVDGSKATHELIDSKPEAIQDWILKMRERFGQAGKKVLVCLEQSKGALIYQLMAYDFFVLYPINPKTLSSFREAFRPSGAKGDESDADLLCEIVRLHRHRLKAWQPDDPQTRQLTAFCQRRRQAVQMGVRLVQRLRAELKNYYPFVLAELELSTVLACDFLERWPTPEELRRAKLPTLRKFFYAHNYRRGDKLEEMLKRVATTAAITSDAAIIEPAAAHVRLLAAQLRVVLNAIPEFDEKIAELFQAHPDAAIFQSFPGAGAQLAPRLLTAFGTDRTRVERAEQMSLISGIAPIRIASGKMAVTVKRWACPKFMRQSFHEFAGCSIRLCPWAKEFYDQQRARNKKHHTAVRALAFKWMRILFACWKTRKPYDDALYNAQLQKHGSAFACA

SEQ ID NO: 284814 - protein, 360 aa, unidentified
MNRYDYTGKTIYMGIDVHKKTYSCVSICEGEVIKRDRMPAKAEILLNYIHNFFNGAVVKTAYEAGFSGFHLHRFLLSHGIENQVVHPGAIEVASRDRVKTDKRDALKIATQLSSHRLKGIFVPSVEQEARRSVTRLRQQIWRSRQRIGNQLKGVLFTQGLIDVNDDTRISSRWIIKKINELSKLQAHEDLSYSVQRYAEEWNDLTRRLKMIEGQLQNQAKEDGLTMIYQSAPGIGLLHARELANELGDMSQFKNEKKLFSFIGLTPSEYSSGEHVRQGNISRQGRSVLRKIFIEAAWVAIRQDPSLNEIYDRLSTRRGKKRAIVAVARHLAGRIRACIKMGCLYEKREVIKDQVKQQQFA

SEQ ID NO: 284815 - protein, 333 aa, unidentified
MNPPEFKPVRALGIDIAKATFQVALMAYDSPGTYREKSFENTPKGHASLLKWLGPDLASLHACMEATGPYGDALACLLDGQVGRLSVENPRRIKGYAACRNQRSKSDPADARLIAHYCASQRPPAWQRPSAAEFKIRALSRRLDSLKIQLNAENNRLELAGDPFIKRDIKAHLRFLQTHIDKVEAELLATIKGEATLHRSHQLLCSIKGVGELSAAIILAELPDLSCLRDGRQLAAYAGVTSRHKQSGTSGSSYTPMSKAGSSRLRKALFFPAMSAMTHNKLCRTFADRLKEKGKKSIVVIGAVMTKLLHLVFGILRSGMPFNPDHLANSRIA

SEQ ID NO: 284816 - protein, 339 aa, unidentified
MNILFLGIDLAKNVFQLCGLNQAGKPVYTKRTGRKELLQTLANIPACLIGIEASTGAFYYWQREFEKLGHKVKVISPQYVKPFVRGQKNDGNDAQAIAVALMQPTMQFVPPKSPEQQDIQALHRARQRIVNHRTATVCQIRGLLLDRGIPIGSAVSRARRAIPLILEDAENGLSSRMRRTIAELYDLFNDLGRRIHFFDKEIETVFRQSEACQRIAKVKGIGPETATAVVAAIGKGTEFKNGRHFAAWLGLVPRQHSSGDRQVLMNMTKKGDKHLRTLFIYGARAVVRVATNNNDGHMNQRVNQLKERRGFNKTTVAVANKNARIIWSMLRNDTGYQVV

SEQ ID NO: 284817 - protein, 347 aa, unidentified
MVHVGLDLSRRRLDVCVLGDNGDKLTVTTAPPDRDGLGVLARRIAGFGDPVSAAIESMNGARYIHDTLELLGWDVEIADAQKVKGLAPLACKTDRIDAWVLAELSRRDLVPAIWLPDPGVRAERERARYRLHLVRHRTMFKNRVHATLIAFGKPCPVSDLFGVSGRDLLRRLDLPEPWNTNVARALQQIDQLDAEIGTCAVELRQLGADHRYVPLLTTVPGISWVLGYTIAAEIGDISRFSSPKKLCGYTGLCPRVYQSGGKDHRGPLAKNGPKYLRWALIEATVHAARHPAYREHYERTAARLGKQRGKKVARVEVARKLAEAIWHMCTYDRPFTPARSHVNALVA

SEQ ID NO: 284818 - protein, 405 aa, unidentified
MWFVGIDWADDHHDAVVIDDAGKRAATTRVPHTSDGMAELIAFLRDIGDVDTQPAHLACIVETNRGLLIAALLDAGVPVYPVNPTTVDRQRKPSGAKTDAIDAYLLARTGRSDLADLRRLTPDSPLVAELKLLTRDQDGLIQGQTRLVNQLTACLKAYYPVALELFGKLHQGATLAFLRAFPTPDAARAATVERIAAVLTAARYATAEAKAREIWERVRQPQLTADPVVTRAKARLMLTLAAQLQGLVADIAAYDREIACVFAQHADSVAFASLPRAGKRLAPRLLAEWGDDRGRYADAASVQALAGTSPVVFQSGNYASVHKRYACSKPLRNALHQFAWQSTLQEDWAATYYRRKRREGKSHTKAVRALANQWVRIIHALWRKREAYDPAVFMEAQRAHAPRVA

SEQ ID NO: 284819 - protein, 309 aa, unidentified
MEIVVGIDVSKERLDVAILPQEEVFAVGNDHAGIDELVERLKGIGVDAIALEATGGFEMLAVAGLSAAGLTVLVVNPAQVRAYAHAIGRRAKTDPIDAAVIAAFVLATKPEIRPLRDAETQALSELVARRRQIVQMVVAEENRLRMALAKQAQKSIKRLLKALRRELESLDADLDSHIRKSPVWRVREALLTSVPGVGATTARTLLAELPELGSHDRRQIASLAGLAPWTRQSGKWKGKSFIGGGRGKVRAVLFMAALVASRYNPDLKAFRDRLVAAGKPKIVATVATMRKLLTILNAIIRDGRPWQNA

SEQ ID NO: 284820 - protein, 361 aa, unidentified
MQLQDAFSIPKIFIGLDIHKKSWTVSIQTDLFFHKTYSMPSNAEDLYQYVERTFPDHAVDLVYEAGCCGFSAARYFLNLGWNVLVVNPADIKTGDKERYQKTDALDSKNLSNQLKSGVLRGVFIPTEEHEQFTTLARHRTQVTKKLRQTKSHIKSMLLFHDIKVPEEFDNPNWSKAFILWLEEIKFSTSCGDLALQGKIRMFKFIKSEYLEIANQMRSYCRKNNKKDYNLLRSIPGIGGYLASVILAECGDLRRFNNEGQFSSYIGLVPGMYNSGESEKCLGITPRSRSQLRSYLVEAAWIAIRKDTEMQNYYRKHQGKNVKSVIIKVAHKMARRILSVIKTETPYQINRNLVPIAIGIAQ

SEQ ID NO: 284821 - protein, 421 aa, unidentified
MSDQRQWYAGVDWGSQSHWVFLADGEGRKIGERAFAHGGEGLAEMTAFLLAASGAVEPGRIHVAIEVPHGPVVEALIARGFCVHAINPKQMDRFRDRFTMAGAKDDSRDAEVMASSLRTDPRCFRRLVPTDPLVVELREFSRIAEELGIERNRLANRLREQLWRYFPALLELEHDMSAEWLLQLWEAAPTPQKAGSLRVGSIAAILKRCRIRRFTAADVREALRKPPLTLAAGTVEAASAHVASLIPRIRLLNRQIKDAERRIDALIARLAPPEEAGDTGAIEPGQKKQRDPVVLASLPGVGRTVLATLLAEAPGPLQRRDYPALRSLTGVAPVTRRSGKSCIVVRRQACHPRLANAVYHWARVAIQHDPKSRAKYAELRRRGHSHGRALRSVADRLLNVACAMLKSGTLFNPVLKAEKNA

SEQ ID NO: 284822 - protein, 342 aa, unidentified
MNIPVRIGMDTSKSVFQLHGVDESEVVVVRRQFRRAEMIRYFERLAPVLVAIESCGSSHHWARLLQSFGHEVKLIPPQYVKAYVKRGKNDAADAEALCEAVTRPSMRFVPVKSKEQQAACMLMTVRERLVSVKSQLSNAFRSYAAEFGIVGPAGRQNVTALIKRVLEDDSLPEMARDLFRLQAEEYAAVQARLAKIEAKLMKWHREDDVSRRIATIPGVGPIGSSMLSMKAPPPETFRSGRDFAAWLGLTPKDHSTGGRQRHGGITKAGDSVLRSTLIVGATALLRHIRKGRHKPTPWLASLLERKPPKLVAVALANKFARIAWRLMISGGVYNRPAAAMPI

SEQ ID NO: 284823 - protein, 420 aa, unidentified
MKVVYQICCGVDVHKSFLVATIIKTTSGVQPSYHKKRFSTFNNSILEFKKWLLDNSCRDVCMESTGKYWVPVFNLLEDEINVTIANPKWVKAVKGNKDDTKDSKWIGDLFRLGLVPGSYIPCKPIRILREFMRYRYKLTSNRSSEKNRFQNALTVCNVALDSAVSDIFGKSATSVIDYLLKQPDNSINHEEISSRLLGSLKKKSERVIRSIEGHQVTDAQKYRMRLVHAHMDYITSTISDLDAVINLMVEPYENTLQLLCTIPGVNRKNAITIISEIGTDMTQFSNSKRLCCWAGLTPGNNESAGKKKSVRITRAGVYLKPALVQAAHAAVRSTRSPYYKVKYERIMKRRGKKRAIIAVARMILTAIYHMLSTGEEWNPTDLYKIDMPEPLKNKQKEKAIKQAKKLLITEGLIKESQFAS

SEQ ID NO: 284824 - protein, 350 aa, unidentified
MKKLSKTQKQRVRETIGIDLGDKVSRYCVLDPAGEVVEEGNFRNQVSSIEAHFAGEPRRIALEAGAQSAWISRELKRLGHEVIVANPRQLKWITASDTKNDPVDARKLAMLARADVRLLHPIEHRSAAQQAELAVIRARDAILRARTLLVNAARSLAKGCGVRLPPSITRSFGERALAGLPPELLPALKDALEQIDALSLTIQKYDQRIAEVAGQHPEIEPLTSVTGVGTLTALTFVLTLGNAERFAHSRDVAGYLGLRPKQRQSGARDPQLGITKSGDAYLRKLLVQCAHHILGHYGKDSALRKWGLAKSEGGKKATLRAIVGVARKLAVLLHRLWVSGEKFKPFPKMV

SEQ ID NO: 284825 - protein, 429 aa, unidentified
MNSTQNKKIEQVKETTMIVGIDVGSEKHYFRAFNWRGIELTRKPVAFSNSMEGFNSFYNSVVELMQKNELKEALVGIEPTGHYWFDLGQFMGEKNIKFVMVNPHHVHKTKELDDNSPSKNDRKDPSVIAGLVRDGRYFYSYMPTGVYAELRNASNRRFVLVEEQTRAKNRLQKWVAVYFPEYKGIYTHIDAKGGLLVLKQAPTLEEIVRLGVEGIIKIWKDAKLRGNGHKKAMLILNAAMKSIGLKAGLTEARMEIQDLIEDYELQTKRLERVNDLIKELCQQVRYADKLLEIKGIGITTVAGFIAEVGDITRFDSTKELQKLAGLELVADSSGKHDGKTKISKRGRKRLRYLLFEAAISVVGKNEEFKEIHRYYTTREKNPLKKMQSLIAVACKLIRVFHVILTKGISYDASKMLKDIRRPGEQLKAA

SEQ ID NO: 284826 - protein, 343 aa, unidentified
MDQYVALDVSLQKTAVCVLNVSGRVLIEADVPSEPAALIAFIQTHAPGAARVGLESGPTSPWLWHSLKAAGLPVVCMDARHAHAALSVRPSKSDRNDAHGLAEMVRMGWYREVQVKSLAAHERMALLGVRRRLVDMRVEIDGQIRGILKTFGLVVGSGNKGAFAQRARMLAQDHPVLSALIDKLIEVREVAVAKVAALDKEIRRFVRDDLTLRRFMTVPGVGPVTALAFRSTIDEPNRFKRARDVGPYLGLTPRRYQSGETDRHGGISKCGDRFTRTCLYEAASVLLTKVQRWSPLKAWGTRLARRIGSKKARVAIARKIAVILRCIWTDGTEFWWTRETATA

SEQ ID NO: 284827 - protein, 342 aa, unidentified
MNLPIRIGMDTSKSVFQLHGVDDNEGVVVHRQFRRAEMIRYFERLPPVLVAIESCGSSHHWARLLQSFGHEVKLIPPQYVKAYVKRGKNDAADAEALCEAVTRPSMRFVPVKSKERQAACMLMTVRERLVSVKSQLSNAFRSYAAEFGIVGPAGRQNVTALIKRVLEDDSLPEMARDLFRLQAEEYAAVQARLAKIEAKLMKWHREDDVSRRIATIPGVGPIGSSMLSMKAPPPETFRSGRDFAAWLGLTPKDHSTGGRQRHGGITKAGDSALRSTLIVGATALLRHIRKGRHKPTPWLASLLERKPPKLVAVALANKFARIAWRLMISGGVYNRPVADMPI

SEQ ID NO: 284828 - protein, 330 aa, unidentified
MNNVPLLLGLDYSDAFVQVCAMDEQANVVMNRACGNDWRELVAAVAGKGVVKRVAIEACSGAADLAEELVTHAGWHVELAHPHYVAKLKGSPDKSDFSDGRLLADLTRVGYLPVTWLPPAPVRELRQLVNYRQQLADQRRAAKLRVGALLREQRVKAPRELSRWSRGWIEFARTTTQLSEHARWIVNQLLEQLGELNKRIAQAEQSLRGATANDKIVERLLEQEGVGEVTAWVMRAFIGVFDRFKSGKQLSRYCGMSPKNASSGTRQADGGLIKSSNKILRATIVQAAHRLIRTRPRWATLAQSLRDRGNRRASSPPPWATAGCEKYSMK

SEQ ID NO: 284829 - protein, 335 aa, unidentified
MTAAVTAQAGRLCGSRASPAATRGYVALVTWAEGFGPVERVGVEGTGTFGAGLTRFVRAYGLAVVEVARPDRSTRRRRGKSDPIDAQAAARATLAGVAVTTPKTRDGQVEMIRLLRVARRGAMKARVAAAEQLYGVLYSAPEELRQPLLGLTTKALVRACASMRPGPLTSPMAATKTTLRTLARRWQQLQAELDQLDTQLQALVASVAPTLLALPGVGVETAGQLLVTAGDNPQRLGSEAAFAHLCGAAPIPASSGRTDRHRLNRGGDRRANNALWRIALVRMRCHPPTRAYVERRTKQGLSKLDIMRCLKRYIAREIYYQLTSPPLTAPTACSK

SEQ ID NO: 284830 - protein, 406 aa, unidentified
MERIYPRCAGLDVHKDSVWVCIRVDGTASVEKFGTSTRELLRLSDRLVAAGVTIAAMESTGVYWKPVWNLLEGRVKLMLVNAYHVKQVPGRKTDVKDCQWIAELLEHGLLKPSLVPDRPQRELRDLTRQRAQLLGDRARVVNRIHKTLEDANIKLGSVASDITGKSGRAILDALVEGELTPEQMAELVHKRMEAKKPALREALAGRVTPHHRFMLSQLLGQIDHLDGMVEALDARVEEVMSPLEREAVKRLDEAPGIDRRSGQVIVAEIGTDMTRFPSPHHLASWAGICPGNDRSAGKRRSGRTRQANRWLKAALTQAAWGASRTRRSYFSAQHRRLTTRRGVKRATIAVAHSLLVTAYHLLAERRDYVDLGVEHFDRKRTPHEQAQRMVRKLESLGYSVDIRPAA

SEQ ID NO: 284831 - protein, 391 aa, unidentified
MIYVGIDVAKDKHDCFITNSNGEVLFKAFTISNNQDGFNVLYQRIESVMEDVTKVKVGLEATGHYNYNLLGYLIDKGLTTYVINPLHTTLYRKSLSLRLTKTDKVDARTIAYMLMSDVNLKSYSDTSYHNEELKSLTRYRFNKVKERAKLKTSVSRLVCILFPELEKLVPTLHMASVYALLSEFPRAKHIAGAHLTRLTNLLSDASKGRYGKDTAITFREAARASIGSNMPAKSLELKHTIKLILELGSEIEEIENEIKIIIDEINSPILSIPGINYRMGAMIIAEIGDFSRFDSPDKILAYAGFSPSTYQSGQLDSAYSHMEKRGSKYLRYALYNAAKYVCHWDVTFAEYLAKKRAEGKHYNVAISHAVKKLVRVIYHLVKSNQQYIKVA

SEQ ID NO: 284832 - protein, 409 aa, unidentified
MDVIHPRCAGLDLGKDMLVAAVRLQDGGSVRYEHRVFQTTSGQLLELSSWLTSEGVTHVVMEATGSYWKSVWHVLERQFELVLANPMYVKNQPGKKSDVNDATWLSDLLAHGLVKGSFVPPAAIDALRELTRTRKQFTREIARHTQRIQKILEVSNLKLTGTITDIMGASGRAIVKALVAGETDPERLADLARRNIKAPRARLVEVLHGRITEQRRVLLGMHVHMIEEIEASIARLDLDIEKAVDPFRPIVDRLKAVPGLSAVSVPALLGEIGVDMSKFRTHRHIVSWARACPRLHESAGKVLSRRTLKGSVWIKPLLVQAAWSATRTKNSYFRAQFLRLRARRGAQKAIVAVAASILTAVYYMIRDGKPYKDLGVNYFDTRDRSRTANRFVARLKHLGYNVQLSEAVA

SEQ ID NO: 284833 - protein, 425 aa, unidentified
MYNKNYISVGIDVGSAFSFMTIVAPDGSVIQKPFKITHNKPDSLEKAVSAIKKAEELHSLESRTFLESTGIYHFPLFCYLVDCGFHVSIINPIITHSANNTSIRKVKNDKVDSIGIAKLGLSGDIPVSQFPAKLVLEIRSLTRKYYDLTDERSAHINKLKGDLHTVFPQYLDIFCDVTGKTSTMILRQYGTPDKILRGHKKTMIEKISKASRKGLSKAAERYEKLCAAATAAKTFGCQIDSIYFNISLTLDLIEKLDSALDSILQRIHQLVTFNKSEKFIQQIKWLDTIKGVGFLTAVTIMCEIGDFSAFRNPKQLFAYFGLDPEVNQSGKFVGTEMHMTKRGSRIARRAVFAVALASIRTKRNGEGINPYLREYYEKKSGQKPKMVALGAVMHKVCNIIFAVLRDEKEFELRSPEEHCRQYQRP

SEQ ID NO: 284834 - protein, 408 aa, unidentified
MEVLHPRCAGLDVHKDTVVAAVRCVSPPVHHEVQSFATTTRGLFALADWLGSHNCTHVAMEATGVYWKPVWHVLEERFELVLANAQHVRNVPGRKTDVGDAAWIADLLAHGLIRSSFVPPAPIQELRDLTRTRKQLVREIAQHSQRIQKVLEDANLKLGSVLSDILGQSGRAMLNAIIAGEDDPVRLAELAQGTARKKTAALIEALRGRVTPHHRALLKLHLGLVDAVESALEEVDRHVGKTLEPIRDLARLLMTMPGVGDLVAQVILAEIGCDMKRFPTSGHLISWAGLCPRNDESAGKRRSTRVRKSGTWLKTTLVTAAWAGIRVKDSYLHALFLRIKSRRGAKKAILAVAASMLTATYFMLRDGVEYQDLGPDHFDRRDRSKVIHRLVRRLRDLGCTVQISEEAA

SEQ ID NO: 284835 - protein, 355 aa, unidentified
MNDAKYIGLDVHQATISVAVLDSAGKLVMEAILETKAETILQFIHGLRGSLHVTFEEGTCAAWLHDLLKPHVAQVLVCDPRKNALIKAGNKSDRIDARKLADLLYLNKLNPVYHGETGIRALKEVARSYLAWTRDTTRVMNRLKALYRSWAIPCAGQRVYAPRYRSEWLAKITEAGVRRRAEIYYQQLDALRSLREQVRRDLLAEGRKHSAMKLLRQIPSIGPIRAVLLIALMQTPHRFRTKRQLWAYCGLALKTSTSGEYRIVEGRLKRSKKFLAIRGLNANHNHDLKNIFKGAATRAAAVAGPFQEFHAGLVARGMKPTMARLTLARKIAAITLIVWKKGVRFDAEYLKQQAA

SEQ ID NO: 284836 - protein, 410 aa, unidentified
MLKIIYPICCGIDVHKKFVVACIASTDDRGITMYKSSRFSTFTSGLRKLSGWLCSNSCTDVCMESTGKYWIPVYNILEDTCQITLAHPKYLKAIRGKKTDKKDARWIADLFKHDLVAGSFMPPLRIRWLRDLMRYRFKLTNFASSEKNRIQNCLTVSNIQLASVVSDTFGRSSMKIIDYLLENPYDKDFDFVPLLHGSMTGKADSIRLAIDGMITVEQRQKMNIILCHYSEVQKCKVNLESLILSLSEPYARELSLVSTVPGIKNPFSVIAIISEIGADMSVFPTAKHLCSWAGLTPQNNESAGKKYSVRISRAGVYIKPLLVQCANAVVRSEKHPEIRGRYLSIRKRRGHKRAIIAIARMLLTAIYHILLKDEPYNPELYKKADVLPKTRSITVDQAILLAKRYGYSVA

SEQ ID NO: 284837 - protein, 337 aa, unidentified
MKRYLGVDLHRTQFVVCTRWENGEQEIQQWRIGELSKFVEQLCIEDQIAVEAMGTTALFYDAVVGRVARVVVVNPHQFKVISESVKKTDRKDAQALALYLEKDLLPEVRMKPKQNRELMHLAETRDLLVKQRSALKGKINNLLAMQGIELKREALSSKIALARVLALPVSGMVQLELRVLVEQVRALSESIVELDERLEEEGQQLPGYENLTSIKGIGSLSATVLLTVIGKISDFADENKLASYLGLVPKIANSNESERSGRITKQGNKLARTALVQCGLVAKRYSPYLQGFYERIKQRRGGGKAKIALARKLAKIVYDTLKNQWIFEDFPSFTLAA

SEQ ID NO: 284838 - protein, 394 aa, unidentified
MSITCGIDWAEAHHDICVLDDGGRVLQRRRIDTGAAGFTELMTLLAEHTDDPASVPVAIETDKNLIVVALQAAGLTVFAINPRAVARYRERHGQAGTKSDPGDARVLADILRTDRHQHRPLPSLSDGARAVKALARQHQEAIWAAHQTTSRLRSVLLEFYPQALRAFPNLQHKAALTILAAVPTPDQGLKLIARKVVTLLHRCGRRNDASLVDQIVTALRTTALRQPPPVEAALGQTVVGLLGILTAMHTAVDQLEQALAAEFDAHPLAAVLRSAPGLGPVLAARVLAEIGDDPTRFTTAGGLRAFAGTAPVTRASGRSRRVLARRIRNKRLGDACHWWAFSMLTKSPGARAHYDRRRAAGDRHNAALRNLANKALGRMWWCLQNDQLWDDTAA

SEQ ID NO: 284839 - protein, 456 aa, unidentified
MLRDAIGIDPDSKGCQCALVKLGECQAQQRGYPATEEGMERFIRWVKEKEDVIVAIEGSNGQSKPIEKALRYAEIVFYSFKPSDVGKFRRVVLGQNKNNKKDAESTARYAMALEAQGKLDKWKRVWSPDEELQGLTRSYSQKTTESTRSINRLWKLLREASVDLYLALGGEHPDIDINENILQNEGILALLIEKPDIFEWKTLSETDFLSVMGNFNYKGRKKLIEELQKVSRSFRPVSPAISLMIKNTTEQIILLKRQLKEIKKMIEKQTKDNKAVKTLEQHRGIGTMTAATLYAEIIDIRRFVKDDNLASYSGLCKREYKTGKNEKEIPNYFFNRRLKNVFMTAARNYVLYNPGSHLTGYYRNNVKGGMKKTDARKRVARALVRVFFKELYSLVEQDNNSDKIEDKKMGKENDMANGLSRSDKYHSNISFPSPIKNNTEGREKVKREKIEKLVMK

SEQ ID NO: 284840 - protein, 364 aa, unidentified
MKIIGCDFHPSFQQIAMVDTESGETTERRLLHADGEAQQFYESLSGPVLVGIETSGNTLWFERLLEKLGHQLRIGDATAIRAAAPRHQRCDPRDARNVLQLLLEKRFPTIWVPTLAERDLRQLLKHRHTLVQMRTRAKNQLQHIAMNQGLQKKRQLWSKAGLEQLKSLALEPWTKRRRDDLLQILEQMDSHIAELSKAVEAEAQHWPQAVLLMSHPGVGPIVALATVLTLGDVSRFARGKHVASYLGLIPREDSSGEHRRLGSITKQGNSFMRFLLVQAGMSAARGDAELGRVYKRLAQRKHHGVAKVAVARRLVLRLYWMLRTNRRYPEVVRMQGSSSHPVAEVKADRLSEHPASRCCTHPGL

SEQ ID NO: 284841 - protein, 405 aa, unidentified
MKKIAGIDVHKKVLMVVIAEAASPEQIVRKDKFGTGRAELERLRVWLQQTEVGDVVMESTAQYWRPVWNELEPFFALQLAHAQSNRAPQGRKSDWADARRLVKRFAAEELFLSFVPEPEQRDWRTLTRARQALVRDHVHLQNQIEALLEQASIKLSSVVSDLFGLSSLRILSALAEGQTDAEKLAQLADPRLRCGQQTLVDALRGRFREVHRQLLDQALQRLAILSKQIAELSRLAAQRLQPYASTLERLIEVPGIGAEAAQEILAEIGPTAAAFSSSAKLASWIGVCPGTQESAGENHSGRCPKGNRYIRRVLCQVAHAAARTKGSHFEVMFRKFLHKGYNKAIWAVAHKLCKIVWIILHHGARYLESGVVNPKAVQRAIQLHLKALRRLGYVLPPSSTPTSQP

SEQ ID NO: 284842 - protein, 426 aa, unidentified
MIRAVLERCAGIDVHKKFVTVCVLVGAAHLEPEPQRRRFGTCNAELYQLRDWLLAEKCQKVAMESTGPYWRPVFNVLEEAGLEVVLANPQQVKNLRGHKTDMKDCWWIAHLLRHGMIRPSYIPSRPMRELRDLTRRRKQLIRNGAMERNRVQKVLEEANIKIGSVLSDVFGASGQDMLLALVEGQATAKQIAQLAKRQARKKIPQLEAALEGHRMTETQRQLIQQCMSHMAFLEQQIEEVDQQIQGKIGGFQLSESYGLLQTVTGIKAEAAATVLAEVGDTVDAFPSSAKLSSWAGVCPGNNESGGKRKSTRTTKGNPYVRDALLECAWAASRRKNSQMQHLYQRLQHRVGHKRAIVAVAHKLVEAIYYVLSTRRSYIDTSEPPRSTSQVKRLIRHHTRRLRKLGCWLQQTTQQAPRSTEHYQGLT

SEQ ID NO: 284843 - protein, 402 aa, unidentified
MNAVGIDVSKGKSMVAIMRPFGEIVSAPFEIKHTASDINSLVELINSVEGESRIVMEHTGRYYEVLAHQLSVANLFVSAINPKLIKDFDNDSLRKVKSDKADAVKIARYALDKWQNLKQYSVMDELRNQLKTMNRQFGFYMKHKTAMKNNLIGILDQTYPGVNTYFDSPARNDGSQKWVDFASTYWHVDCVRKLSLNAFIDHYQNWCKRKKYNFSQSKAEEIYGKAKELVPVLPKDAITKLIIKQAVDQLKSASTTVESLRTLMNETASKLPEYPVVMAMKGVGTSLGPQLMAEIGDVSRFTHKSAITAFAGVDPGVNESGTYEQKSVPTSKRGSVDLRKTLFQVMDVLIKTHPEDDPVYQFLDKKRAQGKPYYVYMTAGANKFLRIYYGRVKEYLSSLPES

SEQ ID NO: 284844 - protein, 312 aa, unidentified
MTIICGVDVSKAKLDACIEPGGIFASFDNDAAGIAELAAFCRQHAASLVVMEASGGYERRAFLELWQLGVSCALTNPRSVRRYAEAMGFLEKTDRIDASVIARFAMAKNLSPTPLPSPAQQRLKALVTRLRQLTDDLTVQKQRRTNLLDNPEMLASIDEVIALLKRQSRSLEGEIASMIDDDPLWALLAKTWRSIKGVAGRTVGRLHAELPEIGTRSNRAIAKLVGLAPLADDSGQRKGKRAIRGGRAGVRSILFLVAGIAARYDQSLAAFKARLAAAGKQKMVIRIALARKLLVRLNAKARDARAAYANAT

SEQ ID NO: 284845 - protein, 421 aa, unidentified
MKRADTWKVRGVRDDTLIVAIDVGMEMNRGYCTIPDGRSTKIFKFDNTREGFDTFWGMVMASKNRFKCNEVIVGYESTGPYGEPLVHYLVKKPVKMVQVNPMHTKRVKEINDNSPLKTDDKDPRVIADIIKLGRALSIVIPEGEAAYLRRVNNSRERHVRERTALVNQLQQLVFLLFPEFKKVIKDIKCRTPLYLLEKYPTPEAISVLDKHVLGEEMRKKSRGKFREQHADMLINLARNTVGIREGVSGLSMDIRHILVQLEMLGNLIAEIEGEMEITLRRIPYSSKLLSIKGLGVVSVAGIIGEIGDFKKFGTQPEIMKLAGLDLYEISSGKMKGQRRISKRGRSLLRKILYYAAIQTIRKNGILHDYYTRLTDRGMKRMMALVAVSRKLLGIIYAIVRDDSEHTVNFESMKRQVIKKAA

SEQ ID NO: 284846 - protein, 424 aa, unidentified
MKVTYQTCCGVDVHKSFLVATIVKTTGGIEPSYQKKRFSTFNNSILEFKQWLLDNDCHDVCMESTGKYWVPVFNLLEDEINVVIANPKWVKAVKGNKDDTKDSKWIGDLFRLGLVKGSYIPCKKVRILREYTRYRYKLVSCRSSEKNRYQNALTVCNVALDSVVSDIFGKSSTSIIDYLLEQSGTSINHEEIASKLLRSLKSKEDAVIKSVEGYQMTDAQKYRMRLVRAHMDYITAEINDVDKMIENMISSNPDFENAVQFLCTIPGVKRDSAITIISEIGTDMSQFSSSKRLCCWAGLTPGSNESAGKKKSVRITRAGVYLKPALVQCAHAAVKSDKSPYYKKKYESLVKRRGKKRAIIAIARMILTAIYQMLSTGEQWNPSDLYKIDMPVALVEKQKAKAIKQAKKLLQREGLLPPDEPLAS

SEQ ID NO: 284847 - protein, 387 aa, unidentified
MVNGINAEALSQRGIFRQEAPANHDAGSGARAHFKEAMMRFYQQPHRFYCGVDLHARTMYLCIVDPAGQTLLHANYPADPRAFLDAVAPYRDGLVVAVECMFAWYWLADLCAEHGIPFVLGHALYMKAIHQGKSKNDRLDAAKIAGLLRGGLLPQGYVYPKAMRATRDLLRRRSFLVRRRADLLAHLVNTNSQYNLPALNKKLVYPGNRGELNLPERFAEPSARKMVECDLALIDALDAQIHELERHLVRTAKVHDAQAYARLQSIPGVGKVLGLVLLYEIHDIGRFPEAGHFLSYARLVRPRQESAGKASGFGNKKIGNAHLRWALGEAACLYLRSSARAKRWQARQAKKHGPAKTLGILAAKLGRTVYHLLRTKQVFDEARFFAS

SEQ ID NO: 284848 - protein, 411 aa, unidentified
MEVVHSRCAGLDISKKDAKVCVRIAGAGRRKTTETVTTWGSMTNQILALREHLVAEHVTCAVMEATSDYWKPFYYLLEDAGFEVLLVNARHVKNLPGRKTDVSDATWLAQLGAHGLVRGSFVPPEPIRQLRDLTRARTAITRERSREAQRLEKLLEDAGIKLSAVASDILGVSGRQMLEALIAGNHDPVVLADLAKRRLRSKIPELTEALTGRFSEHHAFLARVHLDLIDRHTAAIETLTGRIEVMIEPFQGFRDLICTIPGISTLTADVVIAETGADMARFPTAKHLASWAGTTPGNNESAGKVKSSKTRPGNPYLQGALGAAAMSCAQNPRTYYGARYRRIASRRGPQKANVAIQHSMLIAIWHMGTTGTIYDDPGADYFTTLHPERAKKRAIHQLEAMGYSVTLDNAS

SEQ ID NO: 284849 - protein, 344 aa, unidentified
MEITTVGLDLAKNVFQVHAISSTGEVVVRRALRRAQVIPFFSKLPPCLIGMEACGTSHHWARELVSLGHQVRLMPPAYVKPYVKRGKTDAGDAEAICEAVTRPTMRFVSIKSVEQQAALALHRTRDLLVRQRTQLVNMIRGLLAEFGIDIPKGITQALAFVRRAVAGQADDVPDLAAKVIGALAEQAIEVQGRIRQLERDLLAWYRSNEVARRIATVPGVGLLGATAMAATVTDPTQFRSGRQFAAWLGLTPLNNSSGGKERLGRISKMGDQYLRRLLVTGMTSLVRRNRHHPSSADPRINALLARKPLRLATIAMANRAARAIWAIMVRGEVYRAPALGSAAA

SEQ ID NO: 284850 - protein, 484 aa, unidentified
MAKRKMSTFERLQQGRRMNRQQRRELGRRLNSEDPGLEVVHVNAAGIDIGNESHFVSIPPDRDAMPIREFGSWTADLQEMARWLKEHGIRTVAMQSTGVYWIAVLEVLEQAGMEVYLVNARGTKNLPGRKTDVQECAWLRKLHTYGLLRNSFRPPEEIRAVRTIWRQRDRWVKESGRAVQQMQKALTTMNVQLANAISDISGVTGQLILRAIVAGIRDPWELAELRDKRIAASKEEIAHSLQGNWREDVIFELRQVLEAYDFYQKQMAGCHQELMKYTAAIPSREIAGKPDLAQGGASEPPPSKAVRRSKTRRKNQPGFDLAAELQRTMGVDLTRIDGIDVITAQVIFSEIGPDFGAFPDENHFASWLTLAPQRDISGGKVIRHIPAAGRNRVANALRMAAESLSRSNSYLGARYRRLRMRLDGPLAVKAMARYLACLVYRMVTKGQDYVDRGAAHFEAKRLKRERVALDRRAANLGLKLVPAT

SEQ ID NO: 284851 - protein, 430 aa, unidentified
MKQYELLHSLFVGIDVSMKENVVHAMPFSPEDHPGHAHLRFSAPNTPAGSVGIVEKVSDFLKFCPDVIQVVIALEATSVYSFHLATFLSVAHFNGHIPAIVYSVNPKEIHAYKKTFTDVGKDDYVDAMVIADYARSNKIRSRPWKGPELLGLRVLTRLRFRIAKLMGIVKNSTGNSIYLECSGLMTGENPFCNVWTTTCQELLTTFQGPDEILSLSNEELLNFITEKGHGRFSHPLDVVEKVKKAARNSYRLDKRVYEPLTSGLSVSFFIIHSLETAIKKLDKSIETMAKSFSSDSYQILLSIDGVGPVIAGGLLAEIGDIKRFKTDDALAKYIGLTWRGKQSGQSESPVKHLSKAGDVYLRYYVLLATGQIINYSAKYREAYERIRSRKTLFPYRAALNLVARKIVRLIFTLLDKHQLYSDNKVMVTLE

SEQ ID NO: 284852 - protein, 343 aa, unidentified
MQAITTIGLDIAKSVFQVHGVDAAGQVVIRRQLKRRYVLAFFQKLPPCLVGIEACASSHHWSRELQALGHTVRMMPPAYVKPYVKRQKNDAADAEAICEAVTRANMRFVATKTPEQQSCLTLHRTRHLFIRQQTAVINAIRAHLAEFGIVAPVGRQGVEELLNVVANPCDKRVPEVARACLAALGAQLRMLKAQILEFDRMIITWHRSSEMSRRLDDCPGIGPALATALVATVADPKAFRSGRNFSAWIGLVPKQHSSGGKDKLGSISKQGDRYLRSLFVAGALAVIRYAKIHGTKHRPWLTALLARRPTKVAAIALANKIARMAWAMMAKGERYKEPVALAA

SEQ ID NO: 284853 - protein, 341 aa, unidentified
MQITTIGLDIAKNVFQVHGIDAKEKVVVRKQLRRSQVIAFFKALPPCLVGMEACASAHYWARELRKFGHEVRLMPAKDVKAYVKRNKNDAVDAEASCEAVRRPTMRFVGVKSAEQQGQLMQHRTRDLLMRQRTQVINALRAHLAELGIVAAQGREGLKELLAIIADESDARLPIDARASLIVLAAQLQAVQTLIGSIEKRITAQHRANEASKRLQSIPGIGVIGASAIVSTVTDPNAFRSGRDLAAWIGLVPRQDSTGGKQKLGPISKQGDRYLRRILVVGAHAVLRRAKHNPEKYPWLTQLLARRPFKVVAIALANKMARVAWALLASGGRYRAPRLTAA

SEQ ID NO: 284854 - protein, 455 aa, unidentified
MPRKRTEDRPELKPVNVGAAAIDIGSRMHMAAVNPVCTDVPVRSFGTFTQDLHDLADWFKACGVTSVAMESTGVYWIPVYEILEQCGFEVILVNARYAKNVPGRKTDVSDAAWLRQLHSYGLLRGSFRPDAEIATLRAYLRQRERLVEYAAAHIQHMQKALMEMNLQLHHVVSDITGATGMRIIRAIVAGERNPDVLATYRDVRCHSSIETIRAALVGNDRDEHVFALSQSLELYDVYQAKMLDCDRKLEVLIAALSNKGAKPVGKLSKPRIKTKQVNTPTFDVRTALYGVLGVDLTEIHGLGPSLALKLVGECGTDLRAWPSAKHFTSWLCLAPGNKISGGKVLSSRTRRSSSRAAALLRLAATTVGRSDTALGAFYRRLSSRAGKSKAVTATARKIAVLFYNTLRHGMSYKDPGADQYGQQYRTRVLANLQRRAKSLGFVLQAIPAEAEPAVS

SEQ ID NO: 284855 - protein, 370 aa, unidentified
MGKSVLYVGLDVHKMSVDVAIAETGPAGEVRFYGRIGGDLEALDKVTRKLQAQGAELRLAYEAGPCGYQVYRHLTARGLECLVAAPALIPRRPGDRLKNDRRDALALARLLRAGELTPVKVPDADDEAMRDLTRAREDAICVERRARQRTVAFLLRHGRVYPGKTTWGRGHWAWLLQQVMDHPAQQIVLQEYLDAVREASARVLRLTGQIRDLVPQWHQAPFVAAYQALRGVSFIVAATVVAEVGDLDRFNNPKELMAYLGLVPSEHSSGASVRRGRITKTGNSHARRVLVEAAWAYRLRARVSRTLLKRQEGLPERVRQLAWKAQLRLCTRYRRLLARGKARQTIVIALARELAAFLWAIGRAVAPATA

SEQ ID NO: 284856 - protein, 425 aa, unidentified
MKKTDYLSTLFVGIDIGSRTNVVSAIDFNQDFFIRMKPVPNAKEGAETLESLLVDVLSAHHEFNHVIIGLESTGFYGVHIANYLSASGLLAPFGTEVYCLNPKEVAKYKESFNSLDKNDGIDSFVIADFARVGRISIKPWRGAQYLALQRLTRHRLHITECIAREKTYVLNNIFLKFSEFAMLKKEDHPFSNKYGATAEAILEQYVTNDDIIGASIEELVELIESKSRGRITDPEETVKILKAAANGSYRLDKVVAEPITLSISSSFNCIRAFEKELKAIEKAIEHTVQGLNPVEYQVLKSIPGIGHVYAAGILAEIGTIKAFTGNGALAKYCGIVWKENQSGNFRAEDTKMSKAGNRYLRYYVIEATGSVINNCPEYKDFYDKKFAETTTHQHKRALALTSRKFLRMLFGLLDKSQLYSLERSR

SEQ ID NO: 284857 - protein, 373 aa, unidentified
MSEVTTFVGMDVHKKKIAVALLAPGHRESVTWQLPNEPAAIRRLARRLLRESDGDLFACYEAGPTGYALQRQLRAAGVACQVVAPSLTPVKPGARIKTDRRDARKLAELLRADLLTEVHPPSESDEALRDLCRCREDVREDLTRARHRMSKFLLRRHCYYGAGKRAWGTRHRVWLGSLRFDDPASQATFDCYLGTIDQLGERLRHMEEQMAAFAAAVPYAEPVAWLRCFRGIDTVTAVTLVAELHDFQRFPSPRALMAFLGLVPSEHSSGESQRRGPITKTGNRHVRRLLVEAAWHNRYRPAVGLPLRRRREGQPQRVIDLADRAAGRLHRRYVRLTARGKPTQKAVVAVARELAGFLWMTLHPEGLPAQIQE

SEQ ID NO: 284858 - protein, 355 aa, unidentified
MDSKKYIGMDVHKESISIAVMNGAGKIVMECVIETKASMILQFIDGLRGDLQVTFEEGTSAAWLYDLLKPYVTKLVVCDPRKNASMKEGNKSDKIDARRLAELLRLNHLNPVYHGEHGLRGLKELVRSYLTITKDLGRVMTRVKAIYRSWAIPCTGKQVYAPRHRAEWLGKIGEPGVRRRAEFYYQQLDALRAVRQQVRRELLAEGKKHKAWKQLCQIPSIGPIRAAVLLGILQTPHRFRSKRQLWTYSGFGIETHSSADHRNVDGQLQRAKKHISIRGLNRNCNHDLKNLFKGAAIVASSKPGPFQEFYTALLSKGIRPEMARLTLARKIATIVLMVWKRGACFDAQHLKPQTA

SEQ ID NO: 284859 - protein, 405 aa, unidentified
MDVVYERCCGLDVHKKSITACIMTPDGKEIQTFGTMTEDLLSLVDWIKSKGCTHVAMESTGVYWKPIYNLLELEEIQTLVVNAQHIKAVPGRKTDVKDAEWIANLLRHGLLQGSYIPDRKQRELRELIRYRRSLIDERAREVNRIQKVLEGANIKLSSVATNVLGKSGRAMMEAMIQGVDDPAVLSELAQRRLKNKKGELERALQGLIGPHQKLMLSTQLQHIDFLDQQIAKLDEEIKARMLPFEEDLELLDTIPGVGRRTAEQILAEIGTDMNRFPTAAHLCSWAGMAPGNNESAGKRRSGRTRKGNKKLRSALVEAARAAARTKNTYLSAQYNRLAARRGANRAAVAVGHTILTITYYILVRKQSYIELGADYYEQRKKDAVIKQSIKRLESLGYKVKIEEIA

SEQ ID NO: 284860 - protein, 336 aa, unidentified
MDNVTTIGIDLAKDTFSLHGVDALGCVVLQQSVKRRELLSVVRQWPPCLIGLETGSGAHQWAREFQAMGHCVKLMSPQFVAPYRLGSKNDGNDAAAICEAVQRPRMRFVPVKSLEQQSWLSLHRVHLGFIEERTAMCNRIRGLLAEFGFVLARKSATLRRVVPTLLESVPSHVARCLRDLLDHVRLLDERVAEYTREIVRHAKTHPGAKLIQERLGIGPMTASAYIAYLGDGSEFRNGRQVVAWLGMVPKQHSTGGKARLGQITRRGDKYLRTLLVLGARSVLQRAPKRDDAFSKWALQVRQRRGYHRACVAIAAKNARVAWAMLQGRQPRRASAV

SEQ ID NO: 284861 - protein, 324 aa, unidentified
MAKRITICAGIDTGKRKLDVAIDGSSLQLQVENAAEGHKVLLEWLRRHKVKRIGIEASGGYEIPVVTELRRKRFVVVVFQPAQVRAYAKFHLQLAKNDKIDAALIAACTAAVRKIHAAPDPRLQPFAEHLTLIEQIGEDIKLYKNRIETCRDPRIQKLWKEEISRLNKRERAELKALVAAIRQHRDLAQRLDLIYSVSGAGMPTAVAILVRMPEIGTLSREQVAALAGLAPYDDDSGERSGARHIDGGRKRLRRALYTAALPASFFWNPHLIALYQRLRAAGKVHKSALIACARKLLIFVNTVVARGTPWQNEQPVRATNPAAA

SEQ ID NO: 284862 - protein, 468 aa, unidentified
MTPHKDYVLEPCPPAPMPLLPPSPVLSEALQVYHPHAAGIDIGEAEHWVAVPPGCDPQPVRRFGTFTVDLDALADWLIDCGVTTVAMESTGVYWIPLFELLEARGLQVLLIDPRQAKRVPGRPKTDRLDCKWLQRLHTYGLLAGAFRPDAHVCVLRSYLRHRQMLLTYAAHHIQHMHKALEQMNLKLTQVVSEITGVTGMAILKAIIAGERDPQRLAKLRNPHCHHDEDDIAKALQGTWRAEHLFALQQAIALYDFYHQQITQCDQQIKAHLATFGDQSAGRPLPPKARRHTKTNEPRFDARTPLSRLAGVDLTTIEGIEEGTALVILSEIGTDMTRWPSVKHFCSWLGLCPQHKISGGKVLSRRVRPGAHRVTVALRLAARTLHHSQSALGAFFRRMKVRLGTPKAITATAHKLARLVYSLLRHGSAYVQQGLDAYEAQYRERKVTAMAKQAKALGYTLVPLAAQGS

SEQ ID NO: 284863 - protein, 409 aa, unidentified
MDVVYERCCGLDVHKTSVVACLLISRSAGEPVRTVRTFGTMTGDLLDLADWLAAAGCTHVAMESTGVYWKPLWNLLEDSFELLLVNPRHIKAVPGRKTDVTDAEWIADLLRHGLLRASYVPNRPQRELRELTRYRTSLVRERTAAANRLQKTLEGANIKLASVATDILGKSGREILAALVAGETDGATLAQLAQGRLREKLPQLEQALVGCIGPHQRFLVAEHLAHIDFLEAAIDRVSAEIAERLRPCAEAVARLDTIPGIGPYLAEALIAEIGTDMSRFPTAAHLASWAGMCPGNHESAGKRRSGKTRKGSPWLRALLVQAAHAGARKKDTYLGAQYRRLAARRGKSRAAVAVGHAILIIAYHLLRDGTDYHDLGPRYFDERDRRAVERRLVHRLEGLGYTVSLQPAA

SEQ ID NO: 284864 - protein, 408 aa, unidentified
MTTAEYELYVGIDWATQEHRVVVLDAARRPLHDRIVRQDGAALEAFATWLVALVAGRGAAIAVALEVPRGALIDTLLARGCHVFAINPKQLDRFRDRFTVAGAKDDRRDAHVLAAALATDRPAFRPLAPEDARIIELRELSRLDEELGQEGRRLTNRLREQLSRFYIQVLPLSPAADEPWIWALLQRAPTPAAARSVPRAVIQRLLTRHRIRRVSADAVRATLRAPALPVAAGTVPAAQPQVGMLVARLQLVHDPRATCGARLEALLEALAESQEHRDVPILRSLPGVGSRVSATMLAEASRLLAGRDYHALRAHSGLAPVTKQSGKRAVVMMRSACNRRLRDAAPYWGQSAVRHDPHSAAHYQRLRARGHSHGRALRGVVDRLLRVLMAMLKTQTLYDATRRPALST

SEQ ID NO: 284865 - protein, 344 aa, unidentified
MQIACIGLDLAKFVFEVHGVDGHGKMVLCRTLRRGAVTAFFANLPPCLVGMEASNGAHFWAKAISELGHEVRLISPQFVKPYVKSNKNDRNDAEAICESVGRPNMRFVPIKSAEQLAVQAVHRIRSRLVADRVRFVNQIRGLLGEHGTVVAKDISNLRRALVRIVDDDGDRGLNKLVRSLMGELRQELTELDARIADYDRKIRELYRSSEVCQRLSKIEGIGPVTATALVAAVGDRSSFKNGRQFAAWLGLVPRQRSSGGRAKLLGISKRGDRYLRTLLIHGARAALGRVREKQDPRSLWLSKMRQRRCPNIVAVALANKNARIAWSLLTSDRVYDPSLSVCAA

SEQ ID NO: 284866 - protein, 411 aa, unidentified
MNPVVGLDVAKGESQVQAYLEKKKPYKTSFKVTHTLEGLENLHQFLREIESLTGVKLPIVLEATGHYHTPVVQYFEEKDYLLIIVNPLISYRAKSSSLRKVKTDIIDANHLCELYYKEDLEPYKKRGIQLLNLRNLTRQHENLTGIYVQAKLQFQAVLDQVFPEYRGVFGDLYSVVSLLTLLEYPTSNDVLEAEEERIAAKIKEHCKSRSRKWAATKAKELIVAAARNPFRKTLYQSHILTLKMYINMLLEYQKHLSVFEVEIDALAKELIEYKIIQSIPGIGEKIAATIISEIGEIDRFNHPKKLVAFAGIDPSIFESGRFKGTVNRITKRGSSRLRRALYLAVKCAIRDCRKKKTTKDIIPRNKRLREFYDKKREEGKLYKVAVIACANKLLQWIYAILKNNSTFQDIA

SEQ ID NO: 284867 - protein, 428 aa, unidentified
MGEGSARLFVGIDWGTEEHQVCVEDASGAVTEKRRILHSGDGLAGMCDWLLELAGGDSSTVSVAIEVPHGPVVETLLERGFVVFSINPKQLDRFRDRFSMAGAKDDRLDAYVLSDSLRTDEHCFRKVKLDEPEIIELREFSRISGELTTQRNRLSNKIREQLRRYYPQALELPADVDATWFLDLLMLASTPEKARRIRESSVGKILRKRRVRKVDAKNVLQTLRKPGYTVAPGTPEAASSHVRLLVQQLRLVNEQLKDCRRQLAVMLDAFHASTVDTLAEESDEVEKCEQRSDVEILRSLPGIGVVVLATLLAEASQPLGDRAYHTLRALSGAGPVTRRTGKRRPMVMMRRACNPRLREALYHWARVSVQHDPVSREHYARLRAKGHSYGRALRGIGDRLLNVACAMLRNRTLYDPSMRHRTAQKEAA

SEQ ID NO: 284868 - protein, 354 aa, unidentified
MTSTKYIGMDVHKESISIAVMNAVGKIVMECVIETKANMILQCIDGLRGDLYVTFEEGTSAAWLYDLLKPHVTKLIVCDPRKNASMREDNQNDKIDARRLAELLRIDHLHPVYHGEHGLRTLKELVRSYLTVTKDLARVKTRVKAIYRSWAIPCDGKEVYAACHRAEWLEKINELGVRRRAEFYYQELDGLRVLRLGVRRELLAESKKQKAWKRLCQIPAIGPIRAAVLLGILQTPHRFRAKRPLWKYSGLAIETCSSADHRSINGQLQRSKKNSVRGLNRNCNHDLKNLFKGAAVIASSKPGPFQEFYAALLAKGMRPEMARLTLARKIATIVLIVWKRGVCFDAQHLKPQTA

SEQ ID NO: 284869 - protein, 428 aa, unidentified
MAGVMIGIDPHKGSHTAVALDGREKRLGQLRVRASRMQVEGLLEWAGHWPRRTWAIEGARGLGQLLSQQLIAAGERVLDVPPKLAARVRLLNTGQINKNDDNDARSVAVAALRAHKLPELAAEDHTMVMRVWARRYHDLGRLRTQAVCRLHTVLCELVPGGVRRQLRTSQAVELVDRIVADSPIARAKLELARELIADLQRIDTQRREAKRHTARAVDASGTSITSIYGVGPIVAGTVLGYVRDVRRFPTRHRFASYNGTAPIEVSSGDRRIYRLSRRGNRQLNHAIHLAAVTQIRHRGSEGRTYYERKIAKGMGGKAALRALKRKISDTLYEHMIDDVHTRDKRIGKDPGGQSGNDAASSVAGSHPDRPALRTSHSRAKANSRTAATGGVLRSGPAPDRRRTSRSAAGVQVEPRPCPRRRGHGQDRP

SEQ ID NO: 284870 - protein, 424 aa, unidentified
MKVTYPTCCGVDVHKSFLVATIIKTTGGIEPSYQKKRFSTFNNSILDFKSWLLENECHDVCMESTGKYWVPVFNLLEDQINVTIANPKWVKAVKGNKDDTKDSKWIGDLFRLGLVKGSYIPCKSIRILREYTRYRYKLVSCRSSEKNRYQNALTVCNVALDSVVSDIFGKSSSSIIDYLLEQSGTTINHEEIASKLLKRLKSKEDVVIESIEGYQMTDSQKYRMRLVRAHIDYITAEINDVDKQIESLISSVPDYVKAIRFLTTIPGVKHDSAITIISEIGIDMSQFCNSKRLCCWAGLTPGNNESAGKKKSVRITRAGIYLKPALVQCAHAAVKSDKSPYYKKKYESLVKRRGKKRAIIAIARMILTAIYQMLSTGEVWNPSDLYKIDMPAPLVERQKAKAIKQAKKLLQKEGLLPPDEPLAS

SEQ ID NO: 284871 - protein, 403 aa, unidentified
MNSVGIDISKGRSTVAVMRPFGEVVISPFEVRHTDSELSELARQLKSLDGETRVVMEATGNYHASVAKLLHDAGLYVSVVNAKLVHDYGNNELRRVKTDRKDAVKLANYGLDRWLTLPRYIPEEDTRLLLKNCYRQYRQYSKVQTVLKNNLISLLDTVFPNANRLFSSPIRGDGSEKWVDFVAEFWHCRCVSEKSERAFTSKYLRWCRKHGYNFREAKAHTIYAEASGHIGVMPKSETTKLLVEQAVAQLRATSTALAALKHEMQSLASQLPEYPVVMDLFGVGPTLGPQLIAEIGDVRRFYSKKALVAYAGLDAPPNDSGDVTGRHKSMSKIGASSLRRTLFLVMSVYLQTAPLDEPVYQFMDRKRAEGKPYRVYMMASANKFLRIYYATVKAYLESLEHTA

SEQ ID NO: 284872 - protein, 452 aa, unidentified
MAEEPVEIDAEEHEQIVERVAAIDVAKASGELCTRVPHASIPGKRVTKVWSVAATTNAITALAEQLARERIERVVVESTSDYWRPFVYLLQARGLTVWLVNARDVKQVPGRPKTDKLDSVWLAKLNERGMLRPSFVPPAEIRRLRDYTRLRLDLTEERSRHAQRLEKLLEDALIKLSSVASDILGVSGRAMIEALIAGQRDPQLLAELARGRMRVKRAALVEALTGRFDDHHAELARMLLDQIDALSAKIDALTLRIEALIAQIPAAQAPAVDETRGGEGDDPATAPLAAVARLDEITGIGVHTAQVLIAELGLDMRQFPTPGQLVSWAKLSPRTIQSGARSRSGKTGKGNRYLRGALGEAATAAAKTNTFLGERYRRLVKRRGKLKALVATARSILVIVWHLLADPAAHYRDLGSDFYAKRIDKNRRQRHLIRQLEALGYTVTLEALPMAA

SEQ ID NO: 284873 - protein, 368 aa, unidentified [sequence omitted]

SEQ ID NO: 284874 - protein, 421 aa, unidentified
MKNSAARKLEQIPAGYLAIGVDPHKKKHAAVAITGNLMVRTKFKFDNSKVGFEQALENARAEMIKSSCRGVIFAIETGGHFWRNFAYFLEERGIPFRLISQFTLKRMRDGRDVNRRKSDFRDAEMAAGVLLTGDFTETRLPQGVYADLRSTYSAYFRLAKERSRIINLLKGLMDGLFPEFTQVFKNPCGLTASTVLSTCPIPATIASMKEENFLDSIKSRHRGRLMRNKLRALYQIARTSVGIKPGAGSVAMEVSLLVNRYSLVEGQAGTLVKALVRLVDQTEEGKYLLSIPGINYLSAAALLAELGPLKAYQSAKQVIKMAGTNPIESESGGKKRGQTPMSKKGRPRLRYSAWNAVIPLFRHNPDFRSWAKRLRERPVHANPLNGKEVIGAALNRLLRLVYTLVKKQEFYHSPQRALVAN

SEQ ID NO: 284875 - protein, 313 aa, unidentified
MIYIGIDVAKDSLVGVRIDKSSCVKETYTLINNPETIKHFLDAITKKWKRITIGSEATGYYHQVLALACLDREIPFRLLNPIITNQFTRATVRRRKTDLSDAFVIAKLVMQKEGTLLTQEMFTKSKPAMRTAVKLNQIEQMLHLMQQKLAMTDMDTSLIEQLGLCQKQLQESQIVFRDFAQTMVDRKLQKLLMTIPGIGITIATTLIAEIGDIKRFPSGTCLVSFCGLDPRIKQSGGSLHHNTHLTKRGSPNLRRSMFLAASIAQRYDIELKTYFEKKRTEGKFYKEATVANARKLLYRIYAVWTRGTPYLVR

SEQ ID NO: 284876 - protein, 356 aa, unidentified
MQEKTTKLDFTNQEIYVGLDIGKNSWKTSIMTEHYEHKTFTQPPRIDALVKYLHRMFPGATYHCVYEAGYQGYWIHEALKEEGIDCIVVNPADVPSKNKEYANKTDRVDARKLARCIRSGELDAIYVPFRQAQENRSLVRTRHQFVKKQTRCKNQIKGLLSFYGITIPDNICTSYWSRRFVCWLEQIKFQQASGDKTLGALLEELKFLRKQITYLTLQIRTLSREEQYCTAVEYLSSIPGIGTLSSMILLTEIIDINRFNSVDRLASFCGIIPGEHSSGNKEIITGISTRRNSMLRKILIECAWVAVRKDPALIMSFNKLSKRMPKNKAIICIARKLLNRINYVLKNQQYYKVGIV

SEQ ID NO: 284877 - protein, 343 aa, unidentified
MLAITTVGLDIAKSVFQVHCVDARGNAVVRRQLKRRYLLAFFKKLSPCLVGIEACATSHHWSRELQALGHTVRLIPPAYVKPYVKRQKNDAADAEAICEAVQRPSMRFVPTKTPEQQGCLMLHRTRHLFIRQQTAVINTIRAHLAEFGIVAPLGRNGVEELLYAVADRREERIPDVARACLEALGAALRRLKAQILEFDRHINAWHRSNETCQRLDELPGVGPALATALVASVGDPKAFRSGRDFSAWIGLVPKQNSSGGRDKLGGIIKQGDRYLRSLFTAGALAVIRYAKIHGSRHRPWLTKLLERRPTKVAAIALANKIARMAWAMMATGECYREPLALAR

SEQ ID NO: 284878 - protein, 345 aa, unidentified
MKITTIGIDLAKTVFQVHGVDERGKAVSRKQLKRKDVVSFFANLEPCLIGMEACGSAHYWARKFSELGHTVRLMAPQFVKPYVKTNKSDRNDAEAICEAVARPNMRFVAVKTAPMQAVLALHRARQGFVRARTAQANQIRGLLAEFGIVIPKGIGHIAKRLPEILEDGDNALPGMMRELLERLGENLKDMDRQAGELERQIKLWHRENEASRKLEAIAGIGPITASALVATLGDAKSFKNARQVPAWLGMVPRHEGTGGNVKLGGISKRGDVYLRTMLIHGARAVIAHMERKPDHADEWLKKLIARRNKNIAAVALAAKNARIAWALLAHERSYQHDYVATRKAA

SEQ ID NO: 284879 - protein, 347 aa, unidentified
MKSTIVGVDLAKKVIQVCTCTNHTVRSNVEMTPNEFTQFLANSKPMSVVFEACSTSSYWKQKALFFGHDAHLISAKLVASVRQSQKTDKNDALAIVQSALLPDVRFISGKSAQQQQLQSIMRLRELCVKQKTAISNQLIALLSEFNISSSNRNGGLKGAVERTLADSKNEFSEHFRSSLDTAWKLYIELSKSLVIYDQCLENSIEEHPDCKKLLKLEGVGPINAINLYIALGCGDLGGFNKGKDASACIGLTPLQHSSGGKNKIGSIGKHVKNTIVRSNLITGASNFVNHVIKREAKTAKEIWIQGVVDRRGIKCAAVALANKTVRTAFAMLSQGTEYRADFVKPLF

SEQ ID NO: 284880 - protein, 416 aa, unidentified
MLVQRDKACGVDVHRDSIVATILSRDGTKVQKEFGTTISELFEFRDWLRSNECKVVALESTGTYWIPVYTVLEDGFEVIVANPYMIKHIRKKKKDQIDSEWIAELCLNDQIAPSRIFPKDDWALRMLTRTREGLVKTRTDYKNKVHRDLASANIKLASVITDVFGKSGMHCLTGKLLGQDIDEIIRTIPSRRVRKKADQIREAIIANLNQVQILSIRISLSLIESLNQKIEEIDRELRSRILNRQKDLEIAISVPGIDFVSGVTILAEIGNYRDFTSPEQLAAYFGLVPYVYQSAGKLYTGPITKMGSKHLRWILVQVAHAASRVKNSRFRRFFLRVRGRRGHNVAIVALARKILCILYHLLINQEMYVEEVKKPKPSKLRISETSSPIGMTLEEMIVVVRQSGYVVSQIDGGTCG

SEQ ID NO: 284881 - protein, 345 aa, unidentified
MPIVGGFDIHRKQITFDYLDTSTGEVKRGQIAPADRAHLRAWLARFAGCDDVAFALEGCTGWRYVAEELAAAGVTAHVAEPADTAFARGRKRHAKTDKTDSRHLRELLAEGRLPECWIPPSRILECRALLETYHDLRAEHTGWVQRIHAVFFHQGAPALGEGALRTDRDLEALRAAAAAHLSPAGQLQVATALDMLAGLEARLDMLRHRLLAAARSLTGARVLAERLYGVGPVTGLAMTCWLGGAGRFSSSRKAVRFAGLDVTVWSSDRKGPPGRLSRQGPEVLRWAVYEAGKTHARASAPDHRYYAQVKDRQDGKRAAISEARKILRQACHILAELGDDALTAA

SEQ ID NO: 284882 - protein, 370 aa, unidentified
MKKDTLFVGLDTDKKHVDVAVAEPLPRGEVRYWGRTANTPAAVDRMVKKLGHGGRELVVCYEAGPCGYGLYRQLTDKRGVRCLVVAPSMTPQRPGDRVKTNRRDALKLARLLRAEELTEVWVPDAAHEAMRDLVRARSSVVSALTRCRQHISSFLLRQGIAYAGKPWTNKHRAWLGTLRFEHAAHRLLLAELLLALDQAQAGRDRLTDHIRELVPNWSLAWLVEALQALRGYELINAAVMVAELGDPRRFAKPRQLMGFVGLNVSEASSGETVRRGRLTKTGNKRARKALIEAAWTYTRPAATTSKPAAARLPAAVQQIADKARHRLSRRYRHLVRRGKLKQVAIAAVARESLGFIWAIAHAAAPLPAQS

SEQ ID NO: 284883 - protein, 449 aa, unidentified
MEQPQEAEDEEHERVHERVAAVDVAKASGVVCTRVPGDEPGGRRRMHVWTVQATLGAVTELGDHLRCEGIEVVTLESTSDYWRTWHAGLEACGLKVQLVNARAVKNVPGRAKTDRKDAVWLAKLTERGMLRPSFVPPYDIRRLREFTRLRADLVRERSRYWSRLEKLLERALVKVSSVASKLTTQSVRAVLEALIAGQRDPRALADLAIGKMRAKRKELAEALEGRFEDRHAELARILLDQTDALTAQIGALENRISELIAQIPAAQGVDADGTTGPEAGRGPDAAVLPAVARLDEITGCGTVAAAAIIAEVGLDMTVFATPGRLVSWAKRCPQTRQSGQKNTSGKAGKGNPWLNGVLGEIAASASRTDTFLGERYRRLARRRGKRKALAAIARSVLVIIFHLLADPATRFNDLGPDYYDNRISRERKIHNHVRQLEALGLRVNVEEAA

SEQ ID NO: 284884 - protein, 343 aa, unidentified
MSEISMIGLDLAKNVFQVHGVDASGSVVLRRQLRRGAVEKFFAQLPPCTVGIEACGSAHHWARVIGRYGHQVRLMPPSYVKPYVKRNKNDGRDAEAIYEAVGRPTMRFVPGKSVEQQATLAVHTTRALLVRQRTMIANSLRAALSEIGIVAAQGLEGLRELMTRLEAPNEEVPEIMRGALLMLAKHWQALDADERALERQIAKAARADHEARRLMEVPCVGPIIASTVLAKVPDAKVFRSGRDFAAWIGLTGRDHGTGGKHRPGRISKQGDRMLRALLISGASAYLRHQKTRGVSDPWLRDLLARRPYKVVMVALAAKTARILWAMLVKGEPYRDRASASAAA

SEQ ID NO: 284885 - protein, 318 aa, unidentified
MSMLSFCGIDVSKDRLDVMVLPGQQSFAVRNDAVGWAELVARLRGIAIAAIGLEASGGYERGAMRALLAAGLPACQVNPFKLRQFAKASGILAKSDRLDARVIASFIAIMPTRPAQLRPPAIERLAEMLAVRRQLNAEKVATENAARLLEDTMLQRLSRRRVARLAADVDMLDRHLVEIVETDVALAHRYRLLTSMPGVGLVLACTLIALLPELGTMSRKQVAALVGVAPYAFESGKFKGLRCIWGGRAPVRDALYMAAMSAGNWNPVLKPFRKRLKDAGKMAKVVIVAVMRKMITMLNAMVRDDVEWADLLDGQQLR

SEQ ID NO: 284886 - protein, 322 aa, unidentified
MKVTLIGIDLAKSILQVCGVNHAGKRVFNRQVRRTRLMELLMQHPDATVAMEACSGSNYWGRELQQRGFKVMLIPPQHVKPFVKGNKNDRNDAFAITEAARRPDLKCVEPRTLIQTDLIQLHRVLDRMIRQRTALINQLRGFLNEYGLIVAKGKEKLLAAMPGLLEDAENGLTPASRVLFQELYEQWRQANNDEAAQRLMKMKGVAEKISTATIAHAGNGRGYKSGRHFSANLGLVPKEHSSGGKQKLGGITKRGNRYLRRLLIQGAWSVVRNADKNDDRMSRWARQLVERRGKHKAVVAVANKMARIMWSMLYHQTEYRAA

SEQ ID NO: 284887 - protein, 362 aa, unidentified
MSKASWLVSGAIPGVERQPLKKLEPDATALLRLIERWRNEAVRAGRPISRIALAYEAGRDGFWLARWLIARGIEAHVIHSASVAVSRERKRAKTDRLDAAMLMRVFLGWLRGERGHCGMVAIPTMEEEDARRPSRERECLVNERSRITNRMKSALARLGVRGFKPHLRKAPGRLAGLRTAEGTGLPANIIEEFRRDMARLALVREQISSIEKTRAERLERAPDTGPHAMVRLLARVIGIGIETADMLVREILSRKLRDRRAVARYAGLTGSPDESGLKRREKGLAKAGNARVRRGLIQLAWRFLMFQKDSALARWYRTRTEGPSGARKTTMIVALARKLLIALWRLVTTGEVPDGVELRPAA

SEQ ID NO: 284888 - protein, 372 aa, unidentified
MGHHTEAFVGIDTSKSCNAIAIADGGRGGEVRYLGEFSATEAAIRKLVAKLAAKYRDLMFCYEAGPTGYGLYRLLKSLGHECLVVAPSLIPKKAGDRVKTNRRDAVSLAKLLRAGELTAVWVPDERHEAMRDLSRARQAVKKDLQGKRQQISSLMLRLGRIFPGKTTWGPAHMKWLMAQKLEHREQRIAFEELLEGIRQESERVERLEKAIREVVPEWSLAEVVAALQAMRGIDLIAAVGVLAEIGDLSRFQNPRELMGYLGLVPSESSTGDKVKRGGITKAGNGRARRILVEAAWSYRYPPRVSREKQPKVEAAPRRVREIAWKAQTRLCGRFRSLERKGKRRTVIATAVARELSAFIWAINCELMAHRQA

SEQ ID NO: 284889 - protein, 407 aa, unidentified
MEVVYRCCCGIDVHKKVIVACLVNGGEQELREFGTTTSEIKTLANWLTESGCEMIAMESTGVFWKPLYNLFELMDLDAMIVNAAHMKALPGRKTDVKDAEWIADLLRHGLLKASYIPNREQRELREITRYRKSLTEERCREVNRLQKILEGANIKLDSVVKDITGKSARKLLQRIIDDDIPDSDEVSKLVHGRMRPKLEQIVASIEGITTPLQRKLLAQIIDHIDDLNRRIGELDKLVQEYMAEYEAAIEAIDEIPGIARRSAEVILAEIGLDMGRFPSAAHLCSWAGVCPGNYQSAGRRKHGKTTKGNKALKTILTQCAKSAKTVKSSYFFAQYQRISARRGKNRATLAVAHSMLIAIYHILKNKTAFHDLGSDYYDSFNRDRKINSYLKRLKALGWEPDAIPSPA

SEQ ID NO: 284890 - protein, 272 aa, unidentified
MAMVSFGGIDVSKDRLDVMVLPEEQCSSVSNDAAGWAKLVEQLRGFSISAIGIEASGGYERGAVRALLAAGMSVRQVNPFKLRQFARASGVLAKNDPLDARMIASFVAVMPTRPAQRQSPAAERLAEMLAVRRQLSAEKVAAENASRLLEDAMLQRLSRRRIARLAADIDMLDGHLVEVVGTDAALAHRYRLLTSMPGVGTVLACTLIALLPELGRMTRKQVAALIGVAPYAFESGTLKGRRCIWGGRANVRQVLYMAAMSASNWNPGQGVP

SEQ ID NO: 284891 - protein, 344 aa, unidentified
MNKLNRVGIDLAKNIFQLHGVNRTETSTWCRRLKRDNWIKVLLNKVEPGCEIGMEACTGAHHWARLLQSKGFRVKLIAPQFVKPYVKSNKNDANDAEAICEAMSRPGMRFVTVKTIEQQEIQAVHRVRSELVGQRTAKGNQIRGLVAEYGLVAPQRINHLRAALPAWLEDAENGLSDRFRRLLDGLWGDLKRLDERVSEMDKEIALIAESDPVAKRLQQLRGVGPMVATALLAAVGDGKQFANGRQMAASLGLTPKQHSSGGKDRLLGISKRGDSYLRSLLIHGARSAIYAARGKEDRLSQWVISIATRRHPNVAAAALANKTARIAWAMLRYDTDYAPELAAA

SEQ ID NO: 284892 - protein, 391 aa, unidentified
MIYIGIDVAKDKHDCFITNSDSEVLFKAFTIFNNLDGFNDLYQKIESVMDDVTKVKVGLEATGHYSYNLLGYLIDKGLPTYVINPLHTNLYRKSLSLRQTKTDKVDARTIASMLMSDVNLKSYSDTFYHNEELKSLTRYRFDKVKERAKLKTSVSRLVCILFPELEKLVPTLHMASVYALLSEFPSAKHVATAHLTRLTNLLSESSKGRYGKDTAITFRDSARASIGSNMPAKSLELKHPIKLIQELDSEIDEIENEIKIIMDEINSPILSIPGINYRMGAMIIAEIGDFNRFDSPDKILAYAGFSPSTYQSGQLDGAYAHMEKRGSRYLRYALYNATKYVCHWNPTFAAYLAKKRAEGKHYNVAISHAVKKLVRVIYHLEKTKQQYIKAA

SEQ ID NO: 284893 - protein, 312 aa, unidentified
MALQDVFVGIDVSKGRLDVHVRPLGVGFSVSNEAAGYAALIARLRPLRVKRIVLEATGGYERALWLALSEAGLVAAIVNPRQVREFARAAGRLAKTDRLDAAVIAHFAETFAPRIGKPDPVADRLGEHVLYRRSLQDEIVALEHQRRRLETPALRERAERRHAALRAEVKEIEAAMRAIVDSDPAKKALFACLTALKGVGLVLACTLIANMRELGSLTRHQAAALIGVAPLNHDSAARRGYRAIAGGRRRVRNVLYVATLSAVRCNGPIREFYRRLSAGGKPAKVALVACMRKMVVMLNGRVRDQLAATATP

SEQ ID NO: 284894 - protein, 350 aa, unidentified
MNYAQINQRYLCGIDLHANSMYLKILDREGRVLYKRNMPNNFALFKQILTPFLPDIAVGVESTFNYYWLYDGCVEAGVPFYLGHAAYMKAIAGNKQKNDPLDAETIAHLMRSNLFPQAYPYPKEMRAVRDLLRRRHRLVRHRSEAYTHVQLLLRQQGICEFRGKDVKSVSGKQEILQSLTDPDVYYLVNSDLLLIDQLDKLLSEKEKHIKERAYHHNGTDYSLLKSVTGVGDMLALSILYETHDINRFPRAQNYSSYCRVIRVQRTSAGKNKYGRNQKMGNPYLKWEYGQIISHARQSSDQINAYYQKLEAKRCAKLARGIMSHKFAVAVYHMLKKKVAFDENRFLKVAS

SEQ ID NO: 284895 - protein, 348 aa, unidentified
MRFYTEQHQHYCGIDLHARTLYLCILNAEGNVLLHKNLPCDRTRFLEAIEPFREDLVVASECIFNWYWLADLCAEHSIAFVLGHALYMKAIHGAKAKNDRIDALKTVSLLRGGLLPMAYVYPAQMRSTRDLLRRRTHFVRKRGELMAHIQNTFHQYNLPRPPGRLVYKYQRAPIPDAFDDPILKKSMETDLALCDTYDELIRDLEKTVLRQARTHDPQTLLRLNTVPGIGEILALTLLYEIHDIRRFESVQRFASYARLVKCEKSSAGKRIGTSGHKIGSVHLKWAFSEAAVSVIRHLPQSKRLHDRLKRKYGKGKALSIFAHKLGRTVYFMLKRNQAFDADRFLANA

SEQ ID NO: 284896 - protein, 371 aa, unidentified
MNYNIKYVGLDVSKEKIAVAVADEGRSKARYIGMINYTVEAIRKLIKKLGEPEQLEVCYEAGPTGYGLYRLLKSMDIHCEVIAPSLIPQKPGSRVKTDKRDAINLATLYRAGELTPVYVPTEDDEALRDLVRAREDVKEDELRAKHRLTKFLLRNEIRQPKGIRKWTAKYWEWLRQLKFQRSASKVVFQEYVQQLIEYQQRIKILEEEIKEQAENGVHAPLIQKLMTLRGVAIITATSLAAEVASFARFARPNGFMAFTGLVPSEFSSGDARKVGAITKTGNRHIRKLLIEAAWSYRHKPAVGRDLQKRQQGQPTNILSISWKAQHRLHKKYYRLMARGKESGKVVTAVARELAGFIWAIANEPDDASEMA

SEQ ID NO: 284897 - protein, 453 aa, unidentified
MINPNAGAIDIGSEQHVVAVPPGRDTESVRTFGSFTADIHEMGRWLKACGVTSVVMEATGVYWIAAFQILEQDGLEVHLIDPRAAKNLPGRKSDVLDCQWHQKLHSFGLLSSCFVPPAEILPLRTYLRLRQELVQNRSQAVERMQKALFAMNVQLVNVISDITGETGLAIIKAILAGEREGTKLAELKNQRIQASKAVIAKSLEGNWKEELLYALQTALASHEFYQQQIEQCEQKITETLERLPSRQIPPQDNCQANELQPLNKEAVKVYQLKELPPASNSCSREPLSPLAAELKRIAGVDLSSIDGIGEQTAQVILSEFGPDLKSRFKTEKHFSSYLGLCPGTRISGGKVLNRRSRKVSHRVATALRLAARSLHSSQSALGANYRRLKARLGAPKAITAMANKLAKLVYRLLVNGQDYFDRGIKHYEEKFRQQQIRRLEKQARILNLKLIPA

SEQ ID NO: 284898 - protein, 458 aa, unidentified
MVSKKRTGKQEKKVQRLDYINTNAAGIDIGSKSHFVAIPEGRDTQSVKEFSTFTNGLYELVAWLKKVKVTTVAMESTGVYWVPVYDLLEQEGFEVLLVNARHIKNVPGRKTDVCDCQWIQQLHSYGLLRASFRPEEKVRKMRTLMRHRSMLIEYASSHIQHIKKTLSLMNVRLDNAIRDITGVTGMKIVRAIIGGERDPAKLAKYRDSKCKNSEEVIRESLAGNYQEDQMFCLKQTIELYDQYQNQIDECCQEIQKIMNEMEALSDKEKTKAHKKNSTKRAFNFDMRQELVRVTGVDLTCIPSINAYTAAKVISEAGVDMSKWRTSKHFASWLGLCPGNKISGGKRLSGKTAPSANQAAAALRMAASSLQRSQTALGAFFRRLCGRMEKCKVITAVAHKLAVIIYNMIKTGSEYIESGAQFYEEQYRERCVKNLKKRAEQLGFSLAPKEPDTLTLCLP

SEQ ID NO: 284899 - protein, 317 aa, unidentified
MAMQTAPTIVGIDVAKAELVTYRADLDRVRTLDNEHKAIDRWLATLPAGSLIAIEATNDYHLEVLERAHALGHCPYVVDGYRLSHYRKGTGERVKTDARDARLLARYLGHEQAHLRPWSPPPAAYRRLQQLLRRRAALVRTRTALKQSFAGATAAAMLEPVLAGLRQLEAQLQRELLQVAEQAGLADPVQRCQAVEGIGPLTACALNMAYLRGPFRHSDAFIAFLGLDVRIRDSGRSRGRRRLTKQGDPELRRLLYNAAMAASRSQTWQPFYQRHLDRGLTRIQALVALARKLARVAFALIRHQTQYQPRLAGCEGT

SEQ ID NO: 284900 - protein, 357 aa, unidentified
MTIIIGIDMHVKTLVCEIGYGKMFPYKKTFMNDLAGHEMLFSYVDQLKKEHAIEDVLMGYEASGLGYVLYDRAIDRGYRCAVLAPTELLRSATGFKKKTDKKDASYIYETLRGHVLAGNRLSNIWVPDKEFREDRDLVRTWFDISEKISTVKTQIQTLLKKYGLRRPDEIESWTRAFMGWMEYEGSQQGKGFQISLDSLLRQLKSLNDESKLIEREVKALSQNKRYKRMCDALLTIKGVGLKTAMSFITEMGDMRRFQNRRQVGAYIGLVPSSFESGDASDRKGRITRNGPYRVRSILNQALWVHLKYNGEEKAYYDKIVSKNPKRKKKAVVACMRRLAVRMWHIAHNADTDYLKVA

SEQ ID NO: 284901 - protein, 312 aa, unidentified
MLTPPVYVGADVSKLTIDLGCPHFTVPTSIPNNPAGYRTLIKIVARSPVPVHVVCEATGPYHKAFAAALHQAGIVVCVVNPRLPRDFARSRGQLAKTDRIDARLLADFGRTMQPQPTPKPEASTVLLDDLVTRRAQLVEDRVREKNRLQQTTCAQAVASLKRHLRQLDAEIEAFLLHIDAVVQATPALRAKVQCLVGVRGVGRLTASALLAGLPELGTLSKPEVTALAGLAPFNRDSGAFRGTRRIGGGRAGVRKALYMAALSATRSNLVLAPFYQRLRAAGKAHKVALTAVMRKLLVYLNSLLKNHPVPTP

SEQ ID NO: 284902 - protein, 358 aa, unidentified
MSMQQVPTHRRVVIGVDTHKHVHVAVAIDELGAVLGNRSFAADSGGYIELIYWALAFGGKPTFGIEGTGSYGAGLASAVRRRNIGTIEVVRTDRRDRRLRGKSDTIDAENAARAVLAGQATAIPKTADGAVEMIRQVKVAKDLAVKARTAAMISLKQIIVNAPPELREELQPLSKMALIKRCAGLRPGPVTTIVASSKYTLRAIARRWQQLNVEIAGHEKVLADLTAQAAPELSAAFAVGPDTAAEMLIVAGDNPDRVRSEPAFAKLCGVAPIPASSGMTTRHRLNRGGHRQANAALYRVVIVRMQHHEPTKTYVARRTTEGKTKAEIIRCLKRLLAREVWAAMRPLRSTQQPAPTAA

SEQ ID NO: 284903 - protein, 313 aa, unidentified
MPMQTVIGIDIAKHHFDLHLLPSGKAKHFANNTRGIRQCRRFVLGVQPDKIVLEATGGYERALVMDLQAAHLPVIVVNPRRTRNYARAMGWLAKTDEIDASVIAEFATSPHVVVRPLPDPKARKRQALIARRDQLVQMHVAEQNHLEHAFDKDIVRSIRQVLKTLKRQIDHIEKQVAELIEADETLQRQFAILYSTPGIGETTAAMLVTQLPELGHCNRRQIAALVGVAPLNRDSGQFQGKRMTGGGRRRVRTRLYMPTLVAIQHNPVIRAFYQRLLNQGKAKMTALVAAMRKLLTILNAMVATNELWNPNIA

SEQ ID NO: 284904 - protein, 354 aa, unidentified
MKRTTKYVALDVHQASTVASVRDQGGRVIARSVLPTEAAALEEFFGGMRGSVHVAFEEGTQAQWLHGLLRPLVHRVVVCDRRGEARGGNKGDQVDADRLSRLLRSGDLRPVYHGGAGRATLRELTRAYRNVVDDSTRVMLRLKALFRARAIRTPGKRLYNPQNRAEWLAKLGDRGAGFRAETLYAELDVLRELRPRAKAVMVAEARRDPAWETLRTIPFMGPVRVALLLATMQTPWRFRTKRNLWAYAGLAVVTRSSADHEFVAGSPVRRRRAPLTRGLNKNHNRVLKDVFKGAALAAIVRPGPLQDFYHGMLNRGLRPELARVTLARKLAALTLRLWKTGEPYDPAQLTQQAT

SEQ ID NO: 284905 - protein, 379 aa, unidentified
MKKHCNSAMESEVRAKRVKSRGPVRRETRDVMAELVGKLSKKMDAKALSARLGEEYRRNAVCPNLDRLTVGMDLGDQWSHYCILGLRGETLAEGQMRTRQQEMAEFYGGLAESRVVIEVGTHSAWVREGIAECGHEVLFANPRLMEGSKRRQRKNDRIDANKLARLGRVDPQSLHPIEHRSKEVRQDLLVLRARDALAAARTELINTTRGLVKSMGARLPKCSSPSFAAKVEEAVPSEVREALLPLVRLAAALSDNIQAYDQQIEKLASKKYGHTKLLRQVKGVGPITALAYVLTLEHPERFAKSRDVGPYLGVVPKQEDSGDSQPQLGISKAGDTMLRKLLVGSAHYILGPFGPDTDLRRYGQRLCERGGKTRRNGPR

SEQ ID NO: 284906 - protein, 339 aa, unidentified
MGLYCGVDLHSNNAVYAVLDEKDRRVFRKRLPNDLPTVLEALAPFKSKLKAVAVESTYNWYWLVDGLQENGYRVRLANPAAMEQYDGLKDANDDTDAAFLARMLRLGILPEGYIYPKEDRPVRDLLRRRMLLVQTRTSIELSLRSLVTRHTGKDPSWRCVRQRVPPDLRHMLGGDEVLVFTVEQQMGLIRFLSEKIHLFEQQVLERAQLKPEYKLLLTIPGVGLILALTIMLETGDINRFPGVPNYTSYCRAARAKRWTNGKCKGDNNSKCGNAYLSWAFVEAVHHAIRCCAPAREFYQRKSAKRNGALATKALASKWTKAAFYVMKRQEPFDLKRVFG

SEQ ID NO: 284907 - protein, 351 aa, unidentified
MYLIGVDYHPSFQTIAFFVEETGEYGEQDLNHSDGKAEKFYRDLKQREVSVRVGMEATGYSRWFERLLAELGFELWIGDPAQIKAKRVKKQKYDREDARLLLRLMRENNFPQIWVPSPENRDLRQLLWHRHRLVQMRTRIMNQLQALAMNEGKRMKKKLWSEQGRVVLEKLVLGPWASRRRQELLELLDRMNPKIEELTAAAEQEAKKRPDVLRLMTHPGVGPLTALAYVLIIGTPERFPRGKQIGTYVGMIPCEDSSAGKQQLGHISKQGNSLLRFLLVEAAQAAARIHPDWRRRYIHLAMRRHKSIAKVAMGRRMAIQLYWMWRNGCEYSQSGKRGSYAGQLGTVHGGK

SEQ ID NO: 284908 - protein, 344 aa, unidentified
MGEVSTIGLDIAKSVFQVHGVDADGAVVIRKRISRAKVLEFFAALPSCLVGVEACPSAHYWSRKLQALGHAVRLMPPSYVKAYLKRSKNDANDAAAICEAVTRPSMRFVPTKSDQQQSGLMLHRGRQLLVRQRTMLSNAIRGHMAELGIISAKGRIGTAELLEIIANADDDRIPAIARLSLDALARQYANTTAEIRAFEKHIHAWHRSCEESRRLEAIPGVGSIVATALVAEVGDWKAFSSGRNLAAWIGLVPKQHSTGGKDRLGGISKQGNRYLRWLLIAGSMAVIRHARQHGTKRLWLARIMERRPIKVAAVALANKIARMAWAMMVRGERFKEPRLLSEAA

SEQ ID NO: 284909 - protein, 427 aa, unidentified
MPYRIAGIDVHKRMLAVVVSDVEIDQEYQFARRMFGSNPEQLRSLAAWLLEQEVEEVVMESTAQYWKPVWEALERYWKPLRQKREGARPKSGTLHLAQAQSNRGPRGRKRDFPDAERLVKRLVARELTLSFVPDAEQRLWRTVTRRKYQLTRDHVRVQNQVESLLEEAHIKLSSLVSDLLGASARRMLTALAQGETDPAILAGLAHRRLRATPQQLRDALSACADLKTVYRRLLKMMLEQLQFLEQQIGQLDQEMASLLNQHQDAVERLAEVPGLGADSAQQIVAEVGPTAATFPSDKHLSSWVGACPGDDESAGVNYSHRSPKGNRNMRRVLNQAANAAAKAKGSIFEIVYRRLVPRLGHKQAIGAIAHRQCRLIWLILHQGIRYQERGPAVNKKSKQQRTARMIRELRKLGYTVNLAIPQAGHPA

SEQ ID NO: 284910 - protein, 415 aa, unidentified
METLVERGCGLDVHQATVVACLLIVRKDGKVQKQIRTFGTTTRELVSLREWLLSEGCSHVAMESTGVYWKPVYAILEGEGTFKIVVANAQHVKKVPGRKTDVKDAEWIAELLCHGLLRSSFVPPKAIRELRDLTRYRRKLVESQVAERNRLLKLLESANIKLASVAADVFGLSGQLMLRALIEGKASPQEMAELAKGRMRAKIPELEPALEGKLEEHHRFLLRLELQRLEAGEKDLAVLEQRIQERLKPYEAQLTLLDEIPGVDWAVAAAIIAELGVDMSVFQNVLQAASWAGVCPGNHESAGKRKSSRIPKGNVYLKTALVEAATAATKAKGTYLRDKFYRLKARRGYKRAIVAVAHKILVAIYHILSHQVCYNELGDLYLDNLKRHTLTRNLVHRLERLGYTVTLEQKAARSR

SEQ ID NO: 284911 - protein, 348 aa, unidentified
MDHIIRIGMDTSKHVFQLHGVNAAEEPVLRRKLRRNDMVVFFERLAPTIIAIEAAGASHHWARLLRSFGHEVKLIAPQLVKPYVKRGKNDAADAEALCEAMSRPTMRFVPVKTAERQAALMLLGLRDRLVRNRTQLANAIRGYAAEFGLAAAKGIAHLAPLLARIQSDESLPDLARELFAAHAQEYAQLQAQIDEVEGKLMAWHKTNPGSRRLAQIPGIGPIGAAMLIMKTPAPEMFRSGRQFAAWIGLTPKDHSTAGKVRLGVITRAGDEGLRSALVVGATAVIRHLRNGKGRSMLSAWVEQLLKRKPPKLAAVALANKLARIAWKLMVTGETYTAKPRPIASAGIA

SEQ ID NO: 284912 - protein, 354 aa, unidentified
MHYSGIDLHKDNCYITTRDESGDIANRMRVKNIEEDILNYFKSIGSDHKAVVESTNSWYWLNDLLESNNIHLELAHAKYIKAIAYAKVKTDKIDSKTLSTLLQNNLISPAHKISEEKRGLRDTLRMRLRLVQKRTSCYNSIHRVAEKFNCDDSVDLAKEIIPDKLPEDYKFQVKLLYEQIEVLNKQIKEVEKSLRKRLIKNEDIQRLLWIPSIGMITAFTIYLEIDGIERFETVKNFLSYCRLVPGAKNSNKSIKHKSGSKDGNKYLKIAFSDSAVHSIRYYSEIRSHYQKMLRRSNQAIARTVVAKEIAKIVYFILKNKTDYKGYKGKPISHMKSQSWPRLASPDEWLDNKIP

SEQ ID NO: 284913 - protein, 414 aa, unidentified
MPFAGIDWAAADHVACVVDMAGRIVDRFSAAHDKAGIGALITRLRRSGVSEVAIERSDGVLVAALLAAGLTVVVITSRQVKNLRSRYGSAGAKDDRFDSYVLADTLRTDRARLRPLIPDAPATLTLRAAVRARRDLVAHRVAACNQLRAHLAAAFPAAVGLFFDLDSPISLAFLARFGSQDAACQLDEQAIDGWLKTIPARGRTAPAGVLCARLRAAPGGATGEDGAAHARITAALTATVTMLAAQIKTLETGIGIQLAAHPDAHIFTSLPRAGTLRAARLLAETGDCRTRFPDPQSLAALAGVAAVTRQSGTHISHAFRWAVSRQLRDAVCDFADGSRHASAWAAAVYDAARARGKDHPHAVRILARAWIYVIWRCWQEGTAYDPAKHGALQRILDQPASQAADAAPGPERAR

SEQ ID NO: 284914 - protein, 357 aa, unidentified
MECQEVKYVGVDCGKKSIEVVRINSENSLERRQFSTTESGINNLLQWLTLNDIVGLEAGSQSFRIAKSILNKGVQVIVLNPGNLATIYQSLKKTDKEDSLKIARLIQRHPIEELPTVPIPNDEEEDNRRLCSEHENWTKQLTQGKNRLHSLFTQAGLTQITKKHLRTKANREISVALLPSRYQKEAERILKVLDLVELNLKLIEKEIQEALKKNKAYVQTIMSMPGIGMITSLAIMSYMGDCKRFSSAKQAAYYAGLVPRVDISGDTVRYGRIINRGCHSIRRVIVQAAWSLVRCQHGGKVKEFYQRLYLKKGAKKSIIATSRKMIEVLYVMIRTGKLFDSMPENILNRKLTQYGLM

SEQ ID NO: 284915 - protein, 349 aa, unidentified
MNRTTYGLDIAKNVMQLHWVDGETGEIGRKKLVRAKLGEYFAQLQPVRIVMEGCGSAHHWARVLGGLGHQVELLPARQVRPFVRSNKDDAADARAIWLAAQQSDIRRVPQKSVEQQAVMALHRSRQHWVRVRTATINALRGLLYEFGVVLPGGKKAGLKTLVAHRADIDARVPAPMSRLIDGQLDTLQDIERRIDQLEAEVAGLQKQTGKADKLRKVPGIGVLGASALAATLGDGRGWRSGREFAASLGLVPVHSGTGGKVHMGHLSKRGDPYLRTLLIHGARSVIQHAKLKPEWLEQLLARRPMNVAVVALANKLARTAWALVAHGRDYQREWKSTPPKGCAAHAAAA

SEQ ID NO: 284916 - protein, 358 aa, unidentified
MEKLIRVGMDTSKSVFVLHGVDAAEKVVLRKKLRRQQVIEFFGKLKPTKIGLEACGAAHYWARELEALAHEVVLLPPQYVKPYVKRGKNDAADAEAICEAMSRPTMRFVPVKTAEQQAALMLAGTRDRLIRTRTQLTNAIRGYAAEFGLTAAKGLDKIEPLLARLTAATELPKLAKELFAAHAREYAQIKVAIQKIEAKLMAWHKHNELSRRLVEVPAIGPIGASLVVMKVPDPHAFRSGRDFSAWIGLTPKDHSTAGKTRLGVITRAGDETLRSTLILGATAVIQQVRRGKGHPSPWLIDLLKRKPPKLAAVALANKTARIVWKLMVSGESYNPMRLRDTRGPSARYGSKATAITQA

SEQ ID NO: 284917 - protein, 348 aa, unidentified
MFADELDYVVGVDTHRDEHVLAVVVAPAGAVVARRAVAANARGYAQALRFADAYASGRRVWAIEGAGHYGAALARYLSGRSETVLEAGRSPRGERRLQGKDDGLDAIRAARAALGHELASPRAGQRREALRLLLVARRSAVDVRREALVQLRSVIVTSPDRLRNELRKLPVQGLLDRCSRLRRSKTATPDELAVRLVLRTLARRIEAATVEATELEQEILVHVRALAPQLLNEPGVGPIVAAQLIVAWSHHGRVRSEAAFARLAGVAPVPASSGQTTRYRLSRGGDRQLNRALHTVILHRRQHDPATKEYIARRVAEGKSRRDATRLLKRYLARHLYRVLDQRTPLIA

SEQ ID NO: 284918 - protein, 361 aa, unidentified
MTNRITTPPETRTVIVGVDTHKHVHVAVAIDSWGIRLGDHAFVADSGGYEALVTWAETHGRIEAFGIEGTGSYGAGLARAVRRAGHHVVEVNRGDRRTRRAAGKSDTIDAEVAARSLLAGQSTAIPKTADGAVEMIRQLKITRDTAMKARTTAMNTLKQIIVQAPPVLREALHDLTDHGLLTRCAGLRPGPIDTPIASAKHTLRSLARRWMALAEEIALHDQHLARLTTATSPTLCEGFGVGAHTAAELLIIFGDNPDRIRSEAAFAKLCGACPIPASSGMTTGRHRLNRGGHRHANAALYRAVIVRMQFHQPTRDYVARRLAAGRTKRDIIRCLKRFLAREIYQRVMTDFRARQEIIQAA

SEQ ID NO: 284919 - protein, 341 aa, unidentified
MAYFAGLDVSVKETRVCIVDDAGKIVREARVASEPDALLQMLTIYRFKRIGLEAGPLSQWLYSVLAEAGLPVICVETRHMRAMLKAQINKTDRNDARGIAQMMRAGLYRPVHVKTLRSQKLRMLLTHRKLLQSKAIAIENDLRATLRNFGLKVGMIGMIKFETRIRELVENLPDLAVLVEPLLIVRRVVREQLGILHRRLLAIVRDDEVCRRLMTTPGVGPVVALTYRATVDVPARFRKSKAVGAVFGLTCAKYQSGEVDRNGRISRCGDEMMRMMLYEAAQSMLVRSTKWSWLKAWAMKIARHREMKKAIVALARRLAVIMHRIWVDGTEFRWTREVAAA

SEQ ID NO: 284920 - protein, 320 aa, unidentified
MNAVLGIDISKAKFQAALLLADGKVRHKTFPNTAAGFAQLAGWLQHQHVTGVHACLEATGTYGDALATWLHDAGHRVSVLNPMIIHAYARTQLARSKTDRLDAELIARFTATQQPPVWTPPALEIRQLQALVRRLDALQGMRTQEANRLAAGVPIDAVRMSIEAMLASLNAQIAHVQQLIRDHLDQHPGLRAQRDLLTTIPGIGEATAAILIAELFDKRYTSARQAAAFAGLVPRLVESGTLRGRSRLSKIGPGRVRKALYFPAVTALRWNPTIRAVRVRLTAAGKPPMVIIGAAMRKLIHIAYGVLKSGRAYEPTCAHP

SEQ ID NO: 284921 - protein, 382 aa, unidentified
MAQTASHKKHIAAEERLYVAFELGWTKWKLGFCSRLDEKAWVTTIDARDIGGMKKTIAKARTRFKVSATCPVASCYEAGRDGFWLDRLLKQMSVENVVVDSGSIKVDRRARRAKTDRLDAEDLVTMLVRYVSGEPKVWHVVRVPSPEQEDARHLQREIRSLKKEQTRIVNRVRGLLASQGVSVKMGRRGLLVPLESLRTWDGSPLPPGLTLRVDQELSRHVVVHEQMLALEAQRHRGIQEEGSANAAMSQRLMELKAIGETTAETLTREVFFRNFKNRRQIGSYSGLTPSPYQSGDMSHESGISRAGNRHLRGIIVDVAWDWLRYQPQSTLARWYQKRFGSGGPRMRKIGIVALARKLLIALWRYAEFGVLPQRAQRKALAA

SEQ ID NO: 284922 - protein, 419 aa, unidentified
MSDTVYRRCCGMDIHKDTIVVCVLAPDGQTGPGVQKSYGTFRNDLTRMRGWLKMLKVTEIAMESTGVYWRPVWNVLEGHGFRLLLVNPAQVKALQGRKSDQRDARRIAEYLHDNRLDASFVPPQEIRELRQMLRHRLSLLQERGEVHNQIRDLFETANLKLSSVATDLMGVSGRRIIEAMIAGEDSPELLSWKVRGRLRKKEKLVRESLKGCFNDFHRMMLKAHYEHYQFLSGQIQAFEAEIEKRMAPYAKQIEGLMTIPGVERIVAWHLIAELGADMSVFADADHCASWAGLSPGSCESAGKQMSGRTKKGNKYLRRVLTQAGWAASRCKRGYLRAFFHRVKARRGWGRAIFAVAHKILIIAYCILKDGQPYHELGDDYFDRLHPERTAKRLLQRLERLGLSVVVTPSQSLTLGTSEG

SEQ ID NO: 284923 - protein, 390 aa, unidentified
MLRNLVQSHKRKEPVMREKLRFLGLDVHAETIAVAVAEPDGEVRSLGTIPNREDSIRKFIRKLGSPEHLRACYEAGPTGYVLYWQLAELGVACEVIAPTLVPMKAGDRVKTDRRDAERLARSYRSGDLTAVWVPDEGSEALRDLVRAREAAKQDQLRARHRLNKFLLRSGQRPAVGMKAWTLSYMAWVRQLRFKQVAQESTRLDYLHEVEHMAERVKRLEQAITEAVKLASPALREVIGGLQALRGVAQISAVTIAAELGNISRFEGARQLMGYSGAVPTEDSSGQRTRRGSITKTGNAHLRRIAIEAAWSYRLRPGIGPALRKRQEGVAEEIKEIAWKAQHRLHRRYMRLAAAGKDQRKIITAVGRELLGFIWAIGIKAEAASKLPKAA

SEQ ID NO: 284924 - protein, 400 aa, unidentified
MKVSGLDVHKDSIFCGIYNGKKQSEVKEFTTLTTDIKAMGLYLKAEGVKKIAMESTGMYWIPIWNILENMGFELMLVNPYLIKQMPGRKSDVKDAQWIAQLLHKKLLRGSLIPNEIIRELRTYSRRYTKLKQRQTNLLQTMERNLEMCSIRISSYVSNISSKSLMKVILQIVEGETSPDILIKNIHGRIRKKHGTEIIKNSLTGFVTDHHRFILEQLLEEFNMIDSQVNKTLEKMKQICENYYAKELDLLQTIPGISELSAMIIIAESGADMSAFENSGKFSGWTGLRPRNDESAGKYKSTATTKGNKYLRTILVQVAWAASRTKGSYFKEKYNRLAMRKSRKKALIAIARKIGVIIWNVLQKLEVYNPSKLPVYDPIKLEAKMNYHQREFERLEELYTR

SEQ ID NO: 284925 - protein, 425 aa, unidentified
MNFTQNEKISQVTNETLVVGIDISSENHYVRAFDWRGIELSKTFKFESTSYGFKRLMEWLDETCKSNSKTKVIMGAEPTGHYWFTLAEYLKENNIKFVFVNPMHVKRTKELDDNHPSKNDRKDTKVIAKLVIEGRYLIPYIPEDIYAELRVANERRMRITREIVAIKNRIQRWFAIYFPEYTHVFGSWECDSSIEVLRNCPLPADVMSLGAEDINQLWREKKIRAVGIKRVNALIETAKTSVGVKNGANAARFEMSMLIEDYLIKKEQEARIIEILKTLCIQVPNSEKLLSIKGIGILTVASFFGEVGDIRRFESPKQIQKLAGLAIANDDSGKHRGKAGISKRGRKLLRYTLFQAVISLLMHSPEFRYLHHYYTTRSNNPLKGKQSKIALCCKLIRVFYAILTKGVEYDSEKLLYDIVRPELAA

SEQ ID NO: 284926 - protein, 324 aa, unidentified
MLPTLGMDISKDSFHLELSINDKLRHRKFANRKEGFGELCVWLAKHKATHVHACLEATGPYSEALALYLHQQGHTVSIVNPVQIKAFGQSELLRNKDDRPDAGLIRRFCEKQRPAPWTPPPVHLRELQALTRHLENLIETRQQQVNRLETTNTKQVAKSLRKLVTHLDAEIERTEQQIDDLVDRHPDLKQQSELLESIPGVGKRTAAKLLAEIPNITQYKSARQVAAYAGLTPRNNRSGTIRGKTRLSKTGNARVRKALFFPAIVAKRHNPIVRAFCERLSRNGKNKMQVVGAAMRKLIHIAFGVLKSGRMFDPNHELLINQAC

SEQ ID NO: 284927 - protein, 321 aa, unidentified
MAMPKTPIEAGVDTAKDELVIQSAPDTKPFAIPNTPKSIKAWLKTLPAGSALAIEATSTYHIEMAEQAHAAGFAVYVVDGFRLSKYRESIAVRAKTDAQDAALLARYLRNERSSLKVWTPPPAGHRQIQVLLRRRAKLVEVRGMLRESFKGDKMFAAELKKIERTLKRTELAIAKALREEVKDAGLNDQLRRVQQLPGIGFLTAVGLVMSFMRGEFANSDAFVAYLGMDVTVVQSGKWSGRGRLSKRGDSEVRRLLYNASMSGSRTATWKAFHAYHLGRGKKTTQAFVILARRLARLAFGLMRHQQDWKPEIYTGGAKLTS

SEQ ID NO: 284928 - protein, 429 aa, unidentified
MNSTQNKKIEQVKETTMIVGIDVGSEKHYFRAFNWRGIELTRKPVPFLNSMEGFNSFYNTIVELMQENKLEEAMVGIEPTGHYWFDLGQFMSEKNIKFVMVNPHHVHKTKELDDNSPSKNDRKDPRVIAGLVRDGRYFYSYMPTGVYAELRNASNRRFVIVEEQTRAKNRLQKWIAVYFPEYKGIYTHIDAKGGLLVLKQAPTPEEIINLGEEGIIKIWKDVKLRGNGHKKAMLILNAAMRSIGLKAGLTEARMEIQDLIEDYELQTKRLERINDLIKELCQQIRYVDNLLEIKGIGITTVAGFIAEVGDITRFDSTKELQKLAGLELVADSSGKHNGKTKISKRGRKRLRYLLFEAAISVVGKNEEFKEIHRYYTTREKNPLKKMQSLIAVACKLIRVFHVILTKGVSYDASKMLGDIKRPGTQLKVA

SEQ ID NO: 284929 - protein, 342 aa, unidentified
MSEVTIIGVDLAKRVFQLHGASGDGSVVFRKKLSRGQVLAFFARHAKCVVAMEACATAHGWGRELEKLGHSVRLIPPVYVKPFVKRQKNDAADAEAIVEAALRPTMRFVAVKTEDQQARAMLFRTRQMFVGQRTQMINALRGHLAEHGLVAATGTAQFKRLADAIEDSDTALPEGVRDLGQMYLAQIAGLNARVAELDQKMRSAAKEADVARRFQTMPGVGPITALAIETFAPDLATFRRGRDFAAWLGLVPKQHSTGGKARLGKTSKMGQRDIRTLLVSGAMAVLQAVERFGTPNNGWLSRLRARKPRMVVAIALANKMARGLWAMMTKQEDYRNPVATMA

SEQ ID NO: 284930 - protein, 385 aa, unidentified
MKKHSKGNGAVGEWRELAARKRLTIGIDLGDKVSRYFVIDEEGAEVLQDSVKTTPAALLETFGGMARCRVAIEVGSHSRWVNELLTDLGHEVLVADPRRVPLISRSDNKSDGVDAEMLARLARVDPKLLHPIRHRGREAQRDLTVIRARQALVEARTKLINCTRGLVKTTGVRIAKSSSQGFGRRAAEAMPELLRGALAEVLEVIERIQEGVSAYDEQIEQLGRKQYPETARLRQVNGVGALTALTFVLTVEDPQRFRKSRDVGCYFGLRPKRDQSGNSDPQLGITKAGDVYMRQLLVNCAHHILGPFGADCKLRRWGLALAQQTMEQDSQKIRAGQKVKKSNAKKRAITAVARKLAVLLHRLWVSGDTYEPLRGCGQRQAAVAA

SEQ ID NO: 284931 - protein, 403 aa, unidentified
MNMNAVGIDVSKGKSMVAILRSYGEIISKPFEVKHTVSGIRSLIEQIQSIDGESRIVMEHTGRYYEPLVRELSKADLFVSAINPKLIKDFGDNSLRKVKSDKADAVKIARYTLDSWTELRQYSLMDEIRNQLKTMNRQFDFYMKHKTAMKNNLISILDQTYPGANTYFDSPTREDGSQKWVDFSATYWHVDCVRKLSLNAFIDHYQKWCKRRKYNFSRSKAVEIYEASKELVSILPKDDLTKLIIKQAVEQLNTASQTVEQLRTMMNEAASKLPEYPVVMAMKGVGKSLGPQLMAEIGDVSRFTHKGALTAFAGVDPGVNESGSYEQKSVPASKRGSSTLRKTLFQVMDVLIKTKPQDDPVYLFMDKKRAQGKPYYVYMTAGANKFLRIYYGRVKEYLSSLPE

SEQ ID NO: 284932 - protein, 331 aa, unidentified
MKFTETIGIDVSKLTLDACIHGQQFLIQVPNTKKGHLKLLSWAKKNTGCSIENILFCFEHTGIYSFILARFMTKMKLNYILVPGLEIKRSLGIQRGKNDQIDARKIAQYAYRRRDEITPYQAPDESINKIRQLFSLREKLVKQRSEFMTTLKDQANFIEKSKNKLFFSVPNKLIKELNKQIENIEKEVDIVLEESAAIMDNFKLVISIIGIGRQTALLLIVVTNNFLWFNDHRKLASYAGIAPFPYSSGTSIKGRNKVSPLANKKLKSLLSSCAVSAIRNDPEMKIYFNRRTESGKHKMNTINAVRNKLLSRVFAVVKRRTPFVSLCKYAA

SEQ ID NO: 284933 - protein, 461 aa, unidentified
MANVNKTDTLTPNQKKSASRLSIVNPHAAGIDIGDTIHAVAVPPQAAEESVRIFTTMTCDHTTISDWLRECGVNTVAMESTGVYWKPLFSHLVRAGFEVFLVNSRNVKNVSGRKTDEGDAVWIQKLHSYGLLKSSYLPDDEQEALRTLVRFRKILLSDSSRCVLRMQKSMELMNIKLHTIISDITGQTGAAIVTAIIGGERNAEAFLPLVGHRIKADKEMIRKSLQGNWRTEHLFTLSESYSLYRYYQQRIAVCDQQIEEQLRNYEARRNDGVVETTEKDTVNRQDKKLKQKNAPGFNVRGYLDRILGVDVLAIYGLSETGGLQILAETGTDMTKWENEKHFASWLNLCPNNKLSGGKLISSKVKKGRPSIAGQAFRAAANAVQRSDHWLADYFRRMKSIGGNKYAIVATANKLSTIYYKMVRYQAEFAPVNPQEYNAKRNEHKIKYLERKLNELKAIKSG

SEQ ID NO: 284934 - protein, 341 aa, unidentified
MWNRCRCERKGMSVFVGVDIAAKTFDLVNRKGGKASKVESFSQSPQGHAKAIKRLHNLKPTLITMEATGIYYFDLAVALVQAGLPVAVINPKSFHHFAKLKLAGSKTDGVDAALLAEYGERIEPSLWTPPDEVRLALRDIGRQINRLTGTRTQAKNRLHALQAKNSTRSLLVEDEQEGIAYLDRRIERLSQAALALIAECETLSRYLTHMCAAKGVGKATALIVLAELCVLPSSLKAPQVSRFAGLDVRLTQSGSSVNRPARLSKAGNAYLRAALYMPAMSAVQHDPRVKAFYDALVSRGKKKIQALCAVMRKYLTGLWACIQTETAFDSAMLFSEEHLKA

SEQ ID NO: 284935 - protein, 317 aa, unidentified
MNFVGIDVAKDSMEVMVHESSKRWNFMNDESGLHKLIAKMKRLSPCLIVLEATGGYENMVATGLQCKGFSVAVINPRQIRDFARSIGTLAKTDILDARVIAHFAAKIQPPPRILPTEEAKRLGAILMRRRQVVTLLTAEKNRLLQANPAVRERVKNHVTWLKQELSDISKELKQMVQDDPEWKEKDKIIQSVPGVGPILSVTLLADFPELGTLNRKQIAALGGVAPFNRDSGKMRGKRTIWGGRGVVRTATYMAAFAAIRCNPLLTSFFNRLVAAGKPRKVALVACMRKLLCILNAMLKNRTRWTCYSPQLVGPCYC

SEQ ID NO: 284936 - protein, 404 aa, unidentified
MKFCGIDWADEHHDALTIDEQGHQLGSIRVAHTPEGLSRLDSYLERIAGEQGREHVACIIETTHGLLITYLLEHHWPVYPVNPRTVDRHRAPSGAKTDTIDAYLLAKTGRADLADLHRLQPDDQLIQELKELTRDQDSLIKTQTRLFNQLTACLKAYYPAGLIAFSQVEQPCTLAFLRAYPTPQQARQATVAELTTLLKQGHYPGAQRKAQDLVELLRQPHLTANEVTTRTKSRLLLALLDQLEPLMRQIADYDEEIERLFLISEDHDLFQALPGAGTRLAPRLLAEIGDDRHRYQSAASLQALAGTSPVLFQSGMYAKAHRRLGCIKPLRNALHQFAFHSTRLEGWAKQYYQRKRAEGKSHTVAVRALANVWVRILFAVWTKKEAYQTTTFEAAQLAHARRIA

SEQ ID NO: 284937 - protein, 369 aa, unidentified
MQTVRSFVGMDVHKETISISVAEDGRNGPVRFLGVIPNQPDEIAKMAKRLAKHGELDFCYEASCCGYNIHRQLTALGHRCTVVATSLIPTKPGERIKTDRRDSQKLAVLHRSGDLTAVWVPDATHEALRDLVRARVDATMHLMRARQQLLAFLLRHGRSYPTGKHWTMRHRAWLALQTFAEPVHQIVFQDYIEAVWTAQQRRDALVQSITSTVENWSLGPLVEALRGLRGIDLISAATLVATTGDLSRFESPRRLMGYLGLVPSEHSSGASIRRGGITKAGNREARRMLVEAAWSYRYPARVAKEKAEILVRLPKGVRDIAWKAQTRLCVRYRKMIARGKKPTVVIAAIARELAGFVWAIGQEMRVGTT

SEQ ID NO: 284938 - protein, 403 aa, unidentified
MNNLKTVLSVDVAKGKSMFMLMNSEGEIFIDSIELKHNLENFNKLKKQVETFEISDLTVFMESTGIYHLPVERYFKENGFNTLVINSLTTKNNYDTIRKTKTDKKDCFRLAKLFFVNEVEYHDLSKKDLYANLKAMTRQYFYLTQVNVSCKNRYKRLINICFPELETIFKSSRIYEETALNFIKVFPHAEIVKEKRIDALYNNLYKTNSRHDYYYKRLAHEIKEIASNSYPGIDKAHSDVQNLSNIAEMLQNNIKNINELKERMIETAKQSPYFKIINSFYGIGEVLTAELLGELGDITRFDNHKQLIAFCGLDPTIIQSGKSINVHGAISKRGDKYARWILFNISQMVVKLGHQYLEHPVYNYYLKKKAEGKHYYESLTACSTKILRMLYSMCKNNKQFLEK

SEQ ID NO: 284939 - protein, 334 aa, unidentified
MEEAPSSSSRLSFSLGIDVGKTALELALRDGKDTVARTTVSNDPEGHDNLADWLQDRGAEPENTCVCMEASGDFQKTVARFLHEKGYRVSVVNARRIKGYAASQLQRTKTDAADAALIARFGWREDLRAWEPPSASESRLQELTRARQALKKEKTRTQNRLDEAEDEAVRRAHRNLLNEIEQQIEDLEEEIEEHVEEDPELKGQCSLLDTIPGVGLQTAAIVISELGSPEQFDSARQAAAYAGLVPSHRESGTSVRGTPRMSKVGNGRLRRAMYFPAMTALRFNSAVKAFGDRLKERGKEKMVVIGAAMRKLLHICYGVLKSGRPFDASLHPGT

SEQ ID NO: 284940 - protein, 311 aa, unidentified
MSEHVVYIGIDIAKVDLELSFAGKPQKSVANTRCGIRALLRKAQKTNQPVMLCCEATGGYEKLLIGMALDQQVPIALLNPKRVRDFARSKGILAKTDKIDAAVIAKYAYQNHPVPLKEPPVWLPELQALVARRDTLITMRKSETNRLDPEPDAVLKKSVTRIVNVLNREGGKIEEQIEALFKTHTSLQQASQKLQKVSSIGKVTAQALLATVPELGTLNDKQVTALVGLAPFNQDSGFMRGQRHIRGGRAQARKALYMAAVVASNHNPILKSFYQRLKQSGKPSKVALTAVMRKLLILTNRIMADPQFVPS

SEQ ID NO: 284941 - protein, 412 aa, unidentified
MNQKVYVGIDLAKDSSRVAVVDKDGNKLTSPFSVKNTREGMEKLLSKLNSYKNDQILCGMEASSNYWENVYSYLKEKKVSCLLINPYQVKKYRQALGLKIKTDSVDAEAVAQLIRAKKYDNLYISDEVAVELKELVRIKFSFARRAKDLKKGVMSLLCLVFPEYTRIIPHPFSKVSKEILSKYPTSCHMAKASISKLLKIFRKYQGCNFSAGKAEELIAAAKESFYSGRASRSRGISISMQIEEISSLSSKMEEIEEEIKSILDPADPRGGPPSFSILNSIKGVGIGTISAFLGTVGDMSRFLNSDKLVSYIGFYPKIFESGKYKKKNPEIQKAGPRELRYMLYLSSVAAIKHNIYLKKYYNDLVSAGMPAKKALIKVAVKIVRMMYSMLKYKTYYDPSRVFMQYRPEKIAA

SEQ ID NO: 284942 - protein, 342 aa, unidentified
MEQVTIIGLDLAKRVFQVHGATADGRIALRKKLSRGQVLTFFKGLPPGVVAMEACATAHYWAREIGALGHDIRLVPPAYVKPFVKRQKNDAADAEAIAEAASRPTMRFVEPKSPRQQARAMAFRTRDLFVRQRTQTINALRAHLAEHGLIAPLGLSNIAGLQRLVEDSASYLDPLVVETAHMYIEQISDLTDRIAKMEATLKQEAARSNASSRMMTMPGLGPVTAMAIEAFAPALSVFKRSRDFAAWLGLVPRQHSTGGKQVLGRTSKMGQRDIRRLLIIGAMSVIRWATRKGTIQGTWLHAMLARKPRKVVAIALANKMARALWAMETRKEDYRAPRLATA

SEQ ID NO: 284943 - protein, 361 aa, unidentified
METSVVYVGMDVHKESITMAMITDGSSAVITEKIENRDEKIRRFLKKASKYGEIKACYEASSCGYVLWRKLNKWGYSCDVIAPSMVPKSPADKIKTDKRDATALVKLLKANMLCCVAVPTTEREIDRTLVRLHDQKSQDVKRNKHRILKFLQTRGFAYEGRNFSPPFRSWLKSLPLAKQDRFVLDEYLASFEYEESRLDEVDRQIIGLSNKDIYSEKTDRLKTLKGIDTLSAMVLLTEIGDFTRFESPRQLMAYAGLVTSENSSGEKRRQGKTGHGGNRHIRFILIEAAWHYRHRPSIGKNLMKRQEGQPAEVISYSMKAQQRLYKKYWKISSVKSNQKAVVAVARELTGFIWGIATGSTN

SEQ ID NO: 284944 - protein, 314 aa, unidentified
MPENPMYVGIDVAKATLEIASRPEGLRLSVPNAGEGYGQLLAALKGRDVKLVVLEATGGYERAAAAELVCAGYKTVVANPRQIRDFARALGELAKTDRIDAAVLARFAELVKPEPRPRRSEEADTLAQLVTRRQQLVALLTQETNRMPQARQKAVKKSLKLMTRALAKQIAELERLIAAHIESDEALRQKNAILRSAPGVGPKTSAMLLSHLPELGSLNRQQIAALAGVAPWDVKSGTWSGRSRIWGGRAEVRAVLYMAALTAMRCNETIRAFAERLTAAGKAYKVVATACMRKILVILNTMLRNNTKWQNKNS

SEQ ID NO: 284945 - protein, 366 aa, unidentified
MEKKIAYVGIDYHLNSLSIAVLIDGQKKLYDTIRLKNVDKIISKYMKKLSRDFQIKACYEASTNGYAFQRKMTQWGYSCDVIAPSLIPKKAGNRRKNDFRDARDLAQNFAAGMLSIVHPPSEDEEAVRSLVRCRTSFKDDAKRIKFKINSLLLSQDLRWPRSKWTFAHKKWLSEIQLSNPYLQEVLDEHLGHLHYMETRLKHLENQIEEIARSQIYSASVKKLRAFKGIGTLAAMILISEITDFRRFATPRALMAFLGLIPSENSSGDKQRGGSITKAGNRRCRTQLIESMQHYVKSAHISLQMRCDLSHVDAVTANRAIKCLNRLHKRYWALTMKGKNRPLAITAIAREFVGFIWAVMQPEPLPA

SEQ ID NO: 284946 - protein, 339 aa, unidentified
MGKITTTGLDLAKNVFHAVCCDTHGKIVKKKMLRRSGLLAWFANLPPCLVGMESCASAHHWARALKAQGHQVKLIPPQYVKPFVRGNKNDYNDALAIAEAVTRPEMRFVSIKTPEQQDIQALHRLRERRLRDRTALCNQLRGLLGEYGIVFPRGVNVLRRQLPEVMEEAENGLSDFFRRLLSQSYQQLVELDAHIDAYTETIEIHSQRDDACQRLRTIPGYGPIISSAFYSTVGHGEAYRRGRDVSASLGLVPKQHSSGGKEVLLGISKRGDRYLRSLLIHGARSVAIQAANKTDALSVWINKIRAARGFNKAVVALANKLARMGWAILANNTVYQARP

SEQ ID NO: 284947 - protein, 342 aa, unidentified
MSRLTIGIDLAKNVFQVHGVDAVGQVVIVQRLRRSQFLSYFTKLKPCLIGMEACGSSHHWARELTAMGHEVKLMAPSYVKPYVKRGKNDMVDAEAICEAVTRPNMRFVPIKTVEQQSILMLHRSRALLVRQRTMLVNALRGHLAEIGIVAPIGIERMAELVERVLTPNATELDVPQLVRDIVVSLVGQINSLTAEVKSLETKIREWHRTSEASRRLATIPGVGVITATAFAATITDPSCFRSGRALAAWLGLTPRSNSSGGKQRLGRITKAGDRYLRTLLVVGATAIIRYARHKESGRLTGWVRKLLENKSARLTSVALANKMARIAWAVMTRNTVYGPAAA

SEQ ID NO: 284948 - protein, 365 aa, unidentified
MRKVSTAKQGRDCFEQKLTIGLDLGDHSSCYCVLDETGHILVEQKVSTRPKGLQAAFGAVQHCRIALETGVHSPWVSRLLSGLGHEVIVAHARNVRLIGESRRKDDRLDAQTLARLARIDPQLLFPVKHRSAKAQADLTVIRARAGLVRARTALVNSARGLAKSYGERLRGCNVRNMNPEKAEGLSPELQAALKPLLVALESLSEQIREYNERIEKLAQESYPQVALLKQVKGVGTLIALTFLLTLEDAHRFQKSRDVGCYLGLQPGRRNSGRSEPQMHISKEGDPYIRTLLVQGAQHILGPFGVDCDLRRWGLKLAERGGRNGKKRAIIATARKLAVLLHRLWVSGEVYEPLYNSRRVAIPAAA

SEQ ID NO: 284949 - protein, 324 aa, unidentified
MVKMKHHTSIAAPVVAGIDVSKAHLDVYLYPAGKRRRFSNDKTAWRALRGWLVKAAPDHVVYEATGRYHKGFERYLGGHGLPIARLDPRRARRFAEAIGVQAKTDPGDACVLAQFGAFLKPATTALSGPALEQLKELVAARRGLIQQGTRIANKSKTAIAPLLKRQLKQTGAQVQRQIKAIDKACREIAASEPALAQRLAILLSIPSIGEITAMAILAEMPELGVLNDKQAASLLGVAPIARDSGTFQGKRHIRGGRAKLRQALYMAALVATRFNPDMKQKYQALIKNGKPPKVAITAIMRKLITLANALIKDNRNWSEIRPCQ

SEQ ID NO: 284950 - protein, 363 aa, unidentified
MLKTPDRVVIAVDPHKASWTAAAVNASLQPLDIIRVPVSRDGYRALRRFARRWPDPTWAIEGASGLGAPLTARLRADGADVVDVPAKLAARVRMLSTGHGRKNDDADAVSVGIAALSARTLNTAAVHATVTALRAVVEHRDDLVKTRTQTINRLHVLLTHLVPAGARRELTADQAAELLRGVRPHDAAGKALRRLAADLVAEIRQLDRYIAKAAANIQTAVSASGTTLTELSGIGTLTAGKILGRVGTIKRFRSATAFATYTGTAPIDVSSGDVIRHRLSRAGDRQLNLCLHVMALTQIRQDTPGRAYYQRKRAAGKSHKEAMRCLKRRLSDVVYRQLVRDETRLGAGPGGHSGAALLSSAAS

SEQ ID NO: 284951 - protein, 355 aa, unidentified
MDKIKYIGLDVHRDTISAAVLNESGRLLQQSVLMTRTTAILDFISGVRGSLHVTFEEGTHSAWLYDLLSRRVDKLVVCNPRKNALLKSGNKGDAIDARKLADLLRAGLLSPVYHGETSALEVQQLARSYLMLTEDTTRAMGRLKAVFRGQAISCTGRRLYGPKHRGEYLAALGGCALRRRAERLYQQLDALQQLRRDARHDLIVECRKHVEAKWLQTVPFLGPLRAAVLIGRVQTPHRFRTKRQFWTYCGLALETRDSAEYRVTGGQLERKKRPAQVRGLNWNYNHELKNVFKGAANAASTGQGVFREFYLGLLKKGMRPEMARLTLARKIAAIALKIWKKGESFDAEHLKSKAA

SEQ ID NO: 284952 - protein, 410 aa, unidentified
MDVILDRVCGMDVHRDTVKACVRVPGTKQKRESHIATFGTMTEDLLALRDWLQGWGVKDVAMESTGEYWKPVYYVLEGAFSVRVVNAQHIKNVPGRKTDTQDSIWIAELLECGLLRGSFVPPPEIRDLRDLTRYRKVLTQQRTEEVQRLHGVLQKAGIKLSSVASSIMGVSGRAMMDMLVNGKTDVEALANLARGKLRSKLPQLRKALEGHFSDHHRFLVAQMLAHIDYLEESLGEVSRQIEEQIRPFAEQKQLLMSIPGVQDKVAEAIMAEIGLDMEQFPTDRNLISWAGLCPGNNQSAGKRKSGKTRKGDRWLRAFLTEAAWAAVREDDSYLAAQFHRLAPRKGKKKAIVAVASSLLQAAYFILRERVSYRDLGRDFYVKRNQDAIRRRCIRQLQQLGYQVQLTEYAA

SEQ ID NO: 284953 - protein, 390 aa, unidentified
MLGFLGLDIGKDTFTAAFLWLGDDGKQHTLNPQSFSADQAGWQAFLRLWQSQPPAEWHVGLESSGPYTRLYLHHLHSLPHPVYLISPLQARHFRRSRSLRKAKTDRIDAQTLAAWLFSAWQEGRLPRPAQPPTSLRDLAFLYHQLTQELTRLQNRFRQVLHTLFPELERRQRRFPKSLRRLLLLYSSAQQIAQAAPEDLQPFCHRLACSPETLQALATTSWGIHDEVAIAHLRHLLALWEELEARRHQVWLTLRQQVRQTYPDAWRRLRPIPGLGDRLLTLFLALLGDLHRFPSAKSLIAFVGLDPSVYQSGSFLAHGRLSKRGSPLLRHVLFLIAQALVRFSLRFRRTFLHHRQRGRAYREALVIVARKALSIFHLLIVRQQSFQDLSP

SEQ ID NO: 284954 - protein, 342 aa, unidentified
MTSFQSFVGIDIASASFVACVGTTPWKLTVKPVKFENDEEGFVSFLDWLKEHNLSSKHTVVCMEATGVYGEGLAYFLHASGYTVAVEPPLNIQRKFPVNASKTDELDCQYIAEYACRYADKLSYWQPRAEVLEQVKVLLTTRQHFSVQLTGHKNALHAVKRKKVVSELAKQAHQSMIEQIAKQIKAIDKEIRRLIDSDPTFKQTLLLLLSVPGIGLQLAAHLLIHMQTTLDPKVLASFIGICPIQHESGSSVYSTPTSRHYGPSVLRKLLYLAACSVRTHKKQFQHYFFRKVAEGKHKKLVLNNIQNKILKIACAVVRSQKPYIPNYVSVNPLALHNPLTVS

SEQ ID NO: 284955 - protein, 366 aa, unidentified
MKKISTVQTLKSEIFKEQKLTIGLDLGDRWSFYCVKDEAGQVILEQKLPTTPEAMKQTFGKIPRGLIALETGTHSPWVSRLLTQLGHEVIVAHAQKVQLITKSSRKDDRHDAQTLARLARVDPELLGPVRHRSVQAQIHLTVIRARAELVSTRTALVNAARGLVKSYGERLPKCGTQQVSRDLAAELSTELRDVLEPLLKEIESLNERIKEYDERMEKIAKEVYPQVSLLKQVKGVGTQIALTYVLTIEDPYRFPKSREVGCFLGLRPGRRNSGKSEPQKGISKEGDRYLRTMMVQGAHYILGPFGEDSDLRRWGLKLAERGGKNAKKRAVVAVARKLAVLLHRLWVSGEVYEPLRNSQKAMRAVA

SEQ ID NO: 284956 - protein, 347 aa, unidentified
MSEISIIGLDLAKQVFQIHGADPAGRCVLRKQLKRREVLQFFAKLRPCTVAMEACGTAHYWAREIGKLGHCTRLIPPAYVKPYVKRGKNDAIDAEAICEAAARPTMRFVPVKPMENQAIVMLHRSRDLVIKNRTMLVNALRAHLAEFGFVAGKGIWKLPDLVKIVSQAPAEALPELVRTTLSGLLDIIAAIGSQLDAIEKRLREWHKKDARSKRLDTVPGIGLIAATACRALVPDPKLFRNGRHFAAWIGIVPKLDGTGGKTRLGRISKAGDRYLRRLFVLGATSLLRSLENKSTRLALWVQALLARRTKRAVTVALANKLARIAWAVMTRDEAYKPLAAAQSAGCA

SEQ ID NO: 284957 - protein, 413 aa, unidentified
MDKIYDICCGIDVHKKLIVACLNHKRKKELREFGATTRELMELAEWLQKNNCEIVAMESTGSYWKPLYNIMESYGLHVIVVNPAHMKAVPGRKTDVKDAEWIAELLQHGLLQPSYIPSKDQRELRELVQYRKSLVGERTRELNRLQKMLEGANIKLSGTVTNINGKSARKILEYILSGNEIDEKKYDEMYEEKLIAHNLKASKEQILDDLKGFMSPLQRRMLKELLQHLDELNVHIENLNDEIDNFMKPEEKQASQMIQDVTGIGNTSAQAIIAVIGTDMERFPSDRHISSWAGLCPGDNISAKKRKGGKIRKGNALLKSTLVLCAHAAVRHKSSYFHAQFKRISTHRGKKRAYVAVAHSILIAIYHILKDGVNYQDLGAEYYNQFNAERKIHAYLKKLKALGWEPPKEAVPA

SEQ ID NO: 284958 - protein, 423 aa, unidentified
MISAVLECCAGIDVGKKWIAVCVLTGPANGDAQAERRKFQTTNQCLERLAEWLVECGCTHVVMESTGEYWRPIYNVLEEATEMEIILANAQQVKGIRGHKTDPEDAHWLAHLLRHGLIRPSYIPPLEVRQLRDLTRRRKQLVRNGAQERNRILKNLESANIKLGNVLTDVLGLSGQLMIDKLLEGNATVEEIADLAQKSARKKIPQIRAALQGHRMNDLHRRLINLSLDHMAFLEEQIRLLDQAIMEHIRTHGMEKPYQLLQTIPGVREEGAASLLAEFGPDMAVFGSAKHLSSWAGVAPGNNESAGKKKRAPTLRGNPWVRSTLTEAAWSASRKKESEFKMDYERWKPRLGHKRAIVATAHSLAETVFEVLSTGKPYTKPGANPMPETKAASLIRHHTRRIKTLRKRLITTPQKPQAELTAG

SEQ ID NO: 284959 - protein, 414 aa, unidentified
MWYAGVDWADSHHDVVVITETSRQVASRRVAHTAEGLAELIAFLQAIAPLDQIACIIETSQGLLISTMLEAGCTIYPVNPKTIDRRRAASGAKTDTIDAYLLAKTGRSDLPDLRKLTPDSPIIQELKALTRDQDSLVQSQTRVVNQLTACLKAYYPVALQLFSKLQQRSTLIFLQTYPTLEAAQQASVAEITRILKEAGHPTARQSALKIQEALHQPQLHADAITTRTKSRLMMALVAQLLPLIEQISSYDKEITALFLTHEDRELFSSLPGAGKRLAPRLLAEWGSDRTRYGGSTSVQALAGTAPVAFQSGNYAKAHKRYACLKPLRNTLHQFAWQSTKQETWALLYYKRKRVEGKSHSMAVRSLANVWVRIIYAMWFEHKGYETATFEAAQHHHARSGLTAVSGVVHFLMPC

SEQ ID NO: 284960 - protein, 337 aa, unidentified
MNYSGIDLHSNNSVVTVIDDTDRVLAEKRLPNDLTKILAFLAPWQSELAGVVVESTFNWYWIVDGLPAAGFTVHLANTTAIKKYDGLKHSGDETDARYLAHLLRLGILPTGTILPPEARSVRDLGRKRMQLVRSRTSHILAVENITARHHGARISSSQVLRLTTEAIAPMELPAEVTLAVQANVAVIATLSAQIELLEKRLQEKVEPRADYALLTTVPGIGRILATVILLETGSIDRFASAGNFASYARCVDSQHLSNGKKKGEGNTKNGNKYLSWAFVEAANFAIRYSVEAKRFYERKKARTNTTVARKALAHKLARACFHILKERKPFDVTRCFA

SEQ ID NO: 284961 - protein, 470 aa, unidentified
MKHNRRRSLGKPRVSPTVLDRINPNVAGIDCGAAEHFVAVPPDRDATPVQSFQTFTGDLVRLAEWLTACRVQSVAMEATGVYWIPIYEILEARGFEVLLVNARHLKNVPGRKSDVSDCEWIRELHSVGLLRGSFRPPAALVALRAYLRHRQTLIESAGTYVQRMQKALIQMNLQLSVVISDITGVTGLRILRDIVAGQRDPEHLVQHRDHRCRASKPELVAALTGHYRPEHLFVLQQNLELFDTCQAQLAACDVAIEAHVRTLIADVTTPATPVPAPRVTRKPRENEPHFEIRTPLHRLTGGVDLTQIDGITPYTALKLISEIGIDMTRWPTEKHFTSWLTLAPKNKISGGRLLSSRTQPSANRAAAILRMTVMSLGRTDTTLGAFYRRLAARIGKPQAITATARKLAILVYRTLKGDLAYRGLGADAYEAQQRTRTLRRLRHRAASLGFELVNRVTGEILPPNVSYSAP

SEQ ID NO: 284962 - protein, 319 aa, unidentified
MAQNDLVVAGIDVAKDKVDVCIRSLSLRRTFASTAEGRRELASWLRRKKVGKAVMEASGGYEREWAKALRDARIEVRIVDPKRVRSFAQSAGRLAKNDTIDAEMIAWFAETFDEARSQTYDAAREQLHQMVHARQALKEMQAKLESQGEHAVPATVQRIHARISKTIAVELVKIEAAISALIQATPRFTELAEIIESVPAIARTTSAALIAAMPELGQANNKIVAALLGVAPYDDDSGRRRGERHIKGGRRRTRNVFYMACLGAATRHNPVLKAFYDRLVAKGKEKKVALIACMRKLICILNVMITRRQKWDANRYALS

SEQ ID NO: 284963 - protein, 436 aa, unidentified
MRILYRRCAGLDVHKASVVACVLALQEGSRVEEQVRRFGTMTEDLRELAAWLNSQQVERVAMESTGVYWKPVWNILEAAGLDQLLANAQQVKALPGRKTDQKDSQWLADLLMHGLLRNSFVPSRGIRDLRDLTRSRARLAQWHGTIANRIQKVLEDANIKLASVASDVLGASGRLMLRAIMGGNTDSNALADLSKGRLREKIPQLRKALEGQVSGHHRLLLQRYWEQYQFLERQLTKIDAEISRRMKYTTEELAQVKASLPAAALLPPCPRQAALGYWMELPGISVVSGSSIVAEIGVDMTQYPSAAHLASWATLCPGHDESAGKRRSGRTRKGNKWLRRTMSEAAWAASHTKNTYFAAQFRRIAARRGKKRANIAVAHSLLVTGYTMLTNRSHYKEVGASFFDSLNREKVKKSAVKKLEALGYEVTLQAAEPTGH

SEQ ID NO: 284964 - protein, 341 aa, unidentified
MSVIIGIDPHKLLHAACVIDRTEVELAELQVRTGPRQLAELLAWAAPFECRTWAIESAGGLGYLLAQQLVARGEHVVDVPATLSSRTRLLGSGRSSKNDANDARAVAIAALRSPSILAVRVEDHVSVLRLLAKAQLDASRARSRACCRLHALVAELVPGGIRKEIVVTQADHVLASIEPVNATQRQRLELAHETLGEIRALDVRLKRSKARITEAVTASATSLTDIFGVGPIIAALIIGYTGDVTRFATAGHFAAYNGTAPIEFSSSGHTVHRLSRRGNRTLNHAIHMIAVTQIRHAHSEGRAYYDRKIDEGHKPRGARRALKRQISDRVYRQLRLDASNK

SEQ ID NO: 284965 - protein, 345 aa, unidentified
MKIIGCDFHPSFQQIAMCDLETGEIQERKLSHADGQAERFYRELGEAALIGIEATGNSQWFLDLVQRLGHEIRVGDAAKIRASYVRRQSTDKRDAAHILTLLLEKRFPQLWRPSAAIRDQRQLLRHRDKLVEIRTKVKNSLQHLAMNRGIQKKSRLWTRQGMEQFQQLAMPGWAGVRREDLLHLLKELNRQIAQLDQAVKQAAEQHPQAQLLMTQPGVGPVTALAFVLTIGEVARFAGSKQLTSYLGLVPSEHSSGSKRRLGAITKQGNCFLRKLLVEAAQTAVRKDEGFRKEYQHRCHHRPKAVAKVAAARKLAVRLYWMLRSNVSYPEIARVESNPRVALGDV

SEQ ID NO: 284966 - protein, 321 aa, unidentified
MFVGIDISKLSFDVAVLIDSRYHSRHFENNSTGFSAVLKWVKSFNGTPYFCLEATGIYGLALAKYLHTQQHKVVVANPIQTHAFAKMEMSRNKTDKADAMSIARYCQYLQDKGELTKSLFTPRDKAFERVQFLVTRLDQLNKMRSQENNRLDVSLDKAAARSIASMLRFIDKQIIKIKNELTTIVKENEQLKAQVELLASIDGIGDKTAWAILAYIGDIDLFENAKQVSSYAGLNPRIEQSGTSINHSRLSKMGCARLRKSLYMPALVAVRFNPLMRVFYEKLLTKGKPKKVALVAVMRKLLVLAYGVLKSGKPFDVNYQN

SEQ ID NO: 284967 - protein, 403 aa, unidentified
MKKAKSPYTAFVGIDISKGKADAALLLVYPDGSKKDQMRRKRIKVDFTKTSVEEFHWTILSYTDEQCTRIVYAMEDTGIYYRGFYTYLSSLAGEKEQILVLKPSYVSSWCKLHERSKSDPLDAQSIAQIVAYERDFKTVSPSFIHEKRDYSEVKSETHRYHQVKKMETQESTRLIGMADIHCPELAKVLGTGMTFLKVLAVYPSSYDIIHADNQELLELVQKASKNHFGQEKVDELIAACKDSLSQSEPTESDRRIIRDLVEHLMALRASLAASKARLHELGQKLPGYQALLSMPGFGKVTAVTVLAEVMDIGRFKSADALIAYAGLDPVNKRSGSSSIQKGRYLEMVPGTCDTLSSSLPNLPEGITLFLAGCLNVLKQDRRSGIFLHWSLSPINFCGISIPF

SEQ ID NO: 284968 - protein, 414 aa, unidentified
MKVVYPICCGVDVHKTFLVGTIISTTDGVQPHYQKKRFSTYNSDLHRFADWLYANNCLDVCMESTGKYWVPVFNILEERIIRVTIANPKWVKAVKGNKDDTKDSKWIGDLFRLGLVPSSFIPPKNIRILRESTRYRSKLVSMKSSEKNRFQNAFTVCNVALDSVVSDMFGKSATAITDYLISEDTFDPDHCVSLLQRSLKKKADSVLESIEGYSITDEQKFRMRIVRSHLDYITSLISQVDSAIDTMVAKHESLISLLCTIPGVDRNSAITIISEVGDDMSQFGSSKRLCCWAGLTPGNNESAGKKKSVRITRAGVYLKPALVQVAHAAVKATDNSYYRRKYEQISKRRGKKRAIIAIARMILTAVFQMMSTGEVWNPTDLFKVDMPETLKEKQLSKAVRQATKFLEKQGLTVS

SEQ ID NO: 284969 - protein, 304 aa, unidentified
MTASYEYHIGVDYHKSYSHLVVQDSSGKTLRSGRMKNDRQSLGGFLERYRDNSHAVVEATRNWMVIYDWLDDICDDVVLAHPLKVKAIADAKIKTDKIDATVLAHLLRADLVPEAWAPGERARELRVALRERMFYVRLRTMTKNRIVTVFDRYPEQTAQLKKLGDLFGKAGRLQLAQVNVSEIDRIQIDRGLDFIGDLDVRIKQSEATIRAMTKANGNVKLLKTIPGIGEFFARLIDAEIDDIGRFRNPKKLAAYAGLVPSTYSGHRQRCAASRPIRASEVQRSEQGACCHCAQAFDDRLPNPA

SEQ ID NO: 284970 - protein, 373 aa, unidentified
MSDYSAFVGLDVHKDTIAVAVADAGRTGEVRFWGEIANTPDAVASMLRKLGGRHPLMHFVYEAGPCGYGLHRQIMATQHHCEVVSPAHTPRKPGDRIKTDRRDAIILARLSRAGELTSVWVPDTIHEAMRDLIRLRQAMVKDLRAARQRTKSFLLRHGRVFKGTSWKRSHKIWLGNQSFAHPAQQIAFQSYLNAVDQAQARRDEVDVQLHHFTADWSMAPVVEALQALRGVAFITAVTVVCEVGDIRRFAKPRQLMAFLGLVPGERSSGETRRQGGITKAGNVLARSVLIEAAWSYRTPAKIGAQMMLRQEGIPQAAKDIGWKAQVRLCGRYRRLMARGKKSALAVTAVARELVGFIWAIAHITEPTSAEGVA

SEQ ID NO: 284971 - protein, 409 aa, unidentified
MRVVGLDMHRTFAEVVFLEGGLCRSGGRVGLTVEELNRFGERLLKTDEVVLEATGNTAAIVRALKPHVALVVIANPLQVRAIAHARVKTDKIDAAVLAQLHASGFLPTVWMPDTDTEALRRQVSRRTQLVRQRTRLKNEIHSVLHAHLIPRCPFTDLFGKKDRAWLAQQPLPIDERCSVEQRLREIDRHGEDLAVIDRALAQATLHDPRVHRLLTISGVNVTVAISLIAAIGEVGRFASAQKLVSYFGLNPSVRQSGLAPARHGHITKIGRAHARGMLVEAAWAATHTPGPLRAFFLRIRARRGMQIAAVAAARKLAIIAWHVLSKNEDYDWVRPALTQKKLRALELQSGFVPAPGSRRGRAYKYNLPTVRAQDCVVAEQAERAYERFVANWKTRGAKPRTTRDLRQNE

SEQ ID NO: 284972 - protein, 397 aa, unidentified
MYIVGIDIAKRKHEAAVIDGEGAVIIKPFSFTNNCSGYNRLLAMLTKAKLPLDEVSFAMEATGHYWLALFTRLQKEGFRVQVINPVQTNSIRSFYIRQAKTDPRDALLIAEVIRFGHFSESTLHPENIYELRELCRGRHAIVSMQADVKRKVVALLDQVFPEYETAFTNMFSDTSMAILQTCPTPKELSEMPLEELCHLIEVSSHKRFRMAKAQELQALARGSFGFAMAGDVFSTMIRLYAKHLDFLKQQVREMDRKIAEIMDTLDTPITTITGIGPTLGAYILSEIGDISRFSSAAKLAAYAGIDPTMRQSGEYNGVRNRMSKRGSPYLRHAIWLAASSAVLHDPALKFYFQKKRDEGKPYMASVGHACRKMVSIIYAVMRDNKAYTPHIPNEISA

SEQ ID NO: 284973 - protein, 321 aa, unidentified
MQTIPVTVYAGVDVAKATLQLHLQGRQAEFSNQAAGLVQLCQQLKTIPHIHVVCEATGGYERLLVQAMHQAQIPVSVTNPAQVRAAAQAQGQRAKTDRIDAALLTDYGQRYQPKPTSPTTASQDQLVALTQWLMQLVQAQALAKTQAEHHEAAFVCGRHTKLMAHYQSQIVAVEKQIRALLAQDAQLQQRVDCLDEIKGVGARTAWLVLAHMPELGQINRQQVAALAGLAPWTRQSGTMKGMRCIGGGRPEVRLALYMAALSAARCNSVLKPFYQRLRAKEKPAKVALTAVMRRLLVYMNHQLKALQATQTDTNLQNSKIP

SEQ ID NO: 284974 - protein, 449 aa, unidentified
MSRPQVIDDEDHERVHERVAAVDVAKDSGVVCTRTPHPSRAGARRSTVWTVKARMNAVRALGRQLKADGIEIVTLESTSDYWRIWFFVLEACGLAVQLVNAAQARNLPGRPKTDKLDAMWLARLTEMGLLRASFVPPKAIRDLRDYTRMRIRLVQERTRCWQRLEKLLEGALVKVSSVASKLTTVSAQDMIKAMIAGQRDPRQLAALARGRMKAKHDDLVEALDGMFDDHHGELAQLLLDQIAVLDGRIAQLSARAAELAGAMPAAWGVNPDGTTGPDAGAGPDAPVLNAVARLAQIPGLSEDLARSVIAETGLDMSRFPTAAHLVSWAGLCPSARQSGPRTRAGKKGQGDTWLRGSLGQAAIGAARTDSFLGERYWRIARRRGKAKAQVAVARSILVIIWHLLADPAARYTDLGHGYYQARTDTDRKLRNHVRQIQALGFEVTITKAA

SEQ ID NO: 284975 - protein, 413 aa, unidentified
MDVLHPRCCGLDVHRSSISACILLREAGRVQKHQRRFGAMTQELRELAEWLRQFDVTHVAMESSGVYWKPVWNILEGQFTVVLANAQHIKNVPGRKTDQKDAEWIAQLLQYGLLRPSYVPCESIRDLRDLTRMRASLSQEASRISSRIQKVLEDANVKLASVATNVLGKSGRAMLEDIISGEDDPEHLASLALGHLRVKIPQLRLALEGKIRSHHRFLLRCLVDQIQFVEHEIGLLDERLEEIAQQRPELSQAVARWDTIPGIDRVAAWTLLAEIGDNMAQFPTAEHLASWAALCPGNHESAGKRLRGTTRQGSPWLCRMACQCAWAAARTKNTYLSSQFRRLAARRGKKRAIIAVAHTIIVIGYHLQKNQSNYQDLGGNYFDRIHSDGLKRYLVKRLQQLGHKVTLEPMEAA

SEQ ID NO: 284976 - protein, 391 aa, unidentified
MSDEGKQVRRVIGLDAHPYLFSAAALSGADALQAKQEWVVDRVALDRLEAVLRKRTQPGDVMVLEASGNSFAVAERLFALGLRAVVLESQAVGKVGKAYCATDKVDAVKIARVYLSGLAHEVWVPDGKAAERRELFFGHRNAVRDSVRARNRIWAFLNQQCLRRPKGLRLAGPHALSELLVLRAWTPLQQLLLAEEVTAFQQAEVRRRRLREEIAAEVVSDPQILKMIRLLGIRDKVAFALAAFIGTIERFENAKKLVAYFGLNPSVSRSGIGGGNGGLTHYGRSDVRALLIQAAQSIMKYGRGATHHWAVALKMRKGNNLAVAALARKLVVSVWYLLKGFFTPLTELTDPLKVKMHKIACEIGKTRILKMGFASIADFERKNLEILIQTV

SEQ ID NO: 284977 - protein, 427 aa, unidentified
MVGCLTVAAGILARSEGETICNDPQVCRIVDLPVYYELETNNGNRDYRIQIGGHYMNYNTVYVGMDVHKESFTLCSCKYEDEKASHYQRTPASYKNVLRYLAFLRTIYGEDTRFVCGYEAGCLGYSLYHQLENFNVECVILAPTTMLEQRSKRRIKTDKRDAEIIARSLAQHNYSPVHIPTETDNQTKEFIRMRDDHKAELKKIKQQILSFCLRQGYQYDGSGNWTAKHVKWLRSLKPAGLYKEILDEYLLTYTILTDKLNRLDQRIEELASKEEYKESVSKLTCFLGIKIHTALSVIVEVGDFQRFVSARKFAGYLGLVPGQHSSGDDRNGLGITKAGNTHVRRLLVESAQSYTRGKIGYKSRVLRSRQAGNSPQVINYADRANERLRRRYYKMVLKDGKKYNIAKTAVARELACFIWGMMTDNIY

SEQ ID NO: 284978 - protein, 410 aa, unidentified
MKDSGKRYIGLDVHKHYLIALGVDEDLNIVLPARRVEFSYLETWMKKTLTQQDAVVLEMTTNTWQLYDELVVYAGSVMVVHPPHVALITRSQVMNDKIAASILARLLAKRLLVGIWVPPQEIRELRGLVAQRKKMTNMATQAKNRLHAVLQRHHLLLPEGNPFGASNTEWWQSLSIGKLEKLNLQSDLETLQFAEQQVNRMTEIMEGMTAEQEAIGRLLHLAGFGVVTAVTVWAAIGDIHRFAEPRYLVGYAGLGTRVHNSGMSTRSGQITKAGRRDLRTVLIEAANVVANSHPHWKAEFARLEPRLGHNKAIVAIARKLLVAVWYILSQNKTDRFAQPQAIAQKLLGFAYRVGKENRPAGQSAAQFVRERLDTLHLGAELTHISWGSKRPIPLPPSSLKTEKSDVPNTK

SEQ ID NO: 284979 - protein, 319 aa, unidentified
MAQDQVFVGVDVSKGTLDVHVHPGGTTGQFGNHKAGWRALCAWLRRLAPGDRQGGIALEASGGYERAVARCLVEAGFRVHVLDPAQVRSFARGLRRHAKTDAIDAAMIARCLAATIDEAVPYRPDPHAERLAALVAFRARLVAEAAALRGYRDTVEEAMVRRMVAARIAGLKLAVARLDSEIAALIASTDRFAARARMLLSVPGVGPVLTATLIAQLPELGRIGAKAVAALVGVAPFNRQSGRTDRGGRCRGGRRAVRAVLYMATLSAIRAGNPPVAALYQRLRRAGKPAKPAIVAAMRKLITILNAVARDQKPWAHAT

SEQ ID NO: 284980 - protein, 340 aa, unidentified
MGDITTIGLDLAKTVFQVHAVDEAGTVMMRKRLRRSQVLAFFAGIPPCLVGLEACATAHHWARELIALGHEARLMPPNYVKAYVKRNKHDVADAEAICEAVRRPSMRFVPVKTAEQQSALMMHRARDLLIRQRTMLVNALRGHLAEFGLIEAQGLHKVTRLIAIVMDETDGRVPDIARQVLKVIVNQIEDTQTRIAGLETQVVAWHKSNPVSQRLATIPGIGPIIATAIAATVADPNIFRSGREFAAWLGLVPRQNSTGGKVRLGGISKRGDSYLRRLLVNSAHTVLLCSKRAKNDPWLTSLLSRKPRLVVAVALANKTARVAWAVMSRQDTYRHAAVAA

SEQ ID NO: 284981 - protein, 341 aa, unidentified
MAVAGGFDLHRGQLTFDYVDTGTGETCRGRICPADRESLHGWLRRFDGVPDVEFAVEGCTGWRYVVEELQRAGITAHLAEPAETAGLRGSKRRAKTDWADARHLRDLLLDGRIPESWIAPGHVLEARALVRLYKDLLEERTSWQQRVHATLFHQGIPVVPELGTAGGQQRLAAAGLSAAGRLAVQAGLRQIERLNQEMVPLRRELARLSLRQPGCRALRKAHYGIGGLLSVAVWAELGDCRRFSSSDDAVRHTGLDITVYDPDGRRARGHIARQGPPVLRWALYEAALYASRPASPDYACFCGVRDRIDGQRALLPVARKLARRCYHTLRDLGEDALVPAA

SEQ ID NO: 284982 - protein, 367 aa, unidentified
MRTYVLKNNPKAPAEQAPAVQFEVIYLGCDLHKQSITVTRILDHGTPQPAQRFTWQAYFEWVQKQTALGKKVYAVYEAGAFGFWVARKLKDLKVECYVVHPEKLDPRQKRVQTDKLDSRHLADKLQRYVLGNRKAMVPVYIPTPQEEQKRLAARHRQKLSQQMLALQARGRGLLLSQGIFQNGRWWTDREWEPLQGRLSPELQGALADDRALIVDYQKRLHAADKQLEATAPKELPKGFGRLSFVLLLSELCNYQRFKSRRNVGGFTGLCGGVSSSGDYHLDLSINKAGSPYVRTLLIELAWRVVYWQPQYRGLRVWKRFCGGTRPVHKRRRKIAIVALARQLAVDLWRWQTGTATVQELGWEMTPA

SEQ ID NO: 284983 - protein, 354 aa, unidentified
MGLKHQKEKRSMDYFAGLDVSVKETSLCIVDDAGRIVREVRVASEPEALLAVLTNPSCHFKRIGLEAGPLSQWLFNTLAEAGLPVICVETRHMRAVLKAQINKSDRNDARGIAQMMRAGLYRPVHVKTLRSQKLRMLLTHRKLLQSKAIAIENDLRATLRNFGLKVGVVGTVKFEARIKELVENLTDLAVLVEPLLVVRRVLREQIGVLHRRLLAIVRDDDVCRRLMTIPGVGPVVALTYRATVDVPSRFRNAKAVGAAFGLTPSKHQSGESDRTGGISRCGDEMMRAMLYEAAQILLVRSTRWSWLKAWAMQIARRRGVKKAIVALARRLAVIMHRIWMDGTEFRWTREIPAA

SEQ ID NO: 284984 - protein, 352 aa, unidentified
MAEALRNSIAFVGIDIGKNSFHVVGLDGRGAIVLRQKWSRGQVEARFANIPPCLIGMEACVGAHHLSRRLQRLGHDARLMPARYVRPYSKGQKNDFRDAEAIAEAVQRPTMKFVATKTADQLDLQGLHRVRERLVSQRTGIINQIRSFLLERGVAVRQGLRFLRAELPDILAAPSDALSPRMVRIIEDLAGDWRRLDERVERLSKEIEAIALRDAGCERLISVPGIGPIISSAMVAAIGTGDVFSKGRDFAAWLGLVPKQISTGDRTILGKISKRGNRYLRVLFVQAAWVVLIKPQSWERHGLKSWIEAARKRLHRNVLAIALANKLARIAWSVLAHGGSFEANKKLAAAAT

SEQ ID NO: 284985 - protein, 339 aa, unidentified
MQLYAGLDLHSRNTYIGILDKDFNRVFHKRVGNQLDLILKTLEPFRKQLKGLVVESTFNWYWLVDGLMDAGYQRLHLANPSAIRQYEGLKHIDDRHDAFFLAQLLILGILPQGYIYPKKDRPLRDLTRKRLFLVQHKTAHILSLQSLFQRCCAVKITANQMRTLTREDCRQLLKQEHLVLSAQTTLETIGFLKQQINTLENAIIKKVKLHKSFEHLLTVPGIGNILAMTIMLEAGDIRRFPKVGNFVSYCRCASSQRLSDGKPKGHGNRKNGNRYLSWAFVQAAHLSCRYNQCLRAYYNRKAAQTNTCVATKALSNKLARICYYIIRDQVPFRQELAVH

SEQ ID NO: 284986 - protein, 367 aa, unidentified
MGKHSTAVVGMDVHKESVDIAIADGKEARLFGRVGGDAAAVERAVRKIRSVHRDPLFVYEAGPCGFWLYRRLRAQGLRCMVVSPSMTPRRSGDRVKTDRRDALMLARLARAGELAPIYVPDARDEAIRDLVRAREDAVCMQRQARQRLQALLLRNEIRYVGRSAWTQAHRRWIAHLKLPDPAQQIAFEEYVQAVQEAGARLERLAGAIAAQLAHWRWRPVIEALQALRGVSAIHGVRIVAELGDLARFESPRKLMGYLGLTPSEDSSGPRRRQGGITKAGNSSARRALIEAAWAYAHPARVSWVIARRHTGLAKSVTDLAWKAQLRLCARFRRLAARRLPRNKVVVAIARELSGFVWAIARQVKPAA

SEQ ID NO: 284987 - protein, 318 aa, unidentified
MAKSIMACAGIDTGKRTLEVALLAEAAERLGLDNDAAGYVSLLRWLRRHRVKRVGIEASGGYEAPVVAELRRAGFVVIVFQPAQVRAYAKFVLQRAKNDRIDAGLIARCTAAATTIHAPPDPRLAPLAEHLRLVDQLGEDIACLKTRRETCRDPRIRQHWSEEIARLKGRWRRELHGLAQAIRQHPDLARRLELLASIAGIGLVTAVAILVRLPEIGRVSREEAAALAGLAPYDDDSGERVGTRHIDGGRQRLRKALYTAAFPAAFHWNDQLKTLYRRLTAAGKPHKVALIACARKLLIYANAVVQRGTPWRAKPAAA

SEQ ID NO: 284988 - protein, 320 aa, unidentified
MSGFIGIDVSKDDLFVAREGEPESRSYPNTEHGHRDLIRDLERAGAPSELIVVEATGGYEKRLVTALGARGLPVVVVNPRQVRDFAKATGQLAKTDKIDAHVLADFGARVKPEIRELATEEQEDFRDFLLRHEQLVQMLVAEKNRLLQAEGRSRQVLRKKIKNHIRFLERELELLDSDLDDTLKKSSVWKEKDDLLQSVPGIGKQTARTLLGLVPELGTLKAGEIGKLIGLAPFNRDSGKLRGQRHIRGGRARVRAVLYMATLVATRHNPTVKAWYQRLLAAGKLKKVALVACMRKLLVVVNAMVKTGTRWQAQASPATA

SEQ ID NO: 284989 - protein, 330 aa, unidentified
MYSLIVGIDISKTTIDAAITRQNQKDVYHDSFLNKPFGFKQLIKWIEKFKNPEDKLLICMEHTGHYGQKLSEYLKSKEIDISQINPLRIKRSLGLRREKSDKSDSKAIATYGLKFQEDLVINNLTDGVFLDLQLLLAHRKRLQEKMLSFQRQEKYLQHCLESTYAKQIIRNLKLNRRHFKKQFRMIEDHIEVFIAKYPELERNYRLLQTIPGIGSVISLYTILYTKNFSAIDCPRKFACYCGVAPFKNESGTSVRKGNRVSFYANRMMKGILNFGAMNAVKIDPELKAYYQKKVGEKNSKMLVLNAVRNKLIHRMFSVAKRQTPYVTRAQ

SEQ ID NO: 284990 - protein, 340 aa, unidentified
MFTNFVGIDVSKSKFDLALIKELDKDHVFQGVFENTPKGIKLMVKFLEKEHEINLDETIFCMEFTGIYCRPLTSFFVKQNCKVWIEMPVNIIRSMGLQRGKNDRVDAHRIALYAYKNRDDIKLWKPQRDLIFKLRDLLALRERLITAQNSLKTPIKELMAVGDTKAAEMVRRSCHKSLSSLENEIGQIDKNLDDLIKNDPQLKELFRLAKSVPGVGKLTALFMICFTDEFSMYNNPKQLACYCGVAPFEHSSGSSVRGKTRVSHMANKVLKHMLHLGAMSAIQWDPELRDYYKRKIAQGKNKMLVINAVRNKIIHRLCAVIKRGYEYQSQNIFKERLVIS

SEQ ID NO: 284991 - protein, 344 aa, unidentified
MEYFAGIDVSLEESSVCVVDGAGRIVRETKVASEPEALVRFFRGLGIRVIRIGLEAGPLSQWLHAGLVAAGFEGVLLETRHVKAALSAMVNKTDRKDARGIAQLLRMGWFRPVHAKSPGAQEVRALLVARKLLQTKLLDVESSIRGILRGFGLKMGAVSKGRFVARVRELAAGHPMLERITEPMLRAREALRTEYARLHGEMLAIAKPDPVCRRLMTAPGVGALVALTFKSAVDDPGRFTRSRALGAYFGLTPKKYQSGEKDVTGAISRVGDPMVRVTLYEAANIMLSRVTRFSSLKRWALDVAKRRGLKRAKVALARKLATVLHRMWIDGTTFHWGKQADAAV

SEQ ID NO: 284992 - protein, 353 aa, unidentified
MANQRGGVVGGVDAHADEHHVAVVDLQGRLLDATAFPTTAAGYAQLIGWLQSHGEVERVGVESTGAYAAGLVRALRAGGIRVVEVNQPHRHARQRLGKSDPIDAELAARAALSRTATAVPKQTSGIVEAIRQLQVVRTSALKARHAALQQLNDLIVTAPEQLRGELRHGRSMKAKAALCRTLRPDTQHIDDPTQAAKLALKSLARRVGELDREIFDLDRQLERLVRAAAPRTTQLFGVGTQGASQLLITAGQNIERFRSEAAFAKICGAAPIQASSGRTARHRLDSGGDRQANRALHMIAVCRLRHCQRTKAYASKRTADGLNKREILRCLKRYIARETFHALRADLEALNGT

SEQ ID NO: 284993 - protein, 343 aa, unidentified
MEQYVGLDVSLHQTAVCVVDQSGKIIREVMIPSDPEVIAAFIKANTTNVVRIGLESGPTSTWLWTELDRMGLRVICIDARHAKAALKMQINKSDRNDAVGIARIMQTGWYREVRVKDLDSHAIKALLVGRALLVKIKRDLENQIRGLLKNLGLVIGRGRRGPFVTRTRELIEDRPQLQAVIEPLLKARETVAQQIADLDRKVMRLARTDDQARRFMTIPGVGPITALCYLATIDDPKRFSKSRNVGAYIGLTTRRYASGEIDWTGRISKCGDKLLRSYLFEAANVLLTRVAKWSTLKAWGMRIAQRSGIRKAKVAVARKLAVILHRMWINGTEFQWSSKEAAV

SEQ ID NO: 284994 - protein, 365 aa, unidentified
MQKISTVEARGKRILGKQLTIGLDLGDRFSSYCVLEAAGEIVLEQKLPTTPEAMRKTFGTMPRCRIAMETGTHSPWVSRLLTALGHEVIVAHAQKVRLIVKSRRKDDRMDARTLARLARIDPELLSPVQHRSAQAQLHLAEIRARAVLVSTRTALVNAARGLVKSYGERLRKCHTQQVRRETSRELSMELREALQPLLREVESLNERIQEYDRRIEKMAKERYPETALLKQVKGVGDLIATTYVLTLEDPHRFRKSRDAGCFVGLQPGRRNSGESEPQMRISKEGDEYLRTLLVQGAHYILGPFGEDSDLRRWGQKLAVRGGKNAKKRAVIAVARKLAVLLHRLWVSGEVYEPLRNSQKVVNAAA

SEQ ID NO: 284995 - protein, 335 aa, unidentified
MVKVKNFIGIDVSKKTFDAALIKNLNRQTIIHEQFENSRQGLKAFTNWLTAQGVSIDDSTVVCMEHTGIYNYSILEYLLETPVLVWLEMALQIKQSLGIQRGKSDKLDAIRIARYAYKEREDMRVWKPVNSIINSLKLLMAQRDRIVSSLTRLTVPVEELKSVGQLKEAQMLERLQKSAVRELQKTLKKIEQQIELKLKEDEGLYRLYQYADSVCGIGEVIATKLVIYTHGFTRLTDYKKMATYCGVAPFEHTSGTSVKKPSRTHHMANMDLKSTLSMGAKSAINYDPEIKLYAQRKTAEGKSYAWIKTAVSNKLLKRVLSCVNNQRMYVKKQAA

SEQ ID NO: 284996 - protein, 340 aa, unidentified
MNTMTLLGIDIGKHSFHLHGQDAKGHQVLRKKTNRGQLLSTLAQVPSCTVVMESCGGAHWLARQIGALGHEVKLIAPQYVKPFVKGNKNDFIDAEAICEAASRPAMRFCSIKTAEQQTLSALHRVRKSLIGQRTVATNQIHGFLLEFGISLPIGAAALHRVPALLDDPQHPVPLRLKSVVMRLHHQIQQLNDEIKDIESDLKQQLKEDDAGSRLQSIPGIGPITASAVLADVGDASNYRSGRDFDASLGLVPRQYSTGGKTVLLGISKRGDKHIRQLLVQGARSIMQHIDKREDALGPWVRELLTRRHSNVVACALANKLARIVWAVLAKGGQYDPHPNA

SEQ ID NO: 284997 - protein, 350 aa, unidentified
MEYIAFDCHKRYTWAVVEDEQGQILVEERIEHAPGALREFLAVWEPGSPVAVETVGNWYWIVDEIEQAGYKPRLVHAGKAKLMLGMVNKTDKLDARGLNKLQRIGTLPVVWIPPGQLRDKRELTRTRMVLVAQRTQLKNRIHSTLDKYGVRVGVSDLFGKKGRELLTRKLPKLPPNTRQVTEIMLSQIDLLEERIGAIEGRMREVLSPTREVELLETLPGVGFILATVIWLEVGDVGRFPGPGHLASYAGMVPRVHSSGGKTRYGRTRKDVNHYLKWAYCEAANVVARHRQKHPERHVSQLYERVMHRRGHQKAIGAVGRHLAEATYWMLKRDEPYKDPAVNKQVREAGA

SEQ ID NO: 284998 - protein, 376 aa, unidentified
MSKDTLYVGLDTDKKSIEVALAEGLPGGEVRAWGKLANDARSVLRLVKRLQAGGRQLEMCYEAGPCGYGLDRLLNGQPGVRCMVVAPSLTPRRPGDRVKTNRRDALMLARLLRAGELTAVWVPDPAHEAMRDLVRARGAATGDLVRCRQRIGGFLLRQGIGYVGKPWTRKHRAWLGQLVATLPLAAHRLMLGEALQALDEATARRDRLTDHIAELVPGWSLAWLVDALQALRGFALINAATLAVEIGDPRRFATPRQLMAYLGLVPSESSTGDKVRRGGLTKAGNGRTRKALIEAAWTYSRPARAPSDNRRHAPAVVAIATKARHRLSQRYRRLTARGKRPVIAVAAIARELSGFAWAIAQVAGPTATAPQPPAKR

SEQ ID NO: 284999 - protein, 416 aa, unidentified
MNAAGIDVSSRKSTVAVLRPFGEVVKLPFDVRHNAGELVALAKQLKSIEGETRVVMEHTGRYYESIAKVLHEAGLYVSAINPLLIKEYGNNSLRKVKTDKADAMKIAKYALDNWTELRDYTPMDTIRYDLKTLNRQFQLASKQKTATANNLIALQEQSFPGIRKLFDSPVRSDGTQKWVDFTHDFWHVDCVRSGSQNAFTQRYRKWCKRNRYQFSMEKAAEVYALAKSAVVLVQKTSVTKTLVQEATNQLTAISRSVETYRSEMNKLASQLPEYPVVMEMYGVGESFGPQLMAEIGDVRRFERKQSLVAFAGIDPAPNESGDYCSRSNKTTKRGSPYLRKTLFNIMTIHLQHAPANEPVFQFLDKKRAEGKPYYVYMTAAGNKFLRRYYGKVMAYFSTLEGLPPVDMDSTGLHHAE

SEQ ID NO: 285000 - protein, 400 aa, unidentified
MTAVWAGIDSGKRAHHCVVIDAMGRTLVSRRVVNDESALLELIAAVLALGGGDQVVWATDLNAGGAALLIALLAERGQRVLYIPGRIVHHAAATYRGDGKTDAKDARIIADQARMRIDLQPVRSADQISTDLQLLTSRRTDLIYDRVRAINRLRALMLEYFPALEAAFDYSKKAPLILVSGYQTPEALRRIGAARLAAWLKKRGCRGSANVARKAVDAANAQRTALRTEAVASQLVAQLAEQIAAIDTQTAQLDEQISERFDQHRDAPILLSMPGFGPMLAASFLANTGGDLNTFETADRLASVAGLAPAPRDSGRISGNHHRPRRFNRRLMRTCYLAALSSLKNSPASRAFYDRKRGEGKSHKQALIALARRRINTLWAMLRDRTTYQEPPQPALAPAA

SEQ ID NO: 285001 - protein, 356 aa, unidentified
MPQTLNSKIAVIGIDIGKNSFHIVGQDRRGALVLRQKWSRGQVEARLANLPPCLIGMEACTGAHHLSRELQALGHDARLMPAKYVRPYSKGEKNDYRDAEAIGEAVQRPTMKFVATKTADQLDLQALHRVRARLVSQRTGIINQIRAFLLERGIAVRQGLHFLRAELPGILGKRTDVLSPRMLRIIEDLCGDWRRLDERIDSLSDEIAALARQDKGCERLMTVPGIGPIISSAIVAAIGSGDAFSKGRDFGAWLGLVPKQMSTGDRTILGSISRRGNRYLRALFVQAAWVVLVKITPEGWERYGLRSWIEAAKQRLHHNVLAIALANKLARIAWAVLHKGRAFECVKANATASRSA

SEQ ID NO: 285002 - protein, 345 aa, unidentified
MKITTMGIDLAKNVFQVHGIDERGKAVLRKQLRRSQVAAFFGNLPPCLIGMEACASAHYWARTLQCFGPTVRLMAPQFVKAYVKTNKNDVADAEAICEAVSRPNMRFVPIKSIEQQAILSVHRVRQGFVKARTAQANQIRGLLGEFGLVIPQGIYNVAKRVPEILEDASNELPVPFRHLIDRLTQHLKELDRQVKEFEQEIIAWHRGSELSRKLEKIPGIGPLAASALVASIADARSFKNGRQVSAWLGLVPRQNSSGGKPTLLGMSKRGDAYLRTLLIHGARSAILAAKNKIDNTQGWLTDLLKRRHPNIAAVALANKNVRTVWAILAHGREFKADYVPTRMTA

SEQ ID NO: 285003 - protein, 341 aa, unidentified
MLKNTFFIGLDIACDDFAASIYQSPEKPVITKEAIKNNPEGFGMLISWLKEHNIDCTNSVICMEATGVYSEAIAYYLSTYGFKVSVEPPLKVKRAFDPVGHKTDPVDSKQIAEYAYRYSDELKFWQPRKDILEKIKQLLTAREQFTKQSTAIKNAMKSYERHVVQVPLIVKAHHETLKELKKHIAEIDKELDRLIRQNPIISQMSNQLKGIPGVGLLLASNLITITGAFNDISSYKTLSAFIGICPYQHRSGKSIYKAPHIRNFGPVYTRKLLMLAARSVATHNVPFRKYYLRKLAEGKAKQLVLNNIANKIIKIACALIKNNSQYLEGYYSVNPLCLNLA

SEQ ID NO: 285004 - protein, 310 aa, unidentified
MITCFIGIDAHTTNYTLSTAIDAEDKPFNTCKYAPKLTYILKYANALCKKYNLKKEDILLGYEAGCLGFKLQRDLNENGFNCVVMAPSTIPGTAINRRKKTKNDIRDAEAIAKALRNDDYSSVATPDEEDEAIREFIRAREDVRMELKRCKQHIMAFCNRHGQHYEETGWTQKHMKWLNNLAFSQPVLKETLNSLLLEYEYLTEKLEEKDRRIEEFAQMDKYRESVHKLTCFKGIKTLTALAVIVEIGDFARFMKAKNFVAYLGLSVGEQSSGNDHNQTGITKQGNRFIRKLLTEAAQCFSRATSKKSKG

SEQ ID NO: 285005 - protein, 372 aa, unidentified
MNYNTVYVGMDVHKESFSLCAYTIDSEKASYYQRTEADYKKVLKYLEFLRTIYGDDASFICGYEAGCLGYSLYHQLAAQNVKCVILAPTTMLEQRSKKRIKTDKRDAEIIAKCLAQRNYSSVHIPTAKDEETKEFLRMRDDHKLALKKIKQQILSLCLRHNWCYDGKTHWTAAHIKWLRSLEVEALYKELLEEYLLTYQTLSDKLDRLDKRIEELASQDEYKDSVKKLCCFIGVKTHTALSVVVEVGDFKRFASAEKFASYLGLVPGENSSGDDKTRLSITKAGNRHVRLLLTEAAQCYGRGTVGYKSQALKARQVGNTPQVIAYADKANERLRRRFYKMILAKGKKHNVAKTAITRELACFMWGMMTDNIA

SEQ ID NO: 285006 - protein, 404 aa, unidentified
MYNAVGIDVSKGKSTVAVLQPGGTVIRKPFDVSHTSQNLNELVDYLSSLDGTTKIVMECTGRYHEPMVKALSEAGLFVSIVNPHLIKNFGNNSLRKVKSDPADARKIARYTLDNWTELRQYSGMDNTRTQLKTLNSQFSFFMKQKVAAKANLIALLDNTYPGVNKLFDSPTREDGSEKWVDYAYSFWHADCVRKIGLKAFTERYKSFCKKHHYIFQQDKPEKLFNASKELVAVFPKEKTYKLLIQQSIQQLNLASEHVERLRREMNELASTLPEYSTVMGIYGVGKTYGPQLIAEIGDVSRFTHREALTSFAGVDPGVDESGQHKSKSNRASKVGSARLRKTLFQIMTTLLQNAPEADPVYRFLDKKRSQGKPYYVYMTAGANKFLRIYYGKVKECLRNLEQTE

SEQ ID NO: 285007 - protein, 340 aa, unidentified
MQVITIGLDIAKSVFQVHGEDANAKIVIQKRLRRGQVTGFFAKLAPAPVGIETCGTAHYRGRSLRALGHQVRLIPAAYVRPFVKRNKNDARDAAAICAALGRPDLRFVAIKSVDQQAARGVERARELMVKQRTQLMNCLRSQLAELGIVAAPGGRGFAELSGLVAAEDATIPALLRPARHALLGQITGLHGSIMALEAQIMATVKTDPAMRRLATIPGVGGLTAHAIVTAIGEGKQFASARDFAAWCGLTPREQASAGKRRETGISRQGDIRLRKLFALGASTIMRYARAHGDRATQWQRGILARRPVKVAVLAQAAKTARIAWAMLVSGETYRKPSRVA

SEQ ID NO: 285008 - protein, 345 aa, unidentified
MFIIGVDPHKGSHTAAALNADEHVHGELRVRADRNQRRYLLAWAEAFSPRAWAIEGATGTGALLAQQLVAAGETVLDVPPTLSARARLLDSGSTDKTDPHDARSAAIVALRHPKLRAVAEEDHVAILRLLAKRHHDLTAQRTQAVCRLHTVLCLLTAGGATRRLSAKRAAEGLRRIRPTDGVATERKRLAADLLVDVRRCDRDLIELRARTVAAVEASKTSLTELYGVGPVVAAHIIGYTGDVLRFPSAGHYARYNATAPIEASSGPKKRHRLNPRGNRQLNHAMYMIAVTQVRNDTPGRAYYLRKQAEGKSRKEAMRALMRRISDAVYRQLVLDVVGQAAREDT

SEQ ID NO: 285009 - protein, 410 aa, unidentified
MDTLIERCAGLDVHKETVVACVRVPTRGGGREQCLQTFGTTTAQLLALRDWLVAHGVTRVGMESTGVYWKPVYYMLEDAVECWLLNARHLRNVPGRKTDVADAAWICQLVEHGLVRPSFVPPKPIRELRNLTRYRKAQIEERTREAQRLDKVLQDAGIKLSSVASDVLGVSARAMLRALVAGTRDPELLAELARGTLRKKIPALREALHGRFGPHHALLVGTILAKLEFLDEALAQLSAEIEQVIAPFTAEAALLRTIPGVDRRTAEALIAEIGVDMTRFGAAGRLASWAGWCPGNHESAGRQGSAKTRKGSKWLRTYLTEAAKAAAGAKGTYLAAQYARLRGRRGSARATVAVGHSILVAAYYILDRHQPYRDLGPDYFRRRHSREHQMRRLVRQIEALGFRVTLEEAA

SEQ ID NO: 285010 - protein, 402 aa, unidentified
MTMRRRAWVGIDVGKTSHHACAIDETGKVVWNQKVSNEQRAIEQLVTRACKGAEQVQWAIDLTSPMALMLITVLLCAEQSVVYVPGRTVNTMTHAFRGEGKTDAKDARVIAETARLRNDLSNVVLPDELVVELTQLTGYRADLMADWVRGINRLRALLGSIFPGLEAAFDYSTRTPLILVSGLCTPAEIRAAGIDGMTAFLVDNHAWPTGIVKSAATAALANEQPLALPGEAGTAALVKRLACRLLELDREIKDIDKTITARFRDHPYARIIESLPGFGPGLGAEFLVVTRGDLASFATAGRLASYAGLVPVPKDSGRITGNLRRPKRYNRRLRRVFYLAALSSLRADGPSRRFYDRKRAERLIHTQALLALARRLIDVLWALLRDDREFTPEKPITATAAA

SEQ ID NO: 285011 - protein, 408 aa, unidentified
MTVVGIDVSKGKSMVAAMKPGGELVTTPYEVKHSGIELSRFALDVLCMEPDTRVVMEATGRYHEPVAALLHSEGIFVSVLNPLLIKQSGAGSLRKVKSDPKDALKIAKYGLDNWSTLREYTPMEAIRQQLKLCARQCDLYSKNIVMLTNNLISLSDKTFPGVNELFSSPEKADGHLKWVDFYRSFWHCDCINRMSPDAFEERYKKWCKRKGYHFSTDAADALYAASCGSYTTLPRDNNAKLLVTVAADQLIALRENQSKLEAEMLNVCKQLPEYETVMAMYGVGKSTGPHLMAELGDVRRFPHRSSIVAFAGVDPGVVGSGKMQLSSVTTSKRGSPQLRKALFQVVSTYVKCKPENEAVYQFYAKKRDEGKPFFVCTTAAANKFLRIYYARVKECLNAAESATQVEEG

SEQ ID NO: 285012 - protein, 459 aa, unidentified
MGKAKACKGGKNQLQVIHPRAAGIDVGSKFHVVAVSAEYDPDPVRKFNSFTTDLHRLADWLKAVGVTTIAMESTGVYWIPVFEILESRGFDVILVNAREGKRVPGRKTDIKDAQWLQQLHQYGLLSASFRPGEKIASLRSYLRHRERLTEYAAAHIQHMQKALMQMNLQLQHVVSDITGDTGMRIIRAIIEGERSATKLASYRDPHCKQSEKTISAALTGNYRPEHVFSLKQAVALYDFYQKQIKECDQEIEKALAALNSDKNPPSEPLPKARRTQKQKNEPGVPIREMLYTLTGVDSTQINGIGPYTTLRLVAECGTDMAKWPTSKHFTSWLTLSPGNKISGGKVLSSRTRRTKNRATTLLRIAAVNIGKTQTALGAFYRRLAARVGKAKAVTATARKLAVLFYTLMRYGKAYVEPGADYYERQYRERVLRALSRKAAALGYRLAQKQETSPVTGNVS

SEQ ID NO: 285013 - protein, 461 aa, unidentified
MTVSPCRTHGLGGGVTGSGGIDRPLIRGMTTGFFAGWEALRNVDVAIGAVGRPGEDDRRKHVIDVSDIGAFLGLDVGKGEHHATAVTPAGKKAFDKRLPNSEPKLREVFARLKTKHGTVLVIVDQPASIGALPLAVARDMGCEVAYLPGLTLRRIADLYPGEAKTDARDAFVIADAARSMPHTLRTIDPADETVAELEMIVGFDDDLAGEATRVSNRLRGLLTQIHPHLERVIGPRVQHPAVLALLERFGSPAQIRTAGRRRLVNLLRPKAPRMAERLVEDIFTALDEQTVVVPGTDAAALTVPSLAGSLTAVLDQRELLAARIEELLEAHPLSKVLTSMPGIGVRTGARILIDVGDASSFPSAAHLAAYAGLAPATRSSGSPIRGEQPSRRGNKQLKRAFFLSAFAALADPVSRAYYDKKIAQGKHHTQALLCLARRRADVLFAMLRDGTFYDPRPAPTG

SEQ ID NO: 285014 - protein, 429 aa, unidentified
MNKSEAKETEEYAALIGLDWASEKHDICLWDAATGEVRQRVVDHTPEALAEWLGELQAQYPGRRVAVCLEQSRGALMYALMGHAFLDLYPINPVTLARYREAFAPSRAKDDPGDARLLSEILRLHREKLAVWKPDDEQTRTLGFLNEERRKAVNLRTKLVLRLQSALKLYFPQALQWAGTDLAAPMACDWLLKWPALEAVQRARPQTVRAFFYAHNCRSAGHIESVLAALPAAKPLTQDAAVLAVQPLTVQMLAKQLRLLHGSIAAYERQIHALFRQHPDAFLFESLPGAGEILAPRLLSAFGTDRARHPTAQDMQTYAGVAPVIERSGKSCWTHWRWNCPKFLRQTFHEYAKNSIPYSAWARAYYEQQKQRGKGHNAAIRSLAFKWIRIIHRCWQTRTPYDEGLYLQALERRGSPLVALLAAPTREAS

SEQ ID NO: 285015 - protein, 424 aa, unidentified
MNFKMQDKQNQLIERISDTHLIVGVDIAQQLHVARAVNFRGIVVGDPISFENNEEGFFKLLNWIQDLKRLKNLNEVIVGMEPTGHYWINLSTWLYNQNIEIVTVNPHLVKRNKENRDNTQSKSDKKDALVIADMVKNGYYSFIRPSSESFEKLRVLMSNRDVIVKRLVMSINQINRWVDVVFPELRQVFNDVSCKGAIATLRLFPTPDEISSMESLDIQRGWKSLMKRQPGPKKAQLLINLAKSSIGTGQALDAYKFHLEQLIEEYDLAVKQLERVEQQVKEVLYNIPFARKLLTIKGISEISLAGILGESGDLSGFAHGNSLLRHAGLHLAEASSGKWKGQIIISKRGRSRLRRFLYLATMSLVMNNPEFKALHSHNVKFKKIKKMKSIMKLIGKLARIFVGIARRNESYCPNKIQELIPLAA

SEQ ID NO: 285016 - protein, 391 aa, unidentified
MIYVGIDVAKDKHDCFITNSDGEVLFKPFTISNNREGFDTLFHRIESISDDLTKVKVGLEATGHYSYNLLGFLLDKGLPTYVINPLHTNLYRKSLSLRKTKTDKVDSRTIATMMMSDVNLKSYSDISYHNEELKSLSRYRFDKVKERAKLKSSISRLVTILFPELEKLVPKLHMPSVYALLSEFPGASYVASAHLTKLTHLLSEASKGRYNKETAILFREAARTSIGSVMPAKSLELKHTIKLIQELTSEIDEIESEIKRIMDEIESPILTIPGISYRMGAMILAEIGDFSRFDSPDKILAYAGMSPSTYQSGQLTNCHSHMEKRGSRYLRYALYNATKYVCHWDTSFRIYLEKKRSEGKHYNVALSHATKKLVRLIFALEKSKKAYLPAV

SEQ ID NO: 285017 - protein, 331 aa, unidentified
MDQHNYVGIDVSARSLEAAFVGPSHRSTTASFANSPAGHRQLIKWATKRGRLAQVCLEATGVYSLEIALALHHHPKTKVMVINPKAIHNYAGATMQRAKTDQVDARLILDYGQRMPFACWQPPSKEVLQLQAITRRVSQLNVELNREANRLHAEGHRTSTTDLIARDIQVNLRHLERRMAHLEEKAVAWVLSVQHLSALFQRLLSMPGIGETSALRRLAELAVLPEGMKPPQWVAHAGLDPRPHESGQSVHRPRAITKAGNKYLRAALYMPALVAIRYQPNVKAFYDQLIAAGKKPLQAIAAVMRKLVHAIWGVWKHDQDFDGQKFYKMAA

SEQ ID NO: 285018 - protein, 351 aa, unidentified
MLLIGVDYHPSFQQIAFFHEETGECGEQQLNHSDGEAERFYRDLKQRGISVRVGMEATGYSRWFERLLAELGFEAWIGDPAEIKTKRVKKQKTDRKDAQLLLRLMRENNFPQIWVPSPENRDLRQLLWHRHRLVQMRTRIMNQLQALAMNEGQRRKKKLWNEQGRAALEKLPLAPWASRRRCELLELLDRMNLTIEELTAAVGQEARKRPDAVRLMTHPGVGPLTALAYVLIIGTPARFPRGKQIGTYVGMIPCEDSSAHKQRLGHISKQGSSLLRFLLVEAAQAAARSNPDWRRRYIRLAMRRHRNIAKVAMGRRLAIRLYWMWRNGCEYSQSLEFGSYAGQLGTGHGVK

SEQ ID NO: 285019 - protein, 339 aa, unidentified
MTTCTTVGLDIAKSSFQVHGIAASGRPTLRKKLRRGKLLEFFANLPACLIGMEACGGAHHWARELTKLGHEVRLMPPQYVKPYVKTNKHDAADAEACCEAVQRPSMRFVPVKSETQQSLLMLHRIRDRLVAERTGTISAVRGHMAEFGLVAARRGLGMKELLAIISDVDDARLPPMARELLVLQVEHLRAIETRIADLDGRLQRQARSDEAARRLTAIPGVGPVIATAMVATVVDAQIFPSGRSFAAWLGLTPRQHATGGRERLLGISKRGDGYLRRQLMHGARSLVRLAAGRDGRLWTWIDGLVARRPFNVVVAAVANKLARIIWAMLGHNETYRAAV

SEQ ID NO: 285020 - protein, 348 aa, unidentified
MKIVGCDLHARQQSIAMLDTETGELTEKVIRHEGNGVREFYAALGNSVVVGIEATGSMQWFLELLEELGIESRVGDPAKIRAAETRKQKHDRRDARLILDLLERDRFPAIWMPTSGQRDLRSFLRDRHQWVQMRARLQHTLQAMALNHALRKGPALWSGRGQEALRKLPLPPYASQRRNELMSLYAQLQRRIQELDKQVEEQAQQRPQARRLLTHPGVGPVTALATDVFLGDPSRFTTANQVASYIGMIPSEHSSGKRQRLGKMSKQGNSLLRYLWTEAGMHATGKDPELKRFYRRKLIQKGMGKARVAAARKLGIRLWIMMRDEIDYEEFCRRGKVRQIGESPCGNA

SEQ ID NO: 285021 - protein, 342 aa, unidentified
MGKLYVGLDLGSRHVEQVVMRLNGKVIQQRRFATSEIKLRQAFEDLTAEVHVHMEAGELAAWVREVIKPYARSITVSHARDNAWIAKDPNKRDRIDAFKLADLLRMNRVHPVYYADDPRRRDFKQLVQHYDDLTAQEVALKAMIKARLRTQGVIIHNASPFTEKGCKEVLARVPSTELRGAIRQLYKVLAHTLEVRDQAYAAMVKAGRRFPEIKLFQEGVPGVGPIGAARFSAYVQTPHRFSNKRKLWRYCRLGISYRSSDGQLLSYPKLDRAGCGPLKDVARKAFEVAVNSKDDNQFKRAFEQTLGRTHDKTHARLTVMRKIVSVLRAMWLTNSPYQDELG

SEQ ID NO: 285022 - protein, 415 aa, unidentified
MEKQKEKVCGADIHKKFLVATILSRDGHKITERFGMNLDDILEFKKWIKDNNCEQVAVESTGVYWVPIYTALEGSIGVIVANAHKIKHTPGRKTDMRDSEWIAQLCLNGMIEPSRIFPREDRELRTLTRARENLVNNRTQMKNRIHQALESSCIKISSVLSDIFGKSGMQILNGLLKGKNIDEILKGITSKKILQKEQMLRDAIKNSLEPAKVFMIQTYLGLIEKIQDEIDKLDKEILTRIQRVKEDLEIVMSMPGMGLTSAITVRAEIGNYKDFETGDQLASWCGLVPSVSQSADVLVTGNITKQGSKHIRRMLVQVAQAITRTKSSKLKRFFLRVKARKGTKKAIVALARKILCILHHLLLNREKYVDDYPKVKKVKLDKASSPVQMDEQEMINVLVRAGYTIQKKISGGVYT

SEQ ID NO: 285023 - protein, 424 aa, unidentified
MSKKKTSGAGLAALYGRVCGMDVHKNIVVACVRILNAKDGTVQSTLRRFGTMTADLVELRQWLADEQVTHAAMESTGVYWQPVFNVLEGHLEVWVVNAQHIKKVPGRKTDMKDAEWIAQLLQCGLLRPSFVPDRQQRQLRDLTRQQTKLVQQRNAVDNRIQKVLETANIKLGSVASDVLGVSGRKMIEALIDGEKDPRVLAELAQKRLRDKIPQLQRALEGEINDHHRFLLRQLLDQYDFLEKEIARISERLGAVAPPSFRSAVEQLDAVAGVGERGARALLAETGTDMNRFPSHKHFASWAGSCPGNHESAGKRRSGKTPAANRHLDAVLTEMAHAAVRKKDSYFKSQYHRLAGRRGKKRALGAVKHSLLVTVYFMLRDNKPYKDLGANYFDKLNPQHQIHYHVRKLKELGHKVELTPMADAA

SEQ ID NO: 285024 - protein, 310 aa, unidentified
MEALNVGIDVSKDSLDVAVLPTGEAFSVPRSSAGVQALVERLGPLNAERIGIEATGGFETIVAAGLQAAQLPVVVLNPAHVRDFAKALGQRAKTDRLDALVIARFVEAVKPEVRLLPDEQTRELADLVSRRRQIVEMMAAEKQRLGRTTQKRLRKSIERLVAALQKELSEVETDIDDAVRGSPTWREREKLLKTVPGIGPTTARVLLSEMPELGSLDRRRVAALAGLAPWVRESGQWKGRSKIGGGRATCRAVLFTSALTATRGTSPFKAYYDRLVAAGKPKMVALIAVARKILTIANAIVRDQKPWQPA

SEQ ID NO: 285025 - protein, 387 aa, unidentified
MGVIIGMDPHKRSATIEVVDERGQILAVGRYGTDRAGYAEMLQAGRKHPDRLWAVEGCNGIGRHLAHRLVHDGETVVDVPTKLSAQARVFATGNGRKTDPVDAHSVAMVALRTPNLLRVEVDDDLIVMGMLVDRRDELGRARTQTINRLHRLLLELFPGGAPQFLSSHKARVMIATIKPRDLVGKTRRRLAVELIVELEAIDKRIKAVKKELAVLVEARGSTLMGLTGIGPSGAARLLADVGDIHRFADRDRFASWNGTAPLDASSGDQKRHRLSRAGNRRINRTLHIMAVVQLRNPTEGRAYFDAKKAADKTSMEAMRALKRRLSNVVYAQMTADQKRREAASPGGHSGTTLQSSVTDLTPDVGSSDKPLPGPATNQPRTVLPAVS

SEQ ID NO: 285026 - protein, 430 aa, unidentified
MPVRRAEVAVVEVAQEDQEIIARVAALDIGKAEVVCCVRVPGQGPRARRMQDVRTYSTMTRSLLAMADWLTGLGVTRVVMEATSDYWKPPFYLLENTFETWLVNAKDVKHLPGRPKTDRLDAVWLCKVAERQMLRASFVPPPAFRELRDLTRYRADLVTTRTSEKQRVEKLLEDAQIKLSVVVSDIFGVSGRDMMAALIAGERDPKVLADLARGSMRGKTDRLGEAFTGRFTGHHAFLLQTMLTRVDGIDHDIEMVQGRIDRQIAPFAKAVARLDEIPGIGITTAQVIIAEVGIDMTRFPTPNHLASWAKFAPGISESAGRKKGGSSTGHGNRYLARALGEAAIGCRLTKTFLGERYRLIARRRGKKRAIVAVGRSILMIVWELLNDEQKRFVDLGPGYYESRVNRNRSTRNHVRELQAMGYKVILEPAA

SEQ ID NO: 285027 - protein, 403 aa, unidentified
MERVIIGVDPHKLSATIEVVDHHEHLLGSGRFTTDRAGYAAMRTYAKAWPDRTWAVEGANGAGRPLAQRLLEAGEHVVDVPAKLAARVRLFDTGHNRKTDARDAHSIAVVAVRTKELRVLHVDGELQALRMLVDHRDALSRRRVQCVNRLHALLAELIPGQGKKDITALQAKALLASVRPRDIAGKTCRRIAAEELAELVAVDAKIKKSTAELKAMVLARGSHLMDLRGVGPVVAARVLADVGDVTRFADRNRFASWTGTAPLDASSGENNRHRLSRAGNRRVNHMIHIAAISQIRLDTDGRAYYRRKRAEGKKPLEAIRCLKRRISDAIYRQLVTDAAAATAEGVNAGPGGHCGASHVSSAAGSIPHTGTSDQPLPGPAPTTLRPPAPRGKTEPEKHLEPAG

SEQ ID NO: 285028 - protein, 353 aa, unidentified
MTYTGIDYHKRYSVACTLDEKGRRLLERRIEHNAPEAFAAYFAELGAPSEVVIEACWNWGTLYDLLEQVPGVTRVVLSHPAKNRIIADAQIKNDRVDAHALATLLRGDFVARVHVPNREVRQRRNTVRQRLWAAKVRTMVRNRIHTVLDRHPGLDRPVYKDVFCQRGVSWMRTAELPAPDRELLTEDLELHTLLERQMAGLERRIEADSATSDDARRLRTLPGVGKVLGPVIALEIDGIRRFRTSDRLCAYAGLVPTTRSSGGKTSHGRMLPFCNHWLKWAFIEAAWVAVGCSDYFGGFYRQHRARGKCANEAITITARRLAKIAWQMLTAQRDYRRVPTKPDPLSPAALVTD

SEQ ID NO: 285029 - protein, 391 aa, unidentified
MFLLGIDIAKLDHVASCIDSSTNEVVFSNFKFKNDFRGFCSLLDKIRTFDAENLIIGMESTSHYGENLISFLFKQHFKVALINPLQTSHLRKANIRDAKNDRLDSLNIARSLIFGKLNFVSEKNIDCFSLKKLTRFRSNLIKQRSKAKIQLTSLLDLLFPELQYLFKSKIHSRAIYSLLKKYPSAEEIAALKDDEISNLLYASSKGHFRKEKSIELKSLAKTSVGIKDTSISLHVIQLIELIELYDRQIKDIVTKITDTVDKLDTKLLSVPGINIISCAIILGETGNLDNFSDSKKLLAFAGLDPKIRQSGNFYASSCRMSKKGSPYLRYALVFTAWNIVRHSEKFNRYYCLKRSQGKSHYNALGHVAHKLVRVIFTLIKKDIIYQEENLR

SEQ ID NO: 285030 - protein, 361 aa, unidentified
MKSILSVGMDVHKNSFSLCAYDGYTGEIVSESTFASDVKLVIKFIETLKSRYENDVEIKCGYEAGCLGYSLYKSLTSRGVDCVILAPTTMQVSAKNKMVKNDRMDALNIAKNLASGSYKAVYVPDEEDVEIKEYIRMIHDFKKELKRVKQEIYAFVLRHGYQYDGKSKWTIRYMNWIRELEMSEIQRETLDEYLAEMDNLNDKIERFMNRIDEMYQSDRYNEKVSELRCFKGIDTFAAMTIQVETADFERFPNAKAYASYTGLTTGEHSSGDKNNRIGITKQGNTVIRKTLVECAQSLVKGNVYTPKSKRLKSRQKGMDVNIIAYADKATERLKKKYQKLIERNVPRNKAIVAVARELACC

SEQ ID NO: 285031 - protein, 425 aa, unidentified
MQALKTHVAGVDVHKDILAITVLIGMPDEEPVAHHFECLTFTEDLLAMGIKMKEMGVTDVAMESTGIYWKPVFNVWDKLGLKVIVGNASHIKNVPGRKTDIKDSQWIAELHRYGLIRASFVPDGEFQRMRLLSRHRTNLTEDLAAVKNRIQKVLEDGNIKLGSVVSDVFGVSGIQILNLIAEGVSRPDTLAAAATTKIKRIGEVKKALTNCLTTEHCFVVKELMTQYRDIQARIESVDKELFAKVKPYAHLVEKLDEIPGIDVILAMGIIAEATTDTSAFRDERTFAAWAGVAPGNNESAGKKKRSKTRYGNPALRKILIQAAHGAIHTKKSFYRSKYNKLAFRMGSKNKAKVAIANRLARVVYKILAGSQYKDLGYMRGDPKEEKIKRLFTQLRALGVEINGHTHQFIHASRKVKVDDSGVITG

SEQ ID NO: 285032 - protein, 412 aa, unidentified
MKTIMDFAVFVGLDWADKKHDVCIQQKGQKKRYFKEIVHSPESIDHWINLLHKRYKGKIAIAIELNKGPIVFALQKYHFVTIFPIHAATLAKYRETFTASGAKSDPRDAEIALDLLLNYPQKFKPLERQGAAIRKLEVLVEKRRSLVDDKRRFVNQLISALKHYYPQPLDWFSHRNTELFCDFIIRWPTLQCFKRAREQTIRKFFQSYGGQSTVKLNYRLEQRKKVMYLTEDSAVIEPYQLLAKSLASLVNTATIAIREFDKQIAIEFHGMADSDFFQSLPGAGLCLGPRLLVAFGEDRNRFGSAAQLQAYMGIAPVTVSSGQKTWIHWRWHCAKFVRQTIIEWAAKTVQSSYWASIYYDKHRAKGSSHQAAVRALAYKWLRIIFKCWKDRKPYDETKYLQALRRRKSPLLS

SEQ ID NO: 285033 - protein, 352 aa, unidentified
MEGDTFMVVLGIDAHKRTHTVVAVDEAGRQLGVRVTKATSTAAHLDLVVWADQFGADRRWAVEDCRHLSRRLEADLLAAGEVIVRVPPKLMAHCRDSARTYGKSDPIDALAVARAALREPGLPAARLDGPERELRLLADHRDDLVAERTRMINRLRWHLHELDPSWDPAPRSLARSKNLEAVCSRLAGMDGLVARLAADLAGRIAALTADVNALQREIAVLVRQLAPSLLALPGAAELTAAKIVGQTADVRRFRSKDAYARHNGTAPLPAWSGNHTRHRLSRTGNRQLNCAIHRIAVTQIRCHPPAQAYLKARIAAGDTKTEALRALKRRLSDTVYRALLADGTTIPVTRAA

SEQ ID NO: 285034 - protein, 347 aa, unidentified
MKNYVGLDISQASCAICILNEDGSGVFEGECSTDPDEIIETISLHADCVERIVHESGPLSIWLSREFTNLGAPVVCIDARAAHKALSARMNTSDRSDAEALAQLARTGWYREVHIKSENSDRLRLLLSVRERLVRIRMDIEGQARGILKTFGIRLGPVRKGRSRRDFRDHLSEIVSGDPILEAVFASLIQVHETVCHKTTDLDAQIQKCAKDCALARRLTSVPGVGPIVALSFIATIDDATRFRRAVDVGAYLGLTPRRYQSGETDWSGRISKRGDRSMRKLLYEAANILIQRVAKFSPLKGWAMRLVQRKGLKKATVATARKMAVILARLWRDGTEFAWTKEALPV

SEQ ID NO: 285035 - protein, 335 aa, unidentified
MEASYYVGIDISKERLDWHVNDAQNTALTTGQAPNTPKGIHQMIGQWKRGKAGLDEYLVCFEHTGPYGLLLAALLEGSGICYVVVSATQVQLSLGIRRGKSDPIDARRLAEYLWRFRDRLAPSRLPSKALLELRGWLLWREKLVKMRTALTNGIKANALTSQVADLGEINEQMQSQREGLTRQLKKVDGTIKNLFHRYNILKGQYNLLTSIPGIGPVIAGWLLVYTEGFTRFANARQLACFAGSAPFPKQSGQHKSPDRVSQWRCQRLKSLLGNGVHSAIQYDLELRAYYKRKCEEGKHPQSVRNAVICKLLYRVFAVINRGTPYVKIHQHEAVK

SEQ ID NO: 285036 - protein, 416 aa, unidentified
MEQIFMIKENYIYVGIDLHKETHTAVMIDCYNQKLGEITFPNRPADFPKLVAKVKKCNTDGKTIVFGLENAYGYGRALAVWLIDKGYLVKDVNTAISHRQAKHRGAMYRKSDSDDAEAIALATLNMLDKLPDAYPNDAYWSLGQLVHRRDNIMKQRTRLVNQLHEQLCIAYPSYKQFFNDISRPTALYFWEHYPSRKYLKGKSVEDLRAELVPVSHNKCSTKTCEKILDAVASDKVKNNAYQDARDMVTLSIVSDLQHYDKQLAEVDKMLEQMYKMLGCTLTTIPGVNVITAVKILAEIGDIKRFSNANKLAQFAGIAPLHLSSSGKGKDVATKQGNRRLQATIYFLAIQMVQVSSKGTPRNSVVRAYYEKRKAEGKTSQQALICISRRLISIIYGMLKYGTEYRMPVVENAGENR

SEQ ID NO: 285037 - protein, 495 aa, unidentified
MKAKACKAKGKHSNSSKRGVKIAAQRGAEGMEIVNPHAGGIDCGAQEHYVAVPPQSVEPGEPVVRCFSAFTEGLDALVEWLKACGVTTVAIESTGVYWIALCQKLEAAGIEVFLVNARHVRHVPGRKTDVKDCQWLQRLHSFGLLSASFRPEDTICRLRSFQRHRLNLISTAGAEIQHMQKALQQMNLHLHHVVSDITGVSGLRILDAILAGQRDASQLAKLRDHRVYKSTLAQMEAALVGDYRPEHLFVLGQSLQAYRFYQTRTQECDAEIEKLLQQLAERFESSSVLGAELSQPEVLNDAAPSQNPRPAKRKVKRKPQANEPKINLADYLRRICGVDLTQVNGLNVLSVLLIVSEIGVDMSKWRSAKAFCSWLGLCPRNKISGRKVLDTRTCKVINRVATTLRLAAQAVGRTNTALGIFYRRKKAHLGPAKATTATARKLACLVYHLLKYKEQYREPDPATYQLKVQKAILAKIQKQAAALGYKLLPTALVPA

SEQ ID NO: 285038 - protein, 325 aa, unidentified
MMSTQHNYAGIDIAKRNFVIAVSSLSKTKTKTETNNPKGIAHTVEYLKKHNVALVVMESTGGLEIPAAKAIHRSGIAVIIANPRQTHQFAQSQSLTKTDAKDAKMLAFFAQMTAQKEGWQTMLYQPPTEAEEVLEALVNRRNQLVDMRTAEKNRLHQVHETQVESVKQLIAHFDRLIDELDKQIDDHTHTHFDGKAKVAKQIKGIGSTTTATLMAMLPELGRLSHKRLASLVGIAPHPRESGETKFKSRCFGGRSAVRKALYMATVVATRFEPLIRDFYQRLLSKGKPYKVAVTACMRKLLTILNARMRDYFAENDTTENGIQTA

SEQ ID NO: 285039 - protein, 460 aa, unidentified
MTLLERLGAGLPTRYYLGVDVGYKEHVAVVVSLKTFVRGDDRWKRARCVHFPSTQAGLHKLQRYLEQFSTDPSQFLGLCEPTGGYYGATVFQSLLSRGYDMNLIENATVSRMRKQLFPGLPKTDEMDGRVMSRIGYLHEAVGEEFTLRPLKLSNPDDTHLLALCRDSWKVSAIITRARNQFTQLMAITFPELKTFFTGSVSSLAPVSLMAAYPTPALLAEAPEDEVREVLWKTGAYHHAKRASELCTLASDSSGLLPDPGRAWRQEWLTHFLLTNFEYQAALDRRIKQLLEQRDDYQLITTVPYSGPNTLGIILAATRDVANYSNYRKYVAYTGYFAGLLKSQSIDRTKMSKRGNRELKRAYFQIAAPLVWFDKGENPYKELYQRKMAEGKEWYKAMPFVCAALARHIYHCLKFNDPYDVEKAFQGTSLQPASEEGWLDLGACLDERFEEMEVHLCQIEG

SEQ ID NO: 285040 - protein, 408 aa, unidentified
MNCVGIDVSKGKSMIAVMRPFGEVVVSPFEVRHTASELSELARLLKNLDGETRVVMESTGNYHAPVAWLLHGAGFYVSVVNAMLVHDYGNNSLRRGKTDKKDAVKLANYGLDHWLTLPRYVPEEDTRLMLKTCYRQYQQYSKVQTMLKNNLISLLDTAFPDANRLFTSPPRADGSEKWVDFVATFWHCECVCGLSKKAFTAKYQKWCRKHGYNFSEDKALDIYASACRHFGVIPKTDTAKLLVEQAISQLQTTSSALAALKQEMQSLAASLPEYPVVMGMFGVGPTLGPQLLAEIGDVRRFHSKKALVAFAGIDAPPYQSGQIDVRSRSISKRGSASLRRTLFLVMSVILQCAPIDEPVYQFMDKKRSEGKPYRVYMMASANKFLRIYYARVKECLEAFDAQQDTSQR

SEQ ID NO: 285041 - protein, 463 aa, unidentified
MTRKRTGTRKRSAQSKLDLKTVEIVHSDAAGIDVGGSEHWVAISPDRDAEPVRRFGSFTADLRDMARWLVEKGVRSVAMQSTGVYWMPVFEVLEQHGLEVFLVNARHTKNVPGRKSDVQECQWLLKLHAFGLLNNSFQPTDEIRIARTLWRQRGNLVAAASGTIQRMQKALIEMNVQLSSVLSDLSGVSGMSIIGAILEGERDPWKLAALVQPEVKAAPQAIAKSLEGNWRKELLFVLRQEVELYRTYQEKIHDCDLQLREHLKSFGSVVNLAAQPIGPKPKGKRSKNAPQFDLRTELYRITGIDWSQVNGIDVLTAQTVIAECGADLSAFPSEKQFTSWLGLVPTNEQSGGKILKRRTRKVVNRAATAFRNAATTLLRSQSYLGAQYRRLRTRLGAPKAITAAARKLACLFYRLIKNGQQYVDKGTEYYETKYREQQVRILAKKAQRLGFQLVTPTPLEPAL

SEQ ID NO: 285042 - protein, 449 aa, unidentified
MKQQKSLEALSIIHPNAAGIDIGSREIWVALRPDLEGETTRPFPSFTPDLERLAAWLVEHHVDTVAMESTGVYWIPLFEILEVRGIQVYLVNARHVKHVPGRKSDVLDCQWLQKLHSLGLLSASFRPDAEMCALRSLLRHRAQLIQHRAPHILHMQKALQQMNLQVHHVLSDITGVTGQQILRAIVAGERDPKALAAFRQSNCKADEATLIKALTGNWRDEHLFALKQSLELFDFFTTQLAACDAEIERRFAVVKPRWDAPDDLPLLPPVKAGSKSKNKPAESTRQQLFRITGVDLVAVDGISASLAQIILTEVGTDMSRWFSVKHFASWLGLAPHNDISGGKVLRSRTLKTDNRAGQAFKQAAASVIRSHSAYGAFYRRKRAQLGPQQALVATAHRIARTVYFLLKYKTAYHDLGAAGYETQQRERELAALKRRAAKLGFDLTAKEVA

SEQ ID NO: 285043 - protein, 387 aa, unidentified
MTTLINVSKLIARDYDIFIGLDVDKKKMAVTCIDHGTLQRSLSLPNSAAQLLNYTGKHFPEQRVAFVYEAGPTGFGLYDELTAAQQCCLVVSPAGVPSAPRNRVKTNRLDSKKLSEGLRGGQLRGIHVPPQTYRELRHLVQLRDTQVAQLRATKCRIKSLLLYEGLPFPAANEKWSVAVLRQLETIPCNASVRFKLDRLLDTLQFHFETAAKVQKEIRRFCNAAPGLKASIDFLTSLPGVGTITATHAVARLGDWRQINNVRQIAGFLGLVSSEHSTGEKKNRGPITRIGDQRLRNKLIQCAWVAIRQDPELRAFYRQVYARQPKKVAARKAIVAVARKLTTRMYAVLKQQRPFVMRADSSIAPLTAEETAGLRERLATAQNDQSDI

SEQ ID NO: 285044 - protein, 438 aa, unidentified
MSNKVIFNLDELFISVGIDVGADFSWMSIALPNQQFVGKPYKILHNSIDSLTTAVSKIKEAEELYSLESRIFLESTGIYHYPLFCYLRDKGFNCSVINPIITKNSTNINIRKVHNDRFDSKKAALVGLKPDLKVSLMPSDLALNCRNLCREYYDLMDNRSAYVNKLQGELRMAFPQYLGIFSKVTINTSLTLLETYTSPSAFLKTDKQEIIDIIKSTARFGLTYAQNKYNAIIQAATDANQFGYIIESNIKRIRLYISFIRKYDEEINSILESLHELVDANEDTDFVKQIHLIKTFKGAGFLSAVSIMGEIGDFSAFSKPKQLFAYFGLDPAVKQSGKFEGTKVQMSKRGSAIARRVIHTLTLQSISISRNGEAKNPVLREYYLNKCGSKPKLVAMGAVSHKVCNMIFAILRDNKPFKIIAPQEHVKQYNAAKCDMTA

SEQ ID NO: 285045 - protein, 381 aa, unidentified
MRDATRFVGLDVHAETIAVAVAEDGRDGEVRSLGVIPNELGAVRRLIQKLGKKKLRACYEAGPTGFALYWQLAELGVDCEVIAPTLIPKKPGERIKTDRRDAIKLARCFRAGELTKIWVPDQAHEALRDLVRAREAAKYDHHRAKQRLGKFLLRNAKRPPTACAAWSLKHVAWIRTLQFEHAAQQATLVDYLAEVDHAGERIRRLERAIDDSVASAPLELRAVIEGLQALRGVAKLSATTLAIEIGSFSRFGSAKQLMAYCGVVPSEHSSGNSRRQGGITKSGNAHVRRVLFESAWGCRHRPNLGDQLKRRQRGLSAATNEIAWKAQHRLYRRYIALTSRGKPSSKVLGAIGRELLGFIWAIAVNVERERTKAASPQQRAA

SEQ ID NO: 285046 - protein, 381 aa, unidentified
MKVMHDRVAAIDVRKDMVKVAVRVPGAKRGSRKTDVLEFRTFYGVLQEMGRELRRRGVTHVVMEASGVYTEPVYYALAGLDFTEVMVINPAHAKALKGHKTDAKDAIRLLDLYECGLLSGSYIPAPDLKEVRDLARYRMKTVQARTSEIQRLQKTLESAGIKLDSVVSDITGMSSTAMIEALIDGERRGEVLADLARGRLRTAGKMADLSMALAGRFTDHHAMMCRLHRDRIKMSGDAVADLDARIAPPVARYSREADLLKTLPGFGDVVAAGWLGAIGPAPHEHFATAQRLASWATVCPGNYMSAKKSKGGRTGDGGNYIKPLLVQAAWAAVRVPGRLQARYSRLVRRFGGPRSKGAVKRAIMAIAHTLLKIAYQVPDLI

SEQ ID NO: 285047 - protein, 314 aa, unidentified
MSGPAVCVGIDVSKATLDLAVRPSGERWTLANDAAAIQALVHDLRPRAPSLIVLEATGGFEHAVVAALAAARLPVVVANPRQVRDFARATGQLAKTDAIDAQVLALFAERVRPEPRPLADAAAQALDALLTRRRQLLDMLGAEKNRLGFARPVVRRGITQHIHWLERRLDDVDHELGQMIEHSPVWRAKDDLLRSVPGVGPVLSRTLVGELPELGRLSRKQIAALVGVAPLARDSGTLRGKRTVWGGRAPIRAVLYMGALVATRYNPVIRAFYHRLRAAGKPAKVALTACMRKLLVILNAMVRTNTPWRAPARA

SEQ ID NO: 285048 - protein, 311 aa, unidentified
MNSEAYVGVDVSKVSLDVKVLPTNETLQISNNNGGINELIKRLTQIDPTLIVFESTGGLEMLAVSNLIENQLPVVVVNPRQVRDFAKATGRLAKTDAIDADTIARFARDIRPEIRPIKDEHTQLLSALNARRRQIVDMLVAEKNRLSRAPKPNRKSIQKHIQWLERSLTDINKDIDKTIKKSPIWRENDRILQSFKGVGPVVSATLLCDLPELGALNRKKIANLVGVAPLNCDSGHFRGRRRIKGGRANVRRKLYMAAVASLRHNPLMKDFYERLVEAGKPPKVALTACMRKILTILNAMMRERTYWNAIW

SEQ ID NO: 285049 - protein, 363 aa, unidentified
MIVIGTDTHKRTHTCGAVFAGTGQLAGELTAPARGPGFRQLLDWGRNLDEERIWAIEDCRHVSGSFERFLIASGERVVRVAPKLMGESRRGERAAGKSDPIDALAIARAALREGPETLPAAYLDEDAMQVKLLLDHRESLVKARSEDQCRLRWHLHDLWPELEIPAGALDRMVWLERVCRKLSRVEQSARVRVARELVLEIRRRTRRAKELEREIGALVKAQAPELIELEGCGALTAAKLIAETAGASHLASDAKFARLAGVAPIPASSGNRVRHRLDRGGNRQLNCALHRIAVTQGRTHPPAREFLAKKQAEGKSRMEALRCLKRHLARRVWRLLIDSEREISMTTVDTQRGKLTPQIAAVA

SEQ ID NO: 285050 - protein, 419 aa, unidentified
MEHISTKKVKRINGKTLLVTVDIGKGKHTGYCRCPDGTERKPFDFLNNSKGFEEFWQRVREMKKAHDLEEMVIGFESTGPYAEPLLHFLKKKGVRLVQVNPFHTRKLKELQGNSPSKTDHKDPKVIADIVELGHALTVVIPESASAELRRLTQARERSIQRRTALLNQLQDLVFLIFPEFLNVMKDIKGKSAQYLLKSCPTPEDIIETGSDSLTQILKRISRGKLGRNRAEALYEVAGKSVGIQEGQKSIVLEIAETISTIEACERFVANVEKEMARHLKQISYSQCILSIKGIGTVTAAGLIGEVGDFKQFRTISEIMKHAGLDLYEISSGKRTGRRRISKRGRSLLRKLLFFASINTVRTGGVMRGYYQRYLKRMPRRKALIAVSRKLLRIIFALVRDHNAFIYNYSKLPYQMKEAA

SEQ ID NO: 285051 - protein, 413 aa, unidentified
MDVVHPRCAGIDISKKDAKVCVRIQGRGSRPTSATVTTWGAMTNQILALREYLVQQQVTCVVMEATSDYWKPYFYLLEEGVTVMLVNAHDSRNVPGRKTDVSDATWLADLGAHGLLRGSLVPPPPIRRLRDLTRARTALTRDRSRQVQRIEKVLEDSGIKLSSVASDIMGVSGRLMLQALIDGQDDPAAIAELAQRRMRPKIPVLTEALTGRFTGHHGFLISMHLKLIDEYGHALTDLDARIAEAMEPLAAARELLISLPGISRIVAEVFLAETGGDMSVFPTAAHLASWAGTAPGCNESAGRIKSTKTRPGNRHLKGALGTAALAASRSKGTYFSAKYRRIASRRGPMKALVAVEHSMLITAWHMLTNGDFYRDPGADYFTARQPAKTKARAIGQLQSLGYQVTLQPLANTA

SEQ ID NO: 285052 - protein, 482 aa, unidentified
MKKRNIYQNQSQELLHLFEEAGSSEKVMCEPMDYAKNDHLVMFCNGHGDILRKPFSVKNTPEGIAYIDDQVTRSCRRRGIKREHVFFGGEDANSFAKNFVSTLRSKGFVVANVNAHDAKKQRGNVQASTDRIDLMGIATMLLNCRANCCPAQFGIYRNLRTLVRHRRRLVQMLTEVKNRVHGIVDEIFPGFLNEKNSGIIPFTQSSLYLMEDRFSPKQIRRRKRQKLVEILKRFGTSKAEYTAAKLQQYAAKVLHAPVEYVDTMQLSLAQHVKHIRCLKESVVQMEKEIALNLAQTQGAFLTSVRGIGLVLAAGVTAEIGDPNAQKPLNNLASYAGIIPRVKQTGGLDGKTYTGPVAKRCNRILKDYVVKSAYHLGLHGPQDLMNDYKCRNASGQHADFGIGRRYLRMATNLMRTSQVYLPPHLRKADSTVQDRAGYYLMSWPYLREKWKKVGALEAALANNRPLGLWRQIVQELYDIKLKL

SEQ ID NO: 285053 - protein, 383 aa, unidentified
MTIAADQDNIIYVAIELSNSTWLVAARLPKAKKPLFFRIAGGNTSALLTLLSSLRARKTGNTGQARQITCCFEAGRDGFWLHRLLTARGVSCYILEPTSILVNRRARRAKTDRLDAEGMLRVLMAYLWGDPKACSMVRVPTPDEEDAKRPHRERQYLTQERLRIENRIEALLFTQGIRGRPSLRTWERDLDAMRTGDGRAIPQHLQSELNRLRRQLVFTLELIREVEAERDLASQVAPEEPINCKIVALCRIKGIGSNFAAVLTREVFYRSFGNRRQLASYVGITPMPYQSGNINRDRRIGRAGNPRARTTMIQLAWLWLRYQPGSEMAEWFRKRVGTMAGRTRRIAIVAMARKLLIALWRYVEAGVIPVGVEIRPPAIAAAA

SEQ ID NO: 285054 - protein, 377 aa, unidentified
MGEFFRQCVGIDISKDKFTACLYMYDRASDEGCCTKSINFANTKSGFNQMVRWSRKEAIKGYSLTYLMEPTGVYYEHLAYHLHKIGQTVYVVLPNKARQFCESEGIKTKTDAMDARCLALMGCVSRKLKAWSPPAAIYRELRQMTRFHADLWEVRTSVTNRLEALRHMEGLSKTVRRNCEKLIEEIDTLIEKNDKAIMQKVAEDKELEARVKRIATAKGLGEATIVCVIAETEGFHLIENRKQLTSYAGLDVEARQSGNDDPRHRISKKGNAHIRAALYMPALVAIRYNRQIRAAYGRVCQKHPKEKMIGVAAAMRRLLLLIYTLWKSGEVYDETRDTTRTPRKKSPELEHGPKDSITTTKEHVDWNAVGENGQALF

SEQ ID NO: 285055 - protein, 479 aa, unidentified
MTPHKDYGLDPRPSAPTPLLPLSPLLSDALQVCHPHAAGIDIGEAEHWVAVPPGRDPQPVRRFGTFTADLDALADWLIECGVTTVAMESTGVYWIPLFELLETRGLEVLLIDPRQAKRAPGRPKTDRLDCKWLQRLHAYGLLAAAFRPAEQVCVLRSYLRHRQMLLTYGAHHIQHMHKALQQMNLKLSQVVSDLTSVTGMAILHAIIAGERAPLTLAKLRNPHCQHSEEEIAKALQGTWRAEHLFALQQAVELYHFYHQQLTVCDQHIQAHLGTFADKSDGQPLPPKPRRHKKVNEPRCDARTPLYRLAGVDLTTIEGIEEGTALVILSEIGTDMSRWPSVKHFCSWLGLAPQHQISGGKVLSRRVRPGAQRVTVALRLAARTVHQAHTALGAFYRRMRSRLGAPKAITATAHKLARLVYSLLKHGSAYVQQGIEAYESQYRERKIKALARQARAFGYTLMALGTPEVPSLDAVAVPTP

SEQ ID NO: 285056 - protein, 351 aa, unidentified
MVLLGIDPHKDTHTVVAVDQAGRQLDQRTVPARTLGHGQLVGWARMRWPDRLWAVEDCRHVTGRLERDLLAAGERIVRVPPRLMAGARQAVRVQGKSDPIDALAVARAALREPDLPTAGHDQASWELRLLVDHREHLVAERTRTINRLRWHLHQLDPDLERATRRLPGPGLGPITTRLAQAAADPGSVVQVMICQAQVTAIQTLTDQIGQLDRQLRQRIAQQAPSLLSLPGCGPLTAAKLIAETAGVARFRSEACFAMHAGVAPIPVSSGRTDRHRLSRGGNRQLNAALHRIAITQLRLSGPGQSYYQRRRTQGDGPGEAVRALKRRIARAVHQRLRAALPPANTLHTAAA

SEQ ID NO: 285057 - protein, 407 aa, unidentified
MSKEVLYLGLDVHAENIAVAIAGAGRDGEVRNYGDIPNTFHSVEKLLRKLGHPDKELRACYEAGPCGFVLARFLKKKGIACDVIAPSLTPKGSGDKIKTDRRDARMLARLHRAGELTAVHVPDERDEAIRDLCRARTDAVQDQRSGRNQLKAFLLRNGYRYGEKTSWSAGHMRYLRELILPHPAMKIVLEEYLQCIDAAAERIERLEEHMKALLDEWHMKPVVLALMGFKGYQTVAAMITVSEIGDIHRFPHPRQLMAYLGLVPSESSSGGSRAQGTITKCGNGHLRWIFNECAQHYRLPPKVSQELTTRQEAIPKAHRRQVIEISWRCQNRLHERGRKLAARGKTRQKAQIAMARELSAFVWEVMRAVMPKADGSHAISTARTPKAIEATQPAAKKKGREYTLKTK

SEQ ID NO: 285058 - protein, 397 aa, unidentified
MSRIGWTGPGERDLIGTCAPDASSLFCPPVPAEPPFERREDNISIAENAPVVVAGVDCHSQFHHAVALDDRGRKVGELRFDATRKGCHRATGWLKSLGTVREVGVESSGSYGAELTRVLIEAGISVVEINRPHLHTRHRKGKSDGIDAEAAARQVLAGETRIAPKDTTGVVEAIRQLKVAQDGALKARAAALVQLRDLIVTAPAEMKEALSKRKTLRGRATLCRRLRPDIARMHEPSEAAKLSLRSLARRIATLDEEVVELDSQLDPLVRKTAPRTMALLGVGVGHATQLLITAGQNIDRLRGDSAFAHLCGADPIPASSGKTVRHRLNPGGDRDANSTLHMIAVVRLRYCDRTRAYVARRLEEGRTKREIIRCLKRYIARELYKSLRKDLIAIAQA

SEQ ID NO: 285059 - protein, 413 aa, unidentified
MEILHATCAGLDVHKETVVACVRRFVEGKVRQEVRTFRTETNQLLALADWLTEEGVAHVAMESTGVYWKPIWNLFEGLFELLLCNAEPIKAVPGRKTDVQDSQWIAQLLQHGLLKPSFVPDKPVRQLRDLTRQRVQLVRQKVQVSNRIQKTLEDANIKLASVASDVLGVSGRDMLQAIIRGERDPVVLANLARQRLRAKIPQLQETLFGEIEDHHRFLLGMLWEQVEFLEKQIERLTTRIAEVLPPPFVEAVTRLQTIPGIDRRAAEGIVAEVGVDLKAFASAGHLSSWVGICPGNHESAGKRRSGRTTKGNAWLRVLLVQCAWAAGRSKGTYLQAMFRRLSARRGTKRALVAVGHRLLEIVYAVLKKGQSYRELGADYLDRMQDRDRLKTRLVKRLEKLGVKVTVEETQTVA

SEQ ID NO: 285060 - protein, 348 aa, unidentified
MEKITRIGMDTSKAFFQVHGVDDAECVILRRQLRRDKMLTFFASLAPTKIGIEACGAAHHWARELTKLGHAVVLIAPQHAKRYVKRNKNDAADAAALCEAMSRPDMTFVPMKTAEQQAALMLAGVREQLTGRRTQVANSIRGYAAEYGFVEAKGLDKIEPLVERLIADEAVPALARELIAELARDLASVCLKLDKIEARMMAWHKGDATSRRLAKIEGVGPIGASLMVMKTPAPKQFKSARHYPAWMGLTPKDHSTAGKQKLGAITHAGDEMLRKVLVAGAMSVCKIAKSKPERVSPWLRELVARKPLMVAAVALANKNARIAWKMMVTGEAYDAARSRRVVQAAAAA

SEQ ID NO: 285061 - protein, 386 aa, unidentified
MNHSTNILPRSVDYDQTLVLAIELSNKSWVLAAQVPGLSQTKAKRTIEPDKNDLLAAINGYRTRAAAAGHQVKRVITSYEAGWCGFWLARWLMAHDIEVHVVQPSSVPVDRRMRRAKSDGIDAELLLRTLLAWLRGEPRVCSMVPIPDEADEDARRCVRERSELISERVGLVNRIGAILATLGAGDYNPLLQSRRRRLTELRTGLGNPIPPNALAKLVRLLTRLELVLAQIAELELERDAAAKTDTPDQAGKMIQQLIRLRGIGVQSATVLVREAFVRRFANGKALGSYAGLTSTPYSSGGIDRERGIGKAGNRRLRTVMVELAWLWQRYQPGATQVVWFRQRVGSTGRRVRKVMVVALARKLLIALWRFVIDGVMLEGAVMKPSI

SEQ ID NO: 285062 - protein, 309 aa, unidentified
MSSWVGIDVSKNTLAVWVRPSGVNFIVCNSSEGHQTLLLNLAEIQVERVLLEATGGYERAVMGCLAQAGHSVVRINPRRARAFAQAMGKLVKTDPVDAGVLAHLAQVIEPSACQPVSLARDELQELVRRREQVVKLRDDERRRLTLARSGVVQESLQTNISQLNEQIARLNSAIETAAQRTDNQLVKQLGAIAGIGPVTVASLLAYLPELGQLNRRQIAALAGLAPYNNDSGRHSGKRCIKGGRASIRRVLYMATWSVIRCHSSFAARYASLRARGKCAKVALVACMRVLLIRLNAMVRDHSSWRAEAV

SEQ ID NO: 285063 - protein, 346 aa, unidentified
MNNHNAKGIIKVLGIDLAKQSFQLHGVDKTGGTVLKKKLSRNKLTAFIANLPPCLIGLEACGGAHYWVRVFKSLGHSVRMIAPQFVKPYVKSNKNDAVDAEAICEAVQRPNMRFVPAKSVTQQDIQCLHRIRSQLVARRTAQANQIRGLLLEYGVIIPKGISYVRKEIPLILEDAENSLTSLFRELLSELYDEMVHLDERVNSLEGKLEIICRQNEDCQRLLSIPGVGLLSATALIAAIGDISVFKNGRELAAWLGLVPRQHSTGGKPTLMGISKRGDCYLRTLLIHGGRTVVRVAHLYTDKRNLWINELDQRRGKNISAVAVANKNARIAWALLTKKQCYEAAII

SEQ ID NO: 285064 - protein, 464 aa, unidentified
MLLRLGIDIACRAAHQVSLADEQGRFVWTGRRFRTTAQDLIRLWSMLPEGTDPADVVVVMEPTRNAWVPLAAWFRRHGAEVVLVPPERSADLRRYYAKHSKTDRLDSQLLARLPMLHPDGLYAEQGLGPGDALKRAAKLHSTLTHRRSQSLARLDALLEILGPAWHAAIGADLANRTPLKFLAAGYADPYVVKRLGRTRLARFCYRHSRGAWGEPHADALLAAANQTLQLWAGGELDYPDLAEDIAIEARLALQLTEEIKDLDERTTLLLHQADPMGILTSAPGVAAITAAAILGRLGDPKRFDSLAGARAFTGLVPILDSSGLNGRHGGPTKRGDAVLRQALFMAAGQARRIDPTLAAKYQRLMIDAGKHHNSALCHIATTLLTRIIACWRAGQPYQLRDVDGTPVTMDQARTIIAERYAIPKDLRARRKTTADTGTDRRSKESPSAPSTGPSNHNATTPDAA

SEQ ID NO: 285065 - protein, 389 aa, unidentified
MKIYVGIDIAKLNHFAAAISSDGEIILEPFKFTNDADGFQLLVSKLESFDKNSIIIGLESTTHYGDNLVRYLVAELYQVCVLNPIKTCQMRKNNIRKTKTDKVDTYVIAKTLMMQDDLRFVSFYDLDMMDLKALGRFRQKTIKQRTRLKIQLTTYVDQVFPEIQYFFKSGLHQNAVYALLKEAPSPKEIASMHMTHLANLLKVNSHGHFTKELSKELRVLAQKSVGANDSAISIQITQTIQQIELLDSQLEKIEAEMTDIMKFNDSVIMTIPGIGYINGGMILGEIGDIHRFSNPNKLLAFAGLDPSVYQSGNFQAKTTRMSKRGSRVLRYALVNAAWNVVRNNATFKAYYDAKRAEGRSHYNALGHCAGKLVRVIWKMLTDEVEFNLE

SEQ ID NO: 285066 - protein, 377 aa, unidentified
MKIANSKDGFQRLMEVVQRYGDPVHVAFEPTADYHRNLAYWLQNAGATCFLVSSLMSARARELLFKTWDKNDRKDAQVILYLMRQNMMKPFYDPLVEGTMDIQELSNTYHQISLARTRCQHSLINHYLTLYFPEMERFYHASRSEWFCRFLCKFPTPQSITRYKIATFVKRAWVIVGRKVAKQRFLEEVHETACRSIGLPVELQGQAVKTFRIQLQRIIDLNQLRHQLEKTSENILNAREDYQQLRSVPGVGPICAMMIIAESGDLNRFGHYRQYLNFCGFNLCSSQSGQRQSKHKISKRGNSRLRYAYWLAATIAIRQRENSFREKYERHIKSSPNNPDLKRKAVVAIACKLARVCHSLVKQNTPYRGYYEFNHGT

SEQ ID NO: 285067 - protein, 425 aa, unidentified
MCKTIPVCCGVDVHKKFLIATILTGDYLIPQCKQKHFGTSYRNLLAFRQWLLENGCKDVCMESTGKYWVPVWNVLEGFVRVVIANPKWVSAVKGNKDDKKDSKWIGNLFRMGLVPASYIPGKDIRILREFTRYRSKLVSMRSSEKCRFQNAFTVCNLTLDAVVSDMFGKSATDIENYLLNTDSVDPEHCVSLLQRSLKKKADAVVEAVEGFHMTLEQKERVRIIQGHFADIDKRIGQIDEIVSHLVAEYESQISLLCTVPGIDRRLAITIISEIGADMSEFGSSRKLCAWAGLAPGSNQSAGKKKSVKITRAGVYLKPALVEAAHAAVKSTEKQPYFRMKYERIMKRRGKKRAIIAIARMILTSIYAMLSSGEVFNPSDLQKYDMPDELKKKMTLASAKDAVKLLVSLGVVAEGSISLDSLALAG

SEQ ID NO: 285068 - protein, 359 aa, unidentified
METQSNKIDFSNQNIYVGFDVHLRSWKVTILTEKVAVKTFSQDPNPELLYQYLKRNFPGGIYHSAYEAGFCGYWIHNKLKSLGINSIVVNPADIPTTNKERVQKEDQRDSKKIARSLRSGDLRAIYVPGIKTLEDRSLLRARSTMVKDLTRFKNRIKSFLYFHGIDFPESFNKAQSHWSKRFMTWLESIELTEESGKITLDSFIHQSKNLRASVLDLTKKMQKLSQSEPYQNNVTLLRSIPGIGILSAMTILTELETILRFGNLDQLCCFIGLVPSTNSSGEKEITGDITPRGHSILRNAIIESAWVAVQHDPVLMKSHNDYCKRMDPNKSIVRIAKKLMSRIKFVLKNKQPYVSSWPK

SEQ ID NO: 285069 - protein, 407 aa, unidentified
MDVHRDFLIACIAATNAQGVTEYQSRRFSTYTGSLRELRDWLLANDCKDVCMESTGKYWFPVHNILEESCHVVVSHPKFVKAIKGKKTDKKDAQWIADLFKHDLVRGSFIPPKDIRQLRDLCRYWVKLSSYMTGEKNRAQNCLTVSNFKLDDVFSNVFGKSASAITTQLLEHPGEQFDVAPFVDGRCKTPIAQIQEAVDGIFTYEQAEKLKIIRGHMDSLERHKADLDSLILEIAQNYLPQIELLLTVPGIHDAFTAIRILAEIGADMTVFDTSKHLCSWAGLTPQNAESAGKKKTTRIGKSGAYLKPLLIQVALAASRGEKHPEIYGKKQALQKRRGKKKAIVAIARRLLTAIYHILSKNEPYNPAAYIQEDKNPMARQISQEKAFEMLARMGFIVSNPSPLSSSG

SEQ ID NO: 285070 - protein, 324 aa, unidentified
MIDGVLGIDVSKNTLDASMSSCNKVRARSFANSPDGWRHLLDWLITQRVRRVHACLESTGRYSLGIAGALNEAGHVVSIVNPAQIRDFARTKLGRNKTDGVDASHIREYCELFKPQPWAPPSEAHRRLGELQTIRAGIIAGLTEWKNRKNSGMIDAVAQSLADVTISHFTSQLSAVDEAITQTIDHDSVLRRKRDLLLSISGVGETLAGVVLAELPGPDVLHSSAEVVAYAGLNPRQHQSGTSIDRVTRISKIGNAVLRAALYMPAMSAMRYNPAIVALVARLKSRGRLKPKQIVVAAMRKLLVLCFGVLKTGKPFDPAIAMGR

SEQ ID NO: 285071 - protein, 376 aa, unidentified
MESIAYVGLDLHKRSISYCVKSADGHIDSEGTISAAPAAVEAWARGLDRPWIGALEATMFTGWVHDLLEKHASEVRVGHPAMLKAIAAGKKKNDQVDARLLADLLRCNLFPECYTAPTEMRNLRRVLRFRTMLVEVAVRMKNRLSGILMEVGAEYDSRRLHNKSYFPELLTELEEMPASVLDLLRINRGAVEYFDGLQRHLLQELSKHPHLQERVILLRSIPGIGQVGALTWALEIGDPHRFPAVENAVSYCGLCSAQDSSAGKDKRGAISKQRNKHLQTILIECAKLAPNYNEELARVRERSQSKSHRNYATIAVARKLVSYLLAVDKRGTPFVMPSTEDNGNGNNGNGKTKGKTQTKSKTKGKSKGKGKGNDAR

SEQ ID NO: 285072 - protein, 351 aa, unidentified
MPRTSAVHAVTTIGIDMGKNTLHMIGLDARGGIVLREKVSRGRITLRLANLPPCLIGIEAGMATHYVARELAALGHDVKQVPPTYAKPFRQGHKNDFRDAHAVAEAVQRPTTRFVPAKTNEQLDLQALHRVRSRLVSERTAVINQIRGFLLERGIIVRQGLRFLRQTLPDILAKRTDVLSPRMARVVADLASDWRQLDERIEPVTDEIKTLAKNDDSCRRVMTVPGIGPIISSAMVAAIGSGAAFAKGRDFSAWIGLVPKQLSTGDRTILGRITKRGNGYLRTLFMQAARVILLRPASWPKHGFGIWLARAAQRLHPNVLATALANKLARIAWTVLAQERSYEARIMKAAA

SEQ ID NO: 285073 - protein, 404 aa, unidentified
MNAVGIDVSKVKSMIAIMRPFGEVVVTPYEVPHTEADLKKLATFLKELPGETRVVMEYTGKYHQPIAKVLCDEGIFVSVVNALLVYKYGNHSIRKVKTDKLDAIKIANYGLDRWTVLERYIPENEARKMLKSYNRQYGQYMKLKVMLKNNLISLLDETFSGINTMFTSAPRKTDGHEKWVDFAAQFWHHECVRGISESAFQSRYQKWCKKSGYNYSVAKAETIYTKARDCVNTLPYNDAAKLLITMAVGQLNTITETLADIQKEMLTLSSQLPEYPAVMALFGVGETLGPQLMAEIGDVRRFERKQSLVAFAGVDAPPYQSGVFESKNRSISKRGSPRLRKTLFQVMSTCLQHAPADEPVFQFLDRKRAEGKHYYVYMTAGANKFLRIYYGTVKAYLGQLDAIV

SEQ ID NO: 285074 - protein, 338 aa, unidentified
MKLYGGIDLHSNNSVIVILNEKDEAVYKKKHNNDLLEILSCLLPFRDSLQGLVVESTYNWYWLVDGLMEAGFKVHLANPAALQQYSGLKHTDDKSDARWLAHVLRLGLLPEGYICPKEERSIRDLLRKRSQLVRQKTANVLSIINLFTRNTGEAINVKQVKKLTEEELQKRFGDESLCLAVASNLEVFRCLETQVKLLEQAILKQVKLRKEFIQLKTVNGIGDILALTIMLETGEIGRFPKAGNFASYCRCVSSQKISNGKKKGKGNTKNGNKYLAWAFVEAAVLAIRHNEKVKRFYQRKKDKTNGMIAIKAVAHKLARACYYILRDRVEFDTARAFG

SEQ ID NO: 285075 - protein, 340 aa, unidentified
MQIITIGVDITKNVFQVHGEDATGGMNLSKRLGRARVERFFAQLAPAVVGMEACGSSHHWARVLSGLGHEVRLMPAAYVKPYVKRNKTDARDAAAICEAVRRPTMRFVAIKSVAQQCERALQRARDLLVRQRTQLMNAIRAMLAEMGIVAAQGLKGFATLRAMIERGDTAIPELLLPSLAALTRQWHQLDAEAAKLEHVIVERARADAGARRLMTIPGVGPISAHAIIAAIGDGRQFASARDFAAWVGLTPKQASSGEKRRSGSISRAGDGSLRRLLTLGAASRLRQVNGRPDKAGPWLSGILARRPMRVAVVAQAAKTARIVWAVLTSGQEYRARPMAA

SEQ ID NO: 285076 - protein, 400 aa, unidentified
MRSIGMDVHRSFAQVAIYDDGTIVENFRVDMEHDAVVAFGRRLKADDEVVLEATGNTATIVRLLTPFVARVVIANPLQVKAIAHARVKTDKVDAKILAQLHAAGFLPEVWAADDETLALRRLVSERAAVVRSIRRSKSRVQAVLHANLIPKYAGHLFGKGGRRWLAKAPLPKTERDLLERHLDELDWLAGRLETLERDLIHISLDDPQMRKLMTVAGISSVIATAVIASIGDISRFATPEKLASYFGLTPRVRQSGDRGAIHGRISKQGNATARTMLVEAAWGAASVPGPLRAFFLRIKDRKGPNVAAVATARKIATLIWHLLTKDAPYQWARPAFVAMKMRKLELRAGAPKAHGKAGPGRDYWIKELRHREIELVANAENAYARMVEAWREKPPKPKTG

SEQ ID NO: 285077 - protein, 482 aa, unidentified
MSKPTQHSKKPGEKKTAAGQGKRSRKRKGMCLEDRPILEPNAAGIDIGAREIFVAVPPDRDADPVQVFSTFTEDLERMAQWLVSCGVTTAAMESTGVYWIPAYDVLEQHGVKPCLVDAHGMKNVPGRRTDWHECQWIQFLHSVGLLRAAFRPDGEVCAVRSLMRHRSDLVQMTNQHIQHIHKALTQMNVQIHHVIDDITGVTGLAIVDAIVDGQRNPLELAKLRDPRIKASEETIVKSLQGTWRPEHLFTLKQSRQMYRHYQDQIAACDEEIEKLLVAFQPRVDPAEKPLPPDRKKRKRGREKKKNAKTKQGFDLRTESYKIFGVDLTQIPGLMAMVLTLFSEVGRDMSRWKTAGQFVSWLALCPDNDITGGRVAWRGMRRVHNRAGELFRMAAYSLHHDKSPLGDYLRRMKSKLGPTGATTATAHKIAIIFYTMVKKQVEYDATLWAERDTQREKRFEAKLKRQAQQLGYKLVPIEEKPAA

SEQ ID NO: 285078 - protein, 328 aa, unidentified
MAKEKFDVSFLRQSAKSAVGAPVHKVVSNTESSIRTFLKSVPAGSILVAEHTGVYGERLLKMCTDMNVKIAYVGGHVIHTYKAGPDRGKTDELDCSLLREFGERFTDRLRLATFPTEAIYELQQLSRQRTMLVEERKRVATADKAEECRPYRSETVRRSMRNLMDMLDEEIRDIEKAMLDIIGKDEGLSKSYDIITSVNGVGLVTAVELIVKTKNFTTIKTAKQYAAYAGTAPYEKSSGKMNRGAHISKWGNKRSKTLLYICAESARRYNKEIKLYYERRTIVDKKAHHYVLNAIANKLLKLVFTLIAKNEKYDPCYIQHDPRTFNKK

SEQ ID NO: 285079 - protein, 370 aa, unidentified
MNAKYIGFDIDSKKTVACVVQQGHKDQYATVATDLTAMQQYLQQQRQDGSRVHLTFEISGEAGYRHDALRPYVDTLTVSNPHKMTWIYRTSKKNDRIDCRKQAVLLSIGEVPKVHIPPHAVRQWRVTIQQRRILVCRIVSVKNRIRALLKGNGLTQPRHPGRWWKIENLAWMKEQAQAWSEVTGEQLWRAHLTDRLEELKLLSGQLQQVTTYLDRYLDCQPGGVLLRSIPGVGPRTAEAILAYTDDVGRFKRSKPYAAYFGLTPKLDESGQTRRLGQISKEGPSVVRWLLVESAWRVIRKSPAFRAFYERIVGGQNQRKKTAVVATARKLVTIMRAMLQTGELFQEELVSKAKKNNRKGQDSQAVNSQNP

SEQ ID NO: 285080 - protein, 319 aa, unidentified
MGELWVGIDVSKRRLDVAIRPDGGTLICDNDTAAIKKLAGMLALKSPRLIVMEATGGHEYAAAVILSKAGLPVAIANPRQVRAFARAKGKLAKTDPIDAETLAHFGEAMEPPVRAVRDQQLEEIGQLVTRHRQLIEMLVAERNRRLSCVGTAQRDVDATIRFLEGRLDKVDRQIKALIAEHPDWRSKAELLDSVPGVGPVLISSLVAELPELGTLNRKQIAALVGVAPFNNDSGQSRGRRRIWGGRSHLRAVLYMSAVSGVRFNATIRAFYKHLRERGKAPKVAMVACMRKLLIILNAILKTQQPWRSPAVEMPIALPA

SEQ ID NO: 285081 - protein, 352 aa, unidentified
MKNLAAPEGDRRFGHKLTRVGFHPDGVNLTPEGITMQTILDLGADVDSRYIWVACAAHSFAPYRIGNTRSAILAWLHTLPRGSRLAMESTGSYHELLAELACKAGLQVFVVNARDLRRYAQGVGQRGKTDRISAELIARYVAHEHTELHAYVPPTQEQRALQQLFKRRAKLTVTKGALIQSLRGLRGANREIKQLMSALDHLITHIDRLTERTLRKIPPAREAAEHIQTIAGFGALSSAYLGNSFTRHPFSSSDSVVAFSGLDPRAEDSGKKHGRRRLSKRGPSEARRILFHCARSASRTKLWRPYYQAQRAKGLSATAARVSVARKMLRVAFALYKTKQPFDSARLTFGPA

SEQ ID NO: 285082 - protein, 316 aa, unidentified
MQSILDLGADVDSRYVMVACAAGSFKPQRIANERKAIRAWLRSVPRGSRLAMESTGSYHEALADLAQQAGLQVFIVNARDMRRYGQGIGRRGKTDRIDAEVIARYVAREHGELHAYVAPSRAQRTLARLIRRRAKLVQTKDSIRQSLRGLPALKTETRQLIDRIDRVIGRLELLIQRTVQQMPAAREAAEDIVAIPGFGVLTSTCLGYRFTRLPYTTSDAVVAAVGLDPQPDDSGQRHGRRQLSKHGPSEERRLLFNCARSASQTTMWRPYYRAQLAKGLSKTAATVVLARKMLRVAFAVYKHRQPFNPLLVGGGA

SEQ ID NO: 285083 - protein, 346 aa, unidentified
MDNIGLDLHKRESQLCILTAAGELIEQRIATTRERFTAVLGPRPRSRILLEASTESEWVARHLESLGHEVIIADPGYAPMYATRSRRVKTDRRDARTLCDASRLGAYRAVHRASDAQRHVRAELAVRDTLVRTRTRYVAVIKALVRRDGLRLAQGEPERTVAKVAALALPPALAAELAPLLALLAPLNRQIAAADQHLTILAATDPVVQRLTSAPGIGPVTATAFVATLDQVERFATAHQVEAYLGLVPSEQSSGERQHRGRITKEGNTRMRWLLVEAAWRVLRSPRPEAAALRAWAEPIAVRRGKRVAVVALARRLAGMLYAMWRDGSTYQVARLRSARRTPAAA

SEQ ID NO: 285084 - protein, 339 aa, unidentified
MGLYAAIDLHSNNSVLVVLDAKDKVVYEKRHPNDLQTILAQFKPHKKSIQAIAVESTYNWYWLVDGLMGAGYEVKLVNTVAIKTYYGLKYSSDEHDARRLAHQLRLGILPTAYIYPKEERAVRDLLRKRSQLLRNRTMHILSIQNLVTRNSGKAITQAGIRKPDEKALGLYCGGNALRIMEIKSSLEILRCLDGQITVLERKVPEQARLKPEFKQVTTIDEVREMLGMTITYEAGDMERFEEVGQFASYARCVESSRWSNGKKKGEGNRKNGNKYLAWAFIEAAYSAIRYNERIRKFFQRKKARTNSIVARKAVAHKLARACYHVIRDQVPFNEEKAFA

SEQ ID NO: 285085 - protein, 430 aa, unidentified
MDEVNRNRLEEFRQLKKEIRHSEDYLIVGMDIAKDRHYAFFGTARGQTLLKRIVFGNDHDGFRRLLDQAEALRVQHGLKKVVYGMEPTANYHKPLGEYLIKLGKTVVLVSGVTVARNRESLDGRWDKHDGKDSANVADLISQGKCLYYEHPSVELRGLRGLLSLKRRLKKQEHGYRVRIRNQLIAQYFPEMDRYYERLGAEGLSIVKWCLAASEIAQLDVDPFIERVTSRRIRMEKRRRLEEIWEKAAGSIGCEEVPGLDHEAKVMVEGLRQIREMIKETEDKIEDLCKQFSEYPYILTMPGFGPDVSAKVLGAIGDPDRFLNGKQVLKLAGYDLSADRSGKDSDKAIPEISKRGKADLRYALYQAALIASLKNRDVMIYYTNKIRGREREKGIHIKMRVKLAAKLLVIAWTLMKKKEAFNPAYLKVELN

SEQ ID NO: 285086 - protein, 331 aa, unidentified
MKFKHVIGLDIAKSSIEVRIHAHAFAYTAVNNPQGLKTMLTHVEKALRVSLTQCLCCFEHTGLYSERLMELLSQRQIPFAVVSGLEIKKSRGLTRGKSDPIDARQIAEYAYSKQHRLRLYRNPSPDIKRVKRLLTLREQLVKQRASFKTTLKEQSQILKKTENATLLAVQKRMINKLSNEIDHVEQEYRRIIVSDPETKTLVSLLASVIGVGEVISNYMVVYTHGFTAFTCWRKFACFIGTAPFPHRSGTSIKGRDKVSSLAHKRLKTLIHLAAQCAVRCDPELRTYYQKRLQQGKSKMSTLNIVRNKLLARMFSVVQRRTPYVVLNRFAA

SEQ ID NO: 285087 - protein, 386 aa, unidentified
MQRNDLSRSLVAFDQNSTLVAVVELSLKKWLVGGLVPGLEKQPLKKLDADAGALLGLIDRWRNEGIKGGGKISRIVVTFEAGRDGFWLARWLVGRGIEVHVIHPTSVPVSREQRRAKSDRLDTQLLMRAILGWLRGERKHCQMVAIPTLAEEDARRPNREHKTLVEERTRIVCRMKSILARHGIRDFNPKRKYAAERLEKLCCPEGGSLPPNTLAELRREMALVRVIGDQVKAIEKAREQRLKQAPRAGTHPMVLMLAKIKGIGIETADMLVHEVLSRKLRDERALGRYAGMTGAPDESGNKRREKGLARAGNARVRRGMVQLAWRWLMFQKGSALATWFAARTAGSRKDVRKTMVVALARKLLIALWRYVTTGEVPAGIELRVAA

SEQ ID NO: 285088 - protein, 418 aa, unidentified
MFKIFRKNCCGLDVHKTWIYACIGITDNNSLTSYKEARFSSFSKGLRELADWLASYSCTDVCMESAGKYWIPVFNVLEKTCNVVLAHPKYTKPQKGNKTDRKDAKWICDLFMCDMIKPSFIPPADIRQLRDLMRYREKLTNCLTGEKNRAQNCLTVSNLKLDDVFSDVFGKSARSITEYILAHPGEHFDVSPFVDGRCKQPIEEIQAAVDGAISREQAVKLRECLDHIDELKHHRELIETEIHRLAEPYAYSLELIRSVPGFSANPMTAIALISEIGVDMSVFPTAKHLCSWAGCCPRNDGSGGKVKSTRISRAGAYLKPLLVQVANALIKCNKNPEFKERYRRIKARRGHKKAIIAVCRMILVAVWNILSKLEPYTPCVVADTPAPFSKELSVSQALNFLRLRGYVIKNDVPLGAIT

SEQ ID NO: 285089 - protein, 386 aa, unidentified
MIYVGIDIAKETHVAAAMNADGVILIEPFAFQNDHEGFKLLKSKLDTLKGDILIGLESTAHYAENVIFFLHSQHFKLAVINPVQTAAMRKTGIRKTKTDKVDFLLICKTLSCNSFRLYTDTDVKTLQLKSLCRFRQNLKKSKARLKIQLTSYVDTLFPELQYFFKSGLHIKTCYELLKTYPSPDDIAALHLSKLSNFLSKASRGRFGKQDAKSLKSLAKSSVGVKNTYISIQITQTIAQIELIESQIGELEHIIENAMDELDSVIMSVPGIGKINGAMILGEIGDIKRFSHPSKLLAYSGLDPVTNQSGKFNAKHTKMSKRGSKMLRYALINAAWNVSLNNETFKNYYDSKIAQGNSHYSALGHTAHKLVRVVFKLLNDNVEFALA

SEQ ID NO: 285090 - protein, 339 aa, unidentified
MKYTPVGVDIAKHLIQVHFIDEHTGEVIDKQLRRQDFLMFFCNREPCLIGMEACRGSQHWGRELTKLGHKVRLLQAHFVKAFVMGNKNDVMDARAIWMAVQQPGKDIAVKTEEQQSVLVLHRSRRQLVKFRTMQINSLHGTLLEFGKTIHKGRAAMERELPEALERMKERLPPYLITVLENQYNRLNELDSLIEDIEKKLTSVARQNETCKRLLDIPGVGPLIATAAVATMREASAFKSGREFAAYVGLVPKQTASGGKIRLLEISKRGNTYLRALFIHSARAAALLPKEPGPWITELKKRRPTSVAIVAMANKLARTVWAIAAHGSKYDKNHVSIRSY

SEQ ID NO: 285091 - protein, 340 aa, unidentified
MKLYGAIDLHSTNNVTVVIDEQDRVVYQKRLPNDLALILNELSVYQAELQGIVVESTYNWYWLVDGLMEQGCKVHLANTAAIQQYNGLKYTDDNSDARWLAHLLRLGVLRQGYIYPRADRPVRDLLRKRSQMVRQRTTNLLSIQNLLTRNTGSSLNANRVKGLDVQRVDELLPDGDLALAVKANLSVMSSADEQTKILERTVIERVQLRPQFCFLKTVPGIGKILSLTIMLETGDIRRFASVGNFASYCRCVGSQKVSNGKKKGKGNTKNGNKYLAWAFVEAAHFAIQFNSKIKSFYQRKKAKTKGVVAIKAVAHKLCRASYYIMRDRVPFNITKAFGQN

SEQ ID NO: 285092 - protein, 422 aa, unidentified
MLEPTQDHEQIIERVAALDIGKAELACCVRVPDPNASGKRLQEVVTYSTMTRSLLGMADRLRQLGVTRVVMEATGDYWKPVFYILEAAGFETWLVNARDVKHLPGRPKTDKLDSVWLCKVTERQMLRPSFVPPPAIRVLRDLTRYRVDLVGVRTAEKQRVEKLLEDAQIKLSVVASDIFGISGRAMMAALIAGERDPKVLAQMARARMRAKISQLEEAFHGRFSAHHAFLLAKMLARIDAITDDITDVEAQIEAQIAPFADAADRVDGIPGVGAIGARVVLAEIGLDMTRFPTAAHLASWARFAPTVSESAGKKKGRNATGHGNPYLARVLGEAAVAAGKTDTFLGERYRRIARRRGKKRAIVAVGRSILIIIWHLLSDPQAEFVDLGPDHYDTRGGPQRSIRNHVRHLEALGYKVTLQPAA

SEQ ID NO: 285093 - protein, 332 aa, unidentified
MNMHSQGRVTSEATRPNAGIDVGKDHLDVHLLDIDQRVDNDASGWDALIAKLKESQADLVVVEATGGYERGLVTALHRAQLSVARVNPRQARDFAKSMGVLAKTDRVDARCLRDFADVLARHKDRHKYITLPADPEREVLAALMTRRRQLIDMRVAESNRLEGATARTVRSIRSVIKTLDKQLQDIDGDIDQQLEQHFKPQKELLASVRGVGPVTILTLTSALPELGRLGRRQIAKLVGVAPLADDSGRRKGVRRTAGGRSEVRAVVYMATLTAIRHNPVIKSFYGRLVEAGKPKKVAIVACMRKLLTILNAIVRDQAPWRTDATLTSSRST

SEQ ID NO: 285094 - protein, 455 aa, unidentified
MQVLYERCAAVDAGKDVIAVAVRLPGDGPDGRQTMKRTFKTFYGVLAEAARWLTSLGVTHVAMEATGIYSMPVYHALIEHGDFVQVLVCNAGHVKNVPGRKTDLADADWLVHLLECGLLAGSFIPPAEIRAARDVFRYRTKIVQQRTSEIARLGNVLQDAGIKIDSVASSIATKSGRAMIEALIDGERRGPVLAELAKGKMRAKIPDLSMALEGRFGDHHALMCRLHLDHIDQLEAMIGRLNAQIEVMMTPFRAARDLLATAPGIGQLAAAGVICEIGAGVREFFPDAAHLASWTGLCPGNHESAGKHRSGRRRHGNEHLQSLLVECAWSAVRHDGYLKSLYHRHVMKWGGYRSQIARKKAIIVVAHALIGQVAGARYRAPAPSEPDLPVVPASGSSKPLRALRVAAAVLCPCAAGPCGRGCRRRVSGQWPVSRSARRPARGFLARRVRAGCPGG

SEQ ID NO: 285095 - protein, 422 aa, unidentified
MLEETNDREEIIERVAALDIGKAELVCCVRVPGVEGKSRRVQEVTTYQTMTRALLGMVDRLIELGVTRVVMEATSDYWKPPFYLLEAAGLETWLVNAKDVKHLPGRPKTDKLDAVWLCKLAERQMLRPSFVPPPPIRVLRDLTRYRADLIGVRTAEKQRVEKLLEDAQIKLSVVASDIFGVSGREMMAELIAGQRNPRVLAQFARGRMRAKLSELEEAFTGRFNDHHGFLLSKMLARIDQVDADLADLDVRIEAEIAPFAEEAARLDEIPGIGQHAACVILSEIGIDMSRFPTAAHLCSWARFAPGVKESAGRRKGNETTGHGNPYLARVLGEAALSAGKTDTFLGERYRRIARRRGKKKAIVAVGRSILVIIWHLLSDDQARFHDLGPDFYDTRAGTEHAKRNHIRRLQALGYRVTLEPAA

SEQ ID NO: 285096 - protein, 349 aa, unidentified
MKGTLKMENTQKEIYRHYIALDWSQETVALASMRDSSTEVDLIEMIPEIKILKQYLKSRPGKKILTMEETTTSHWLYVELKDSVDKILVCDAYRNSLLKDGPKTDKLDARNLCLLLRSGLLKEVYHSLDKIYEIRKLVSAYEDFVNSSVRTKNQRSAIFRAGGKDHKKERLLSDSKITKFITEKQNLTIEHFDQTRKEFELMFSKIQKENKVISQLQKISGIGLIISVVIYATVIDAERFINKYKYWAYSGLAKHQKDSGGRSYGKKRIRHNKLLKKYYKIATKAALKGNNDIRQYYEYLLQNKYSFEQAQNQITRYLAKVSYAVMKNNTDYRAYQWKESKQKKTRVKR

SEQ ID NO: 285097 - protein, 333 aa, unidentified
MINCIGLDISKKLIAVHIPINKTNIEIENSLKGIKVLYSKLNKLYKKSINDLVYIFEPTGNYSFTLTKFCNEKNIKCFMINPKQFSNFSKALGQRNKTDLIDAQVLSQAIHLAKEGEIKVPYIDTIVEELKELISYYKFTSKNTSKLISQLESIIVKNGSKYMINDLKKSIKVSKDKELEILSKIKNIINSDDKLLRGYNNIKTITGIGEIGAIVLLHLFIKYPDANQRQIISLAGLNPIEKTSGTSIHKKTKISKAGSKVYRGSLFLGVLTAIRFDDNFRIFFERLKANGKHTTAAQIAVMRKMIIIAHSLYKNNKQYDKEFYKKACGYDKE

SEQ ID NO: 285098 - protein, 357 aa, unidentified
MKQHKNNKKISFKGKDFFIGIDVHKKTWYISIRHNGLLIKSFAMDPIPEILVNFLNKNYPCANFFVAYETGRFGFWIYRKFKKLGINCMVVNPADIPSTHKEKDKKSDKIDSIKLARELENNNLKPIYIPPPEAQHLRSLVRLYLNYTKNITRTKNQIKSFLDYNGITLPKHTSYWSNNFINHLYSITIDNGPGDKTLHSLLNILCFFRKEQNDILKQIRKFINNSYFKEIFYLLKTVPGIGSKIAFIILSEIIDMKRFKNFDQLKSYVGLTPSVYSSGDTYYEYGLTYRKNSRLKYALIEASWVAIRKDPALLESYNKLITRMKKQQAIIRIAKKLLSRIRHVWLNKQPYVTGIVE

SEQ ID NO: 285099 - protein, 343 aa, unidentified
MEHFAGLDVSVKQTSVCIVDGTGRLVREVRVASEPEALLPVLKNPLYRFKRIGLEAGPMSQWLFSALAEADLPVICVETRHMRAVLQAQINKTDRNDARGIAQMMRAGLYRPVHVKTLRSQKLRMLLTHRKLLQSKAIAIENDLRATLRNFGLKVGVVGTVKFEARIRELVETLPDLAELVEPLLIVRRTLREQIGILHGRLLAIVRHDDVCRRLMTVPGVGPVVALTYRATVDVPARFRNSKAVGAVFGLTPSRYQSGEVNRTGAISRCGDEMMRAMLYEAAHTMLLRLAKWSWLKAWAMKIARQRGIKKAIVALARRLAVILHRIWVDGTEFRWTRETAAA

SEQ ID NO: 285100 - protein, 400 aa, unidentified
MLSIGIDVSKGKSTVCGMKPGGEIVYAPFEVQHTREGMLELVSLLRSSGEEVRAVLESTGSYHCPVVAALLENGIFVSVVNSLRMKRFCSQSIRKVKTDRIDAMQIALYGLAYWQELQPTKLPEDTYRELQLLARQYYQMTSLLIKAKVDFNAICDQVLPGMQELMNDHAGRHKLSDFVLRYRHTTHILEMGETRFRKDYCKWAEKKGYRNCERMAVLIFATAQNGIPVLPNAPSTQIVITEAIRVLHTVEASRDAILTQMQALAKTLPEYSLVREMPCIGDTLAPRLIAEIGDVRRFHSKRALIAYAGIDAPPYQSGKFCANNRHISKRGNRYLRKTGYEVMQSYVMHKPANDPIFTFIEKKRGEGKSGKLAMVAGLNKFFRVYYGKVTELYRSLPAIE

SEQ ID NO: 285101 - protein, 310 aa, unidentified
MEDLFVGIDVAKDRVDVHVQPIGEAFAVARDGKGLAELAGRLTAMAPRLVVVEATGGFEITVAAAVAGAGLPLAVVNPRQIRSYAKAIGRLAKTDALDAEVIAKFGEAVKPEVRPLPSEEAQALGEMVARRRQLIDMIGAETNRRRHLTQRRLLKGLDRHLQVLQKELTELEKDIDDEIRGSPAWREKEDLLTSVPGIANKTARTLIADLPELGSLTRRKIAALVGCAPMNRDSGTMRGKRHIAGGRHSVRCALYMAALTASRCNPVIRDFYRRLRAAGKPAKLALIAAAHKLLTIINAMLRDKSTWQSA

SEQ ID NO: 285102 - protein, 407 aa, unidentified
MNAVGIDVSKGKSMVAALRPMGEVAFLPREFLHTEVGLEQMAYAIIALGEDTRVVMEATGRYHEPVAAALHEYGIYVCVLNPLFIKQSGGGSIRKVKTDKADAMKIAKYGLDNWTNLREYTPMDTVRQQLKLCSRQYNLYMKTVVSLQNNLISLTDKTFPGVNELFSSPERADGHQKWVDFIMTFWHCDCICRVSEKAFTERYQKWCKRKSYHFSTEKASDLYACSCGHFTTLPKNENTKLLIVTAAQQLLAGKATLAALRAEMTRLASKLPEYETVCAMYGVGEITAAQLMAEIGDVRRFPRRSSIVGFAGVDPGVDESGKHSAKSVPTTKRGSPYLRKTLYQIVCTYLKKSPADEPVYQFLDKKRAEGKPYFVYMTAAQNKFLRIYYARVKECLETFDTETAART

SEQ ID NO: 285103 - protein, 316 aa, unidentified
MNTLNQNEINIGIDTSQTNLDIYVRPLGLYKSFGNNTEGIKEAIKFIKQHVPIRVLIESTGRLEMDFVCAGHKACLPISVCNPAHVRSFAKATGRVAKTDKLDAEDIAHFGEAVKPEPTTLKPEKLRHVSDLLTVRSQCLEMSTMQKNRLKRMPKTVHKPINNILKALKKELAVIDVQLEKLIKEIPEWQERVDQLTSAKGVGKVLAYTLMSELPELGRLNRKEVAALVGVAPMNRDSGSYEGKRYIRGGRSKVRTVLFVSMLSAIQCHPKLKPMYQRMVAAGKPKKVAIVACMRKQLIILNTMVKNGTHWDENMV

SEQ ID NO: 285104 - protein, 370 aa, unidentified
MKKRITFVGLDTHKNSIEAALADDGRNTEVRLYGTIGGDLASLDKMIRKLQTTGAELRFVYEAGPCGYEIYRHLRAHGFHCDVVAPSMVPKRSGNRIKTDRRDARNLARLYRAGELTAIYVPREDDEAMRDLVRGRQDAIHAQRKARQQLGGFLLRHGSRYSGKCAWTLAHRRWLAGIKMPHPSQQIILEDYIHSVEECTQRVHRLTEQILQLMPDWRMHPLVTALQALRGVAPVVAATAVAEIGSMDRFESPRQLMSYLGLVPSENSSGQSIRRGAITKTGNGHARRALIEAAQAYSYPARISRVILKRQEAVPEPIRQIAWKAQLRLCARFRKLTARGKSRNRVVVAIARELSGFMWAIAKQVPVPQA

SEQ ID NO: 285105 - protein, 326 aa, unidentified
MTNFNNYVGIDIAKKDFYACFDEQSESKKFNNTALGINAFIRHLSKNDFQNQNTVIGVESTGSYHLRLCLQCSSRGFQVKVINPLIVKKQNQTNLRRVKNDRKDASLIRYCLATGAGYVFSETSDTLLLKCLVRQRNSLVNIKFKNKRQQADVRYKEDCLKVRFNSVYQEISDILSQKIKDLEQQLKTFRPKEQKLLQTIPGVGPTTAVSFIAEVNDIKRFKQAKQLVAYVGLDSRVHQSGTSIHGKGYISKRGNKILRTRLYNATHVAVLHPNLFQNFFQKKRDEGKPYQVALVATMHKMVNVIYSVWINNKPFVDHTTNNQKED

SEQ ID NO: 285106 - protein, 347 aa, unidentified
MGVYIGVDFHARKQTVSYLTTEDGQIQQVELEHEKDYVRAFYEQFQGQKVIVGFESSGYAAWFEELLEELEYETWIGHAAAIRQFARRRQKNDRRDADLILELMVAGDFPRLHRYSRESREVLQQLRYRQRLVKMRTMVINSLRFMVASRGVTLRGTLQSRPGQARLMQVALPGPLGQQRDELLRLLIEVEQKVETVEVWLKQKAEADPRVQRLRTHPGIGLLSGLGLVATLESIERFSHSRKVTAYVGLDPVEDSSGERRRMGSISKQGSRLLRLLLVEAGQVAARRDQELGQVYRRVTLRRGHATAKVAVARRLLVRAFIMLRDEIDYAEFCRRGVAARSSRGSA

SEQ ID NO: 285107 - protein, 422 aa, unidentified
MKTPGSKPFTAFIGIDWADAKHDVCMQAAADDCREFSRVSHTVDDIDEWAQSLYRRFGGPIAIALELSKGPLVYALQKYDFFVIFPVNPSTLAKYREAFTPSRAKDDPSDAEFALDLILRHADRFTALHPQSVEMRTLASLVEQRRCLVNDRVRITNRLRNTLKQYYPQALEWFDRIDTPLFCDFIERWPTLVQVKRARRMTLQSFFHQHNMRSARVLEARLISIKAASPLTLDEAVITPNRLQALVLVDLLRVTLAAIKRFDEAIAELAPQHPDFALFDALPGAGPSLAPRLLVAFGEQRDRFNNAAEIQRYAGIAPVTERSGKKHWVHWRWQCPTFLRQTFVEWAAQTINKSFWAGVYYRQQRDKGCTHQAAVRALAFKWIRILYRCWQTKTPYNEALYLKALKHRGSPLLNQIETTIST

SEQ ID NO: 285108 - protein, 410 aa, unidentified
MRVVYERCCGLDVHKKTVVACVLITETSSEMQRHIRTFSTMTAGLLALADWLESMHVPVVAMESTGVYWRPVFNLIEEGRTIILVNAQHMKAVPGRKTDVKDAEWLADLLRHGLLKASFIPPAPIREMRDLVRYRKTLVQERAQEVNRVQKVLETANVKLSSVATDVLGKSGRDMLQAIIEGTTDAEVLANLARGLLRKKLPQLQEALDGRVQPHHRILLKHILAHVAFLEQELEQLQQEIEQRLPPFEEEMGLLMSIPGIQALSAAAILAEIGADMSRFPSAKHLASWAGVCPGNKQSGGKRLSGKTRKGNATLRAALAEVVWVISHTKDNYLAAQYHRLARRIGKNKAAMAVAHSVLVIIYHVLYTREPYSDLGADYFQKQDANRVAQRSLRQLEALGYEVTLTPKIA

SEQ ID NO: 285109 - protein, 358 aa, unidentified
MRFYTKQHQYYCGIDLHTKKMFICILDAAGQIWVHQNIKTDQETFLNIISPFREDLVVAAECMFTWYWIADLCAEKNIPFVLGHALYMKAIHGGKAKNDKIDSHKIATLLRGGMLPQAYVYPARMRATRDLLRRRNHFMRKRAELYAHIQNTRSQYNLPDFLGRIAKPQNREGIVERFNDPSVQKSIAVNLEMIQAYDHILTQLERDIITSAKEHDLRSYALLQTIPGVGRILALVILYEIETIERFPQVQDFVSYCRLIKSIKESNGKKYGSSGKKIGNAHLKWAFSEAAVLFLKGNEPAKRYLEKLSRKHCKAKALSILAHKLGRAVYFMLKNKEAFNQKKFLGLQKLERMDQPVV

SEQ ID NO: 285110 - protein, 344 aa, unidentified
MLADQLDYVIGVDSHRDRHAFAIVTAFGAIELEQELAADPAGYRQALALAKRQAPGRRVWAIEGTGSYGAGLTRFLAAQGEQVLEVERPRRTGSRGRLKTDRLDALRAARTLLSGEQLARPRAGLERASLRALLSTREGAVAAKRAALCQLRSLLVVAPEPLRSSLRPLGRTALLRRCNNLRPRKSPEQGQLLALRACARRILALQHEADELEHAISSEINRIAPNLLDQPGIGPITAAQLLISWSHHGRFPNEAAFARLAGTAPIPASSGRTSRHRLDRGGDRQLNRALHTIALHRRQHDPRTKQYLARRIAEGKGSREATRCLKRYLARNLYRQLEAMPPTT

SEQ ID NO: 285111 - protein, 400 aa, unidentified
MLSIGIDVSKGKSTVCGMKPGGEIVYAPFEVQHTREGMSELVSLLRSSGEEVRAVLESTGSYHCPVVAALLENGIFVSVVNSLRMKRFCSQSIRKVKTDRIDAMQIALYGLAYWQELQPARLPEDTYRELQLLARQYYQMTSLLIKAKVDFNAICDQVLPGMQELMSDHAGRHKLSDFVLRYRHTTHILEMGETRFRKDYCKWAEKKGYRNCERMAALIFATAQNGIPVLPNAPSTQIVITEAIRVLHTVEASRDAILTQMQALAKTLPEYSLVREMPCIGDTLAPRLIAEIGDVRRFHSKRALIAYAGIDAPPYQSGKFCANNRHISKRGNRYLRKTGYEVMQSYVMHKPANDPIFTFIEKKRSEGKCGKLAMVAGLNKFLRIYYGKVTELYRSLPAIE

SEQ ID NO: 285112 - protein, 340 aa, unidentified
MNYYAGIDVSLEASSVCVMDGTGKVVREGKVASEPQALIAWFSLLGLSLTRIGLEAGPLSQWLYAAMRDAGLAVELLETRHVHNAFKIMPVKTDRKDARGIAELMRLGWFRPVHCKSMEAQETRAILTARKLVQKGLYEVESSLRGILRGFGLKVGKTTAARFEARIKELVAGQPSLEALATSMLAVRATLRRELNGFERRLRALARSDARAQLLMSAPGVGTIVSLTFAAAIDDPARFKSSKIVGAHFGLTPTKYQSGETDHSGRISKIGDASVRAALYEAAHVILTRPVKGCTALKSWAMRIAKRAGMNKAKVALARKLAVIMHRMLADGTPFTTQKA

SEQ ID NO: 285113 - protein, 343 aa, unidentified
MGASIGVDSHKSSLAAAAVDELGRVFGIKEFSNDPGGHRALLEWARHYGKPRVIGVEGSGSYGAGLCRTLSSAGEQVREVPATLTFKERRRKGSQGKSDAVDAVAIARIMARGEDLPSPTRTQALADLKLLSDYRDQLVHTRTQVANRVHQDLVVLHPGYERRVPNLVGAKHLAKAASLVRGDTSIRAELARRRIGDLRRLSREIAETKVQITDVLTESGTTLTGLPGIGPLIAARILGEVGDVGRVRSQAAFAMMTGTAPLVASSGMTFRHRLNRGGNRKLNFALHYMALARYRTDEQTKAYIERRRAEGKTFKESMRCLKRHLSNVVYRQMIVDWRAMEAA

SEQ ID NO: 285114 - protein, 405 aa, unidentified
MNAVGIDVSKGKSTVTIRRPGDIVIMSPRDIPHTQSAINDLIGLIRKLDGETKVCMEHTGRYYEPIATWLSDAGIFVSAVNPILIKDFGDDSLRTPKTDKADSKKIARYTLDRWAKLPQYGSMDKTRNQLKTMNRQFGFYMAQKTAMKNNLIALLDQTYPGANDFFDSPARSDGSQKWVDFIAAYWHVDCVRSKSLKAFTEHYQNWCRRKGYNFSADKAEKIYRLSSDLIAVFPKDNNTKMLIRQAVTMLDTASETVESLRLKMDEIAATLPEYPVVMAMNGVGPTLGPQLIAEIGDVTRFTHRGALTAFAGVDPGRDESGQRVRKSVPTTKKGSPYLRKTLFQIMDGLIKRSPADDAVYAFMDKKRAQGKPYYVYMTAGANKFLRIYYGRVKEYFATLADSEET

SEQ ID NO: 285115 - protein, 417 aa, unidentified
MTDLVPPTVFERYVAVDLHKDYVVVGGVNARLEVVLSPRRIELEAWPRWSQAHLRKTDALVVESTSNAWDFYDQVAPLVGQAVVANPRLVKLIASGRVKTDKVDTLSLAKLLATGFIPTVWVPPLEVREARGLLAHRRRLVRNRTMVTNRLQSVLQRHNLPAPAGEPFSAANRPWWDKLSVSPTEKLRVRQDLATLEHLAGQIAELDDEVVRLSTQAPWADQATYVMQLPGFSVLLTMTVLAAIGDVTRFESAKKLVGYAGLGASVHSSGATHRTGRITKTGRRELRWALVEAAWSAVRYHPYWKAEFERLARRLSDNKAIVAIARKLLVAIWHVLTEQVADRHADEKMVATKLMRWSWKLTDEQRGGLTTRQFIRVQLMKLKLGEDLTHLKYGNMPRRIASVEEVLAVRPELRDTV

SEQ ID NO: 285116 - protein, 342 aa, unidentified
MIMNNSPQIYVSVDIGCRQHSVAIGLSNGDVLDEFAILHRPEGFKQFFERIEYHRQHHGGEVAVAMEGYNGYARPLDSLVKVRGYQLYNINNLKLARFKEIFPAAAKNDRIDACKGLELFQLRDHLPLAKDVLQEIMPTPRENDMLKRLSRRRRALVDEKSRLQSRLQGDLHAVCPGLLDITKDADNLWFLRFITSVDELTKLSRLRLSTLLKIPGVGRKYAGDISAWQSHASFSHEVEWVGEMIIEDARRILALKNDIKALELRCKMLMQESQAAQLIDSIPGFAVICASELAGEVGTTDRFASERSLALYLGMANLLITAQGSFAAQKHHNMSTNELKAR

SEQ ID NO: 285117 - protein, 393 aa, unidentified
MYLVGIDIGKLKHSFCLLEKETGEILVEPVFFENNRDGFNVLLSSFKHLPQKDILIGMEDTGHYNLALLKFLLERNYQVALINPVATDLTRKMQGGISKNDKLDTLTICDVLASNQRVKSYRISKYSSFDLYEQKQLTREHHNLKEELNQYTNRLQKSIDIVFPEFNSLFKSKYGNVYMNILKEFGSADVIAHADIRTLRKYFDTGRGKHISLTAEELKEAARNSIGFPSTAEVIQIKHLVAQIELIKEQIAEIDKKIEEFSIKNNSPILSIPGISHFSGTSILAELGDIHNYSKPSQIIKYAGVAPLTYESSQFTAQHTAITKKGCKYLRKTLYQIITPVIQCNPVFRKFYQLKIAQGKGHRCAQGHCVRKLMRVIYHLLSTGTQFDPALLR

SEQ ID NO: 285118 - protein, 350 aa, unidentified
MTTLPLRITAGVDTHLDVHVAAALDDTGGLLGVESFATTTAGYRRLLAWLRGLGELELVGIEGTGSYGAGLTRVLLGESVRVVEIDRPNRQRRRRRGKSDPQDAITAARAAQSGDACGEAKTRDGNVEAMRVLRVARFSARKARTQTLNQMRSLISTGPESIRAELRHLKAGPMLDCASAYRPGTKQDLVSITKFSLRLLARRAIALEAEVAELDALLTPLVAETAPELLAVMGLGTDTASALLVAAGDNPERLRSEATFAHLCGVSPLDASSGKNERHRLNRGGDRQANSALWRIVITRTVCDARTRDYIERRMKEGLSKKEAFRCLKRYIAREVYNHLPRQQLALDTP

SEQ ID NO: 285119 - protein, 353 aa, unidentified
MEYIAFDAHKHYTLASVARPDGQLVREQRIAHERGALQQFLERCEPGSPVAVETVGNWYWIIDEIEAAGCVPRLVHARKAKLMMGEINKTDKLDVRGLNQLQRPGTLPTVWIPPGELRDQRDLPRTRMVLVRQRTQLKNRIHSTLAKYALHDIEVSDLFGARGRALVRQRLELLPPCTAYTTRHLLEHVERLDHQVREFEQQIRTLFKPTPTIQHLLTLPGVGLTLAVVIALEVGDVVRFPTAEKLAAYAGTTPRVHASGGKTRFGPSRPDVNRYLKWAFVEAANAICLNRGRTPRRHVTRLYERVAQRKGHQKAIGAVARHLAEATYWVLTKQQPYREPKTAAVSSTGDKRG

SEQ ID NO: 285120 - protein, 340 aa, unidentified
MKISTVGLDIAKQVFQVHGVDERGKVVLQKRLKRREMAEFFANLPPCLIGLEACGTAHYWGRQLQGFGHTVKLMAPRFVKAYLNREKNDANDAAAICEAVGRPSMRFVPLKSAEQQALLVLHRTRAGLVRARTGASNQVRGLLLEFGITLCTGRREVAARLPEILEDGENGLPPVAREGLAVLRAHLKDLEQRIAEIEHAIKLWHRSQEASVRLATIPGIGVFSATALVASAGDATVFRSGRQFAAWLGLVPKQRSSGGRIRLSGISKRGDRYLRTLLIQGAHAVLCHRTPGTDVWLDQLVQRRHKNVAAVAIANKNARLAWALLAHQRTYQNDYVSCAP

SEQ ID NO: 285121 - protein, 362 aa, unidentified
MEYFTGLDVSIDETAICVVGDDGKVAFETAVETDPAAIAEALRPYADRMRRVGHEAGSLSPWLHTELLAEGVPAVCLETRHVRAALSAQRNKTDANDALGIAHIMRTGWFRQAHIKTDGCYRIRLLLVQRRNLKRKFLDLENAIRHSLKVFGIRLGKVGRGAMEKAVREAVADDAMTAGLMDCMLRARAALWAEYLTLHKLVAQLAMRDELCRRFMAIPGVGPVTALSFSSAIDDPQRFRRSRNVAAYFGLTSKRWQSGTSIDVHGRISKAGDPDVRRALYEAASAMLTRFKGRDMIKTWGLKLAKTKCHAKARVAVARKLAVVMHAMWRDGTFYVGDPDASAQDTDASNAAKLQRLSLANS

SEQ ID NO: 285122 - protein, 341 aa, unidentified
MEHILGIDLHSDNGYYGIIEPDGKRVFKKRIPNDLPTVLTALEPYKETIISIVVESTYNWYWLVDGLMENGYNNRVQLANPAGFSPYKGLKHADDKTDAFFLTELERLGILPVGHIYPKEERPVRDLLRRRMMLVQQKTSHILSFQSLITRQTGTSMSSNNIKKFEEDYVKEILDEEYLILAGETNISIIRFLTKKIHLLERAVLKRIKLKLEYEKLLTVPGIGKILGLVIMLETGDIRRRFASAGNYTSYCRCVKSKRISNSKKKGEGNRKNGNKYLEWAYVEAANFAKRFSPEAKKYYQRKMSKTNQIVATKSLASKISKACYFIMRDQEVFKTEKIFG

SEQ ID NO: 285123 - protein, 359 aa, unidentified
MRIIGCDLHSRQQTLAMLDTATGEIEKTTLKHEENIVREFYSNLPRPVRVGIEATGSMQWFLNLMEELGIECLVGHPAEIRAAEPRKQKHDRRDADLLLSLLAEERFPAIWLPTKELLDIRALLRHRHQWVGLRVKIQNALQAIALANGLRRGSSLWTRAGQQAIAALPLSPHAAYRRNELQAMYVQFETEIEKLNQRVEEQARERFGARLLMTHPGVGPITALATDVFLGDPARFADSKALASYVGMIPGEYSSGKRQRLGGLTKQGNPLLRFLWSEAVIHAVRRDPQLKHFYRRKLIQKGLGKARAAVARKLGIRMWIMLRDRVEYNEFCRRGQKQQTSGDARAGMPVPRYGAKVTG

SEQ ID NO: 285124 - protein, 329 aa, unidentified
MRVVFGIDVSKASSEVAILVNGEKVHNYTMSNDAIGFSRLLGDLKTVHKPEIIFEATGVYSRRLQAFLDEHGYAYTRLNPLEAKKQLDSLRVRKTNQIDAEKLAQSQFVLNRKPTYVQEEVYQNLRDLSRFYQNLTEDIVRAKNRLHKVLQVTFPELENILSTPTGEQYWNLVITFPCKDFVLDLSKNELSKSIRQSTSKRISDKRVAYLAEKLTALANQSYCAVKKTSPILEEVHYYAKELLRLSEQRQAVLDQMVELAQPLPEYDILLSIPGIAETTATSIIGELGDIRRFQSANQINAFIGIDLRHYESGNFLAKEHITKRGNPYR

SEQ ID NO: 285125 - protein, 322 aa, unidentified
MTEVFVGIDVSKATLDVAVVPGGEKWSVTNDPRGISGLVERLKAMRPALVAMEATGGFEYPVAVALRAGGLQASVVNPRQVRDFAKATGRLSKTDEVDALVLAIFAQAIRPPVRSLPDEAARELKALLARRQELVEMTTAEKNRLGTTSSTAVREHIKTHLQWLKGELGGLDRDLEQKVQESPIWREKEDLLKSAPGVGNVLSFTLLAELPELGELDRKQVAALAGVAPFNCDSGTRRGKRVIWGGRAHVRKVLYMATLVATRYNPVIQHYYQHLLSLGKLKKVALVACMRKLLTILNSMLKHHRPWCPVAPKADHHVFTCS

SEQ ID NO: 285126 - protein, 370 aa, unidentified
MRHGSTLYVGLDVHKDSIAVAYATTDGPSDPVHVGAIGTRQCDIDALVRKMQSKSAQLVFIYEAGPCGYWLYRHLTRKGLTCFVVVPSLIPRKPGDRVKTDKRDAVTLARLARSGDLTPVYVPDVPDEAIRDLARAREDALRDLNAGRYQLKALLLRHDIRYVGRANWGPEHVRWLARLVLPTPAQQIVFHEYVRTVTERTELLHRLEAELLEQAKPWRLYPVVEALQALRGVQFTVAITTIAELGDLTRFDNPRQLMSYLGLTPSEYSSGDRRRLGGITKAGNGHARRVLIEAAKAYRHRAKVSEQIQTRQQHLPAPIRDIAWRAQVRLCGRYRKLLARGKHPNTIAAAVARELAAFMWAIARTQAVSA

SEQ ID NO: 285127 - protein, 369 aa, unidentified
MGEYSEAFVAFDTSKVKHAVAIADSGRAGEVRFLGDVASSPATVMRLIRKLASRYAKLHFCYEAGPTGYGLCRQIHELGHDCIVVAPSLIPKKPGERVKTNRRDAVTLARLLRAGELTAVWVPDATHEAVRDLVRAREAAAQDLRRKRQQLLSFLLRHGRIFDGRKHWTMAHRRWLADQKFDHPAQQIVFQDGIDAIEDAIVRLRRLEEQLVAIVPSWSMAPVVEAYQAMRGASFLVAVTFAAEIGDVRRFDNPRQLMGFLGLVPRERSTGETVRRTGLTLAGNRRARRVLVEAAWSYRHPARVSQTLQDRLDGLPKAVREIAWKAQIRLCGRYRRLSAAGKKLPVVIAAVAREMAAFLWAIGRQVAPA

SEQ ID NO: 285128 - protein, 401 aa, unidentified
MNCVGIDVSKGKSMIAVMRPFGEVVVSPFEVLHTDSELSKLARLLKSLDGETRVVMESTGNYHAPVAWLLHDAGLYVSVVNAMLVHDYGNNSLRRAKTDKKDAVKLANYGLDHWLTLPRYIPEEDTRLMLKICYRQYQQYSKVQTMLKNNLISLLDTTFPDANRLFTSPPRADGSEKWVDFVAAFWHCECVCGLSEKAFTAKYQKWCKKHGYNFSEDKALDIYASACRHFGVIPKTDTAKLLVEQAISQLQTTSAALAALKQEMQSLAASLPEYPVVMGMFGVGPTLGPQLMAEIGDVRRFHSKKALVAFAGIDSPPYQSGQMDVHSRSISKRGSASLRRTLFLVMGVLLQCAPMDEPIYQFMNKKRSEGKPYRVYMMASANKFLRIYYATVKQYLDSLEV

SEQ ID NO: 285129 - protein, 355 aa, unidentified
MSQEKYIGMDVHQATISVAVMDAHGKLLMECLLETKAATILEFIQGLHGTLSLTFEEGTSAAWLHDLLKPHVNRLVVCDARKAALLKDGNKSDRIDARKLAELLRTNQLKPVYHEEHGVRTLKELGRSYLTLTKDVTRVMNRIKALYRSWGIPCSGAGVYAPRHRAEWLAKIVEPGVRVRAQRLYQQLDLLQPVRLEARRELLLESHKHAAVKLLRQIPSIGPIRAALLVALLQTPHRFRTKRQLWAYSGFAVETHDSGEYRCVRGKLQRNRERITVRGLNDNHNKDLKNLFKSAAISASTRPGPLHDFYVARVEKGMRPTMARLTLARKIATITLTMWKKGVGFDPQNLPRQAA

SEQ ID NO: 285130 - protein, 393 aa, unidentified
MVYVGIDVAKDKHDCFIANSDGEVLYDVFTIQNNMDGFEDLFFKIKTASRDLSKVKVGLEATGHYSCNILGFLHNKGLTTIVINPLHTNAYRKSLSLRKTKTDKADARAIASMIMSDVSLKPYSDTVYHNEDLKSLSRYRFDKVSDRSKLKQSVSRLVNILFPELEKLVSTLHTKAVYELLSEFPGAHQVASANLKHLTALLSTASKGHFGREKANEIREAARRSISTYLPAKSLELRHTIKLIRELNAEIAEIETEIKKIMDSIDSPILSIPGISYGIGSMIVSEIGDFSRFDSPDKILAYAGCSPTTYQSGQLYSSHAVMEKRGSRYLRWALINAARYVCNWEPTFAAYLEKKRSEGKHYYVALSHAAKKLVRLLYHLETTGEKYIPQTLS

SEQ ID NO: 285131 - protein, 361 aa, unidentified
MSDATTSEGTKVTVGLDLGDRHIQVCVLDEAGEVIEEARLATKPQALRRRFCGAERLRIVLEAGTHSPWVSRLLAELGHEVIVANPRKLRLIYQNDAKSDRVDAEYLARVGRLDPALLAPLRHRGAETQADLALLRSRNALVRARSRLISHTRGTTKSLGARLPTCSAESFAAKAGAFIPDELQPALDPLLAVIAELCAEIRALDERIEEMARQRYPKTALLTQVPGVGTLTAMVYVLTLEDPERFPRSRSVGSYLGLRPRQRDSGSLQPQLRITKAGDEHLRWLLVGAAHYILGPFGPDTDLRRWGLGLAAQGGRSGKKRAAVAVARKLSVLLLRLWVTGEVYEPLRNARLRGELLAAQT

SEQ ID NO: 285132 - protein, 345 aa, unidentified
MKITTIGLDLAKEVFQIHAVDERGKLAQKKKLKRKEMSTYFANLEPCLIGMEACGSSHYWARRLKSMGHTVKLMAPQFVKPYVKTNKNDAADAEAICEAVTRPSMRFVGAKNVDQQTILCLHRARRLLVTAKTAQANQIRGLLAEFGIVAPQGIKTLRDRIPDILEDAENELIPEMRELIKVMDERLKDMIEDVEALDLKIKLSNERNEMIAELMKIPGIGPLTASAMVATIGDFKEFKSGRELAAYLGVVPRQHSSGGKQNLLGISKRGDGYLRTLLIHGARAVIRFAESRQEKNDWLVGLIGRRNKNIAAVALANKNIRIIWAMMTRSERFDPAHISHAPIPA

SEQ ID NO: 285133 - protein, 358 aa, unidentified
MRIIGVDLHTRQQTIAMWDTETKELIERTLTHDGDEVREFYSALPGQVLVGIEATGSMHWFLELLEKLGIDRQVGHPSEIRKAETRKQKHDRRDAALLLKLQIENRFPSIWMPSSELRDLRTLLMHRHQWVRMRTRVQNTLQAMAIGRGLRRGKALWSQTGQHAIASLPLLPHTAYRRNELQDLYQKLHAQIDELDKRVGDQALQRPGAKLLMSHPGVGPVTALATDVFLGDPGRFADGKAVVSYVGMVPSEYSSGGQQRLGGLSKQGNPFLRFLWCEAAVHAVRRDPGLQRFYRRKLAQKGLGKARVAAARKLGIRLWIMLRDQIDYQEFCRRGQMRQKNGGACAGMPEVGHSPAKQ

SEQ ID NO: 285134 - protein, 408 aa, unidentified
METIHSVCCGLDVHQASVSACLRRVATEGTVGIENRQFSTTVQGLTELSDWLTSAGCPIAAMESTGVYWKPVFHILSGTIEVWVVNARDIKQRRGKKTDRADAQWIAELLAYGLIEPSFVPPPHISALRDVIRMRTALVQMRTQVKNRVLAVLEDTNVKLASVVSDPFGVSGRKMMDALAKGDRDPKALSQLAKGVLRRKIPQLEAALEGTFTDHHALLIGLNLDLIDHTNAQIAQLDQRIDELMKPLQDEVERLESIPGVHHTAARIILSEIGTDMSRFGSASRLASWAGMCPGNNETAGKRKSGKTRKGNRYLRRVLAECAWATRKTDSFLGRTFRRLHARIGGKKAAVAVGHKILVIVYHLLNEGTMYDDGRYNRPNPRQEARQLKHALSILETLGYQVQLSLAA

SEQ ID NO: 285135 - protein, 376 aa, unidentified
MEDDNTLYVGMDVHKDSITVAYALGSGDVELLGKIGTTKSDIDRLCKRLQSKARHIRVVYEAGPCGYGLYRQLIQKGFECMVCAPSLIPKKPGERVKTDRRDAVKLVRLLRTVDLSAVYVPSVEDEAFRDLARAWVSAKDDLKRARQRLKAFLLSHGVRYTGRADWGPTHRRWLSAYAFDSAWQQFAFEEHRRTIEDRLAQCERLEAALREAVVDWHFYPAVLGLQTMRGVQFTTAVGMLAELGDLSRFAHPRQLMAWLGVTPSEHSSGDKRRQGSITKTGNSYARKLLVEAAWSYRHPARVSPEIQRRHEGIPKPIVDRAWDAQVRLCRRYRKLTARGKEKNIAVVAVARELSGFIWDISRLAMSLAVPAEAHAV

SEQ ID NO: 285136 - protein, 339 aa, unidentified
MSVIIGVDPHKASHTAVAVGSDEREVAKVTVRTTCQQTPKLLAWAERFAERTWAVESAGGLGYLLAQQLVDAGEVLLDVPPTLASRVRVLSTGRSEKNDPNDAFSVAIAALRSNGLRTVERADHTEIMRLLAKRNHDLGRLRAKLVCRLHNALADLSPGGISKELYVSDANGLLGSFEPVTPIEHMRHQLALELVDDVARLDEQIKESHRRIRTAVRASKTSLTDLFGVGPVLACSLIGYSGDVGRFANRDSFAAYAGIAPVERSSGGRVFHRLSLRGHRRLNNAIHMVAISQIRQPHSEGRAYFDRKVAEGNTKREALRSLKRHVSNAVYRQLVLDAR

SEQ ID NO: 285137 - protein, 326 aa, unidentified
MQGKEASEQETKVKSNVGIDVSKCWLDVHVVPGGEQRRFANSCASIRQLKRWLLRRDIALVAIEATGKWHRQLHRSLVASAIPVAVVDPYRVRKFAQAQGQFAKTDQLDARLLAAFAAIMNPAERPPAPQSMAELGELIAARASAVDEQTALKNQLNAAECVFLKRQLERRIDRAGNDIAALDTEILRRIKADAGLARRYAILTSIPSFGFAVAATLIACLAEIGGATAKQIAMLAGLAPIADQSGKREGVRVIWGGRAAVRRVLYLAALSAARYNADMKAFYARLRTAGKAPKVALIAVARKLVILANTLIREDRTWQSAAVKYA

SEQ ID NO: 285138 - protein, 343 aa, unidentified
MYYIGLDVHKKTISYCVKNAAGQVLSEGKIGSTRRELDAWVRTLPEPRMMAMEATIFTGWIYDHLLPHAEKVKVAHPLMLRAIAAAKRKNDKIDASKIADCLRCDFLPESYMIPTEMRDRRRFLRYRNLVLRQSVQMKNRISGMLMETGVSYEKLRLHRKGYFDQLMKSNEEVSDSIRPLLKLCREQIDRSILLDRTLLKTLERDPLLSGRLERLRTIPGVGPLTALTWVLEIGDVSRFRSIKQAISYCGLCGEEVRSADKVMRTPISKQRNKHIQSMLVEAARLAPRYSPELALLYDRERQRGDGNRATLAVARKLVAHMVAVERRQSSFVPARELKQTTAA

SEQ ID NO: 285139 - protein, 317 aa, unidentified
MIGIDIGVRRCHVCDRRTGDQFSAPSDRVCHYLSTTEPTTVVLEMTGYYGLPIAEAALRAGHHVLIAHDTDAASLRTLLRRQHKNDRLDAQLLADLAELALREPLLTQRHLTPYEELRPLITIRRYAHAWRTLTELRSRIRQRNRHPHTEPLPELEQHLTSLIEDYQTRTINAVPHQQMELLRSIPGITPPLAALLYATIGDVNRFRNTNAVVSYCGVAPKHRPSSGETARKPRRHRYAVLLTTHLHMYALRVAAHPDDYGRIGKTYVRVKARTDGRRALHAVKRHLIRIVAGVLRSQKPYDDDYPSSRAADQQASA

SEQ ID NO: 285140 - protein, 339 aa, unidentified
MPLYAGCDLHSNNNYLALVDQKGKRVDHWKLANDPKVILATLASQCLKIVGIVVESTYNWYWLVDALMEAGYKVHLANPAAIQQYRGLKHVDDKHDAFWLAQMLRLGILPEGYIYPKEERPIRDLLRKRRHLVRLRTSLVISLQNILSRNQGIHFPAHEVKRLKEDRVNPLLEGNEDLALAGQVSKEMIDHLTRQIRKIEEVIVQRVELRETYQHLLTLPGVGKVLALTIMLETGPISRFADVGHYASYCRKVSTRWTSNEKIKGRGNLKNGNKYLAWAFSEAAEFARRYDAQARAYYTRKMRKTNSLVAHGALAHKMSRAAYYVMKDQVPFMPEKLFS

SEQ ID NO: 285141 - protein, 382 aa, unidentified
MHASNICTPIADHNGTIFVAIELSQKTWLAVVRSPDRDRISRHKLEGGNDAGLLALIASVRARAARALGTVPAVVSCYEAGYDGFWLHRRLVAAGITNFVFDPSSIAVEQRRRRAKTDRLDGELLLRSLMAHCRGEPRVVRIVRVPSPEQEDVRRGSRERERLIKEQTAHTNRIKALLRTLGLAAGNPRRRDWLRWLAEQRDWEGQPVPPHYLAELAREHALLLLVVAQLGDLSQAPEATDGPAAARMAKQKTQLRQLKSLGLASAGTLVDEALYKDFDNRRQVGSYIGLAPSPWASGATSREQGISKAGNPRARHQAIELAWLWLRHQPDSALSRWFRQRTAGASARTKRIAIVALARKLMVALWRYLTTGLIPDGAVVKA

SEQ ID NO: 285142 - protein, 322 aa, unidentified
MSTYQLGIDVAKAKLDCALRSPDGKLRHKVVVNSLDGFEALKVWWEKQGANGLHVCMEATGIYWEAVAEFLAALEYVTVSVVNPAQIKAFGASRMVRTKTDKADAKLIAEFCAERCPQRWQPPPPAGQTLRAMVLRLESLHIMHTQECNRQAVVRPVVKDSVDKHLQWLDQEIAAISKAIRDHIDNDPSLRDKRRLLDSIPGVGERTIAVLLAFMADTQRFDNARQAVAFAGLDPRQHESGSSVKAKPRMSKVGHAFLRKMLYMPAMVAAYRTQWGAIFRRRLEASGKPPMLIIGAMMRKIIHVAFGVLKSQKPFDPTLHGA

SEQ ID NO: 285143 - protein, 331 aa, unidentified
METDQYIGVDLHKASFQVCAITPRGERLWEARFARTPEGIAAFVARCTPRSAVAVEATTPTWHFVDQITAHVATVCVVDTRKTKLKAGYAAKTDRLDARRLADALRRESVVSIYVPPPAIREQRELARHRLMLTQMRTRVLQRMRALRLRQGLGDPPTKRLRSAAGQAWLDALELPSQAHRVLITLRQIERDLCAQLAPVEADIAREASADPIVQRLQQVHGIGPVLGLMLRAEIGDIRRFPTPAHLASYAGVVPQVDSSASRTHYGRITKDGSPWLRWALVAVGVQTLRRQDPLGRGGRKLAVRKGAMKAHVALAREMCREIMEAWRRAA

SEQ ID NO: 285144 - protein, 324 aa, unidentified
MKVVFPTCCGVDVHKTFVVATIITTPADSLQPNYQKKRFSTFNSDLNRFATWLLEHNCLDVCMESTGKYWVPVFNILEKRGIRVVIANPKWVKAVKGNKDDTKDSKWIGDLFRIGLVKSSFIPELKIRILREFLRYRYKLVSMKSSEKNRFQNAFTVCNVALDSVVSDMFGKSATAITDYLTSDESFDPEHCVSLLQRSLKKKAEKVLESIEGYSISDEQKARIKIIREHYDFIEKLIAKVDTCVNEMVEKYEGEINLLCTIPGIDRNSAITIISEIGTDMSQFGSSKRLCCWAGLTPGNNESAGKKKSVRISRAGVYLKPALV

SEQ ID NO: 285145 - protein, 333 aa, unidentified
MSKKKSKGFIGIDVSKNLLEVAAHESDYQFRCANKAQAFGELIVELIALRPALIVLEATGGLEIPVVAALHAAGLPVVVVNPRQVRDFAKALGQLAKTDRLDARVLAHFAAAIKPPLRPIKSADELELDALVGRRGQLVEMLTAEKNRRGSAATDTVRDQIKEHIDWLEDRIAELDQQLKAQLKNSTLWQGRDDILQSVPGIGPVVSYSLIADLPELGRLNRQKISKLVGVAPLNNDSGQQRGTRHIYGGRTRVRSMLYMAALTATRFNPVIKEFYERLLANKKLFQVAITALPPDVRKVSDLPASRHRVSLELRPTCLFTTIIQALGIAPEN

SEQ ID NO: 285146 - protein, 408 aa, unidentified
MQVLYPRCAGLDVHKDSVVARIRCVSEPPHDEVRSFATTTSALLQLNEWLSAHQVTHVAMEATGVYWKPVWHLLEGDFELVLANAQHIRNVPGRKTDVNDATWIADLLAHGLIRSSFVPPAPIQELRDLTRTRKQLVREISQHSSRIQKILEDANLKLGSVLSDVLGKSGRAILRALIAGESNPEKLADLAQGAARKKRAALVEALHGRVRDHHRGLLKVHLELVTALEQALANIDATVGKTLAPIHQSARLLTTLPGVSDLTAQVMVAEIGVDMSRFPTAAHLISWTGLCPRSDESAGKRRSTRVRKGAPWLKVALVTAAWVAVRVKDSYLQAQFHRLRSRRGAKKAILAVAASMLTAAYHMLKNGVEYKDLGADHFTRRDRSKMIQRLVRRINDLGCQVQLIPQAA

SEQ ID NO: 285147 - protein, 341 aa, unidentified
MKNKSFIGIDISKNVIDASIFCEGTPIKDFPHAVFNNSRKGFGEMCTWLKKNHVVLSNCLFGMEFTGSYSMKLEKFLNAKKYQFCMLSTHVVKHYPMGPKDKSDKIDSAKIADFLYRYNGTECVKPYKMPDKTMQRLKTLMNERKFLVEQRTCFMNRRQLCTTKEDAQLYDGYIKKFSRDIENIELEEQKLLATDDSLLATYKNLLTIPGVGFVNAINVIVITRNFTAFETARQYASYVGVAPHSHTSGTSVRWRPRPSARCDGQAKADLSMAATVAVQYDAELQSFYNRKLGGKQDSDTKRKALNAVKFKLVLRMFATGKQNRKWEPLDSKSSNEKLAIS

SEQ ID NO: 285148 - protein, 349 aa, unidentified
MKIYVGIDIAKLNHFAAAISSDGEIIIEPFKFTNDADGFQLLVSKLESFDKNSLIIGLESTAHYGDNLVRYLVTELYQVCVLNPIKTCQMRKNNIRKTKTDKVDTYVIAKTLMMQDNLRFVSFFDLDMMDLKALGRFRQKTIKQRTRLKIQLTTYVDQVFPEIQYFFKSGLHQHAVYALLKEAPSPKEIASMHMTHLANLLKVNSHGHFTKEQAKELRVLAQKSVGANDSAISIQITQTIQQIELLDSQLEKIEAEMTDIMKFNDSVIMTIPGIGYINGGMILGEIGDIHRFSNPNKLLAFAGLDPSVYQSGNFQAKTTRMSKRGSRVLRYALVNAAWNVVRNNATFKA

SEQ ID NO: 285149 - protein, 429 aa, unidentified
MQNESTPDARGPVFCGVDTHADSHWLYVLDWRGRKVLSRQFPADAAGYEALAGAIAAAGEPACIAMEGTSSYGAGLTRHLASLGMPVREALSPARMQRRRPRQGKCDEADAERAARAAMSGSRLGTPKSQDGWVDGVRCMLAARSGAVKARTSAINTARSLLTTAPEGLRSRFRGMGGPRLMEELPSVRAEGALGAALGALADLWAAARDAAHDMERAIEASLEENCPALLAMYGCGPVSAAKLAVAAGDNPGRLRSEASFAAICGACPIPASSGKTVRHRLNRGGDRQANSALHEIARQRVMRDPETAEYAERARGRGKSDREVMRCLKRYVAREAYRALMRPHEIRRPEDASELVAARRAAKVSQVRAASILGTSEKYISMLERGQRELKPIRRAYEAWVEAGLPLDWDRQAFEAERKMDSKKHLAK

SEQ ID NO: 285150 - protein, 348 aa, unidentified
MRISTIGIDLAKNVFQVHGVDAAEKLVLKKQLRRSQVLEFFSKLSPCLVGLEACATSHQWARELKKLGHDVRLMPASYVKAYVKRGKNDAADAAAICEAVTRPSMHFVPIKSSEQQSALMLHRTRDLLICQRTQLINAMRAHLAELGLVARKGRKGLQQLIRTVAEADDERLPSDACFACQAIIAQLQAVQIQITRLDKRIHQAHRVNPASKRLEAIPGFGVIVSTAVVATMTDPKAFKTGREFAAWIGLVPRQNSTGGKDRLGSISKQGDRYLRRLLIVGALSVVKSARARPDKYPWIMTLLGRRPAKVVAVALANKMARIAWAVLAKGETYRASAHTTSGAVAVST

SEQ ID NO: 285151 - protein, 359 aa, unidentified
MKIIGCDLHSRQQTLAMLDTATGEIEKTTLKHEENIVREFYSKLPRPVRVGIEATGSMQWFLNLMGELGVECLVGHPAEIRAAEPRKQKHDRRDADLLLSLLVEERFPAIWLPTKDLLDIRALLRHRHQWVGLRVKVQNALQAIALANGLRRGSSLWTQAGQRAIAALPLSPHAAYRRDELQAMYVKFETEIEKLNQRVQQQACGRAGARLLMTHPGVGPITALATDVFLGDPARFADSKALASYVGIIPRENSSGGRQRLGGLTKQGNPLLRFLWSEAVIHAVRRDPELKHFYHRKLIQKGLGKARAAVARKLGIRMWIMLRDRIEYNEFCRRGQMQQTSGDAHAGMPGRRYGAKVTG

SEQ ID NO: 285152 - protein, 361 aa, unidentified
MAQVRTWAAFDVHVSGVVAATLERDSGELRVRRLPGSSEDVAAFAASLPGPVRATYEAGPTGFVLARRLAAAGVECVVCAPGLIPRGVSDRVKTDRRDAERLVRLLAAGELHRVAVPGVEEEALRDLVRAREDLRGDLMRARHRLAKLLLRHEIRFDGPQANWTQAHLGWLATVQLAQPASQRALEDYRGAVLALMIRREQLETEIARALPDSPWAQTARRLMCLRGIDTLTAAGLCAEIGDFARFRHPAQVMSYLGVVPSEHSSGERRRRGPITKSGSQHARRLLVEAAWHYRRPPRVAGSLARRQINGEPEIVALSWKAQRRLHHVWQRMEQRHKRRTIIAVAAARELAGFCWAVATTD

SEQ ID NO: 285153 - protein, 387 aa, unidentified
MPQPNDLSRSLVALDQNSTIIAVVELSQSTWLVAGMLPGIERQPRKKLEPSPERLLALLHRWRDEAVRAGRTITRIALAFEAGRDGFWLARWLAARGIEAHVIHASSVAVSREHRRAKTDRLDTELLKRGFLGWLRGERGHCSMARVPTIAEEDAKRPNRERDCLVGERTRIVNRIKSTLARLGIRNFKPTLRKAAERLATVHTPEGMPLPPNTLAELQRDIARLGFVVSQIREIEDARQKRLEHQPETGPHAMVRLLARSVGVGVETADLLVHEVLLRPMRDRRAVARYAGLTGSPDESGARRREQGLARAGNARVRRGMIQLAWRFLMFQKESALALWYRARTADSRSGTRKTMIVALARKLIIALWRFVTAGEPLEGVVLRPAS

SEQ ID NO: 285154 - protein, 312 aa, unidentified
MIPELLFVGIDVSKARFDVFVYPAGKRWSTGSSPTQIGALANRLLGLGPVVVGLEASGGYERRLADSLHAAGLKVYILPPARVRNFAKAMGQLAKTDMIDAAVIARYLATVHAHLTPYEPDPVRSRLSALAAHRRRLVAEKSGLTSQLDTIEEPLVRDMLEVRLRIIATDIATLDRAMRDLLKATPGLRKRHDRMCKVTGVGPVLATALIADLPELGTVSSKVIAALVGVAPHARQSGSSNRQGKCSGGRKHLRDIAYMAALSAIKVKDPVLGAFYQRLRSKGKPFKLAIVATIRKLITILNAIARTDPAFA

SEQ ID NO: 285155 - protein, 393 aa, unidentified
MICVGIDVAKDKHDCFILSSEGEVLADVFTIPNNAEGFDTLLQTIHRCARPEDKIKVGLEATGHYSYNILGFLLNKDLHTFVINPLHTNLYRKSLSLRKTKTDRVDARTIAAMLMSDVDLKSYTDTAYHNEELKSLTRYRFDKVRERAKLKQSVSRLVTILFPELEKLVPTLHMASVYALLSEFPGAKQVAGAHLTHLKALLNNASKGRYGRDMATELRDAARCSVGSVMPAKSLELQHTIRLIRELNTEIEDIESAIQTIMEEMQSPITTIPGIGFRMGAMILAEIGDFSRFDSPDKILAYAGMSPSTYQSGQLSLSGTYSHMEKRGSKYLRCALYNATKYVCLWDSTFEAYLAKKRAEGKHYNVALSHAAKKLVRLIYAMEKSRQPYNSVA

SEQ ID NO: 285156 - protein, 411 aa, unidentified
MEQNGVVDESTRFVGLDVHRRYATVAAVDSKQQVVLTARRIDFNDFDEWVRKHLRRTDVVTLEATSNAWHLYEMLVPLVASVTVANPIQVALIAKARVKTDPRDALTLARLLAVGMLPSVWVPPVEVRELRALGGHRRRLIKQRTQARNRLRAVLFTHNLFPPAGEAFGPANRPWWEGLDLPASEKLRVRHDLSILDCLEPLVKGVDAELVRQSSLAPWAEQTAFLVQLPGIGVHSAMQLLAAIGDIERFDGPHKLVGYAGLGARVHSSGEEHYGGRITKQGRRDIRTTMVESAWVAVESHTYWKALFERLAVRVGRPKAIVAIARKLLVVVWHVLAKQVADREAVAEQVAGKFLEWSWKLGRVNRDGLTSGAFIRRELCRLQLGDKVTAISRGKRKFPIPLSEHADQAVG

SEQ ID NO: 285157 - protein, 419 aa, unidentified
MASVFIGVDPHKLSATIEVLDERETVLATGRFGTDRGGYAAMRRQVAAWPARVWAVEGSNGAGRPLAQRLLADGEHVLDVPAKLSARARLFDTGHNRKTDAHDAHAVAVVAVRTRGLRVLSYDEHHEALRMLVDRRQELTRRRIQTVNRLQRLLSELTPGKAKKDITALQAKGILASVRPRDLAGKTRRGLAVEQLGELVMVDKKIKKLTKELKAMVLATGSTLMDLPGVGPVVAARALADVGDVARFADRNRFASWTGTAPIEASSGEIVRHRLSRAGNRRMNHMIHIAAATQIRLDTPGRAYYRRKLTEGRTGWRPCAASNAGSPTRSTAVSSLTLKPPRLRAGTRAREGTAGRLKNPARPAPTRPPALRISHFPDPHPRRYSPPRRVRTPARARLPSRRADAPEPSRWSAPPDERP

SEQ ID NO: 285158 - protein, 423 aa, unidentified
MDVLYPRCAGLDVHKAIIVACVRTMVGAKTTRACRSFETSTTGLQSLLAWLTEQGCTHVAMEATGVFWKPVWNILSDGGFELIVANAAHIKAVPGRKSDVNDATWIADLLACGLIRASFVPAQDFQELRALLRTRTQLTREQTRHIQRLQKTLEEANIKLDSAISDVMGVSGRRMVEALIAGETNPVVLAALADRRIKTPREDLVEALRGRVTEHHRFMLRLHLDQHDRVAEAIATVDAEIDTAAARMDQREVAGQASFQALILLLTTVPGVGRLAATIILAEIGTDMSRFPTAGHLLSWAGFCPGQNESAGKRRSAKLRKGAPWLKVILVQCAWSASRTKGSYYKAQYWRLCAKHGKKKAICAVAASMLTAIYHMLKDGTEHHDLGAGHFDRRPAEAKANKLVGQLAKLGFAVELRPIAEAA

SEQ ID NO: 285159 - protein, 343 aa, unidentified
MKLFIGLDVSLAKTAVCVINEYGKIAKEAQVPSDPHAIVDFANTLEGAVAIIGLEAGPLSQWLHRGLADAGLDVVLMETRQVKGALKAMPIKTDRRDAEGIARLLHMGWFRPVHCKSVSAQEVRALLAARKAIQQGMIALELSLRGLLRNFGLKVGAISRGQFDARIRELVDGNAMLQAAAGPMLRARASLRQELAGLERQVRLLAKDDAVCRLLMTMPGIGAVVALTFRSAVDDPGRFSSSKKVGPWVGLTPSRNQSGERDVIGGITRAGDANLRRALCQAATVMIHRGRSTWLRSWAAQVAKRRGAKRAMVALARRIGTILHRMWRDGTEFSTVPLIAKSA

SEQ ID NO: 285160 - protein, 403 aa, unidentified
MLFVGDDWAEDHHDVYLMDDAGARVAARRLPEGVASIAELHELIAAHAEEPGDVVVGIETDRGLWVNALSAAGYQVFAINPMAVARYRDRHRVSGAKSDAADAKLLADLVRTDRHNHRPLDGDSPEAEAVKVLARAHQSLIWARARHIRMLRSALREYYPAALQAFDDLGGRDALAVLGRAPTPAQGARLSVSKIGTALKAAGRQRSIESRAQQIQAILRAEQLSAPEAVAAAFGATTRATVNIVIELNEQISALETTLANHFEKHPDADIYRSLPGLGVILGARVLGEFWDDPNRYTNAKSRKNYAGTSPLTIASGKKKAVLARHVRNPHLYDAVDRWAFATLLSSPGARVYYDQHRAAGDTHHQALRALGNRLVGILHGCLRHRTHYNEHTAWAHRIPTAA

SEQ ID NO: 285161 - protein, 387 aa, unidentified
MARKRTLSTLDTSIAYEAVGLDLAKEDTAIAAFGPDHEGPYLIDRMPYDKLYELLADMAPTLVAMEPCSGAHQIAEQIQELGHEVMMISGRHVQAWVKDHCNGQKTDLNDAFAILNLAYDRWLTPIRGKTREECRLLALQSSYRQLKGQRTKTMVHVEATLHAWGFPIRTGSFNQKALHELIDANREAFGDEVVETLHLMINRVHDLDHDIATVLKLLTEATQRDPRASLLRSIPGFGVLTTSRWCAVVGDIARFDSPKQTMAFIGLVPNNRITGHHTETSSGREARGQGKMSKRGDKMLRSLCILGAGALCLMVRNDRLPDCPFVASIKERLASPRPWFKVLVYVAAKLVRIATALLKYGETFSFEKAGISKAVLKQWELEQAKAA

SEQ ID NO: 285162 - protein, 339 aa, unidentified
MKYTPVGVDIAKHLIQVHFIDENTGEVVDKQLRGRDFLEYFSNREPCLIGMEACGGSQHWARELTKLGHKVRLLQARFVKAFVMGNKNDVMDARAIWMAVQQPGKEIAVKTEEQQSVLVLHRTCMQLVKFRTAQINALHGTLLEFGETIHKGRAAMGREFPEALERMKERLPPYLIAVLENQYNRLNELDSLIEDIEKQLTSVAKQNETCKRLLDIPGVGPLIATAAVATMGEASAFKSGREFAAYVGLVPKQTGSGGKIRLLGISKRGDTYLRTLFIHGARAAALLTKEPGPWITELKKRRPASVAIVAMANKLARTVWAIAAHDRKYDRNHVSIRPY

SEQ ID NO: 285163 - protein, 345 aa, unidentified
MPIVGGLDIHRKQITFDYLDTVTGQVRRGQIAPADREHLRAWLARFAGCEDVAFAAEGCTGWRYVTGELAAAGVAAHLAEPAGTAFARGRKRHAKTGKTDCRHLRMLLAEGRLPECWIPPGHILECRALLETYHDLRAEHTAWVQRIHAVLFHQGAPALGEGALRTEQDLAALRAAAAAHLSPAGQLQVATALEVIEALEARLHVLRHELLDAARHLTGAKVLAERLYGAGPVTALAMTCWLGGAGRFSSSRKAVRFAGLDVTVYSSDRKGPPGRLSRQGPPVLRWAVYEAGKTHARSSAPGHRYYAQVKDRCNGKRAALSEARKILRQACHILAELGDDALSAA

SEQ ID NO: 285164 - protein, 463 aa, unidentified
MKKNKRPAVSKSKQVAGSQLGVTRSNVAGIDIGSSEMFVCGPEQPDGTRELRSFATTTQQIHDCVDWLRQQKVESAAMESTGVYWIPVMEILESRGIETLLVDTRPLSRVPGRKTDVADAQWIQTLHSHGLLQGSYRPGEAISELRTIVRQKASLVREQSDWVRRMQKSLDQMNVRVHHAVKDLQGVTGMRIIRAIVGGERDPLVLAGLREPNCSHSEQKIAEFLRGHWRSNHLFNLEQSLLMYDAIGQRMEAHEKEIQRRMQCLTPPGRESVEAPPPANRGKQAAMKRRGQEEKRQKLYRMVGADLTTIDGVGVETAEVVISEYGIDLSKFATEGEFISHLKLAPYRPVSGGKVLKKKRGRQQGTRTAEALRNAATAVRLSRSALGAYYRRMARRKDGSIAVFATARKIGSLIYRMLRWGQAYVDIGQEAYERHYEAVRLRTMASTAAQMGYTLTKNEAASG

SEQ ID NO: 285165 - protein, 482 aa, unidentified
MKASAKKRSKSPKKVNKKRARRQKSLRDQQLEMINPNAAGIDVASEEMWVCVPEDRVDQPQGNVRKFGAFTCDLYAIADWLQECGVTSVAMESTGIYWIPLYQVLEERGFEVCLVNARQMKNVSGRPKTDRLDCRWIQRLHSYGLLMPSFRPEDEICQLRSLLRHRDAVIRGAARHIQHMQKALHQMNILLDKVISDITGVTGTAIISQILAGERDPQTLATWRNPHIKTSEAEIAKALEGDYRDEHLFVLRQAFEAYHFAQEQLQVCDRTIEGWLQRTEKILDVRDHPLPSSTRCHRRPQRNEPTYEARSYLYEIYGVDLTQIPGFQASTVQTLLSEVGRDLTKWKTEKHFTSWLGLCPNLKRSGGKDQSSRTRKVQSRAAQAFRNAARPLARSSSYLGAFYRRMKARLGTAKAITATARKLAVIFYQMVTQGRAYKELGEDYYLKQHKQRQLKRLKKQARLFGFDLVPNTPSDSDTSALS

SEQ ID NO: 285166 - protein, 346 aa, unidentified
MTHSTTVGVDLAKNVIQVSVVSARGKELSNRSLTRKKFAEFLGKQKPSLVAFEACATSHYWARAAQRHGHEARIIPAKFVAPFRQGHKTDSNDALAVAEAARRPNIKEAPMKTVEQQGLQAIHRSRQLLIQECTALSNHLRGLLMEFGVIIPQGFASLLRAVPEVLEDGDNELPDLYRPTLQRMYTRLLELREDIEAMTKEVEILVKEHPVCSKLTALEGIGPIGALLLYATLGSGTAFSGSREFAAYLGLAPRQYSSGGKTNIVGLSKKVGNCRLRSILILGARAYVYKLKEPKSSKDKWLKANIERNGESRAAIALANKNVRTAWAMVTQGTEYQRRGQVKVAA

SEQ ID NO: 285167 - protein, 325 aa, unidentified
MEVVGLDMHLKKTQGTIMSMNGDIVKQERFDTDKEHIMRFLKKLPQGTRVTLESVGFCWPWIDFIESLGHRVLLANPVKVKSRAEDIKTDKIDSELLAHLTRMDWLPTCYVPSKELRLLRSMLRHRAFRRRMTTAIKNRTYSEFRKRVIDVEDLGTHIGREGMMSSNIYEVNQNIEILNAVENQIKLIELRLKRQYQDVKPIRLLQKIKGIGFLTAITLYAEICDIERFSSPDKLAKYAGLVPRVRQSGEVTRMGRETKGNKWLKWILIEAAWSHIKFCRGGRLSRIFKNAYQRKKDKKKAIKIVARKLVNIIWAVWKYEREFHA

SEQ ID NO: 285168 - protein, 369 aa, unidentified
MAKPITYVGLDVHKDTIAVALAEAGLRGEVREHGKIPNTPAALKALTVKLATARRELRFCYEAGPCGYGIQRQLTEAGHECAVVAPSLIPRKPGERIKTDRRDAINLAKLHRAGELTAVWVPDQAHEAIRDLVRARQAAVRTLRQARQQLSGFLLRHRCHYHRPAWTQLHRRWLASLKFDQAVHHIVLEDCIAAVEAAMARRDRLEAHIEAVLPEWSLAPVVEALQALRGVRLVAAATLVAELGDITRFTNPRQLMAYLGLVPSEHSSGRTRRQGGITKAGNGAARRMLIEAAWSYRFPARISREQLLRQERLAKPICDVAWKAQERLCRRYRKLARAGKLPTVITAAIARELAGFIWAIAKQVQPTAT

SEQ ID NO: 285169 - protein, 263 aa, unidentified
MDYVGIDLHKKESQICILSGGGELSERRIRTEPPRFAEVLGERPRARILLEAATESEWVARCLEALGHEVVVADPNFAPMYATRTRKVKTDRRDARALAEACLLGAYRPAHRLSDPQRHVRGRLAVRDALVRTRTGYIALIRALLRQHGWRVPTGSAEGFSRRVVALPLPGRLLSEVAPLLAVMRHVNQQLAYSDGVIEAVTRPDERVQRLRTVPSVGPVTAAAFVATIDDAQRFRRAHEVEAYLGLVPRRRGSYRLTRAAAS

SEQ ID NO: 285170 - protein, 343 aa, unidentified
MQVVRIGLDLAKYVFAVHGVDARGKIVLRKTLRRDSVSRFFANLPPCLVGMEASNGAHYWARVLTELGHQVRLISPQFVTPYVKSNKNDRNDAEAICEAISRPSMRFVPPKSTEQLAVQAVHRIRRRLVSDRVKLVNQVRGLLAEHGIVIPRDITQLRRGLAELVERCNDELSELVRSLMRELREELAELDRRITSYDRRIREIFRNSEPCQRLGRIEGIGPITATALIAAVGDRTCFKNGRQFAAWLGLVPKQRSSGGRARLVGISKRGDRYLRTLMIHGARAALARAGGKQDPRSLWLEKLRQRRHPNVAAVALANKNARIVWAMLAGNTAYEPELSMNAA

SEQ ID NO: 285171 - protein, 417 aa, unidentified
MASKANGRLPIKPGVMVVGIDVAKRRHVAAIRLPDGRFQRPFSFTNNQEGFAKLLERVGLARAAGHSEVRFGLEATGHYGHALQHFLLAHGDAVISVNPAHTRRVKELLDGSPEKSDPKDAMLVAELVAQGRGRLLTMPMGVYAELRRLGKLREQLATGRIRHLNRYYGLVDLVFPELEGLVYDVRCPSIRRLLAAYPTAADVAAGSCEEICRLLWRESIGHLGAARGQQIYAAAQRSVGVREGLSALRLQMRLALASLDSVSAQMAQVEQAQREALTEIPYAAHLLTIPSLGPVTVATVLGETGDLRQYRSAEALIKLAGLNLYSLSSGTFQGRTRISKRGRPLLRHAVFLGALRMSKHGQPLHTFHDRLRNRLAGPQVAVAGCRKVLRLLYAIARDGVSYAPDRLAIMTSGQVAA

SEQ ID NO: 285172 - protein, 335 aa, unidentified
MQHEPQQQPQPQQSDSIDPAGLPVAGVDVSKARLDTFIDTFDRHLEVANDETGIARLVKDLLAHRVRLVAIEATGRYHRRVAAALLQAGIPVAVVNPQQVRAFAKAAGKLEKTDRIDARVLAAFGRSLNPRAMRKPPENQALLADLVCRRRGLIQMRVAEVNRAHEQLPKLAAAQSKKLLRLIEQQVEDLDREIARLIEADDDWSGKSKVIDSVPGIGPDTANQLLAELPELGTLNRAEIAKLAGLAPLNCDSGAHRGQRHIRGGREGVRTCLYMAAFNARQKCARFKRFFDGLMARGKLYQVAMTACMRKLLIVLNQMVKNKTHWNQKLAGELA

SEQ ID NO: 285173 - protein, 375 aa, unidentified
MREKLRFLGMDVHAETIAAAIAEPDGEVRSLGTISNRMESIRKLLKKLGPVEKLRVCYEAGPTGYVLYWQLAELGVQCEVIAPSLVPVKAGDRVKTDRRDAEKLARSYRSGDLTAVWVPDAGSEALRDLVRAREAAKQDELRARHRLGKFLLRSGHRPPAGVRSWTHLHLTWVSQIRFAQPAQESTRLDYLHEVEHMRERVLRLEQAIVEAVKLASPALQEVITDLQELRGIAHISAVTIAAELGQVSRFAGARELMGYCGAVPSENSSGKRTRRGSITKTGNAHLRRIVVEAAWSYHRPPAIWAGLRKRQQSASQEATEIAWKAQHRLHKRYARLAAKGKDKRKIVTAVGRELLGFIWAIGTKAEATVSQRIAA

SEQ ID NO: 285174 - protein, 341 aa, unidentified
MEPLFVGLDVSKDETAISVRTQSGSVKSAYKKATDPDAIYRALMSELELIRCVVLETGRMANWLYSELSLRGLPIVCIDARQAHAVLSQMHNKTDKNDAAMLAELARTGFYKRIEVKSRVSQERRALLRAREVAIKSRLNVENTIRGLLASFGIRLPKYLKTYDQRVRTALEGQSDLMRIIMPLLRLRTEALRQAAALTKDMVRQAQMNETCRRLMTIPGIGAVSAVTYVATIDTPDRFAHSRSVGAYIGLTSRKYQSGDIDYNGRISRRGDQMLRAVLYEAANSLLCRVKSGLGQRLRDWAIALKKRTSHKKAVVALARKLAVIMHAIWKDGTEFEPRGA

SEQ ID NO: 285175 - protein, 415 aa, unidentified
MGGRQQWYAGVDWGSQSHHVVLTDGDGRKIGERSFKHGGEGLAEMAAWLMAASCAAEPGQILAAIEVPHGPVVETLIERGFKVHAINPKQMDRFRDRFTMAGAKDDSRDAEVMASALRTDPRCFRPLAAADPIIVELREWSRIAEDLGVERNRLINRLREQLWRYFPALLELEDDLGAEWLLELWEAAPTPNTASRLREATIAKLLKRHRIRRFDAASVVNTLRRPPVRVAAGTVEAASAHVALLVPRIRLLNRQIKDAHSRIDGLTARLMPAEAAEPGQKKQHDAEILASLPGVGRTVLATLLAEASDALQRRDYAALRSLAGVAPVTKRSGKSCVVVRRQACHDRLANAVYHWARVAVQHDPRSRAKYAELRSRGHSHGRALRSVADRLLNVACAMLKSGAAFNPSSAAQKPA

SEQ ID NO: 285176 - protein, 325 aa, unidentified
MIISNEEKKIKSDTIIGIDISQDKFDVAISSELGKIQTFSNDGPGHQKFIKIIKMYKPKLILMEATGKCETRLALALQKAKLPFRIENPAKIRSFSKSMGMLEKTDKIDARMIAIAGERLDLSAKLSKLNHLTIKLKEHVRTRFTLIEEVVRLENVIDRMLDTDLKAELFKILDRISESKEIVENKIKKLIDGNEELSSRYKLLTSVPGIGFVTAVTIIAECEELGETGRSQLAKLSGLAPLANDSGKMKGRRHIRGGRKNLRNALYMAMLATVKYNPKIKEFYERLKSKGKPAKVAMIACARKMLGLLNAMIKHKKEWKEFAGC

SEQ ID NO: 285177 - protein, 437 aa, unidentified
MVITIQIFNHQIKMKGIVMTKKSKNSTLIQIVHPICCGLDVHKDKISACLITVDENGKEQHEIREFSSFTQDLQKMKAWLIVNNCPVVAMESTGVYWHPVYNTIEDAMQVVLVNARHIKNVPGRKTDICDSKWLAGLLRHGLVKGSFIPPEHVREWRELSRLRRTYTESQADFKRRVHKLFITANIKIDSVVSDLFGVTGLNLIDLLCKNEEVTLEKVQECTKGSLKKKAPELYLSLHGYFKDHHRFQLIGMMESIEMFQNQIEQIDARLEILTRDHEDLLERLDEIPGIDKKSAQSIIGEVGVTLEEFEKMVAFVAWAGLCPGNNESAGKRKSGRNAVRNHPFKTILIGIAWAAIKTKGSYYKAKYYKLKSRRGAKKAIVAIAHKIAKAIYNIIKYGDRYKDLGEEYLSKPNKQRMLKNLAKKADALGMKLVSCEN

SEQ ID NO: 285178 - protein, 343 aa, unidentified
MVHYVGLDVSLKQTSICVVNQAGSVVREDVVDSDPEAIAAFVRSKALGAVRIGLETGPTSTWLWTELKRLGLPVICIDARHAKAVLKMQINKSDRNDAAGIARIMQTGWFKEVRVKDLDSHSVRALLSSRALLVKIKRDLENQIRGLLKNLGLVIGRAKFNVFATRAEELIADRPELVAAVRPLLDARKAIEQQIGDLDRKVLKLARYDVQVRRFMTAPGVGPITALCFKATIDDPTRFKRSRSVGAYVGLTTRRHASGEVDWSGRISKCGDAMLRTYLFEAANVLLTRVPKWSALKAWGIRLAKRNGLRKAKVAVARKLAVILHRMWIDGTEFSWSTKKAAA

SEQ ID NO: 285179 - protein, 343 aa, unidentified
MEHFAGIDVSLEQSSVCVVDATGRIVREAEVASEPEALVAWFRGLGLEVARVGLEAGPLSQWLYAAMRAAGLAVELLETRHVRDAFKAMPVKTDRKDARGIAQLMRLGWFRPVHCNSVPAQATRALLTARKLLQSKHLDVEMSLRGVLRGFGLKVGPTTPRSFPGRIRELVEGHPTLVAVAGALLAARDAPGEQLRGLDKRLRDQAREDERARLLMTTPGVGVIVALTFVSAVDDPARFRSSKAVGAHFGLTPRKYQSGETDVTGRISKIGDAGARTALYEAANIILTRPVEGSALKSWAARLALRAGTREAKVALARKLAVVLHRMLADGTPFVAARAAAAA

SEQ ID NO: 285180 - protein, 311 aa, unidentified
MKSSIYVGIDVAKHSLQICCKELSLEQSVAYETQALNALIKQLKKCRSKVQIICEATGGLETLLVQSLGAAKINFSVLNPRQVRDFARAQNLLAKTDKIDAALLADFGRRMQPAPTAAAHRLIQQLAALVARRQELLDFCVAEQNRLGQSTQRWVRQQQLVLLGQLRVHLCQLDQRIKALVEATPWLKARFDRLTQTKGIGSVTAVTLLATMPELGTLSAGKAAYLLGVAPLNCDSGTWRGKRRIYGGRRSARSALYMAALSVSRFNHVLRAFSQRLRANGKPPKLALVAVMRKLIIYLNACLKSLRTPAS

SEQ ID NO: 285181 - protein, 412 aa, unidentified
MQVIIERCCGLDVHQETVVACLLIGSPGVQPVKEVRTFRTVTRDLEALRDWLWAAGVTHVGMESTGVYWRPVYAVLEGHFELIVGNARHIRNVPGRKTDVKDSEWIADLVRHGLIAKSFVPPQPLREMRELLRYRRKLVESQAAERNRLLKLLETANIKLASVMSDVFGVSGRAMLRALIEGKASAEAMAALAKGQLRRKCADLILALDGRIEEHHRFLLAMQLRRLEAIEADIAALDLRIGQRLEPYRTQHALLVQIPGVDWLVAAVLIAEVGVDMSVFLSVYHLAAWAGVCPGNNESAGRQKSGRARKGNIHLRTILVGAAISAARTKGSYLKDKFHRLKARRGALRAALAIAHKILVSAYHMLAKNLAYRDLGEAYLDQIGQTRTVANLKRRLERLGYHVTLQPTPHTA

SEQ ID NO: 285182 - protein, 356 aa, unidentified
MSSDVKYIGLDVHKEAISIAVLNASGKLVMESIIETKASSILQFIQGLRGELHVTLEEGTWAAWLYDLVKPRVSELVVCNPRRNALLKEGSKSDKVDARKLAELLRAGMLRSVYHGENGLRTLKELGRSYQTISKDLQRVMNRIKALFRGWGILCAGTEVYAPCHREEWLNKISQAGVRRRAELFYQHLDGLQILRRNARREFLAESRKHQAVKLLRQIPCIGPIRSAQLMALIQNPHRFRSKRQLWTYSGLAVETHDSGQYRYVNSQLQRSKKPQQLRGLNRNHNHEMKEVFKSTALSASRSAGPFSEFYARLLAKGMKPELARLTLARKIAAVTLTLWKKGARFDPEQLKTQAA

SEQ ID NO: 285183 - protein, 430 aa, unidentified
MKSNTQNAKIEAITEKTLVLGIDVGSEMHYARAFDYRGIEYSKKPFKFSNTEAGFVTFKEWILNLKERHEKDKVIPGMEPTGHYWFNLGKFLQDNEMKPVLVNPHHVKKSKELDDNNPTKNDRKDPKVIAGLVREGRYMIPYLPDGVYADLRTASNIRFQLQAELTRIQNRISRWFNIYFPEYKTVYGKPDAKSGMLILKAAPLPEDILTLGIDGVNQIWRDAKLRAVGKARAKTLIEAAEHSVGSKEGAVSARMEIRMLLEDYESRNTRLQEVMVLIEELVRKIPMTEKLLEIKGVGIRTVSGFLAEVGDISRFNNPKELQKLAGLALVENSSGKHKGETTISRRGRKRLGYLLFEVAMSLVSKNQEFRELHNYYTTRRLNPLKKMQSLMAIAAKLIRVFYAILTKGVDYDPKKMVSDIKRPAVYLQAA

SEQ ID NO: 285184 - protein, 341 aa, unidentified
MKEFIRIGVDLAKNYFQIHALESEDGHAATRKLSRQAMRKFFSEIEPCVVGMEACGSAHYWARELRAMGHEVRLIPPIYVKPYVKRGKNDAADAAAICEAMSRPEMRFVPVKSEEQQATLMLHKTRELLIKQRTMGINALRGHLSEFGIVAAKGIGRVDELLEKAESDATLPEIAKAALKILVQHLEAIEASIAVLDQEIAAVHTQSPVSRLLASIPGIGKITASAIVASVPDPSIFKSGRDFSAWLGMTPRQNSSGGKEKLGSITKQGNRYLRRLLVLGATSLLRVVGKRKGALRDWLVALLARKPARLVTVALANKLARIIWAVMTTGETFRMEIFARA

SEQ ID NO: 285185 - protein, 369 aa, unidentified
MPHVTSIGLDVHARSVAAAAFNPFTGEVVHRDFGTDAAEIAEWALGFEEPRACYESGPTGFHMARELRALGLDCAVAAVSKMQRPAADARRKNDRRDAEFIARMLATHNIVEVPLPDAAVEAARDLDRALDDATVEYRRARQRLNMFLIRLGHVWDERNADGTRKGSWTRAHWRWISGIRLEGPQRDVLEYYVTAARCAESDRRQLERKVLALARTDRWRPAVEALSCIKGIDTLTAFRLAAEAGSFTRFRTAPAFASWCGLVPSERSSGETERRGGITKTGNRLARTALVESAWHYLTCTPRPKAPAPGADVPAAIRARADDCTARLCRRREALAAAGKSSCKANAAVARELACWVWEIGRRAEGTLG

SEQ ID NO: 285186 - protein, 352 aa, unidentified
MKCDKYMGMDVHQATTVVCVLDAEGKTALETIVETQAASIIRLMQSLSGPMHVTFEETTQADWLYEVVRHYVSEVIVCDPRRNKLLSEGSKGDKVDARKLAELLRTGMVREVHHGDGTRQLKELVRGYETLCRDSQRTMARIKAIYRARGIRTPGRSVYQVKQREQWLAQLDEPGVRQRVGWLYEQLDHLRPLRRQAKQAMIQESRKYRGVQLLRTIPQLGPIRAALIVATLDTPHRFRTRHQLWSYSGLAVITHMSSEYELQQGRVVRSRKPIATRGLNRNCNRRMKDVFIGAATGGSQTEPYRSYLQSLQDKGIRKEMARLTLARKIAAVALRIWKKGETFDPKKLNWTT

SEQ ID NO: 285187 - protein, 411 aa, unidentified
MHNRQNYLYVGVDLHKEHHTAVMINCWQEKLGEIQFDNKPSAFSKFLLEVETYVCDGIIVVFGLEDVGGYGRALAKYLVDHEQVVKEVNPALSFLERKSQVMIQKNDSWDAECVARILVNKFNRLPDAKPNDLFWSIQQLVSRRNALVKAQSALKNQLHIQLNHHYPSYKKFFSELDGKTALAFWQQYPSPSCLEGANIKQLTAFLLDVSNNTCSVKKASEILKLVKEDGHTMKEYQETRDFLVRSIVRDIEFKKTEMKYIERELKQLVKLLDYQLETMPGIELVTASALIAEIGDVRRFPNANKLARFAGIAPVYFGSGGKGKTHKSKQGNRALHALFYNLAVQQVQVAKGSKLPRNPVFHAYYQKKLKEGKTKGQALVCIMRRLVNIVYGMMKYKTAYELPVVEEKEVV

SEQ ID NO: 285188 - protein, 315 aa, unidentified
MSQTLNVGIDVSKRQLDVAVHEQSGVRAFDNDARGIKQLVAHLTKLAPELVVLEATGGYELAAALALHDGQVPVAVVNPRQVRDFAKANNILAKTDRIDAGILAHFAGVIKPPQRGVPNAELLPLRELVTRRRQLVDMMVAERNRLEHASSQMAKDVKKHLSWLERQIAALDDKTSEALRESPLWQERSKLLRTFNGVGPGVTQTMCVHLPELGQLNGKQIAALVGVAPFNCDSGKYRGQRRIWGGRSVVRSALYMSALCCIRHNPVIGDFYRRLQAAGKPGKVALVACMRKILIILNAMVRDGKPWSPASVGAD

SEQ ID NO: 285189 - protein, 391 aa, unidentified
MEKAWAGVDAGKESHWAHVLDASGRELLSRKVENDEADIARLMDETLSLAEEIVWAVDQPGGSAALLLALLWERNQRVLYVAGLTVDRARDAYRGESKTDARDARVIADQGRMRPDLGELEAGEQEIAELRLLLARRRDLITDQSRTITRLREALLSLFPALERALDLNSKGPLSLLTHYQTPTHLRRAGHKRIATYLRNRGVKGSNKVADKALAAAKTQSVTLPAQDVAASIVAELAKDVLGFKQRVESIDEEIGQRFFARPEARILTSLPGMGPILGAEFLVVVGEICAFESADRLAAYAGLVPAARDSGKRVGKHRRMRGGNKTLKRVFYQSAFASLRSAPESRVFYDRKRAEGKRHTQALIALARRRVNVVWAMLRDGTTFESRSEA

SEQ ID NO: 285190 - protein, 347 aa, unidentified
MRFYTTQHPFYCGIDLHARTMYLCILDQGGEVLVHRNMKTDPDAFLKAIAPYRPGLVVAVECMFTWYWLADLCADQGLPFVLGHALSLKAIHGGKATNDKIDSQKIAALLRGGMLPQASVYPAQMRATRDLLRRRMHLTHKRAELLAHIQNTNSQYNLPAIGKKIAYKANRDGVAERFADAAVQKSIEVALALITYYDELLRDVELSLVQTARHHDAHTRYLLQTVPGIGKILSLVLLYEIHDIERFPRVQEFVSYCRLVKCRKESAGKRYGTSGTKIGQAHLKWAFSEAAVLFLRDHAAAQKYLARLEHKHGKGKALTVLAQKLARAVSYMRKRKVAFATETFFQR

SEQ ID NO: 285191 - protein, 341 aa, unidentified
MKSKFPVDRYFRQCVGVDISKNKFTACLCMLSWGCPAQSTEPIDFANTKTGFNQLVKWARREAEKGCTIFFLMECTGTYYEDLAYHLHKLSFTVYVMPTGRVNAFFKEEGIKTKTDAVDAFGLAMMGCAKPYLKPWSPPNPIYRELRQLTRLGVHLKDIRTMLVNHHEGLSHQYEPSAEALKQINATIKSIDTRIEKNQAAIEALVARNSDIKEKAGYIQSIKGFGFLAAVTLLAETDGFENINSRKQLASFSGLDVAARDSGNATPSRHISKKGNTHIRRILYICSMSATVYNTQIRAVYSRLSLQKPPKVARTAAMRKLLLLAYTLCKTKTMYDPTIRK

SEQ ID NO: 285192 - protein, 450 aa, unidentified
MLPRDGAVIGIDLADEKQALAVIDHDVRVLARKTVRVEAFRLGEAVDWAAGQARVKGFTSVTVACEPAGPRWLRVQRLCAERGLRLVCVQPLVTHIARQQQDYTARKTDEADCVMIARLAAELHCYIPEELDEVRADLRHLGRRRAVLITSQTASVQRIRDFLSVAWPAVTEACAQPFESMTWLAALQAVTSRCGGQPGKLAGTGLEAFTAMVRDALPGWGGQRIHGPVCKTVFAALTSTEGVVRGHRRGLLRRVAAGLGDLQRARAQRQETEAAMTAALGDLGLARLGEIPGLAATGAAAILAETGGPKRYDTSSSVARHAGLSPSDNASGAFDGEAHISRRGRPGLRLTVWRAVWPVLIHNPVMAAKYAAMTQAAGQAAGQARAGSSGHATSAAEAARRRRAKARVACAAALLRWIYSMVVHGTCGDPGVAAGRKDTLAAPSCQPEAA

SEQ ID NO: 285193 - protein, 409 aa, unidentified
MELLIARCAGLDVHQATVVATVRMPDEQGGRRSVTETFGTMTADLLALREWLQAYGVTHVALESTGVYWKPVYYLLEDAFTLLLINMQELKRVPGRKTDVKDSEWLAQLLECGLLKSSFVPPPVIRELRDLTRYRVQQVRDRAQEVNRLCKVLEDAGLKLTSVVTDVMGASGRAMLRALVDGTTDPAVLADLARGVLRKKLPALRRALHGRFRPHHAFLIEQIFAKVDFLDETLDRLTAEIDRRVAPFEPMLTALDTIPGVDRIGAISMVAETGGDMSRFPSAGHLCSWGAMCPGQNESAGKRRSGKTRKGNRYLRRTLIQAGLSATRKNGSALQARYHRVKRHRGHKKAVVAVGHQILEIAYYIMRDGVSYDELGADYFNRRHAERAVRRHVRQLEALGFHVTIEKAA

SEQ ID NO: 285194 - protein, 334 aa, unidentified
MKYALNMSLPVSPSGGVTAGLDWASADHVVAIVDATGAAIDRFTVEHTTTGLRELVRRLAKAGAREVAIERSNGPVVDTLLDAAITVVVISPNQLKNLRSRYGSAGNKDDRFDAYVLADTLRTDRARLRPLQPDSPATVTLRATVRARRDLVAHRVALCNQLRAHLQRVYPGVVGLFRDLDSPISLAFLARFDCQDRADWLSPKRLAAWLKSVGYCGRKDPAVLHAHLTTAPRGATGDEGIANAHTTRALLTVLTRIVDQIKVLSDQITEQLDLHADSQIFTSLPRSGTVRAARLLAEIGDCRSRFPDPESLICLAGVAPSTRQSGQHKAVTVR

SEQ ID NO: 285195 - protein, 353 aa, unidentified
MKCDKYMGMDVHQAMTVVAVLDADGKVILETMVPTVAASIIRLVQSLSGPLRVTFEETTQAAWLYEVMRTYVTEVIVCDPRRNKLLGEGSKADKVDARKLADLLRTGMLRSVYHGHEATRKLKELVRAYETLSIDTLRTMVRIKAIFRGRGIPTPGRGVYQPKQRERWLELLTEAGIHQRAAWLYEQLDQLRALRRKAKQIMLSESRRHRAVGLLKTIPQLGPIRAAFIVATVDTPHRFRTKRQFWSYVGLAVVTHMSSEYEMKAGRVVRRRKPIATRGLNQNCNRRLKEVFIAASTGGSRHKPYGPFLEKLKQNGMRAEMARLTLARKIAAIALRIWKKGETFDPKKLNWTT

SEQ ID NO: 285196 - protein, 391 aa, unidentified
MVCVGIDVAKDKHDCCILDSDGTVRADCFTIPNNMDGFKQLLQTIRDCTKKSDKIKVGLEATGHYSYNILGFLLDNGLPTYVINPLHTNLYRKSLSLRKTKTDRVDARTIATMLLSDVNLKSYTDIAYHNEDLKSLTRYRFDKVQERAKLKQSVSRLATILFPELEQLVSSIHGTSIYALLGEYPGAKQISEVHLTKLTNLLTTASKGRYGKEKAIQIREAARTSIGSVMPAKSLELKHTIKLIQELASEINEIEDSIQKIIDELNPPILSIPGMGVNSAAVILAEIGDFSNFSSPDKILAYAGCSPSTYQSGKLTNCYAHMEKRGSRYLRHALYNATKYVCYWNPVFAEYLAKKRAEGKHYNVALSHAMKKLVRLIYALQKSGKAYLASA

SEQ ID NO: 285197 - protein, 423 aa, unidentified
MKPSIEPSFTALVGIDWSDRKHDFCLQAAGSPQREFGVLVHSPEAITLWAKALYRRFGGPIAVCLEIAKGPLVHALQRHEFIVLFPVNPATLAKYREAFVPSRAKDDPTDAEIALELLLRHRDKLQTLQPQSADMRTLATLVEQRRLLVGDKTRITNRLSSTLKEYFPQALDWFDDRDTVLFCDFLQRWPSLKHAKRARQATLRSFFSAHNLRRAPLIEERIHGIRSATALTDDPAVLRPHQLLVQALVAQLRVTLQAIDHFDTEITVVAKHLPDYALFAALPGAGSILAPRLLVAFGEQRERYASAAQLQQYAGVAPVLERSGNKCWVHWRLACPTFLRQTFVEWAGSTIPRSFWASVYYQRQRAKGCSHQAAVRALAYKWIRILYRCWQTRTPYDESVYLLALKRRGSPLIAAMPTTPQNA

SEQ ID NO: 285198 - protein, 340 aa, unidentified
MNAEYDGRQIVGIDLHRRRSVIVQLSPDGERLGKARIDNDPFALAEQVAGWGESPEVVLEATYGWYWAVDVLQEAGARVHLAHPLGVKGFAYRRVKNDERDAADLADLLRMGRLPEAWIAPPAIRELRELVRHRAKLVALRSGLKAGVHAVLAKCGVHVPMSDLFGVGGRRLLDELALPDAYAGRVASLRRLLDGFGFEIDLYSKMLTARLAGHRGYRAVQAVDGVGPTFAAVFVAEIGDVHRFARAEQLCSWAGVTPLHRESDTKVHRGRITKQGSTLVRWAAVEAVQRVRGGPIGSARARIGEHRGPNIGKVAAARKLLTLVYYGLRDGHIRCLARPA

SEQ ID NO: 285199 - protein, 366 aa, unidentified
MEHIAIDLGARESQVCVRSEAGEIVEERRIATRPQTLRRYLEGRAKSRVIVETGAEAFWVAEIARECGHEVRVVPSMLAPSLGVGRRGQKSDQRDARVLSETPCRVEMPTVHIPSTETRRLQSRLGMREALVRSRTKLVNVTKAYLRTIGERAPIRSPGKLVVQLREKLAHAAQHLEPLLETIEGLNRSIEQFDEELEKLAASNELAQRLQTVPGVGVVTSLRYIATLDVASRFRNGAAVGSYVGLVPSEHSSGQSQRKGGITKAGSPSMRGVLVQAAWAAIRSRRHYNDPMMCWARGVAQRRGKKIAVVALARKLAGILFAMWRDGTQYNALRAAAPSAELPAPPRRLAPSRGPRRPLRLEPATV

SEQ ID NO: 285200 - protein, 416 aa, unidentified
MYYVGLDVHQNRSSLEILDCNGKLFKRQEVKGRWPVLLEELRHVPRPFAICYEASCGYGYLYEQFATLADRVTVAHPGELAWIYKSKRKHNRVDATKLAKLLFLDEVPAVHVPGRQVRQWRQTIEFRQKLLRSRVTTKNQIRAFLKERGIVPPKSLWSRKGQAWFKGLALDGDGGNDEGDALRRDLLVDQLQEADAKIKRVTTYLDGLAARHAGVALLRTIPGVGPRTAEALVAYVDDARRFANLRQVGAYFGLVPCQDASGDTNRLGHITRDGPGTVRKLLCEAAWAAVRRSPTAKAFFERVAGDDPDRKKIAIVATAHWLARVAVAMLKSGECWRERVRADDKGVPAASEAPGGGGETPSRPQGFSPPPVTAPAASGGPPPPPRSASPASPRGGRRQGRSMTTVKDTATRRRNN

SEQ ID NO: 285201 - protein, 416 aa, unidentified
MNAVGIDVSSRKSTVAVLRPLGEVVCLPFDVTHDIVGLASLAEKLKTIDGETRVVMEHTGRYYEAVAKALHEAGLFVCAVNPLLIKEYGANSLRRVKTDKADAIKIARYALDNWADLRDFTPMDAIRYDLKTLNRQFQLASKQRTASANNLIALLEQSFPGIRKCFDSPVRSDGTQKWVDFAHSFWHVDCVRKQPFAAFCERYRKWCKRHAYLFKLSNAEEVYALAKRAVVLTPKSKVVKVLVQEAANQLISISRSVEVYRAEMDRLAAMLPEYPVVMAMYGVGKSYGPQLMAEIGDVRRFERKQALVAFAGIDPMPNQSGDKNVRSNKSSKRGSPYLRKTLFNVIRTYLQCAPQDEPVFQFLNRKRAEGKPFYVYMLAAANKFLRRYYAKLRDYFASLDTLQPVAPIPTILKATL

SEQ ID NO: 285202 - protein, 345 aa, unidentified
MSMVSGVIGGVDTHADVHVAAALDENGRWLGVESFRVNGAGYRRLVEWLTSFGPVIRVGVEGTGSYGVGLARHLHDAGVEVVEVDRPNRQKRRRLGKSDPIDAEAAARAALSGEASVTPKRRDGTVEQIRVLMIARRSARMQRNQALNQLRQIVFCGPDEVRARFKDRYKAGLVTEAAAMRPRKGSDPVTYTTHVVMRGLARRIRDLDDEMRTIDDALTELIAETAPSLLACYGVGVVTAATLLVTAGDNPDRLHTERSWAHLCGVAPVPAGSGKTSGRVRLSYGGNRHANAALYQIVLTRMSSDPATRNYVRRRRAEGLSTREIMRCLKRYVARQTFKHLPRAA

SEQ ID NO: 285203 - protein, 349 aa, unidentified
MSISMIGLDTAKSVFQLHGVDESGKTVLRRKLQRSEVVSYFEKLPPCTVVLEACGAAHFWARTLIGLGHDAKLIAPEAVRPFVKKHKKNDPADAEGLVTAGNHKGTKFVPVKDTEQQGILSIHTARALLVKQQTMLSNSVRGLAAEFGHTAAKGTEKLAELASEVAADEMMPARARQAIVGLYDQFRALDEGIQTLEAEIVAHAKSNEKARILDAIPGVGPITASLVVATVSDWSVFKTARDFAAWIGLVPRQNGTGGKVRLGKITKAGNKLIRKLLVSGATSMVRRAEHWDSAMGRWTASLLKNGRPVRLVTVALANKVARVMWALMTHNDVYRPQGAVKPAAAVAAA

SEQ ID NO: 285204 - protein, 368 aa, unidentified
MSNIKFIGMDVHKKTITVAIADDGRNGQVRSYGTLANNINALDKFCRKMVSTASQLHFVYEAGPCGYGIYRHLTHKGFDCKVIAPSMIPRKSGDRIKTDRRDARMLARLHRAGELTAVYVPDDQDEAMRDLSRSREDAVIAARKAKQRLKAFLLRNGLTYSGRSQWSKAYFNWLADIGMPHPAQQVALQEYISSVHETLNRVDRLTEQIRQMVPDWRLAPIVSALQSARGISLITAVTLLTEIGDLSRFNKPAQLMAYLGLVPSEYSTGDAIKRGGITKTGNSHARKALIEASWAYRMQPRVSRILLKRQQGLPDRVCRIAWKAQLRLCARFRRLAAKGKNKQVVVTAIARELSAFLWAIAKQVQPIV

SEQ ID NO: 285205 - protein, 461 aa, unidentified
MAKKAKKVKTAKGAELRIVNPDAAGIDIADGIMQVCVPADRSKDNNRAFGAYTSDLHAISAWLRECGIKTVAMESTGVYWIPLFCRLQEDGMDVVLTNARDVKNITERKTDESDAEWLMLLHQYGLLKASFQPHNDAKRMRTLTRHRDTLSREASSIVLRMQKAMQQMNIKLTLVLSDITGKSGIRIIEAILAGERDPKKLADLADIQCKTPKEEIAKALEGNWEEDLLFVLRQNYDTFKHFCSQLDRCDTELEKLMENYRTEVAGTGRPSYSPTKKRRDYHKRKRNVGFDVERKAYDMWGVNVFEIPGISHLTALGLMSELGHDFTRKFPSSKQFCCWCNIAPNTKISGGKRISSHVPHRRNNVGLIFRSIASSLANAKNQLGNFYRRIRSRAGGKAAVIATAHKVAEIFFAMVANQTTYNPEKVGIDEKVLLEKRIARYKRELERITGMHIEIGNACVP

SEQ ID NO: 285206 - protein, 387 aa, unidentified
MPQVDDLSRSLATFDQDATLTVVVEMSLSSWLVAGMVPGVDRQPLKKLGPDPDALLRLVERWRDQAVKAGKRIERIALAFEAGRDGFWLARWLQARGIEVHVIHSTSVAVSREHRRAKTDRLDTAMLMRVFLGWLRGERGHCGMVAIPTLEDEDARRPSRERESLVGERTRIINRMKAILAWLGIRGFNPKLRKAPQRLDALRTPEDLPLPPNTVDELRRDMARLAMVCEQIKALEQARLAHLEQAPGTGPHAMVRLIANVIGVGIETADMLVQEVLSRNLRDRRAVARYAGLTGAPNESGSRRREKGLAKSGNARVRRGLIQLAWRFLRFQKDSALAQWYRVRTEGPAAARKTKMIVALARKLLIAFWRMVTVGEIPAGFALRQPA

SEQ ID NO: 285207 - protein, 347 aa, unidentified
MDQIIVGVDTHKSKHVAVAINTQGARLASLTIPTTSQGYRDLEHWAQALGSVQAFGIEGTGSFGAGLSRSLLAGGQTVIEVMRPNRQLRYLHGKSDSLDAEGAARSVLNGQATAIAKAQTGSAEMIRHLKIARDSAVKCRSQAMITLKTLIVNAPAQLRDSLDQVRGKIALVRHVAALRPGEMTTPNASIKTAMRALARRWISLHEEIEALEKNLENLVRDRAPELMEAHGISTMTVAEMLILVGDNPERIKSEAALAKLCGVCPIPASSGKTNRMRLNRGGNRQANAALYRVTIVRMRDHGPTKAYVAKRTLDGKGKREIIRCLKRYIVREIYRYLCVPHVAIGTA

SEQ ID NO: 285208 - protein, 349 aa, unidentified
MPKSNTAVVTIGIDPGKNTLHLIGLDARGGIVLREKVARARIVSRLANVPPCLIGIEAGMGTHYVTRELLALGHDVRQVPPVYAKPFRQTHKNDFRDAHAIAEAVQRPTTRCVPPKTEEQLDLQALHRVRYRLVGQRTAIINQIRCFLLEHGLTVRQRLHWLRHALPDILAQRTDVLSPRMVRILEDLAQDWRRLDDRIETVSGEIEALSKNTEPCRHLMTIPGIGPIISSAVVAAIGNGTAFTRGRDFAAWLGLVPKQISTGDRTILGRITKRGNRYLRMLFMQAARVVLLRPRNWMKNGYGPWLAAAAQRLHHNVLATALANKLARIAWSVLAQHRVYEARLSPAAV

SEQ ID NO: 285209 - protein, 428 aa, unidentified
MNPNDSTNTNDQTDPSAQPPQACIGLDWGDQKHSFALQARGGPIETGVLEHSAENLHRWLKELEQRFGGRPVRLGLETSRGAVIAALRHYPWLEIYPLNPVTSSRYRSAFKPSGAKDDLPDALVCLELARDHAAKLRPLQLQDPQTLKLAGLVEARRDLVDRRTTLLNQLTSLLKSYYPQALALLENLNTPMAVAFLKRWPDVISLKAARPAAVKNFFYQHNVRSEELVKKRLALMAQAVALTTEEARVSVAVLQLRALVDQLEVFQKHVARMDAEIKSAFAAHPDAALFRDLPGAGAQMGPRLCAAFGTDRAAYPDPASLQKYAGLAPVREKSGGQLWTHWRWNAPRFLRQSFVEWAGQTVRYCEWARVYYERMSQKGKKHAVILRALAFKWIRILWKCWQERMAYDDARYLKQLIQRKSPNAVTAP

SEQ ID NO: 285210 - protein, 419 aa, unidentified
MNKLFVGMDISLDDVKVHILDQDGNDACSRFSVDNNPSGCNILVSHILDCCNKYNVQKVFIGLESTSVYGWHIQYYLADHASLKPFNPSVTTFNANTVKAFKKSLGDLPKNDWVDAFVIAEKLRFGRLPKSCPVDFRYLALKRLTRHRFHIVDSIVREKNYFLSNLFLKFSGLCQIKVFSNNFGAAATEIFNEFLTLDDIAARPLEDLIAFLVDKGRDHFNDPNATAKLLQDAVRKSYRINANVNDSLNFVIKSCLNNIQYLEKQKKASEKTIANEVKGFKNQFLCLTSVNGIGPTIAAGLISEIGGISRFDNDNALAKFSGIYWSEYQSADFKAEDTYLKRTGNEYLRYYFIQAADQLRKYCPEFSQYYARKFNESKTHKHKRALVLTARKAVRLVFALLREEKLYKPPAMKGDDCKY

SEQ ID NO: 285211 - protein, 334 aa, unidentified
METLYFLGIDVSKKKLDTALTVDGKIFHEVQIENQSQSITTFFKDLKKQLSSWDRLVVCIEHTGIYGQPLLDVLVKNQIKVCVESALHIKRSQGLMRGKNDQVDAKRIAGYAFRHKENLVFWKPQRHCIQKIKALLVTRERLVMTKVQLEVPTKECSEFIDSSIRKEMIKHSQHSINAIQKDIDRIELAIHHLINTDERLADNCELSTSVPGIGKITALNMIVSTGEFERIREPKKFSCYSGVAPFEHTSGSSIRGKTRVSKMANMTMKRLLHLAAMAAVRSDGELKSYYQRKVAAGKNKMSVLNAVRNKLISRVFACVSTGRRYQKIYQHQLA

SEQ ID NO: 285212 - protein, 353 aa, unidentified
MKYVGLDWAYRTAQWCALAPGGEIAGEGRIAADRDGLARLVLELGDEVTACLEMMSGALWVRDQLVDCGWQVEVADARKVKTVAPLAAKTDKVDARLLAELCRRELVPALWLPSLDERALRERLRRRMHLVRLRTSAKGRIFGLQTQWGVRVSLARLRRADGLTLLERAGVPEVWRRSVGECLALIDFLDARLEPLDAELRPFAKADPRAVLLDTIPGIAELLALTIAVEVGEISRFASPEKLVSYGRLAPRVRQSGQARPRSGPLSKSGSRLLGWAAVEAAQQAWRESNPWHGLYVDVSARSGNRNSAKAAVARKILIAVWHMLSRNEPFNPAPRSTRGDSVPASSRLALAA

SEQ ID NO: 285213 - protein, 438 aa, unidentified
MAQRKQKKSQSKSSLPPPLATVNLHAAGIDVGADTHDVAVPPPDDPQPVRCFGACTADLEALADWLAACGVTTVALEATGVYGIPLFELLETRGFEVLLVDPQQVHRLKGRPKSAVHDCQWLQRLPTFGLLAGAFRPADQVCGLRSYLRQRAMLLTYAGQHIQHRQKALTQMNIKLQHGVSEITGVTGMAMIRAILAGERNPVKLAQLRDDRGHQDQEAIATAWRGQWREEHLLALAQAVALYDVYHQKIAECDLQIEAHVATFADKSNGQAPPSGPRPRTRKRNPPAFEVQGQLHRITGVDLTAIEGIDDTTALIIVSEIGLDMGRWPTVKHFTSWLGVCPHQQVSGGQVRSRGTKPSANRVATALRLAASCLHHSRSALGAFFRRMNARLGTPKAITATAHTLARFVYTMLKYGTAYVAQGMDEDEQRDRTRVVAH

SEQ ID NO: 285214 - protein, 437 aa, unidentified
MGNCAGVDWAGEKHDVRVCDEAGEELLAASFVHDEKGLRALCRTLLRLKVELVAIERPDGLLVERLLDAGLRVLPMHPKQVAASRARFRAAGGKSDRFDAFVICELARTDSHRFRVLEPDSDQTKALRALTRTREDLVHARVALSSQLRAELERFWPGPIGLFTKLDSPISLAFLERYPSPADARGLGAQRLAGFLTRQHYSGGQKPAELLAKLRRAPEGRVGDAEMIARRAIVLALVAAITPLVDQIKQLTEQIATALREHPDGEIFLSLFRDPRSVVTAAELLAEIGDCRARYPTRDALAADAGQAAVAVKSGKRKTANFPWGCNKRLRGAFCTLADSTRHWHPWAQDRYAAARARGHEHPRALRTVGRAWSRIVWRCWQDRTPYDPARHRALQQHIAVTIPTPSGPRPDLAATQRMADEAVTETAGPQGRARSV

SEQ ID NO: 285215 - protein, 346 aa, unidentified
MLHVGLDLSRHRLDYQALAEDGLAVDAGAAPPDADGLRGLADRLADRGEPIRAAIESMNGARFVHDQLELAGWEVQIADALKIKGLAPLACKTDRIDASVLAELSRRDLVPAIWLPDPEVRAERERARWRLHLVRHRSRLKHRVHSTLLAWGRPCPVSDLFGARGRELLARLEVPEPWRANLELAVEMIDSLDREIDAIERGLRRLGAEHRYAALLTTIPGVAWVLGYTIAAEIGEIDRFGSPRKLAGYTGLCPRVHQSGERDRRGPLSKQGPKYLRWALMEAALHACRYPPYAERHARTKRRLGKQRGPKVAQIEIARKLAEAIWHMLTRNQPFAPAGAAPALAA

SEQ ID NO: 285216 - protein, 411 aa, unidentified
MNAVGIDVSKGKSTVAILRPMGEVVQTPIDVSHDAVSLERLAYQILSLGENTRVVMEATGRYHEPVAMELHDRGIFVSVVNPLVIHGYCSGGTVRKVKNDQKDSLKIAKFALDHWVDLREYTPMDAVRQQLKIFSRQYNLYMKSRVALQSNLIALTDKVFPGVNEIFTSPERSDGHLKWVDFVTTFWHCECISLVSENAFTERYKKWCKRMGYKFSAAKASDIYIDSLGHIVTLPKNNNTKLLIQTAAKELTAMNELLAVVKAEMVRLAKELPEYETVHAMFGVGDVTAAQLMAEIGDIRNYPRRSSLVGFAGIDPEVNQSGKMNSESNPSTKRGSPHLRKTLFQLMTVYLRLSPADEAVYQFLDKKRAEGKPYYVYMTTGANKFLRIYYARVKECMAKLETPVETAEENG

SEQ ID NO: 285217 - protein, 342 aa, unidentified
MKITTIGIDLAKDVFQVHGVDQRGNPVVVRRLKRKQVLAFFAKLTPCLVGMEACGGAHYWARKLQTQGHTVKLMAPQFVKPYVKANKTDAADAEAICEAVTRPNMRFVPIKNADQQSVLSLHRARQGFVRARTAQANQIRGLLAEYGITLPQGIGHVTKRLPEIVEDAENGLPGVFRELLTRLGTHLRGLDRQVQELEEQIHAWHRANEDSQKLAKIPGIGPLTASALIASIGDAKNFNNGRELAAWLGLVPRQHSSGGKVLLQGISKRGDAYLRTLMIHGARSVIRVAQNKTTPTDRWSTEMLGRRHKNVAAVARANKNARVVWALLAHGRDYTADYGLAV

SEQ ID NO: 285218 - protein, 385 aa, unidentified
MFLRGVFYTLENDPAAGEFDTPLAFEAVGEWEPPPRCPPRSPNSHRGAPRIDQDGIATVGLTGGLGMSTERFVGIDVSKDHLDVAIRPEGTNTRVPNTDEGFEQLVALLRPLTPTLIVLEATGGYQRRVVAALSLGALPVAVVNPARSREFAKATGRLVKTDAVDAAILAEFAERLRPPTRELPDAETQKMQALLARRGQLIGMRTMERNRLATAVDRTVRRSLEDHLAWLQKQIDATEQDLDEAIEASVVWKAKDELLQSIKGIGPGVARTLLFELPELGRLSREQIGALAGLAPMNRDSGRWSGKRFIAGGRAVVRTAVYMATHAARKWNPALKAFADRLTAAGKPPKVVLIAVARKLLVIANAVLRDQKPWRDLTENQPAVA

SEQ ID NO: 285219 - protein, 402 aa, unidentified
MNAVGIDVSKGKSMVAIMRPFGEIVSTPFEIKHTSSDINSLVKLIKSIGGESRIVMEHTGRYYEVLAHQLSEANLFVSAINPKLIKDFDNDSLRKVKTDKADSVKIARYALDKWQNLKQYSVMDELRNQLKTMNRQFGFYMKHKTAMKNNLIGILDQTYPGVNTYFDSPARSDGSQKWVDFASTYWHVDCVRKMSINAFIDHYENWCKRKKYNFSKSKAEEIYGKAKELVPVLPKDDITKLIIKQAVDQLNSASITVESLRTLMNETASKLPEYPVVMAMKGVGTSLGPQLMAEIGDVSRFTHKGAITAFAGVDPGVNESGSYEQKSVPTSKRGSSDLRKTLFQVMDVLIKTHPQDDPVYQFLDKKRAQKKPYYVYMTAGANKFLRIYYGRVKEYLASLPES

SEQ ID NO: 285220 - protein, 321 aa, unidentified
MTSQTESPRFGIDVSKRWLDIAEYGRSPVLHIDNTAPAIRSWLRTLPPSACHIACESTGTYHRALVELLIGAGHRVYLIDGYTLSRYRDTLGQRAKTDRHDAGLIARYLAHEGARLRPFSLPPRAVTDLRALLRRRATLVRCLGRMRQSMEELPGFARQVRAVTERIQALIKRLEQRIAALIGTSGWGDPYRRILKVEGIGALTAAGLCATFHRAAFGRADAFIAFLGLDVTVRQSGTQRARGVLSKKGDAEMRRLLYNAAMAASRSSTWQPFYQRMLQRGFSRTQALVALARKLARIAFSLMKNASDYVPKQHENACART

SEQ ID NO: 285221 - protein, 457 aa, unidentified
MYGPFIVASSTRIRFAVSLQLPRATAPSLLRRVEVVRVQVAQDDQEIIARVAALDIGKAEVVCCVRVPGQGPRARRMQEVRTYTTMTRSLLAMADWLTGLGVTRVVMEATSDYWKPPFYLLENTFETWLVNARDVKHLPGRPKTDRLDAVWLCKVAERQMLRPSFVPPPAFRELRDLTRYRVDLITTRTSEKQRVEKLLEDAQIKLSVVASDIFGVSGRAMMAALVAGERDPKVLADLARGSMRGKTARLEEAFTGRFTDHHAFLLRTMLARVDGIDADVDRVQGRIDEQIAPFAAAVTRLDEIPGIGVTTAQVIIAEVGLDMTRFPTPDHLASWARFAPGISESAGRKKGGSATGKGNRYLARALGEAAVGAGRTKTFLGERYRRIAKRRGKKRAIVAVGRSILMIVWELLNDEEKRFVDLGPGYYDSRVNRNRSTRNHVRELQALGYKVTLEPAA

SEQ ID NO: 285222 - protein, 352 aa, unidentified
MKILALDLGNFKSVACDYNTETTQHEFETFVSAKDVVRKLFCQRQPDRVVIEVCPLAGWVCDLARELGIEIQVAGVNEQVSKWRNVKRKSDRRDALKLAHQTALADLKLVHVPERGVRQWRSLINYRQQLVRRQTKIKNHLRALLLRENVSWAKGKKGWTEEHREMLLEAALPLSEVAPEELWRGELWVELEALKATRRLLQEVTKKLDQIGKANHQVQLLQSASGVGPRLAEALVAQFDDLKRLKRGKDVGAYLGLVPKQWQSGETERLGHITRQGSRVIRALLVEASWSGLRYNPWIREVYKRVHRGSKARRKIAIVAVARRLAIRCWAMLRDDTPWRETSPFALANTVS

SEQ ID NO: 285223 - protein, 378 aa, unidentified
MVQNAMSAPSAPVQAMAQAVTQYVGLDVGDQHSHLCVLNAAGDILEESRVRTTPGALRARVTAMPRARIVLETGTHSAWISRLLAAPGHEVIVANARKLALITANDSKDDRTDAETLARLGRADPALLAPIQHRRAETQADLAVVRAREALVRTRTVLVNHVRGAVKAVGGGRLPACSTASFARVVAPVIPEALRPALVPVLATIATLSTTIAGYDRVMAQLGERRYPATAQLRQVAGVGPLTALCYVLTLEDPARFRTSRVVGSYLGLRPRRADSGTRTTQLGITKAGDGLLRRLLVSSAQYILGPFGPDSDLRRWGETLAARGGKNAKKRAVVAVARKLAVLLHRLWATGLVYEPLHDTHRRTPPTPVHEPAAVVA

SEQ ID NO: 285224 - protein, 348 aa, unidentified
MALTIVEDTRAVTGGAGTHADMHVGAALDPVGGLLGVGEFPATAAGYARLLGWLGGFGTVCLAGIEGTGSYGAGLARHVTAAGIRVVEVDRSDRQDRRRQGKSDPLDAVSAARAAQSGRARGAPKGRDGAVEAIRALMVAKRSARSERTQTINQARALIVTGPDDLRARFARHTAAGLVSELAALRPRPGATVGYATRIALRELGRRAEFLDGQLGRLDELIVPLVTARAPALLALHGVGPDTAALLLIAAGDHPHRLRSEAAWAHLCAVAPIPASSGKRTRHRLNPGGNREASHALWRIVITRMSSHAPTRAYVERRTKEGLSKKEIIRCLKRYAARQVYRHLRPAG

SEQ ID NO: 285225 - protein, 357 aa, unidentified
MGKSIIDLSSVTRVGLDLAKRVFRIHAVDATGSVVIARSVNRRTLLKFFDALPRCLVAMEACSSAHHWGRQLLELGFAVRLIPPAHVKPYIRRNKNDAADAAAICEAAGRPGQRFVPVRSVENQAALMRHRARELMVGQRTAALNALRGHLSEIGVVAAQGVQNAYALKRLACDGVDDDGEIVVPDCVRLALAPLVRQIDALDEAIAAIDKELEASASTDETARRLMTIPGIGPITASALLATVQDFAAFSSGREFAAFLGLTPREHSSGGKPRLGRITKMGDRYLRKLLVVGACSALGARKGHNDALRRWASGMLERKTVKYKFKLTAVALANKLARIVYALATKGGHYDDHPAAA

SEQ ID NO: 285226 - protein, 359 aa, unidentified
MEAQRKALSFKGQNIYIGIDVHLKSWSVTLMSEATQLKRFSQSPDPDALYAHLVRNYPEAEYHSVYEAGFCGFWIHYRLVGLGIHNIVVNPADVPTTTSEKLRKTDAVDSAKLARSLRAGELKGIYVPGSESLETRSLIRLRDSITKDQTRLKNRIKSHLRYLGIEIPEEFSGPGRCWNRHFVVWLKGAETGTAYGRQTLDFLVRQYEALRGQRLEMLRAVMALSRTERFEKPLENLMTVPGIGQLTGMSLLSEIDDIRRFKSADQLAAFIGMIPMCHSSGEREGVGDITVRRSARLRSVLVEASWVAVRQDPALSMAYGNYCKRMAPGKAIIKIARKLVNRIYFVMKRNQPYVKCVVA

SEQ ID NO: 285227 - protein, 422 aa, unidentified
MLAESHDEEQIIARVAALDIAKAELVCCVRVPSPAGGKRRLQEVATYSTMTQALTELANRLVEMRVQRVVMEATSSYWKPVFYLLEAHGLDPWLVNARDVKHLPGRPKTDVLDAVWLCKVAERQMLRPSFVPPWPIRRLRDLTRYRTDLVAARTAEKNRVEKLLEDACIKLSVVASDIFGVSGRAMLAALVAGERDPKVLAQLARARMRGKIDRLEQAFDGHFDDHHRFLLSRMLARIEGLDADIAAVDAQIDVQLAPFAEAAARLDEIPGIGPVAAAAIIAEIGVDMSRFPTAGHLCSWAKFAPGINSSAGKSKGSASSGHGNPYLARILGEAAVGTTKTNTFLAARYRRIARRRGQPRAVVAIGRSILVIIWHLLHDPDTRYHDLGADHYTRHVDPTAKKRSHIRQLEALGYTVTLTPAA

SEQ ID NO: 285228 - protein, 351 aa, unidentified
MRQYIAFDSHKHYTLAEREGAANHATHQSRIEHKPGAIRNYLTKCEPGTKVVVEATANWYWIVEEIEQAGLVPVLAHPRKAKMMMGMINKTDSLDVHGLNVLQRNRTLPTVWIPPGPLRDLRELTRGRLALGRDRTRLKNCIHAMLDKYGLRVTGYSDIFGKRARPELESLITRIPPHGRFMTTQKLEHLDYVCRQIQEVETRIAELAEATPEIVLLQTLPGIGPILGTAAALEIGDVHRFPTHEHLAAYSGTVPRIHASGGKVRYGKLRPDVNHYLKWAFIEAANSIAVNYNLWPDRFVCQRYMNVRRRKCHAVAVGAVARHLAEAAWYVLMHQQSYRDPNVVRGQAVEA

SEQ ID NO: 285229 - protein, 370 aa, unidentified
MLLLLNRYTIDNALSFFFNCKFCMVSKRLSLRVMLNVQGEKQMKHVIGIDVSKDKLDCMWLIDAQNNKKRPRIVPNSPTGFELLEKWFQKDIDVELENILVIVEATSIYHEPLIYALYEKGVQISVVNPAYVRDFAKSYGVHNKTDKKDSMMLARYAVSNPPKLRLWQPEPPEVRELKALLARLSALKKDIQREENRLEKSTITAVSNDVMASIKQVYSLLKEAYKDLEEKINQHIDNHPTLKNNRELLQSIPGVGDVLSREMLAIIASRDFQQASEVSAFLGLVPKQKSSGKQTWQTPITKKGAGRIRAILYMAAIVATQYNPDIKAQYERLLEAGKAKKQAICAGMRKLVQICFGVIKHQNKYQRQTV

SEQ ID NO: 285230 - protein, 411 aa, unidentified
MELMVERCAGLDVGKDEVVACVRTPGSGKKRRQEIRTFLTFTAHLEALADWLEAEGVTQVVMEATGQYWKPIWYVLEERGFELLLVNARHVKILPGRKTDVGDAAWLAELLEHGLLRASFVPPAAIRELRDLTRYRKRMIQAHTSETQRIHKTLEDAGIKLDSVASDVLGVSGRAMLHALVAGERDPGRLAELARGVLRKKIPELREALHGRFRDHHALLIRLCLEHAEHLEAATAELDSRIDEVIAPFARVRDHLVTITGIAQRAAECILAEIGTDMSRFPTAAHLASWAGMCPGNNITGGKRHSGKTQPGNKWLRDILTQCAWAAARTRDNYLAAQFWRLARRIGKKKAAIAVGHSILVICWHLITNDCDYADLGGDYFTRRNEAHRQDHLVRQLQQLGYQVTLRRIAA

SEQ ID NO: 285231 - protein, 367 aa, unidentified
MSIYFGVDFHARQQFIKWCDTSDGEVHEQQLFHHALEEVREFYTRFQGEVIVGLEASGYSSWFETMLQQIGHQVWVGNPTEIRRRARSRQKTDRRDAELLLELLLKDEFPRLHRLTPASLEVLRQLRYRHRLVQMRTRIYNALQAIALSAGVSLKAKLRTNKGQQRLCQLSLTPACAQQRQEWLSLLSELNRRIAQVEQELEPLAAADPRVQRVRTHPGVGLLTGLALVHTLCPVSRFSNSRKVTAYIGLEPREYSSGERQRFGGISKAGSRLLRFLLVEAGHKAIAKDQHLKKLYHRLLHRRERAKAKVAVARHVLVHSYILLRDEIDYAEFLRRGVAVRSARVGHRLSMPDKLIERSASGQQQSA

SEQ ID NO: 285232 - protein, 482 aa, unidentified
MKKRNIFQNRSQQLLQLFEKAGNRLKMMCVPIDYAKKDHIVMFCNGYGDILRKPFSVKNTLEGVKYLIDQVMRSCRQRHIKKEYVFFGGEDVNSYAENFANALRTKGFLVANVNAHDAKKQRETLQASTDRIDLMGIATMLLNLRAKCSPAQDGIYRNLRTLVRHRKKLVVMKTEVKNRVHTLVDRLFPGFLNEKNTGINPFSESSLALMQDRFSAQQIRRRQQRTLIKILKRCATPNAESLAAKLHSYASQVITTPEEYAATLQLSLQHHIKHYRCLQENIDQLLSEIALLLAQTQAVFLTSIKGVGIVLAAGVSSEIGNPFVQKPLNNLTSYSGIIPRVKQSGGIEGHTHTGRVSKRSNHLLKDYVVQSAFQMGLRGPQPLLQDYKRRDAAGQHADFGIGRRFLRMAMCLMRSSQVYLPPKLRSPKIQMQERAGYYLTAWPLLRDKWKKAHAHQVAFAMDQPLGQWRQMVQELYDIKLKL

SEQ ID NO: 285233 - protein, 343 aa, unidentified
MPHYVGLDVSQKTTAICVVDAQGKRLWRGVCATDPGPISARISQHAGVDAKVGIETGSMTPWLVHGLRAAGLDVACLDARRVKAALQMQLNKTDENDAEGLAQIMRTGWYRAVHVKSLDAHRARALLGARAQLVGMTTRLSNMIRGVLKTFGLLPGAGRGLRFDRKVEALLESAPEIALVVRPLLATWRQLREQIAVFDKAVLQQVRADPICRLLMTVPGIGALSSLMYVSTVENPSRFSRSRAVGAHLGLTPRRYQSGETDRSGHISRCGDGLARTLMYEAATVILHRVKRPLHLKDWAEAIERRSGSGKARVALARKLSVILHSVWRSGEPFRWAAPAMAA

SEQ ID NO: 285234 - protein, 342 aa, unidentified
MDHYAGIDVSLEYSSVCVVNASGKIVREGKVLSEPDALINWFGSLGLELSRIGLEAGPLSQWLYAAMTQAGLVVELLETRHVRDAFKAMPVKSDRNDARGIAQLMRLGWFRPVHCKSMSAQETRAVLTSRKLVQSKLQDVENHLRGILRGFGLKVGKTTNPSFGRRILELVADHASLMTIAKSLLAVHAVLLREFKAFEKQVRSMARQDAKARLLMSTPSVGPIVALTYASAIDDPGRFKSSKLVGAHFGLTPKKYQSGETDYTGRISKIGDASVRTVLYEAAHVILTKPVKGAPGLKSWGMRLARRAGMQKAKVALARRLAVIMHRMLADRKPFDFAAAAV

SEQ ID NO: 285235 - protein, 343 aa, unidentified
MKKITTIGLDLAKSVFQVHGIAEDGRVVVRRALRRSQVLDFFLNLEPCLVGIEACASAHHWANEIGVFGHTVRMMPAAYVKAYVKRNKTDAADAEAICEAVMRPTMRFVPIRAPDEQAAGMALKTRELFVRQRTQTANAMRAHMAELGIIAATGMTSVTKLIAILRDENEARLPSAAWAALLEMAEQIERLTGRIEALDTKIVAAVKGDDTARRLTSIPGVGPIIAATVRATIQDPGAFPTGRDLAAWIGITPRAHSSGGKERLGRISKQGNKQLRTLLIVGATSILKQARRGVKLPAWVVSLLARRPYKIAAVALANKMARTIWALLVKGGVYQAPSIMARV

SEQ ID NO: 285236 - protein, 353 aa, unidentified
MIVLGADMHKRSHTIAAVAAVSGELLGDKTIPVGDRGFSAALDWAYGLEDDRVWALEDCRHVSGAFERFLLVHGERVVRVATRLMAGERRGGRDRGKSDRIDAVAVARATLREGVDRLPVAELAGVELDIRLLVDHRERLVRMRAALYNDLLWHLHDLWPEQSLPGCALLSKKWTTRIGRRLARAEQTARVRIARDELRHLHELTHTINALEAEIAELVAQAAPQLLAEPGFGPLTAGKLIGEIAGAQRFANDAKLARAGGIAPIPISSGKTNRHRLDRGGNRQINTAIHRVAITRARCHSETKAYIARKRAEGKTNRDAIRCLKRHLARRIWHLLQPPTPAPTTPRTINLLT

SEQ ID NO: 285237 - protein, 335 aa, unidentified
MTRFNYYIGIDVSKLTLDISILCGNSNSTKTVYYKIENNKKSIAQFVKKMLDKYDLSQILFCFEDTGIYSLPLSYYLNDNKLSYWKVPSLEIKRSKGISRGKDDKIDSKDIAFYAYTHLHKFRPSSVPPKSIQQLKLLFAEREKAMKSLSSFKKTSENKEFMTEDVFNVVASVNALIIKELEQAVKFIEEKMLAIIELEDTLYQQYNLVTSIPGIGKQTAIYILIATKGFEMFDNWRQLACYSGVAPFPYQSGTSIRGRNKVHPLADKKLKTLLNMCAIVAIRHDKELKGYYERKVAEGKSKMLVINNVRCKLLARIFAVINRKSIFINTYKFAS

SEQ ID NO: 285238 - protein, 437 aa, unidentified
MNKFNPTTAKVSTTSALGTIQTAQSALDKYAAYIGLDTHKDSIVVAIALPGRAHAYIDSELANNEKNISKLIHRLSKQFAGQLLLFCYEAGPCGYGIQRQIMASGHDCEVIAPSKIPKKPGEKVKTDRIDARKLAQYLRSGDLTAIWIPDHEQEAMRDLTRARSDMKSQELKARQQLNAFVLRHGHSWPSNKTRWTKSHYNWLESLKFNHDWLQVVLQEYIDAVKAASGRVTDITGQMERVLPQWSMAPVVDSLIALRGIDKLAAMVLLAELGDISRFDSPKQLMAYLGLVPSEHTTGSKRRQGSITRTGNSHARRMLVESAWSYRFPARQTMHLKRKAIKASDKAKTIAWRAQKRLCGRYTTLIQAGKNTKQTTVAIARELIGFIWDIVCHEMPKVKMVAENLCFRYKLDNVLGQLVGFNGTESHPIHGIRFANVV

SEQ ID NO: 285239 - protein, 381 aa, unidentified
MTTPATCHVPESTTAGTLFVAFELSEKTWKLGFTIGHGHKPRERTVTARQQERVLDEIAQAKRRLGLPDTAPVVSCYEAGREGFWLHRFLQAHGITNQVVDSSAIEVNRRRRRAKSDGLDVHKLLSMLMRSHHGEHQVWQVVKVPSVEAEDQRHLHRDLETLKQERASTTTRIQGLLSSQGLRVTSLTQLPEQLDALRLWDGSPIPPGLRRRVLRVYAHHTFLSEQIAALEAERRAQLHASTDARIDQVRQLMLLKGIGINGAWLLVMEFFGWRQLKNRREVGGLAGFTPTPYQSGASTREQGITKAGNRHVRWITTELAWSWLRFQPDSALRVWFRERFGSGGKRLRRIGIIAVARKLLIALWRFLETGVIPAGAVLKEG

SEQ ID NO: 285240 - protein, 316 aa, unidentified
MSKYQNFIGIDIGKFNFVVGLHTNKKSQEYENNPKGIKAFLKDFKHELPSSLVVLETTGGYEMKLLLTLCDKLYTVHRANTRKVKSFIRSFGNVAKTDALDAKALAQYGYERQDQLDLYAPPPEEFVTLYELVQRRKDLKQMLVAEKNRIKAPKASSYIKESCAFVIKTLTEHIKQLSREIEELIEANTTLKKRQNILVTIPGIGKGVSESLLALMPELGTLTRKQVASLAGVAPRANDSGKFKGYRHTGAGRDIIKPALFLAAMAARRSHSPLKAFYEKLIANGKKKMVALTALMRKIIVIANAKLKSLDLELPT

SEQ ID NO: 285241 - protein, 367 aa, unidentified
MSNYVTAIGLDVHARSISACAFDPMTGEVSRARFGYDPASVAEWALGFESPKAVYESGPTGFHLCRALRAPGVDRAVGAVSKMHRPAADRGRKNDRRDAEWLARLLACRNVVEVWVPDERTEAARDLSRALEDARDDLQRARQRMSKFLLRHGLVFDETTPTGRRRSNWTEAYWRWARSIEFDEADDAAAYERYTGAVDRCGEAKRELERRVVEAASRPEWAPTVDALRPVKGVDVAAAFLLAAEAGDFSRFPSAPSFAAWCGLAPSERSSGETESRGGITRAGNSHVRRALVEASWHVPMSTRRPKKPRPGHGVAPAASRHAAKCNRRLRDRRDAMSQAGKRPCVANCATAREMACWVWAIAPMVR

SEQ ID NO: 285242 - protein, 345 aa, unidentified
MQNYTVLAIDLAKHVFQVVKTTGYGKAVFNKKMNRAELKELLRREPKAMVVMEACGGSHYWCRLAESFGHQVKALPARQVKPFRQGQKTDANDAVAIAIAARQPHLKPARVLSEEEQGLQCIEKMRELQIAHKTALSNQLRGLLFEFGIVMSKSDAALKKALPEILEDAENGLPGGFRTVLAQMWALYLTISSELEKLSQFQHQLTLQDEQSRALSALEGVGPVGALGLKLAIGNGVHFKNGRQAAACIGVTPVQHSSGGKENIGSISKLSGHKKLRSVLIQGAMAVLRHLATREARNTKEQWLKALVQRRGTRIAAVALANKTVRTAWAMLSRQQEYQAPGLLA

SEQ ID NO: 285243 - protein, 367 aa, unidentified
MNEEYVGLDVHSKKTVYVIQDSDGEVTAEGAIPTHRDGIRSMVEKHALKLGTRVCMESGTQAPVVCDALVERGLVPVVVDANEVRKKARRTGQKTDRRDAFEICDGLRRGIWDAIVYVPLPAIRRLRGILSRRRHFVRLSTQQINAGRFLFRTECLSAEAPACLTTAGGWKKAIASEQTSLIREHLRLHSKTWALANEHIALLEKELRVALEPVKDIMDWLTSVPGVGLITAASFIAIVGDPTRFRDSNHVVSYLGLAPSMYDSGDTERHGHITKAGPPQMRALLCEVAQQTAKRTHPLNPYFVRVAAKSGYKKAAIAIAQRLARIMYRMWLNAERFDVSKLNVERDGTARTKIYDWKIKKPVLEVA

SEQ ID NO: 285244 - protein, 395 aa, unidentified
MFIVGIDIAKRSHEAIIIAEDGQVVRKAFSFRNNCTGYNLLLEQVRRLTLVKSQIVFAMESTAHYWLALYARLLKDGYTVMVLNPIRSHSLRELYIRKAKTDARDSLIIADLVRFGRCKASNVPQDKILALRELCRSRAYLVDMAADLKRKLIALLDRIFPEYESLFESVFSKASIAVLCKYSTPQKVKNANLRKLTDLLMESSNGHFGEWKAHQLKEAACSSFGIDDSGGVYSTLLGMFLEQILSLTAQADSLEKQISVFFQEFNNPLTSIPGVGTVLAATILSEIGDITRFSSADKLLAYAGLDPSVKQSGEFKSNQNRMSKRGSPYLRRAIWLASTVAVHRDPMFQTYYEKKISEGLHYMNVIGHVSRKMTAVIFAVLRDGQPYQPILQSAG

SEQ ID NO: 285245 - protein, 335 aa, unidentified
MYYAGLDVHKKTISVMIKDQLGNVQEKTKIKSKRDDIIKWVKNAPYPLSVVLEATLFTGWIYDILIHYVDKVTVANPIMLSYISKAKNKNDKIDANKLCDLLRVNMIPETYMLPPKVRQVRELLRYRNWLLAQCTRFKNKINGELMMNGHEFNKKKLHNKGYFQELLDSLETDKNVLEILNMSRHQLELLKQLERRVKRLIYTHPEVTERVELLTTIPGVGEITALTWTLEVWEPTRFSNYKKAISYCGLCAGQDQSGEKTKRGPLSKQRNKRLQWVLIEAAKVAVHRIKDPTLVSIYQKTAAKKNNNAATVAVARHLVKWLMAVDKRGTPFVAA

SEQ ID NO: 285246 - protein, 400 aa, unidentified
MISVGIDVSKGKSTVAIFKPFGEIVTKPFDVKHDKAELCSLIAMLKHFNDEVRVTMESTGIYHWPILQTLLANDIFTVVVNPYVMKLYRKQSIRKGKTDKLDAMAIAQYGLDHWVNLESFESTQPIYDELKLLGRRYRHYMRMHIDSLQELTHILDMTMPGIKKAFAGWQERSGRNKVADFAAEFWHYDNITKMSESQFVKKYETWNKEKGYRMSEAKAVEVYALARNSIPTLPAGYASTKLMVQEAVRVLKNVDATLYKILTQMQELAKGLPEYAVVRSMGGVGDVLAPKLIAEIGDVRRFHSGKALIAYAGLDAPPYQSGGFTGTERHISKRGSSNLRKIGYEVMRCLKCHSAPIDSKVHDFIIKKEIEGKNKTVAKIAGLNKFLRIYYARVKEVYGV

SEQ ID NO: 285247 - protein, 344 aa, unidentified
MSKNVRNLGKFLNEKTLLVTADVGKYSNYCYARRPKGEELEPFEFHNTGSGFIMVYGIIKLFRKKHNLDRIVFGIESTGNYGEPLIHYMVNRGIQMVQVNPLHTKKVKEMRGNSPNKNDKKDPKVIADIIALHNGLTIVIPRGAAAELDRLVHLREILLEDKKRAYNQLESAIVPIFPEFLHIFKDLQIKTVEHLLKYYPLPESIIKLGLEDLIKILHTVSRGRIGRKRAEKFYEAALSSAGIKEGIEGTLLMIKNLYDKINLLDRQLSQVEESIGIKLSEVPYSRFIMSIKGIGPIITAAIIGEVADLRKYDCAQQLHKLAGINLYEISSDYVEKVDGNKIAA

SEQ ID NO: 285248 - protein, 377 aa, unidentified
MSTTLTTVCLMVMAIEIASAKWVVASTAGGDRKIRRKVLSQARIEDRFAALLVEIGEARSKLGVVAPDARVVVGYEAGHEGFWLFRALRERGVETEVIDPVSLQVDRRSKRAKTDRLDAEALTMALWRYVNGDKRALRMLRVPSEEAEDAREWQRERDRLMRERRACTDRIIKKLRTHGIWDLPPKWRTDLREGHLRTFAGKPLGASLHHAMTVELTRLELAESKLKELTAKLRELDPASADRIDRLQGLRGIGPTSARGLSLSLFWRQFNNRREVGACVGMVGTPYDSGTMRQDQGISKAGDPRLRAMLVELSWLWLRLQPDSAITRWFHERTQGAGKRGRRIMIVAVARRLAIALWRFVEHGELPQGATMKRLPA

SEQ ID NO: 285249 - protein, 406 aa, unidentified
MTTYRFHVGIDWATTEHRVVVVDAERRVVLERSVRHDGVALETFATELSELAGGVPSDVAVALETPRGAIVDVLLARGFHVFAINPKQVDRFRDRYSVAGAKDDRRDALVLATALVTDLGAFRRLDPEHPVLIEIRELSRLEEDLQQEAQRLANRLREQLHRYFPHLLQLVPAADEPWLWALLERAPTPSAASQLPRAAIRTILTRHRIRRVDADAVRAVLRAPALPVVPGTVHAAQRHLAVLLPRLRLVDQQHRECATLIEGLLEQLGEQQEHRDVPILRSLPGVGRVVAATMLAEAGRLLAARDYHGLRTHLGAAPVTKQSGKGRRVEMRYACNHRLRNAAHHWGQSAIRHDPHSRAHYDRLRASGHTHGRAVRGVVDRLLCVLIAMLTTQAVYDPDRRRKIAA

SEQ ID NO: 285250 - protein, 433 aa, unidentified
MQDAQDEPLFVQRVAGLDIAKAGAEVTIRVPSDTTPGRRQQETRTFAATRAGLLSLADWLRCWGVTKLGMEATGDYWKPVFFLLESRGFDCELYNAAQVKALPGRPKTDRADSIWLAKIVERGMISSSFVPPEPIRRLRTHTRYRRHLTQARTSQKQRVEKLLEDGHLKLSSVISDIHGVSGRDMLNALVAGQRQPKALAQLARGTMRGKIARLEQALDCSFFTAEHAAVLAMMLTTIDHYSAQIQALTATIEALIEPYLRQAGQLDAVHGIGQVCAQDIIAEIGADMTVFPTAAHLVSWARWSPQVTQSAGKRKGSNATGRGNPYLSAALGEAAISAGRTQSFLGARYRRLAKRMPKKKALVATGNTMLTIIHTLLSDPQASYHDLGAGYYEQRMHTRRQARNHIRSLQRLGYKVTIQPINPGTGEPIPATG

SEQ ID NO: 285251 - protein, 456 aa, unidentified
MGKRNKGLEQMAIIHPNAAGLDIGAREIFACVPPNRTEENVRVFGTFTPDLGCLADWLAASEVDTVAMESTGVYWIPAFELLEARGFKVHLVNARGMKAVPGRKSDYQDCQWIQKLHSLGLLTNSFRPDGEMCGLRAYLRHRADLLQHRAAHIQHMQKAFQQMNIQLAQVLTDIMGETGMAIVRAIVAGERDGVKLAQFRDRRCKSSEEIIAKALTGTWKEEHLFALKQSLELYDFYTQQVAACDAQIQQHYSAMKPRWEGAMTSSTPASSNLSRKPRHKNDPSFDVRADIIRITGIDIAAVMGIGPSLAQTILSEIGTDMTRWPTEKHFASWCGVAPHNDISGGRVLRSRTLPSRNRAGQAFRQAATSASHSASAFGAFYRRKRAQGGPLFAQVATANKIARTVYHMLKYQVQYEDIGGEEFERRHRERDIAALRKKAANLGFTLEIPEAMQATA

SEQ ID NO: 285252 - protein, 341 aa, unidentified
MEEYIGLDVSMKETSVSIRRAGERIWRGRCASDPRIIAELIRKRAPAVKRVVFETGPLSIWFYHSLRTEGLPAICIDARHAKAALDMATNKTDANDADGLAQLAEVGFFREVRVKGFDSMLTRTLVAARTRLVRITTELSNQIRGVMKTFGLLVPAGKGSTFEKNVRSLLADQDGLASIVLPMLEAWRGIRIRAAELGRQLVRDARQSQACRILMSIPGIGAITATAFAAAIERPDNFKKSRSVGAWIGLTTRRYQSGEVDYDGHISRRGDSHLRGLLYEAAAVILTRSSTDSTLRTWGLKLRERIGFKRAAVAVARKLAVIMHTMLKTGELFHPNAGATV

SEQ ID NO: 285253 - protein, 362 aa, unidentified
MNVAGIDGHAQYLVVTVLSNRAKMLHAPVRIKNAEAYRLVELLEPFRPLEAVVETSPAWPWLHDLLVGHGFGFVLAHAKKLRAISEANYKRDEIDAELLARMRLAGLIPEVHPKSIEQREQAVLVRHRARLVKLRTSAAGRIHAELHSIGMHLERGRLLTQGGRRWLRTRAWPLFGPEQRLLVRSQLAIVHGLNPMVRALDRRIVGIGSEIPAVALLQTVPGIGPYRGLLIATEVLPIERFPSPRHLVSYSGLAPRSNQSGSRPIRHGPIPAGANRWLRAAFVRTIVSHHMAAPSSWLSLYYDTQKQRLGWQVARVAAARKLARAVHAMLRTGEVWMDDVPKSDEKGRAPRLACRSDDLQPS

SEQ ID NO: 285254 - protein, 351 aa, unidentified
MLMIGVDYHPSFQQIAFMDQETGECGERRLNHSDGEAERFYRELKQRGVSVRVGLEATGYSRWFERLLAELGFEVWIGDAAEIKKKRVRKQKTDRFDAQLLLKLLLENRFPRIWVPSPENRDLRQLLWHRHRLVQMRTRIMNQLQAVAMNEGYRWKKKLFSEKGRAQLEKLSLAPWASRRRKELLELLDQLDPKIAELTAAVQQEANQRPEVLRLMTHPGVGPITGLVYVLVIGTPERFPCGKQIGSYTGLIPSEDSSAGRQRLGHVSKQGNALLRYLLGEAAQAATRCNGDWRRRYVHLAMRRQKSIAKVAMARKLAVRLYWMWRNGWEYSQLVEFGSHAGKLVIGHGVN

SEQ ID NO: 285255 - protein, 344 aa, unidentified
MNTIRVVGIDIAKSVFQVCVWMVDGSIAYNKKISRSKLLDCVRHFEPGTLIAMEACSTSHFWGRTFRTMGYNVRLIPAQHVKAFVRSQKNDANDALAICETALRPGIHFVPVKTAEQQDIKALRNTRQLMVEQRTALANQLRSLLAEYGLIIPVGIQCLQQHLPELMEDASNELTFTVRRLLSTLREDMQALNERVTGLDKEIAALSSQQAAYRQLLTIPGVGPLIAAAFISEVDAGQFSNGRELSAWCGLVPRQHSSGGKQRLSSVTKNGNRSLRTLIIHGARSVMRCMKKRDDRLGLWLQRLEARRGFLKTTVALANKLTRIIWRVLTDGVDFNMQKAVAMN

SEQ ID NO: 285256 - protein, 457 aa, unidentified
MARRSKSKATRRQSRFNIIHTRAAGIDVGSTFHVVAVPPELSPEPVQAFQSFTGDLYRLADWLVDIGVTTVAMESTGIYWIPVFEILEAHGLEVLLVNARHVKNVPGRKTDVTDAQWLQQLHSYGLLRGSFHPAQEWSALRAYLRHRDRLVEYAASHIQHMQKALMQMNLQLHHVVSDITGVTGMTIMRAIVAGQHDPAELATYRDVRCQASEETIREALTGHYRREHVFALRQALELYDSYQERIEACDQEIETTLESLQDDTVSMEALPAARYKKTRQANEPKFKVREALFRVLGSDLSQIHGFGAYTALKLVGECGMDMSRWPTEKHFTSWLTLAPGNKISGGKVLSTKTRRSANRAAAIFRLAAVNVGRTSTALGAFYRRLASRVGKAKAVTATARKLAVLFYNALRYGMAYEDPGASYYEERYRERVLKGLRRRAKEFGYELTEVGAAAGVS

SEQ ID NO: 285257 - protein, 424 aa, unidentified
MHLTAISSARTSAIVSCDVSAYGLNLACRDLSLPGAAAEWEIPNRTEPITATLRSIVEQAIERGITELMVVVEPTGRYHKLLLRIARSLGIQTALVDAGHVRKMRSVIFGDEGKTDQRDPYVIEAVATQGRLIEDRHHAEVYELLRHWGVLYHQAENALIEAKSRVHAAITMLFPDFDFSTDFLYGPSGQAIVRCFGLDPHALAALSVSRIYERLRKHSSIRRSSVTRLLVQARQTISAIAKSRITDLDAHELALAWEDFELAERRRSCARRELETLYDEARSTDPHLPNPLGSPISKIALARMVGEAGPLSGYSGWRPLLRMAGMNLRERKSGTFVGQTKIAKRGRPLLRSIMTQMALPLVRRDRLFGSYYHQKIGVQKMPGNKAMTAVSRKLIKMIWGWYRSGAEFDPTRVFCCEGQHRIAA

SEQ ID NO: 285258 - protein, 320 aa, unidentified
MSAFSLTVGIDVAKAHVDVCVLGADSGAQRFSNDPDGHSALAASLLPLGVDLVVMEATGGYEAALACALQASGLPVAVLNPRQARDFARSMGRLAKTDAVDARMLAEMAAVLVRREDLARFLRPVADECQQWLAALVTRRRQLLAMLGSERQRLQITPTKLHPSIEAIIAAIKAQLHDLEAQMVGHVREHFSELDGLLQSTNGIGPVASATLIAQLPELGRLNRREIAALVGVAPMSNDSGNRKGRRRVQGGRFEIRRALYMATLTATRYNPVIRAFYERLKAAGKLPKVALVACMRKLLTMLNAMVRTGKPWDASLHRA

SEQ ID NO: 285259 - protein, 338 aa, unidentified
MAIVMGLDQHRAQITAEWVDTVTGEVSRGRIVPADRAGVRKFLARFGGRELEVALEATTGWRFVVEELRRVGGEVHLAEAAQTSALRGTKQHAKNDRADARHLRELLMAGRLPECWIAPGHLLDLRARVRLRHTLVDERGEWQQRMQAVLYHHGLPKRAGLLTSANRAWVGQLPLSGAARGQITVALAMIDAVDVQVAPLERELRSYARRQAGCKAIQAHYGIGALTSVAVLAELGDARRFSSSREAVRYAGLDITVHASDKRRAPGHLSRQGPPVLRWALYEAAQTARRKTSPDHAYYQQAAERLGDNRALLSVMRKLLKRSYHTLRELGDEALAPA

SEQ ID NO: 285260 - protein, 339 aa, unidentified
MWIIGCDYHPRFQQIAFVNSDTGEYGTARLEHADGEAERFYRRLVGQRVRVGIEASGQSLWFERLLGELGHELWTGDPAEIRAQMVRKQKTDSRDAEHILKLLWEERFPRVWRPSLVERDLRQLVLHRHRLVQMRTRVKNQLQALAMNQGLCQKKKLWSRAGRAELQALPLLPWAGRRRQELLQLHDQLCELGRPLDQAVRDQAAGEQVQRLMTHPGVGEVTALTFVLTIGDPQRFASGRHLASYLGLIPQEASSGGKQRLGRISKQGNALLRGLLAEAAHIAVRHEPELGRCWRRLAMKKNRQIATIAVARKLAVRLWWMWIRGLDYGAMFGSGSHAG

SEQ ID NO: 285261 - protein, 399 aa, unidentified
MTASARVVIGADTPLDSHHLAVITDAGKPLADTEFPTSQTGYDDAVRWAQSFGTIVIAGVEGTSSYGAGLTWVLQAAGIEVAEVSRPDRAARRRQGKSDPLDAYAAARAALAGHGVAVPKDASTGALRALLSARRSAVKAHTAATNQIHALLVTGPAELRDRYRRHNSNALVKALARCRPATHNDATTVAVLTAAKALAQRAEFLAHQKQDLHAHLGVLVRRINPALRTAYGVGADTAAQLLVTAGTNPHRLRNEASFAALCGAAPVPASSGKLTRHRLSRGGDRAANNALYRIALVRMSAHPQTRDYVQRQVANGRSKKEILRLLKRAVAREMFRLLTRPAPVDDYRDLRPARQAKHITLATVATHFGVPVITVSRLERGHQRNEALANHYRRWLIAA

SEQ ID NO: 285262 - protein, 386 aa, unidentified
MPKPNDLSRSFTTFEKDSTLIAVIEMSLTSWLIAAILPGIERHPLKKLDVDEGALLQLLHRWRDEAINAGREITRIVLAFEAGRDGFWLARWLRARNIEAYVIHPNSVAVSREHRRAKTDRLDTELLKRAFLGWLRGESDHCSMAAIPTLGEEDARRPNRERENLSGERTRIVNRMRACLVRFGVRNFKPTLRKAPARLETLRTPEGGPLPPNSCAELRRDMARLRFVMDQIREIEETRLQRLQHTPNEGSHPMVRLLARVIGVGIETADMLVHKISSRNLRDQRAVARYAGLTGSPDESGKRRREKGLARAGNARVRRGMIQLAWRFLMFQEESALVQWYRSVTSEARGAIRKTMIVALARKLLIALWRMVRTGEVPQGVALRTA

SEQ ID NO: 285263 - protein, 320 aa, unidentified
MTLHQNIFGVDVAKDWIDVCDLSSGEVRRIETTPRALKALAANLSARPGTLVVFEASGGYERPLMEALEAPGIKDRGVAYARVNPRQAREFARACGKLAKTDKVDARILAQMGRALDLRPAAPADPARRRLAELVARREDILAAITAETNRLAQAREAFVRRDISSLIAILKRRKLGLDAEIQAHKQAHEDLAARDRRLRTAPGVGPTVASVLLACMPELGGTDRRAIACLGGLAPQACDSGRRSGKRQVWGGRPEVRRALYLAAFIASRCDPELRAMRQRLIAAGKPFKVALIAIARKLLTILNAMIRDGHDYERRLPT

SEQ ID NO: 285264 - protein, 356 aa, unidentified
MQTQVTKKIDFSGKDLYIGLDVHKKSWSVTIIIDGIEHRTFTQPPDPGTLNNYLQRMFPGGSYNSAYEAGFCGYGIHSELNSLGIRNIVINAADIPTSQKDKLQKRDPIDSRKIARGLENGSLHGIHIFDRGMEELRSLNRTRFYLMRDLRRSKNRIKSFLQYYGVSIPPEYDNNQWTLKYISWLKQIKMQTVSGQDAFSNLIESYEHHRQQLLILSRMVRLRISQYDNELYSLLKTISGIGPLTSSALITELGDINRFQHIDHLSSFVGLIPRVRESGETTHTGGITFRCNTFLRTLLIESSWQAIRMDPALMQYYQHHVINSKGHKVIIKVARKLLNRIRYVMKNRQPYVTGVA

SEQ ID NO: 285265 - protein, 394 aa, unidentified
MRFVGIDVAAERQVVAVVDDREAVLLEPTAFTEDAEGYQKLLSLLGPPPDALVAMEATGHDWKNLCAALGAAGVAVALLPPLRTRRFAGEDLQRTQTGALDALGIARFAAQKRPPATRWPDRATDELRALVRCRDRLVQDVGDRVRRLHRLVDLGVPEFTRYVRDLGSERATALLREYPTAAAFPGVSLPPLAGLRDDGRHKVGEDLATALRQAAERSVGRHHGEAHRIQVRCTGEDLDLLRRRLRDLEHDLERLLDDHEVGRLLTTIQGIGPQTSARLGATFGDFPRFPSGAALASSVGVIPGLHQPGQRVSPRARLPPLGAARLRAKLWMPGLTAVRNNPWRRAYDQGLLARGKLPRLALVAAMRKLLHAISSVATHRRPFVPSLGAAEGRA

SEQ ID NO: 285266 - protein, 356 aa, unidentified
MMIIGCDYHPAFQQIAFVDTDTGELQERRLQHREEAEKFYRDLAAQGMKVRVGMEASGQARWFERLLAELNFELWIGDAAEIRTKRVRKQKTDRQDAQLILKLMLKDDFPRIWVPSWENRDLRQLLWHRHRMVQARTRIMNQLQAVALNEGLRCKKRLWREAGREQLEAFRLAPWASRRRRDLLELLDRLNPTITDLTRTIEQEVEKCPEAQRLMTHPGVGALTALAFVLIIGTAERFQCGKQIASYLGLVPLEESSGNRRRLGHITKQGNALLRFLLVEAAQVSARSIPEWRNKYFHLAMRRGRKIAKVAMARRLAVQMFWMWRKGRDYEQVRKFGSHAGQPGNRDGVQSKTPSN

SEQ ID NO: 285267 - protein, 363 aa, unidentified
MVKRGPPVSGLKHQKEKRSMDYFAGLDVSVKDTSVCIVDDTGKIVREVKVASEPEALLAVLENPAYHFKRIGLEAGPLSQWLFSALVEAGLPVICVETRHMRAVLKAQINKTDRNDARGMAQMMRVGLYRPVHVKTLRSQKLRMLLTHRKLLQSKAIAIDNDLRGTLRNFGLKVGMAGKARFEARIRELVESLPDLAALVEPLLIVRRTLREQFCILHRRLLAIVRDDEVCQRLMTTPGVGPVVSLTYRATVDVPARFRKSKSVGAVFGLTCAKYQSGEVDWDGRISRCGDEMMRTMLYEAAQAMMRSKKWSWLKAWAMQIARRRGMKKAIVALARRLAVIMHRIWVDGTEFRWTRGLAAAAV

SEQ ID NO: 285268 - protein, 433 aa, unidentified
MREAEDEPLFAERAAGIDIAKAGIEVTIRVPSDTRRGGRQQETRSFRTTRKDLLQLADWLRCWQVTKVGMESTGDYWKPVYFLLEAEGFDCVLYHAAQVKALPGRPKTDKLDSVWLAKITERGALPGSFVPPAEIRRLRTHTRYRRHLTQARTAEKQRVEKLLEDAHLKLSSVISDIHGVSGRAMLEAIAAGERNPRTLAQLARGTMRGKIARLEEALDCSFLTSEHAAVLAMMLATIDYYTARIEELTVKIAVLCQPYEHQIAQLDAVPGTGVITAQDVIAEIGTDMSVFPTAAHLVSWAKWCPQVAQSGGKRTGASAAGRGNRYIGAALGEAAISAGRTQSFPGAKYRRLVKRMPKRKALVATGNSLLTIYHALLSDPQAAYTDLGADYYERRASIRRQARNHVRGLERLGYKVTIEPIDPATGELQAADS

SEQ ID NO: 285269 - protein, 471 aa, unidentified
MPHHCHQPPAGYFWQGNADNARLRVICRFGISHGVFLILTKKGGDETMKKADYLSTLFVGIDIGSKINVVSALNFSQEFLIRMVPVKNAKGGAELIEQLICDALGKDPELKRIIVALESTGYYSFHTANYLSTSEKLLPFGIKVYCLNPKSVKNYKESYVDLPKNDGIDSFVIADFARCGRITIKPWKGAQYLALQRLTRHRLHITECIAREKVYMLNNIFLKFSEFAFLQKDEHPFSNKYGATAEAILTEFTTTEEIVNSSVEDLVDMITARSRGRIANPLNTAELLQKAARDSYRLDKCMYEPLTTSIACSFNCIRAFEKELKALDAAIEEAVKGLNPTEYQILLSVPGIGKVYGAGILAEIGSIKYYRNHNSLAKYSGIYWNQNQSGDFDGEDTSMSKAGNRYLRYYLIEAAGSVIQHCPEYASYYEKKYAEVLKHQHKRALALTSRKLIRMLFGLLDKSQLYSAGNE

SEQ ID NO: 285270 - protein, 402 aa, unidentified
MRFSVGIDWASAAHAVCILDQTGRVHWQGAVPHTADGLADLLARLRRFRRRGSLRVALERPSGLLVDTLLDAGLEVVPIHPNALKASRPRYSAAGAKSDPGDAFILADLLRTDGHRFRPLHPPSDDTRALRALVRGRDDLVAQRIALANQLRALLERFWPGAAAIFADVDSPIALAFLARYPTPDSAARLGEQRLAQFLGQHAYCGRRPVAELLARLRRAPTSQVGAAEADASGDVVRALIAVLSPLVAHLQQLSAAIAAALAQHPDGPLVQSLPRSGAVNAAQILAELGDDRARFPTDEQFAAEAGLAPVTHASGQHHAVVFRWACNKRLRRALTTFADNSRHASRWAALVYQRARTRGCRHQHAIRILARAWARILWRCWQDRAPYDVARHRAAQALAAA

SEQ ID NO: 285271 - protein, 378 aa, unidentified
MKAILQHKDSAPAQVLYMALELSNKKWKLGFSNGERIRVKTIESGNWQALQLEIVQAKTKLHCTADCRVVSCYEAGRDGFWIHRALITEGIENQVLDSASIEVSRRKRKVKTDRVDVNALLRLLMRYVNGEKTALHTLRIPTVDEEDQRRLNRERDRLLKERGAHSARIKSLLVAHGIRLEKMSTLPRLLATAKAAVTGYALPADLKAELEREYVRYELVAKQTKVLEQLQIERAQAEDIPAMRNIQHLRSLKGVGWQSSWILTMEFFNWRDFKNAKQLGACAGLTPTPYDSGDSTREQGISKAGNKRIRKLMVELAWLWLRYQPDSQLSQWYEKRFAQGGKRMRRIGIVALARKLLIALWRYLEHGELPQGAVLKAV

SEQ ID NO: 285272 - protein, 316 aa, unidentified
MFIGIDVGSKFLDLAATPTAPALPRRVANTAEGIATLIAALTPLAPTRVVLEATGAYHYPLLAALLVAELPVSVVNPAQIAAFRTSRLGRHKTDRADAQLLARFAELHAGELRRATPDEPDLAQLRTLVRYRDDLVAQRTAARNRQHAAQWSNASAVMAWLDADLTAIAARLREVEAAIAALLATRPETAVLTAQAGVGLATAAAVLAYLPAGVLGNAKAAAAFAGLHPRQEQSGQRDRSRLSKQGCPPLRRYLYLAAMAAIRFDPEIAAWHQRLCDRGKAPKSAVCAVAHKLLRRMMGKIRELRQEHALILPLAA

SEQ ID NO: 285273 - protein, 337 aa, unidentified
MEYFAGLDVSMAETHVCVMNREGAVVYEVKVRSTPADIATVLAQAPVCARIVFETGRMAPMLYHGLIQLGLPVVCIESRQAYQALKSLATHKTDRNDARGLAHLARTGFFKPVHVKSLPAHALRSLIIARKKLVGQRVTLDNQIRGLAVVFGVRLPRALTAAFIRQALRASEGITGLSTAMPGLVAARAAVLAAVAAIDADVRRMVRASEACRRLMTIPGVGQLTAIAFVAAVDDPARFRRSRDIGAYLGLVPRRYQSGELDHSGSISKCGDRRLRTLLYEAANVMLTRFKGPLKLKDWAFAIAKRSTMRKARIALARRLAIIMHAMLRDGTEFKPA

SEQ ID NO: 285274 - protein, 431 aa, unidentified
MTNAQSMPEKAVLVAIDVAKHRNEILIEEPDRRRRRRRLTVLNTREEHDRLVAALQGYAGPVVAGFEATGNYHRPLAHRLLEAGIELRLISSFALARTREALTNGWDKNDPRDAQVILHMLRIGAVQRYHDPLAHGLSDIQELSKTHEMVSRAKTELWHRLLTHYLPLYFPEAERFKGNARSDWFLAFLEVFPTPASITALEKDAFISAAWAVVGRKVSKRRVLSDIYETARFSIGLPVASDSGAVAMFRMVLAEGRSLIRQRDEIERRAELMLSDNPDYQRLKTIPGIGPINALTILAEAGDLRRFPHHRQFLKFCGLDLSTHQSGAFRGQTRLSKFGNARLRRAFWIASQIAVRQRDNSFRDKFERYVARDRTSPDLRRKALAAIAAKVARTAHAIIKRGVDYRPFFEGAVPGGRTPLCVGRRDAAAIS

SEQ ID NO: 285275 - protein, 386 aa, unidentified
MSQPNDLSRSLAAFVQDNTLVAVIELSLSSWLVAGVVPGIERQPLKKLEPDEAGLLRLLQRWRDEATKSGCTIDRIAVAYEAGRDGFWLARWLRGQGIEVHVIHSSSVAVSREHRRAKTDRLDTAMLLRVFMGWLRGERGHCGMVAVPTVEEEDAKRPHRERENLVGERTRIINRMKAALVRLGIRGFKPELRRAPKKLDGLRTPQGLPIPPNTLEEIRRDLARLAMVREQIDLIEQARLIRIEQAPETGPNAMVRLLASIVGVGVETADMLVQEVLSRNLRDRRAVARYAGLTGSPDESGSKRREKGLAKAGNARVRRGLVQLAWRFLLFQKDSALAQWYRARTGVQGVRKTVLIVALARKLLIALWRMVTTGEVPHGVVLRATA

SEQ ID NO: 285276 - protein, 325 aa, unidentified
MQGKELSEHVPSEETYIGIDVCKSHLDVHIHPCDETWRVSNDRCGIAAFLRRLAALPVAVRLVVVEATGKWHRAVHRRLHEAGYDVAVVNPYRSRKLADAMGHLAKTDAIDARTLALFGQALRPRITPPPPKTVAALRELVAARRATVAEASALGNRLMTAEHGLVARQLRARIAMLKRHIQAMAISISNAIEADPAMASLFNILTSIPGVGSVAATTMIAELTELGACSRTQIAALLGVAPMNWDSGAMRGRRIIKGGRAPLRAVLYMAAIAAVRCNPEIKAFYERLKDRGKKPKLALTAVMRKLVILANTLVRENRPWAPDAP

SEQ ID NO: 285277 - protein, 391 aa, unidentified
MIYVGIDIAKDKHDCFITNSDGETLFNVFTIPNNREGYNDLYQKISSLTSDFSVIKVGLEATGHYNYNLLGFLIDKGLPTYVINPLHTNLYRKSLSLRQTKTDKVDARTIALMMMSGVNLQSYSDTSYHNEELKSLTRYRFDKVKERAKLKTSVSRLINILFPELEKLVTSLHMASVYALLSEFPSASNIASAHLTRLANLLSEASKGRYGKDTAILFRETAKNSIGSHMPAKSLELKHTIKLIRELDAEIEEIENEIKIIMDEINSPILSIPGINYRMGAMIIAEIGDFSRFDSPDKILAYAGLSPSTYQSGQLDSSYSHMEKRGSRYLRYALFNATKFVCIWDSTFADYLAKKRAEGKHYNVAISHAAKKLVRVIYQLEKSGQTYHRSA

SEQ ID NO: 285278 - protein, 418 aa, unidentified
MTDEFAAFVGWDWADKKHDLCLIDTSTGKKESSVIKHTPQAIDEWATAIRKRFGGRPVAVCLEQSRGPLIFALLKYDFLVLYPVNPTTLAKYREAFSPSRAKDDPTDAEYAAELVMQHRDRLKAWRPEDERTRTLQYLVEHRRRVVSDKTRLSNRMTALLKLYFPQVLDWFDDVRTDLVCDFLLEWPTLEEVKRVRRTTLEKFFRSHHSISTKTNEERFASIKEAIPLTTDVAVIASSVVMIKVLSNQMKVAIAAIREFDKRIEELCAAHDDFHLFASLPGSGTVYSSRLLAAFGTDRERFASADEMTRLSGIAPVMERSGESCWIRWRYFCPKFLRQSFVEYAGESTKHSFWARAYYEQQRAKGKSRQAAVRALAFKWIRIIYRCWQTRTEYNEVKYLESLRKKGSSLLSYAASNAA

SEQ ID NO: 285279 - protein, 366 aa, unidentified
MKKLADPVRKVNTQCVGLDVHKNLTVFCVLDGDGKAIREERMASTREAFEALVHEALKSGPAHFAFEASRSSLWVHGLLTEMMDPKYVHVAQAKRIRAIANSNAKNDERDAWWLAYLTFEGRLPEAHVPSGSILDLRIATRERAVAVRARTKIINRIKAHFAQTGEIVPSSSVRTEAAKLFMAKTALATPGIRGQAIRACLGELEYQEAAIKEWEEAVDELLVDLPAVDLIAKEIPGTGKILAATIVAEAGDIRRFHSAKAFGCATGLTPSDHSTSGITKHGGITREGNPHLRWAMTQAAMGCLRSRRGAGLAVGNWIRTKEKRMGNKAKARAAGGRKLSESIWRLFRYGELFDAGRAFGSRGVSK

SEQ ID NO: 285280 - protein, 370 aa, unidentified
MKEPTTSYIGLDIHKESIAIAIADTGRAAPRFIGTINPVPAELCKAMRRVCTKESTLIVYEAGPCGYGWVRYLRKQGWSCDVIAPSRITRQPAEKRLKTDRRDALLLARESRAGNLTSIVVPDERDEAIRDLVRAREDVRVARHRVRLQMQAMMLRHGRHYQGKRNWTQAHDRHLSTIRFEHPAQELAFNEYRLASKEACERVERITEALRVQCEDWRMNPVVKSLMCLKGFDFVAAVTFVAEMGDLTRFAHPRALMAYLGVVPSEFSSGASRRQGGITKSGNKHARRILIEAAWNNRFKAQVSRDLEVRQEGHPKIIRDISWKAQLRLSKRWRSLSMGRKLAQNKICVAIAREFAGFIWDVARHVKVSP

SEQ ID NO: 285281 - protein, 359 aa, unidentified
MNTQVKKTDFKNQNIYVGFDAHSKDWKVTIIAENMVFKTFTQPPEPEILVNYLRNNFPGGKYHTAYEAGFCGYWIHDKLQFYGINSIVVNPADIPTTNKEQVQKEDKRDSRKIAHSLSTGSLMPIYVPSLQTQRDRSLMRTRSMLNKDLTRYKNRIKGFLYFYGIHINETFSNPQSHWSNKFMMWLESLDIDNGSGKDTLHTLISECKNLRASILKVTKQIRNLSNTEKYKNNVELLKSVPGIGLITAMLLLTELESINRFNNIDSLCGYVGIIPSTKSSGDKERPGDITPRGHGVLRSAIIESSWVAIRNDPSLMKAYLLYTNRMKANKAIIKISKKLLSRIRYVLLNQKAYIRLIEK

SEQ ID NO: 285282 - protein, 406 aa, unidentified
MISVGIDVSKGKSTVCAAKPYGEVLMTPRDFKHTKDDLDSLVKQLSRFKEEIHIIMEATGNYHLPIYQYLKSKGYQVAIINPLEMKRYRCQGIRNPKTDKIDSYIIAQYGIDFWYRFTPNSDMEESRAELRLLGLQYTSYMRIRTIRCQDLCHILDRTTPGVYGLLDDFNRNNGQDKLCDFAEKYWHCDNITKYSEKLFVERYNAWLKKKGYRQNENEARQLYFIAKNAIPTLDSKLSSTKLLVQEAVNVLREVDSSLYDILNQLKTLSKMMPEYDTVLAMKGIGETLAPRFIAEVGDPRRFHSAKALIAYAGIDAPPYQSGQFIGTKRHISKRGSANLRKLGYELMDSVNKHKSSYYGDPVCEYFMKKRNEGKPYRVAMIAAFNKFLRIYHSHVSAVLNEHDKNH

SEQ ID NO: 285283 - protein, 351 aa, unidentified
MSRSSSSATIATLGIDLGKNSFHLVGQDQRGAIVLRIKLSRTQLTQRLANIPPCLIGMEACAGAHHIGRQLQALGHDVRLIPAQYVKPFLKGHKNDYRDAEAIAEAVQRPTMSFVAIKTPDQMDLLALHRVRSRLVSQRTGVTNQIRGFLLERGITVRQGLAPLRQALPGILASSSDALSLRIVHLIADLAEDWRQLDERIAHVSAEIEALAAQDEHCQRLMSVPGVGPIISSAVVAAIGTGAGFKQGRDFGAWLGLVPKQESTGDRTILGKISKRGNKYLRTLFVQAAHIVLVRRPHGARLSLWPWIEAAGRRLHRNMLVIALANKLARIAWAVLARGHGYQPRSASHAM

SEQ ID NO: 285284 - protein, 439 aa, unidentified
MSQELPTLDPLAAFVDVGSEHMHVSVAGNKPEVFGTVTSQLHALRDWLIGQGVHSVAMEATGVYWLPLYGVLESAGLDVRMVNGRQTRNLPGRKTDMADSQWGATLHMHGLLHAGFVPPADIRRLQDYLRLRASHVAAAAACVQLMQKAFDRMNIKLHDVISKLGGVSGMAVVRAIVAGERSPEALAALCDVQIRRKKERAVIEALRGTWADEHIFALDQALQSWDHYQKLIADCDRRIAAVLPPHDETQPPLPSSTKQTGVNAPEISRLREILAQMCGGRDLTKLPALSQYGVLQLIGEVGTDLSVWPTEKHFTSWAGLAPGSNDSGKRKKRVSRGRNRTGQLFCMMAQSLVRSKDIALGGFYRRLAARRGGLVATKALARKLAGWFWRVMVKGDDYVEKGIARYEEQVRKTKEHALKRLANELGRQLVPVPSSSQIT

SEQ ID NO: 285285 - protein, 411 aa, unidentified
MDVYCGIDWAEDHHDISLVDRDGKLLARRRIGDDAAGLAQLLELLAGHGDSAEDLIPVAIETPRGLLVACLRATGRKIYPINPMAVARYRDRHSVAGKKSDHGDSFVLANILRTDIGMHRPLPDDSELAQAIAVLARAQQDAVWDRTTAHNKLRSHLREYFPGFLAAFADARGGITRPEARAVLAAAPTPAAAGALTLTQLRALLKKAGRSRGIDTEAARLRDAFRIAQMRQPRLVEDAMGRQAIALLRQLDAACASADDLEHAVTQSFNQHPDAGIITSFPGLGPLTGARVLAEIGDDRSRFQDAKGLKAYAGATPVTRASGKTKSVTHRRIKNNRLNAAGYTWAFSALTASPGARAHYDRRKDAGDRHAAAQRNLFGRLLGCLHRCLITGQHYDKATAFPASTKLPAAA

SEQ ID NO: 285286 - protein, 308 aa, unidentified
MELFVGIDVAKETLEMCIRPEEIRKTFPNDDQGRVAMARLVAEMKPTLILLEASGGYEIPVVEVLALRSLSVAVVNPRQVRDFAKAIGRLAKTDSVDAEVIARFAETIRPEVRPLKDRDAQQLQAFIARRRQLVQMLTEEKNRLGIASSWTRPDIEAHIEWLTDCIDKVGKDIGSLIKKTPLWKEKENLLKTFKGIGPVNACTLLARLPELGQLNRRQIAALAGLAPVNRDSGKYRGRRTIFGGRADVRAALYMAALCAIRYNPVIKAFYERLIHAGKLPKVALTACMHKILTILNAMVRTNTPWCAQ

SEQ ID NO: 285287 - protein, 350 aa, unidentified
MMIIGVDYHPSFQTIAFLMEETGEYDEQRVNHDGEAERFYRDLKQRGIRVRVGMEATGYARWFERLLAELDFELWIGDPAEIKAKRVRKPKTDREDARLLLRLMREDRFPRIWVPSPENRDLRQLLWHRHRMVQMRTRIMNELQALAMNEGKRWKSKLWSQPGRTEFEKLVLGPWASRRRSELLELLDRLNPSIEELTTAAEQEVHKRPEALRLMTHPGVGPITALAFVLIIGTPERFARGKQIGKYMGMIPTEDSSADKQRLGHITKQGSSLLRFLLVEAAQAAARINEHWRRRYIHLTMRRHKSIAKVAMGRRMGIRLYWMWRNGCEYSPSFEFGSYVGQLGNGHGGK

SEQ ID NO: 285288 - protein, 325 aa, unidentified
MPDSTRSVSANPTGSCWGIDVSADKLDLACHGAGEVRTFANSWEGIEPLLALVRQTPVALIVLEATGRYHRALALALQEAGLPVAVVNPRQVRSFADALGQTAKTDALDARVLARYAHDLRPECRVLPGENLQLFAELVARRRQLLQLHTAETNRRKQTAYAAVRTSIDTVLLVLKKQLSELDEQLSQLINDEEEWRRRDELLQSVPGVGPGTSRALIAELPELGKLDHKQLAKLVGIAPRNRDSGKFQGRRSIGGGRGTVRAALYMAAFVGSKHNALLKAFFDRLVAAGKPRKLALIACMNKLLGILNAMVRNGTTWKNPCQNT

SEQ ID NO: 285289 - protein, 446 aa, unidentified
MSRKKRTHLRGKRGQAFADKIRGIPLDCILCVSIDIHKYFHMVIMHNALGEIVTPAFEIDIFQTGFDRLCQVVDETVVQTGTQLVLTGMEPTSHYFENLARHLRNRPQPVTLINSYAVKENRNQQMMHHEKDDEIDTAAIGDLLKRGEGTPFNPAEGVYLEMQHLDRVRLSKVKIRTMLKNQVIGHLDRIFPGLVIMGDAAKARYKPLFATDFWSCQTMQHLIRVCPDPRKLAAMSVQDLIDAFHNHGYAMGPKTACKIIAYAQKVLPPEPELIAIRSELLSHDLTLLDEVQRHITQLEERLCTLLAQTPYHFWVRLKGLSTVQVASLAAAIGDPTHYEYAAQVFRRSGLVSGRNDSGTRKRQGKGKRITKTGDVYLRRSLIGAVSTLVLHQPVLHQYYSELKLSKPAGVARVATARRAIGILWAIQRDQRSDSLCFKKGHQDVDD

SEQ ID NO: 285290 - protein, 355 aa, unidentified
MKGEYQNKKVWARGKEVFIGVDVHKESWHVTVRAEEEEIFHGRIHSRYDILQRLLEHFKDCKVKVAYEAGPCGFWLHDRLMEDGVEVIVAPPSLIPIESGNKVKTDKRDCRKLARLLEGNMLKRVWVLTEEDRVDRELLRTRRQMVEHRNDVARQIKSKLLFYGIPSPFSARHGWTQNYLEWLKGLELRGEALKVCFESLIELYEYLTEQLVRLKQKVKELSESLKYRERVRLLCTVPGIGTLIAMEILVELQDVARFKRAEELASFIGLTPSEFSTGQYVRQGRITRCGNKRVRTCLVESSWHLIQKDPVMRSKYNRLKSKKGAKRAIIAIARNLLIRIRRMLLGQEPYVVGVC

SEQ ID NO: 285291 - protein, 463 aa, unidentified
MTKKNKKQSGPRRRVTKVTRVLPLVNGDAAGIDVGASEHYAAVPADRDEMPVRRFGAFTEDLHALAQWLMQCGVKSVAMESTGVYWIPLYQVLESYGLAVKLVNARHVKHVPGRKSDVQDCQWLQQLESFGLLTGSFRPEAKICVLRSYMRQREKLIRSAGRYVQQMQKALTEMNLKLHQVISDLSGQTGLAIIRAILSGERDRMKLAALKDRRVKSDVLRIAKALEGDYRHEHLFALQQALELYDFHQLKIAECDARILKEMQTLETRAVAPASALKRKPRSNHNPIPFDSQAELYRVLGVDLTRIDGLNESTVQLILSELGLDLCQKWPTEGQFASWLGLCPNNEISGGKVLKRGTRRVVNRVANALRMCAQSLLNSKSALGAYARRMRAKRDSQVAITATAHKLARLIYRTVKYGQEYIDVGQAQYEAKYKASVLKSLQRKARQLGYQLVSCQPTLVVVP

SEQ ID NO: 285292 - protein, 343 aa, unidentified
MKLSRIGIDLAKNVFQLHAVDRHGKAVWKRRLKRNHWLRAVFNQAEPGCEIGMEACAGAHHWARVLESRGYIVKLIAPQFVKPYVKSNKNDANDAEAICEAMSRPSMRFVTVKSVAQQDIQATHRVRSELMSQRTAKANQIRGLVAEYGLVAPQTMCALRAAIPCWLEDAENGLTDHFRSLLHGIWTDLLTLDDRVSELDRGIKKLANSNEVTRRLQQLRGVGPLVATALVATVGDARQYHRGRQMAAAIGLTPRQHSSGGKDRLLGISKRGDVYLRSMLIHGARAVVSQAKHRDDRLSRWVIAIAKRRHPNVAAVALANKTVRMAWAMLRNETDYDPDFAVS

SEQ ID NO: 285293 - protein, 416 aa, unidentified
MNAVGIDVSSRKSTVAVLRPLGEVVCLPFDVTHDIVGLASLAEKLKTIDGETRVVMEHTGRYYEAVEKALHEAGLFVCAVNPLLIKEYGANSLRRVKTDKADAVKIARYALDNWADLRDFTPMDAICYDLKTLNRQFQLASKQRTASANNLIALLEQSFPGIRKCFDSPVRSDGTQKWVDFAHSFWHVDCVRKQPFAAFCERYRKWCKRHAYLFKLSNAEEVYALAKRAVVLTPKSKVVKVLVQEAANQLISISRSVEVYRAEMDRLAAMLPEYPVVMAMYGVGKSYGPQLMAEIGDVRRFERKQALVAFAGIDPMPNQSGDKDVRSNKSSKRGSPYLRKTLFNVIRTYLQCAPQDEPVFQFLNRKQAEGKPFYVYMLAAANKFLRRYYAKLRDYFASLDTLQPVAPIPTILKTTL

SEQ ID NO: 285294 - protein, 340 aa, unidentified
MKITTVGIDLAKSVFSMHGIDEHGKAVMKRTVSRGKVMEVMAGIGPCLVGVEACSGAHHRARELGKLGHTVRIMAPRFVAPYRKSGKNDGNDAEAICEAVGRPSMRFVAVKSAEQQALLVLHRVRKGLSDERTALINQLRGLLSEFGIVIAKGRYQARHQLPVVLDDPDNGIPMLARQILVEVNERIRELDVRILAYDRRIEVLARESEAAQRLMAIPGIGPVTATAIVATVGHATEFKNGRQFAAWLGLVPRQYTTGGKTRLGRITKQGDVYLRTLLIHGTRAVLARVGERTDRASSWVRSLIERRGYKRAAVALAAKNARTIWAMLAKGQTYCPAAPV

SEQ ID NO: 285295 - protein, 383 aa, unidentified
MTGTEPHAWETGLMDSITYVGLDVHKATISVAVAESGRGGEVRQVGVFENRPEVLMKLAARLGKAGRRLSFCYEAGPCGYGLHRLLTGCGHDCVVVAPSLIPMKAGDRVKTDRRDALMLAKLHRAGELTPIWIPDAAHEAMRDLVRARATARKVLSKARQHLQGFLLRHERVYCGARAWTLAYRRWLTTVRFTHPAQQIVLQDYIHAVQDADARLSRLTGQIEELLPSWSMAPVVAALQAMRGVALVVAVTVVAEVGDFRRFANARQLMAYLGLVPSEHSSGSSVRRGGITKAGNVLARRVLIEGAWTYRMSARVSRTLYDRNEELPAPIRDIAWKAQLRLCARYRRLVSAGKERVVVTTAIAREMVGFIWAIARIAQPLLEG

SEQ ID NO: 285296 - protein, 340 aa, unidentified
MEKSEQIQPHAWILGIDVSKQSIDVCLIRSSDGQLFESKFHNNLSGFRHLKRWCKEMKCECDSSTLCCMEHTGLYTRLLVHYLLGREVHVWLEGSLQIKRSQGLIRGKSDKIDAQRIARYAHLYQGKARIMQLGILTLEKLKDLQANRKRLMKALQSLRTSVQELKPFDPATGKVLEQINKEAIRGLEKSLDKVDEQILSFINEDQELKQKYDLMLTVKGVGKVLAAMLLVYTHGFNRLNDSRKLACYSGVAPFVYESGTSIRGKTGISKFANNDLKQVLHMAAISSVQHNSELHQYYQRKVQEGKNKMSVINAVRNKLLHRIVAVVNRGTPYEVRLKNS

SEQ ID NO: 285297 - protein, 387 aa, unidentified
MSQTVAALMPAAVDYEKTLVLAIEVSNKSWVLAAQVPGLPHAKAKRTIDPEAEALLTAIAGYRARAAAMGRSIERVIAVYEAGWSGFWLARWLMRHGVEVHVVQPSSVPVDRRIRRAKSDGIDSELLLRTLLAWLRGEPRVCSMVPVPDEADEDARRCVRERTELISERVGLTNRIGAVLATLGVSDYNPLLRNRSRRLAELRTALGEPLPANAHAKIKRLLVRLELVLTQIAELERERDAVMETEASDRASRMIQQLTALRGIGVQSATVLVREAFVRCFANGKALGSYAGLASSPYSSGGIDREQGIGKAGNRRVRTVMVELAWLWTRYQPGAAQVCWFRERVGTTGRRVRKIMVVALARKLLIALWRFVIDGVLPEGAVFKPAA

SEQ ID NO: 285298 - protein, 373 aa, unidentified
MRADRKSGKRRGCKMNSIIAGIDLGDRESLATVLSPMGDVADRFTFPMNEEGYAYFASRVPKDARVAFESTIMAYPISRALRMHGYSDVTVAHPKTLAWIVRSKKKNDRVDSLKIAKLHMAGMLPESHLLNRDQQIVRDLLVQRVKLGVEIGRLKNSVIGYLKREGVYDSLPKTGDNFSIKRRRAIRSLKFNDERDLVLGTMMDRLDFLERQCLPLEESVRANAKLSDDVRLLMSITGVDYYLASLTSSFIGDVNRFPSDDHLASFLGIVPTSRDSANVKRRGKMTKDGSSIARWALSVMVDTVMRHNEPIREYYVGVKKRTGSGKLAHVSTMRKLTRMLYHMLKARENWKWENPQLTERKMTRLEMGGGDGP

SEQ ID NO: 285299 - protein, 381 aa, unidentified
MPSVSADHGVIHLGLDVHKNTISAAVLEAWAETAVVDKISSDEDAVRRLIARFDQPQRVRACYEAGPTGYELARLLGSLGVRCEVIAPSLIPTAPGDRVKTDKRDARRLARLHRAGELVAIRVPTVAEEAVRDLCRARADMVIDQTRARHRWGKFLLRHGRVWRGGDNWTGKHQAWIAAQRFDDPALTATFGHYRATLTAREAAVAAIDADLVSWFDRAPFADPVARLAAYRGITHLGALTLASEVGDWRRFPTAGAFMGFCGLTPSEYSSGERVRRGHITHAGNLHLRTQLVESAWAYKSRPAAGAAIAVRQRGLPPQVIARAWRAQLRLCGRFRRLDARKTSRNVVVTAIARELAGFIWAEMTSAEMTSAEMTTPRTAV

SEQ ID NO: 285300 - protein, 402 aa, unidentified
MTGVVIGVDPHKGSHTAVVLDAAENVLGQVRVKARADQVPHLRRWAQAWPDRVWAIEGARGLGQLLTQQLLGAGERVVDVQPKLAARVRLLNTGAVNKNDPNDARSVAIAARRGRGLGEVTAEDDTMVLRVWSRRYRDLASLRTQVVCRLHAVLCDLVPGGFSKQITAGQAIEVLAGITAHGPIAQARLELAADLVADLQRLDAQCREIKRRVSRAVAASHTTITDIYGVGPIVAATVLGYVRDIHRFPTRDRFAAYNGTAPIEAPSGNRKIYRLSRRGNRQLNYVIHMAAVTQIRNRGTAGRAYYDRKLAEGMGGKAALRSLKRKISDSIYARMIDDARPRPHATVEDPGGQSGNDSVSSAASSHPDTPALRTSHSRATTDPTTVRTLRQRPNLKRSSPAG

SEQ ID NO: 285301 - protein, 344 aa, unidentified
MKSVATIGLDIAKSVFYVHGIDAAGQVAFRQRLTRGRVLAFFEKLAPCLIGLEACGNSHYWARELIARGHEVRLMPAQYVKPYVKRGKNDAADAEAICEAVTRPTMRFVPVKTPEQQSVMMLHRVRLMLNRQRTQLSNSIRSHLSEFGIVAPIGRRGIDQLLAIVANIEDTRLPADARLCLQMLAAQLAVVKEQILENDRRVRASARQTDLGRRLMEIPGVGPLIASAFIASVADPAAFKTGRDLSAWIGLVPKQKSSGGKERLGSISKAGNRYLRQMLVVGATAVIRYAERYGTHRPWLIQLMQRRTVKIAAVALANKLARIIWALMTSGERYREPAVAEVAA

SEQ ID NO: 285302 - protein, 403 aa, unidentified
MNSVGIDISKGRSTIAVMRPFGEVVISPFEVRHTGSELSKLARQLKSLDGETRVVMEATGNYHASVAKLLHDAGLYVSVVNAKLVHDYGNNELRRVKTDRKDAVKLANYGLDRWLTLPRYIPEEDTRLLLKNCYRQYRQYSKVQTVLKNNLISLLDTVFPNVNRLFSSPIRGDGSEKWVDFVAEFWHCRCVSEKSERAFTSKYLRWCRKHGYNFSEAKAHTIYAEASGHIGVMPKSETTKLLVEQAVSQLRATSTALAALKHEMQSLASQLPEYPVVMGMFGVGPTLGPQLIAEIGDVRRFYSKKALVAYAGLDAPPNDSGDVTGRHKSMSKIGASSLRRTLFLVMSVYLQTAPLDEPVYQFMDRKRAEGKPYRVYMMASANKFLRIYYATVKAYLESLEHTA

SEQ ID NO: 285303 - protein, 403 aa, unidentified
MNSVGIDISKGRSTIAVMRPFGEVVISPFEVRHTDSELSELARQLKSLNGETRVVMEATGNYHAPVAKLLHDAGLYVSVVNAKLVHVYGNNDLRRVKTDRKDAVKLANYGLDRWLTLPRYVPEEDTRLLLKNCYRQYRQYSKVQTVLKNNLISLLDTVFPNVNRLFSSPIRGDGSEKWVDFVAEFWHCRCVSEKSQKAFTSKYQRWCRKHGYNFSEEKAHTIHAEASGYIGVMPKSETTKLLVEQAVAQLRATSAALTALKHEMLALAAQLPEYPVVMGMFGVGPTLGPQLIAEIGDVRRFYSKKALVAYAGLDAPPNDSGDVTGKHKSMSKIGASSLRRTLFLVMSVYLQNAPLDEPVYQFMDKKRAEGKPYRVYMMASANKFLRIYYATVKAYLESLEHTA

SEQ ID NO: 285304 - protein, 378 aa, unidentified
MNSSTMVCPTEWKSTATIYIAIELSQSKWVIGAHTPLADKISIYRLSGGDTQGLLALIARLREKVERLMGHPPDVVSCYEAGYDGFWLHRVLEMHGIRNHVLDSASIQVNRRARRVKTDRIDVEGLVRVLMAYCRGEQRVCAILRVPSVEDEDAKRLHRERERLVRERVQHTNRVRGLLATQGIGHFRPTRKDWEKQLSGLCTGDGRPLPPQLKAEIGRECRRLALVLDMIKEVEKERDAASVSNEKTEMLAELKGIGPAIATVLTREVFYRAFNNRRELGSYVGLTPAPYDSGDTRRDQGISKAGNPRARTLAIELAWLWVRHQPSSAVSRWFQERVGACKGRVRRIAIVAVARKLLVALWRYVETGLLPTGAEVRA

SEQ ID NO: 285305 - protein, 364 aa, unidentified
MNNQIYIGMDLHKNTSSFSVKDKEGKVIDECKLPTEPSAIKGYLKRFPDSSLAVEPVSQWYFYGDLIQGLGIDVHLANPLKVKAIASARVKTDKIDAGVLCDLLRSNLLPEAYFASPDARYWKEMVRYRSSLIRLRTQIKNKIHSILFRNGLRHPFTNLFGVGGRKWLESLDLAEHFAFNLKQYLGLIDAFSQLIKEADERIEKVVGDNQPAKLLTSIPGISYISALTIMAEIGTIERFALAKKLQGYAGLVPSTYASGDRVVHGRLTKQGSRWLRWTMIEIAQRQLLCKRKPGFGWYYQRIKQRRGSGAAAAATARKLLAVVWRMLKDNRPFEIVPPAPRSKTSLLRDKSGAKDAHRKNIVSH

SEQ ID NO: 285306 - protein, 341 aa, unidentified
MKYFAGLDVSLEETSICVVDEDGSVVREARVESDPASIASWFQAGLTVCRLGLEAGPLSPWLHQGLVAAGLPAICIETRRMRSATQLMAVKTDRVDARAIAQAMRVGWYTVVHVKSAASQELRVLLRNRKLVREQRVALDNEIRGTLKAFGIKLGKVSEGRFGERVMSALREQRPALLSMVDPLLSVRLTLRRSYAVLQRQVKAVVQASAVCQRFMTTPGVGSVVSLTYMTGVDDPRRFTRSRDVGPHLGLTPRKYASGRIDRNGAISKCGDEMVREALFQAAHTLLTRVKAWSALKAWGMQVAKRRGLRRATIAVARKLAVILHKMWVTGEDFRWTAAMG

SEQ ID NO: 285307 - protein, 342 aa, unidentified
MEYYAGIDVSLKCSSVCVVDANGKIVHEAKVASEPQALIAWFGSLGFGLQRIGLEAGPLSQWLFAAMKAAGLAVELLETRHVQKAFEAMPVKSDRNDARGIAQLMRLGWFRPVHCKSMSAQETRSLLTARKLVQSKLQDVENSLRGILRGFGLKVGKTTGQKFAGRIEELVAGHPHLQTIAKALLAVRAVLRAEFAAFEKQTRRMVRSDTQARLLTSVPAVGPIVALTYASAIDDPARFKSSKQAGAHFGLTPKKHQSGETDYTGRISKIGDASVRTALYEAANVMLTKPVKGCSRLKSWAMRIKRRAGMSKAKVALARRLAVIMHRMLADGTPFNAAAAAA

SEQ ID NO: 285308 - protein, 325 aa, unidentified
MKFILGMDIAKDKFDCCLLSEGRKFHQEFLNAPRGFKQLLGWLRKADASPAALWACMEATGIYGEALLRFLFEKGLRVSKVNPAQIKHYARSLLSRNKTDRQDAWIIAEFARERSASGQLRIWQPPSPAIARLRQLTRLLAARKGQRAREKRRARMVDRELRAHTRAMLRAFEKQIDAIEAEINALIASSAELKRRHDLLRSIPCVGPVTAQTVLAELPEQIANARAAAAYAGVTPRREDSGQKKGRARLSKTGNAHLRQALYMPASSGRKTNPRLRACAQRLAQKGKTRKLAIGACMHLLLRLCVGVMASGKPFDPHWPKQPMR

SEQ ID NO: 285309 - protein, 343 aa, unidentified
MQVSTIGLDLAKNVFQVHAVDPCGKAVLVRKLRRNQMLEFFGKLPPCLVGMEACATAHHWARELTRLGHTVRLMPPSYVKAYVKRSKNDAADAAAICEAVTRPSMRTVPVKTVVQQGTLSVHRTRDLLIGQRTQLINALRAHLAELGIVAQEGRDGLAKLIAMISQEGALQSLPGAMLQALGAIIAQLASLQQQIGDLDRCIQSQHRASEMSRRLESIPGIGVIGATALAATVTDPSAFRSGRDLAAWIGLVPRQNSSGGKERLGGISKQGDRYLRRLLVAGAMSVVQHTRRHPEKHPWIAKLLARKPAKVVAVAVANKTARIAWAIMSRGGVYSAPALAVAA

SEQ ID NO: 285310 - protein, 315 aa, unidentified
MEAMIERCAGLDVHQETVVACVLFGPLDKKPKTSIETFSTTTTGLLALSDWLTTLQVSDVVMESTGVYWKPIWNILEDSFHLVLANARHVKNVPGRKTDVKDAEWLAKLLRCGLIESNFVPPEDIRDLRDLTRYRKKLIHHRTSEQNRIHKILQDANIKLTSVLSDIFGVSGRRILEAILNGEKIETDGLRKMVDWRTKASITDIASAINGRIRRHHRDMLRYHWEHMSYLEKAIEELENQIDQLLSPYRKEVELLDGIPGVNKAAAATFIAEMGVDMSVFKSAKHLASWAGVSPGNYESAGKKKRVKPHKVTKL

SEQ ID NO: 285311 - protein, 349 aa, unidentified
MTVYIGVDFHPYEQSVAYVDDGDGEIGYRRFLHSDKQTLKAFYRKCGKDAVIGTEATGSLWWFEKLLFDNGMELKIGDPRLIRRAALSRHKNDFRDAETILDLLVRGQFPAITPRSKKSREVLDLVHYRQTLVQKRTSIANQLQAFARQKGMPKFRLPAVKARKKLLEVPETDTEAFLLSSRLLIFDELTAQIKVLETRLEKEAEEDERGKLLMTHPGIGPITATALTHTLGDVRRFRRKEEVVAFVGLDPLEKSSGEKRRIGSISKHGSRLVRHLLGQAAQACRDRRIRQFYSQVSRRRGRPKAKVAAARKLLINCYVMLRDEIGYEEFKRRGEVGLCEGSGEIGGDS

SEQ ID NO: 285312 - protein, 400 aa, unidentified
MIDTSEIGAFLGLDVGKGEHHATAVTPAGKKAFDKRLPNSEPRLREVFGKLQARHGTVLVVVDQPASIGALPLAVARDMGCPVAYLPGLTMRRIADLYPGEAKTDARDAFVIADAARVMPHTLRSVDLEDETIAELEMIVGFDDDLAGEATRISNRLRGLMTQIHPHLERVLGLRIQHPAVLMLLEQFGSPAQIRKAGRRRLITLIRPKAPRMAERLVEEIFTALDEQTVVVPGTDAAALIVPSLAGSLTAVLDQRKLLAARIEEVLENHPLSKVLTSMPGIGVRTGARILIDVGDGSSFPSAAHLAAYAGLAPATRSSGSSIRGEQPSRRGNKQLKRAFFLSAFAALADPASRTYYDKKISQGKHHTQALLCLARRRADVLFAMLRDGTFYDPQPAPSA

SEQ ID NO: 285313 - protein, 372 aa, unidentified
MRSGLFETVSKDSITVAYALGMGEVELLGKIGTSKADIDRLCKRLQSKARHIRIVYEAGPCGYGLYRQLAGKGFECMVCAPSLIPRKPGERVKTDRRDAIKLVRSHRAGDLSAVYVPSVEDEAFRDLSRGWVSAKDDLKRARQRLKAFLLAHGVRYSGKADWGPAHRRWLSAFAFDSAWQQLAFDEYRRTIEDRIAQCSRLEAALREAVVNWRFYPAVLGLQTMRGVQFTTAVGMLAELGDLSRFAHPRQLMAWLGVTPSEHSSGDKRRQGSITKNGNSYARKLLVEAAWSYRHPARVSPEIQRRHEGIPKAIIDRSWDAQVRLCRRYRRLAARGKNPNIAAVAVARELSGFIWDISQLAMSLAVPNEAQTT

SEQ ID NO: 285314 - protein, 445 aa, unidentified
MAKRTVQFSMVNPKAAGIDVGSKSHWVCAGQGMDYVREYAVFTEDLHQMANWLKSLGIQTIAMESTGFYWKSLFLLLQDYGFEVILVHAAHVKNVRGKKSDIQDCQWIWQLHSAGLLSASFQPDELTESLRAYTRHRKSLIDGAARYISKMQKALVVQNVHLSVVLTDITGKSGQAIISAILNGERDGQKLAALADRRVKADKATIAKALTGHWKDQHLFELQQSWQMYHFHHQQIAECDVQIELILQAQIEANGQQDLAYEPKKTKKRKKNDPSFDLAQKAYQLTDGIDLTEVDGVSFGLLLALITEVGLDLSMFPSAKHFVSWLGLCPNKKVSGGKILSSKTRKNKGRLAYAFRQSANSVGNQKDTALSYAFRALAYKHGRKVAITATARKIATIVYNMLEKGQPYQPMGTLQYQNMVRQKKVMNIQRTIKKHDVKVDELAFS

SEQ ID NO: 285315 - protein, 353 aa, unidentified
MNVNHYIGFDVHKKSISYCVKTADGTIVEEGMLRATHLALREWAEKRREPWHGAMEATLFSGWIYDTLKPYAAELQMGHPAMMKAIGASKKKNDKLDARKTADLVRCNLLPVCYVAPREIRELRRMLRYRNLVVAQAARMKNKMSGLLMEVGAEYNKQRLHGKEYFHELLDTIEEVPESVKDLLRLSRGALEMFQTTQWQLLDRLQKQPLLAKRVTVLMSIRGVGEVTALTWALEVGDPQRFPSVGDAVSYCGLTSALDSSADKQKRGPISKQRNAHLQTVLVEAAKLAPRWNPQLAAIHAREVQRGHRNRATLEVARKLVAYLLAVDKSGKPFEIRTTPAAVEQQVEEVATA

SEQ ID NO: 285316 - protein, 385 aa, unidentified
MASAAIEPSANPAESLCFMAIELSKAKWLVGMLTPLSNKISLRSIPCGAVAELLEFVERTIEKVSRTTGRRVRIISCYEAGYDGFWLHRVLDARGIVNHIIEAASVHVSRKARRAKTDRLDAENLVRVLMAYWRGEPKVCSVVRPPSIEEEDAKRQHREREFLMKERVQHIGRIKGLLATQGVYDFQPNRRDWQSRLSKIVTGDGRPLPPRLAREIDRHCQRLVMVNAMLKEIDAARDAASETSTAPSIPSAQHVQRLVQLKGIGPQVGDVLATEVFYRGFKNRRCLDSYLGLTPSPFQSGGMDRDQGITKAGNPRARTMSIELAWLWLRYQPGSALSRWFHDRTNGAKGRMRRILIVAVARKLIVALWRYLETGLLPDGAELKA

SEQ ID NO: 285317 - protein, 428 aa, unidentified
MTVASSEPPQFTIAAESLRIIFAGVDTHKDTHNVAIVDDHGQPIADREFLAVGSGYRKIIEFLHAYGIVDAVGVEGTGSYGAELARVLANAGMRVLEVNRANRAERRLRGKSDPLDAHQAAMSVLAGRGLSTPKQRDGDVESMRVLLAERSSTTKARTASINQIHALLVSAPEAIRHDFRRYDGNKLTVALARTRPTPGTTPELIVRASAKRLAQCHQVPAADIALIDSQLGQLASRQNPALMAASGVGPFVAAHLLATAGDNPDRISTKAQFAALCGVAPIPASSGKRQRFRLSRGGDRQANAALHRIVLLRKRHKEPRTMAYIARRTAEGLSDRDIVRCLKRHVANEIFALLTQNPAVPLPGDPRLRQRRQTLGIVLTDAAKQLNVPYQRLRRLEIGQRADTDLETTFSARLDDQSRQSKPTPKAA

SEQ ID NO: 285318 - protein, 387 aa, unidentified
MSQVSDLSRSLAPFDQNTTLTVVVELSEASWLVAGMIPGIERQPVKKQEPDPVALLRLLERWRLEAIKAGKTIGQIALAFEAGRDGFWLARWLQARDIAAHVIHSTSVAVSREHRRAKTDRLDTAMLMRVFVGWLRGERGHCRMVAIPTLEQEDAKRPSRERESLVGERTRIINRMKAALARLGIRGFNPALRKAPQRLAALRTPEGVPIPPNTLDEFRRDMDRLVVVREQIDGIERARLARLENAPAAGPHAMVRLLARVVGVGVETADMLVQEVLSRNLRDRRAVARYVGLTGSPDESGKRRREKGLAKAGNPRARRGLIQLAWRFLRFQSGSALAQWYRARTDGPKGARKTTMIVALARKLLIALWRMVTIGDIPVGVALRPTT

SEQ ID NO: 285319 - protein, 326 aa, unidentified
MQGKVPSKDSAATQVYVGIDVCKKWLDVAIHPNGLTERFENTAKGFKKLVRLLSRFPVALTVMEATGKYHRGAHRALHQAGLAVAIVNPLRARLFAESAGCLAKTDGLDAKILAVMAESLKPDAVAPLSDRMETLQELVRARHAAVDQQTAFKNQIGATSCAFVKRELNRLKSTLAVTIARFDREIREQIKACSNLEQRYRIVRSIPGIGPVAATALVVGLGELGQCSAKQAAMLAGLAPVACDSGDKSGPRHIRGGRGDVRRSLYMAAVSACRRNPGLKAFYDGLIARGKRAKVALTAVMRKLVVIANTLITQNRHWQPEAPKMT

SEQ ID NO: 285320 - protein, 316 aa, unidentified
MTEEAVCVGVDVAKGTLDLAVSNSTEARQFENNHEGITSAASYIAGLKPNIIILEATGHFEMPLAAVLQTNHLPVVIVNPRQVRDFARATGVLAKTDRIDSRILALFGLQIKPQVRLLPDQKVRDMESLLSRRRQLIEMLTAEHNRVLQAEDGIRQSIKIHIKWLEKAISAINDDLDSQIRNSPSWREKDDLLKSVPGVGKVVSTTLLIELPELGHLNRRKIAALVGVAPLNRDSGTMRGKRTVWGGRAKLRAVLYMAALVGVRHNPVIASFYERLLKAGKAKKVALVACMRKLLTILNAMIRSNTVWQEAAMETK

SEQ ID NO: 285321 - protein, 348 aa, unidentified
MRNLPKGAAIYGIDLGKTTFHVVGIDSQGAIIQKAKFTRATLLSFFSKAAPAKVGMEACPGSQWLARKLIGLGHSVSIIPAQYVKPYVKSNKNDLIDAAAIAEAMTRPTMRFVQVKNTSQVDLQALHRIRENLVQSRTRVICQIRAFCLEYGISMRHGVGTFKADTLQILAEETNDLTPMMRQILLDQWQDFKYLDNRLAEVSLQIQRQAEADETAMRLTTIPGIGNLTATAITAAVGHGQQFKKARDLSAWLGLVPSQNSTGGKTQLGSISKRGNPYVRKLLIHGARAVLLHLDRSKHRLGRWIQELETRLPRNKVVVAIANKLARIAWAVMQKSGNLYLPAKMMAT

SEQ ID NO: 285322 - protein, 413 aa, unidentified
MRVMIERVVGLDVHQETVVACVLIGKPGERPTKEVRTFRTMTRDLAALREWLLSLGVTHVGMESTGIYWKPVYAVLEGSFELIVGNARHIRNVPGRKTDVKDAEWMADLVRHGLIAKSFVPPPPLRELRDLLRYRRTLVESQAAERNRLLKLLETANIKLASVLSDVFGVSGRAMLKALIEGTASAQAMADLAKGQLRRKRADLVLALEGRVEEHHRFLLGLQLRRLEAADEEIAALDARIDEKLEPYRAPHTLLMQIPGVDRLVAAVLIAEIGIDMSVFLSVYHLASWAGVCPGNHESAGKQKSGRARNGNVHLRTMLVGAAISASRAKGSYLKDKFYRLKARRGSMRAALAIAHKILVAAYHMLAKGVGSREIGEAYLDQISQTRTVANLKRRLERLGFHVTLQSNAQPAA

SEQ ID NO: 285323 - protein, 458 aa, unidentified
MRPISNDVEEIDSEEEERVLACAAAVDVAKASGMVCVRRPHPSIEGRRTSRVWEVESTTNSILALGGDLVALGVERVVLESTSDYWRPFFYLLEAAGCTVWLVNARDVKQVTGRPKTDKLDAVWLAKLNERGMLRPSFVPPREIRALRDYTRLRTELVEERSRHKQRLEKLLEDALIKLSSVAADLLGKSARAMIEALIAGERDPAVLADLAQGRLNAKRARLLEALNGRFDDHHADLARLLLDQIDACSEKVDRLTTRIEQLVAELPDPSPPGERVPRPALPTDVPVEHDSDAPRLTTVERLDEVPGIAERAAQIIIAEIGLDMGRFPTPAHLVSWAKLCPQTIQSGPKVMAGKTGKGNRYLKGVLGEVATAAAKTDTFLGERYRRLVRRRGKQRALVAVARSILVIVWHLLADPDARYIDLGSDYYTNRLDPDRKTRDLVRQLHALGHNVTLTPAA

SEQ ID NO: 285324 - protein, 376 aa, unidentified
MENDSTLYVGLDVHKDSITVAYALGTGEVELLGKIGTTKTDIDRLCKRLQSKAWRIGVVYEAGPCGYGLYRQLVEKGFDCMVCAPSLIPKKPGERVKTDRRDAIKLVRSLRAGDLSAVYVPSVEDEAFRDLARAWVSAKDDLKRARQRLKGFLLLHGVRYAGRADWGSAHRRWLNAYAFDSVWQQLAFEEYRRTIEDRLAQCDRLEAALREVVVNWRFYPAVLGLQTMRGVQFTTAVGMLAELGDLSRFAHPRQLMAWLGVTPSEHSSGDKRRQGSITKNGNSHARKLLIEAAWSYQHPARVSPEIERRHVGIPKPIVERAWDAQVRLCRRYRKLVARGKQKNIAVVAVARELAGFIWDISQLAMSLAVRPEVRMA

SEQ ID NO: 285325 - protein, 330 aa, unidentified
MEQHYIGVDLHKAFFQACALSATGARAWEGRFPRTPEGLRVFADRCHRDTHIAVEATGPTWHFVDALHPTGAQICVVDTRKTRLKAGYAAKTDRLDARRLADALRRESVVSIYIPPVAVRELRELCRGRHHLVRVRTRVVQTIRALLLRSGVGDPPVTRLYSPRGLAWLAAVHLADDSDAVLRRLERVLQRVHEEASAADAAVRARASTDPIVDALQTIAGMGPVLGLTLRAEIGAVTRFPDGPHLASFAGLVPSVDISANHTWYGRITRKGSPWIRWALVEVAMHAMKRNDDTGRRARRIAIRKGVLKARVALARMLCEDVVRVWPRAD

SEQ ID NO: 285326 - protein, 459 aa, unidentified
MQVVYQRCCGLDIHKKLIVACLLIWTSQGMQKEIRTFSTMLDDLFRLRDWLKANECQVVAMESTGVYWKPIWNVLEEELELLLVNAAHLKAVPGRKTDTKDAQWIAELLQHGLLRASFVPPRPQRELRELTRYRSKLVEERARLVNRMQKVLEDGNVKLSSVATDITGVSGQAILHALLSGQDDPAALAELARGRMRSKRDELAQAVQGTLGEHHRFLLKSQLRQLNFYDTQIGELDQEIARRLGVQTGPDDPGSSGNGPTTGHHAPWADQASAGAQTPPPSSPQPPPEPARSQAEVLDILDEVTGINQRIAQIVVAELGIRLDQFPSEAHLVSWAGLCPAAKISAGKRLSTKTGKGNRWLRQALIEAAHGAARSKGTYLGAYYQRLKKRMGSKKAIVALAHRILIIIYHLLKEQQSYRELGPGHADEQALESSKRWALRRLEQLGYTVTLAPKDHEAA

SEQ ID NO: 285327 - protein, 364 aa, unidentified
MKRKVYVGMDVHKETIQIAILPSNTKALVKEQQIKHEEVQIKKFIQKLKSEGTEIHCCYEAGVTGYPLYRYLKTLGVNCIIAAPGKIPRQSSDKIKTDKRDAIKLARLLRSGELESIHVPSEEDEAVRDYLRSRDSLRLDLGRNRQRLMKFLLRKGITYSTTKYWTASHYKWLNNLHFENEILQATFNDYYSRVRVQEENLKAMDQKIQEIAKSEPYREKVGILRCFRGVDYLTAMFLLSEVNDFKRFKTAGSFMSFLGLVPGEYSSGSKRKQTSITKTGSPRLRRILVEAAWQHRFPGTGSKVVAARRVGQSALVVSLAEKASLRLHKKFKSMQLRGKTPQVMITAVSRELSGFLWAAMNLVA

SEQ ID NO: 285328 - protein, 346 aa, unidentified
MEHYAGIDVSLEWSSICVVDALGKIVKEAKISSEPATLVAFFEALGFAVKRIGLEAGPLSQWLHAGLKRAGFEAVLLETRHVKAALSAMTVKTDRKDARGLAQLIRMGWFRPVHAKSIRSQEVRALLVARKQLLGRLIDVELSMRGILRGFGLKVGPVTRKGFEARIRELVRGQATLERIAGAMLSARVALKAEYEKLHKTVLAFVRDDVVCRRLMTVPSVGPVVAITYKSAIDDPNRITKSKAAGALFGLTPRKYQSGEKDVTSGITRAGDEMVRTALYEAANVLLSRITRFSKLKRWGIDVAKRRGSKRAKVALARKIAVILHRMWVDGSTYRWTETQPIAAQA

SEQ ID NO: 285329 - protein, 426 aa, unidentified
MKSASNTLPDQPLNGVTAGLDWARDDHAISIVDDRGRQIERATIEHSAAGLRQLLSLLARHQAGEVGIERPDGPVVDTLLEAGITVVVVSPNQVKNLRGRYGSAGNKDDRFDAFVLADTLRTDRARLMALTPDSDATITLRRACRARKDLVNHRVAVANQLRAHLRNVFPGAVGLFADLDSPISLAFLARFDTQDRADWLSPKRLAAWLGSVGYSGRVDPAELHARLVAAPRGATGEHGTAEAHITHALRAVLVTLVDQITTLSTQIGEQLDRHADAHIFTSLPRSGTVRAARLLAEIGDCRGRFPTPEALACLAGVAPSTRQSGKIRAVGFRWACDKQLRDAVTDFAGDSRRANPWAADPTSGPEPEATTMPTPPESSPAPGSTSSGTAGKTTPPTTPPDTGPFKTSSTKINKPRLDTGHLTREQ

SEQ ID NO: 285330 - protein, 463 aa, unidentified
MKANRTTQRPKEPVHDQEIPKLDALKQINLNAAGLDIGDDEIYVAVPEGRNEESVRVFGTFTIDLYALANWLQFCGVDTVAMESTGVYWIPIYEILDQRGFEVYLVNARHIKNVTGRKTDILDCQWIQQLHTYGLLQPSFRPPEEVCALRALVRHRDSLITSCTREIQHMQKALQQMNLKLTNVISDITGVTGMLIIRDIVAGEHDPHRLARHRNPHCAKSEEEVAKALHGNYRPEHLFALQQALEAHDFYQQQIQTCDAEIERCYAAFKPKVDISDKPLPPRQRQRHKPEGNAPNFNLRLYLYQMAGVDLTQIDGVNALTVQKVLAETGVDMSPWPTVKHFTSWLSLCPHNDKTGGKVIKSRTQKSQNRAAAALRIAAQSLAHSESTLGAYHRRMRAKLGKPEAVTATAHKLARILYSMLKNRTEYRDLGAEHYEEQARQRAIKNLKRKAKQLGFQLVPTDA

SEQ ID NO: 285331 - protein, 357 aa, unidentified
MRSSNVKYIGLDVHKEAISIAVLNGAGKLVMESIIETKASTLVQFLDGLRGELHVTLEEGTWAAWLYDVLKPHAREIVVCNPRRNALLREGSKSDKVDARKLAELLRSGMLRAVYHGENGLRTLRELARSYQVISKDLNRVMNRLKALYRGWGIPCTGTQVYSRRHREQWLKKIMEPGVHRRAELFYQQLDALQVLRRTVRGELLAESRKHQAVKVLREIPFIGPLRAAQLVALMQTPHRFRSKRQLWTYSGLAVETHDSAQYRYIDGQVQRSKKPQQVRGLNQNHNHAMKEIFKSAALSASGRAGPFQNFYEGLLARGMKAELARVTLARKIAAITLTLWKKGEHFDAKYVKSQAA

SEQ ID NO: 285332 - protein, 343 aa, unidentified
MKTVTAIGLDIAKSVFQVHGIDAAGKAVIRKQLKRARVIPFFMKLPPCIVGIEACASSHYWARELTALGHEVKLMPPAYVKPYVKRQKNDAADAEAICEAVQRPSMRFVPVKQPEQQAGLVLHRTRHLLVRQLTAVTNSIRAHLTEFGIVAPVGRRGVDALIAIVNDGRDDRIPDLVRTCLTALSIQAGALREQIRILDRRLVLWHRSNETCKRLDAIPGVGPALATALVASVADPKAFRSGRDFSAWIGLVPKQNSSGGRERLGNITKAGDRYLRSLFCAGALAVIKYALKHGTKHRPWLASLLNRRPTKVAAIALANKLARMAWAMMAKGERYKEPIALAR

SEQ ID NO: 285333 - protein, 342 aa, unidentified
MQIARIGLDLAKYVFEIHGVDAHGKAVLRKTLRRHAVPAFFANLPPCLVGMEASNGAHFWAKALSELGHDVRLISPQFVAPYVKSNKNDRNDAEAICEAVGRPNMRFVPVKSPEQLAVQAVHRIRSRLVADRVRLVNQVRGLLGEHGIVVAKDIGNLRRALARIVGDNEDRALNDLVRALMGELRQELIELDVRIAGYDRKIRELYRNSEICQRLGKVEGIGPVTATALVAAVGDRSSFKNGRQFAAWLGLVPKQRSSGGRARLFGISKRGDPRRSRCARAGSRQAGSKKPVARQDAAAATPERRRRRACQQECAHRLELAHQRQRLRRQSFGWRSLKANPK

SEQ ID NO: 285334 - protein, 427 aa, unidentified
MNYTQNHKISQFTPSTLIVGIDIAKDKHVARAQDDRGIEFGKRLIFVNRMHGFQKLVNWAEDLRKENAKDHVIIGVEPTGHYWFSLAYFLVAKGYDFVVVNPMHVKKSKELDDNSPTKNDTKDARVIAQLIKDGRYSVPNLLDGIYAELREGVKLRDQLIKQLMTIEGRIQNHIQRYFPEFFDVFGDWEGKAAFSTLRLFPFPSQIKELTPEEVLMKWKPYVQRGVGIKRATKLVEAARKSIGIQIGIQFAKRELDYLLEQYELYKQQVEQLDTELEALVETLPLAKQMMKISGLGSTTIALFFSEVGDITKYSHPQQLVNLAGLSLREHSSGKFKGQTRITKRGRSRLRRALYSAIRPLVAHNPTFKALHQYYTTRSEKPLKKQQSLIALCCKLLRVLFVIGQKQCEFDGSKLLSGLNQKHLLQAA

SEQ ID NO: 285335 - protein, 346 aa, unidentified
MALFAGLDISLRTISICIVEADGTLVWEGKSLSEPAALIKALTPYRKKIKLVGLEACPLAEWLYGALTECRFNAVCIEARHAHRFLSSRPNKTDRNDARGIADMMRLDHFKPVHVKSRESQLLRTTLAARKTFIDHMLEIEQAIRGFLKVYGLKLGAIHRCNFAAKVEELVADLPELRAAIWPLVEARNMMRKQAKELDRQLGKRARRDDVCKRLMTIPGVGPIISLAYKATIDDPSRFKRSKAVPAHLGLTPRIYQSGEIDRSGHISKCGDRLLRHSLYEAANAHMRLTKKWSTLRSWGAKLTKRVGTKKALVAVARKLAIIMHRMWMENSDFEFGAAPRNAVKA

SEQ ID NO: 285336 - protein, 371 aa, unidentified
MEEGITYVGLDAHQETIHAAVLVPGMERAAEDAFSNTPEAIRRWARRLVKQGPGAVQCCYEAGPLGYGLLRELEVLGLACIVVAPSLIPVRPGDRIKTDRRDARKLAELLRAGLLTAVHPPTPEQEAVRDLTRAREAVKRDQVRLRHRLSKFLLRRAVRFTPGRKAWTQAHLEWLRGRRLEHAADQAILDDHLLGLEQIEGRLEALDAKLEAIAQTAPYREPVGWLRCFRGIDTLTALALVAELHDWRRFESPRALMAYLGMVPSESSSGGKEQRGSITKAGNVRLRRLLVEAAWHYRHRPSVSYRLRIRRAGQPSRVIAIADRAQQRLHARYARLQARGKAHNKIVVAVGRELVGFLWATMDPRAAAPAR

SEQ ID NO: 285337 - protein, 395 aa, unidentified
MSAEGEAIRSNDYRKDTTVKAPSTRPAAVLGLDVGKSSHWACLIDRGGEVLASAPVRNREGALDALFSSAPAGTLVVVDQFRMIRPLAGRRARAAGLAVAPLPGLAASRAAGLFAGEAKTDERDAEVIARTALGVPDSLSGVPGRGEALEAARALSSQRDHVVACATRDKNRLRAVLLESCPALEAAVDLSDRRWLELLAGFGGAWGIARSGAGGPRAEAAGEAAAASTAPPPALVEAENRQVRFLAARISEALDEAGALEAETAGLLEGDETYACLLTVPGIGPRTAAQLAVSVDIARFPDHDHLASYRGIAPRVRSSGTSVRSVRASRRGDARLKSLLIFSCNSLVRSSGRYGEYYRACRARGMGHGRALKAVARKRLRAIYAVMRDRVPYRE

SEQ ID NO: 285338 - protein, 482 aa, unidentified
MKKRTIYTNQSQELLRLFEQVGNSAKVMCVPIDYAKKDHVVMFCNGYGDIVRKPFSVKNSPEGLKYLIDQVTRSCRHRRIRKEHVFFGGEDANSYAENFANALRSKGWLVAHVNAHDAKKQRQNLQASTDRLDLMGIATMLLNRRANCSPAQTGIYRNLRTLVRHRKKLVVMKTEVRNRVHTVVDRLFPGFLSEKKTSITPFSNSSLYLMENSFSAQQIRRRKHSTLVNILKRYGTAAPEGAAAKLRTYAAQVLTTQNQYAATLQLSLAHHIKLYRCLLDNTEQLEKEIALPLAQSQGAFLTSIKGIGIVLAAGVTAEIGSPFEQRPLNNLTSYSGIIPRVKQSGGPNAQAHTGRVSKRSNHLLKDSVVQSAFHIGHFGPKELSLDYKRRKAAGQHADFGMGRRFLRMAMSLMKTSQIYLPPPLRNDQLRAQERAGYYLAVWPQLRDKWNKVDALKVAFAKHNPLGQWRHIVQELYGIKLKL

SEQ ID NO: 285339 - protein, 414 aa, unidentified
MLCVGIDWATGSHTVTFMTRPGEVLKSLIIANTLKGFLALLDAIHRQMGKDKPAPTPGDVLFIIEDRNQRLVDFLLAQDFAGYLMEPNRMTGYRLRYRSSGNKTDPDDAFIMADVLFRDRDQLPTINPMNAAVQTLKTLLVDREGFVRDQTRLTNRLTACLRQYYPEALELFKDIAGKTALAFLAAYPESVVARQLSRAQVRQFLAEHHCNRSKQLERMVAVLAREPIAVPAAVIATKRRLALHIIQQLQAVQATVAEYDTEIQRIGAESEEVRRFRGLPGAGPQIAGGLYTLMGDDRTRFRCATAVQSFVGTAPRTIQSGKMRAVCFRFGCNRFYRTLAQQMALGAIKTSVWAKQYYRGKRAEGKRHQHALRCLANLLLKIAFAIWRDRVTYDENRHLAQIMRHHMRQISSLA

SEQ ID NO: 285340 - protein, 356 aa, unidentified
MPSTFQRHPTPGVVTVGVDTHADVHVAAVVDGLGRLLGSLAIPTTVEGYAELLAWAEGFGQVGCFGVEGTGSWGAGLSRWLTTNGQAVVEVPRADRARRRRKGKSDTLDAEAAARAALAGLDVVIPKRQDGPVEMIRALRVARRSAMKARIQAGNQLLGLLTRAPEELRARLRKLRGRSLVEAALRLQPAAGVPASVTATTEVALWELADRWHGLDGELTRLDELLGALVKKLAPDLLALPGVGTETAAALLEAAGDNPQRLTSEAAFAHLCGAAPLPASSGKTTRHRFNPGGHRDANEALWRIVLVRMKSHAPTRAYVARRTAEGLSKREIMRCLKRYVAREVYRYLKPTGQVHE

SEQ ID NO: 285341 - protein, 370 aa, unidentified
MEERSTFVGLDVHKETIAVAILLPGHEAPVEWEIANDATAVRRLAAQLRRRAPGKIHCCYEAGPCGFTPQRQLAAAGVDCTVIAPSLIPVKPGERIKTDRRDARKLAQLLRAGLLTSVRPPTPAEEAARDLGRTREDISADLKRARQRLGSFLIRRGVTWRHRGRVWGFRHRLWLRALVFAEPLDRQVFEHYLVAVEYFEAQLQSIDVQLTALAAAEPYREPVGWLRTFRGIDIVTALTLVTELHGFARFTTARELMAFLGLVPSEHSSGATQRRGALTKAGNTHVRRVLIEAAWHYRHRPTISAALRRRRVGQPPRVIALADKAQHRLHQRFARLSARGKPPTKVVAAIARELVGFVWAALAPHATAAA

SEQ ID NO: 285342 - protein, 304 aa, unidentified
MATFAGVDVSKSFLDVFDGTEIKRYTNDPEGWAGIAKETRGPYAIEATGIYHIPVARYLWREGRTVYVVSPLQVRRYAQALMARNKTDNLDARVIAAYAEAAGDRLRPWTPLDADLSAIRVLVGYARGISQQSAANRNRLHAVRFAYPEHAGNIVETVAELKKTARRFYREALKVAHENPTIAHWIDQMTEVSGVGERVALTVMAYGGNLERFDNARAFAAYTGLTPMRKQSGEKEGKARISRMGPGALRQAFYIAARVAVMKDERYRAYYERKRAEGKAHLLVMTAIARKLAVVTWKKAVGRP

SEQ ID NO: 285343 - protein, 351 aa, unidentified
MSTAGDVDLIVGVDTHRDTHTAAVCDGRGRVLSQLKVQAAPAGYGELLAWARATGKGRRLMWAIEGTRHYGLGLARHLAAAGEQAAEIDSTPHVGKRRAGKSDPIDAVRAARELLARPRPGQMRADGDREALRLLMIDRDNAVQSGKTARTVLTSVIVTAPAQLREELRHLPAERRARACAALPCPRGADQLTRVVHQTLIRLGQRAAALAEVADDLEAQITAIVEDMAPGLVAAEFGLGALTAAQILLSWSHAGRIATEQAFAMLSGTAPVPVSSGRTDRHRLNRLGDRQLNRALHVIAVSRMRTHPPALAYVQRRQAEGKTDREIRRCIKRYLARHIYRTLSHSTLSQA

SEQ ID NO: 285344 - protein, 431 aa, unidentified
MEEVTDEPLYLERVCGIDIGKAGLEACLRVPSEARPGRRAQEVRGFGATRREVLALADWLRCWGVTDVVMESTGDYWKGPFYRLEAEGFNCVLADARQVRHLPGRPKNDRADARWLAVCFERGAITPCFVATAEFRLIRLNTRYRRDLIAERTREKQRAEKLLESAALKLSSVISDLHGVTGRDIMDHLIAGERNPRALAQLARAAARRKIPQLEEALEGAEFFTGVHAGLLSAMLTRIDRAASDINQVSQVIEQLLAPHEEQLQQVEGMPGWGRRSAQDAIAETGVDMTRFRTPAHLVSWAGRCPLDQQSAGRSTRRAKVKKGNRYLGGVLGETAISAGRTQTREGARYRRLARRRGKAKAQVALGNTQLKVYHTLLSHPGLRYHDLGADYYDRRNTRRQIRTHVHRLESLGFKVALTPLPDLTGCPEVA

SEQ ID NO: 285345 - protein, 352 aa, unidentified
MMIIGCDFHPRFQQICFLLEETGECGQRRLMHTAEAVDYYRSLKGTRVRIGIEATGSYGWFRRLLSELGHELVVGDATRIRASNPRKQKTDKRDAEQILGLLVADRFPAIWQPPAENEHLRQLLLHRSRLVRLRTRVTNQLDGMAKNEGWLIAGGWSGKRRKAIEALPLPGWYGERRKDLLGLLDRLEERIAPLNKAVSHAAANNAEACLLMTHPGVGPVVSLAYVLTIGNWQRFPRGKQVGSYLGLIPSEDSSSDKRRLGHISKQGNTFVRWLLVEAASTAQRYDASWHRQYVRLSMTKHHGVAKVAIAHKLAVRLYWMLRSGQDYGQMMERGSHARQSECPVGRSRRPIE

SEQ ID NO: 285346 - protein, 359 aa, unidentified
MSEAIIIGLDIAKYVFHAHGVDGRGRAIFSKRITRRKLLDFFVAQPSCTVALEACGGGHHWARLLTQLGHEVRLIPPAYVKPFVKRQKNDAIDAEAICEAAQRPSMRFVAVKSEQQQAAGLVFRTRDLLVRQRTQLINAIRGHLTEYGWIAPKGPSHVAMLAELLEEEEMASSLPEAARAMFRLMLDTLAGLGSKIADLDKEIARRAREDEVSRRLMTVPGIGPISATAIAALAPPAETFAKGRDFAAWLGLTPLQRSTGGKQKLGATSKMGERTLRRLLIIGSSAIVLQASKRGAPKGSWLEQMLARKPRMLVTVALANKMARIVWALLVKQENYRAWSQPRREPGGPEVVAGVVGRR

SEQ ID NO: 285347 - protein, 430 aa, unidentified
MKSNTQNAKIEAITEKTLVLGIDVGSEMHYARAFDYRGIEYSKKPFKFSNTEAGFVTFKEWILDLKERHEKDKVIPGMEPTGHYWFNLGKFLQDNEMKPVLVNPHHVKKSKELDDNNPTKNDRKDPKVIAGLVREGRYMIPYLPDGVYADLRTASNIRFQLQAELTRIQNRISRWFNVYFPEYKTVYGKPDAKSGMLILKAAPLPEDILTLGIDGVNQIWRDAKLRAVGKARAKILIEAAEHSVGSKEGAVSARMEIRMLLEDYESRNICLQEVMTLIEGLVKQIPMAEKLLEIKGVGIKTVSGFLAEVGDISRFNTPKELQKLAGLALVESSSGKHKGETTISRRGRKRLRYLLFEVAMSLVAKNPEFRELHNYYTTRRLNPLKKMQSLMAIAAKLIRVFYAMLTKGVDYDPKKMASDIKRPAVYLQAA

SEQ ID NO: 285348 - protein, 412 aa, unidentified
MTAINHFAAHVGLDWADKKHDVCVQFKNGERVFHVIEHTPEALDVWLTELHQKVKGRIAIALELKKGPVVYALQKYPFITVFPVHALSLARYRQAFSPSGAKDDPQDAELALELMLRYPQKIKAIEPDNADIRLLQQLVEQRRQLVEDKRRFVNRIINTLKQYYPQPLEWFSHRGSLLLCELIIRWPSLQQLKRAKRDTIRNFLNAKGGRAMALTEQRVASIDNAIPLTTDQSVIEANALMATALATQIKVVSEIIKTYDERIEMLFDTLPDAGLFKSLPGMGPCMGPRMLAALGDNRDRFNSAEEIQNYAGVAPVTERSGQKSWVHWRWQCAKFVRQTFVEWAAKTVNSSYWARLYYQGQREKGKSHQSAIRALAFKWIRIIYRCWKTKTHYDEAKYLLALEARHSPSLRS

SEQ ID NO: 285349 - protein, 343 aa, unidentified
MQTITTIGLDIAKSVFQVHGVDADGNIVIRRQVKRRYVLAFFQKLPPCLVGIEACASSHYWSRELQALGHTVRLMPPAYVKPYVKRHKNDSTDAEAICEAVTRPNMRFVATKAPERQSCLTLHRTRHLFIRQQTSVINAIRAHLAEFGIVAPVGRHGVEQLLGVVADSHDKRLPEVARACVAALGTQLRILKAQILQFDRMIRAWHRSSEESRRLDDIPGVGPVLATALVASVADPKVFRSGRDFSAWIGLVPKQNSSGGKDRLGNISKRGDRYLRSLFTTGALAVIRYAKIHGTKHRPWLTALLTRRPTKVAAIALANKIARMAWAMMAKGERYKEPAALAG

SEQ ID NO: 285350 - protein, 375 aa, unidentified
MNNNNTLYVGLDVHKESITVAYAINSEPVELMGKIGTSPTDIQNLCKRLRSKSSQVSIVYEAGPCGYGLYRRLVKSGFDCMVCAPSLIPKKPGERVKTDRRDAIRLVRSLRAGDLSAVYVPGIEDEAFRDLARAWASARDDLRHARQRLKSFLLVHGVHYVGRADWGPAHRRWLSKYSFESPWRQLAFDEHRRTIEDRQAQCERLESALKEAVTEWRLYPVVEALQAMRGIQFITAVGLISELGDLTRFEHPRQLMSWFGITPSEYSSGGSRHQGSITKAGNSYARKLLVEAAWSYRHPARISPAIQKRQENLPRPVIDRAWDAQLRLCKRYRKLQAKGKNVNITIVAVARELAGFIWDMGRIAMSVAQQLQCHK

SEQ ID NO: 285351 - protein, 303 aa, unidentified
MTIDRWLGIDVSQAVLDAHLLPSGEVWSVSNDADGIEGLVVRLKATRDVLVVMEATGGYQHEAAVALSRAGAAVAVVNPRQVRDFGRATGRLAKTDRISAEVIALFGERLRPEARFVPDDELDLLAALIQRRRQLLEMLTAEKNRLRVTRSTEVQRELKTHIRWLEKRISDTEQKLDGAIRKSPMWRAKDKILQSAPGVGSVVSRTLISELPELGKLNRKQIGALAGVAPFARDSGTLRGKRSVWGGRASVRSALYMAALVGVRHNPVLREMYQRLRTRGKLPKVALVACMRKLLTILNAFAR

SEQ ID NO: 285352 - protein, 360 aa, unidentified
MQRNKISFKGQKIFVGIDVHKDSWRVAIAPEVGVIKGHSQKPSAQELFDFLNKHYPDGDYLAVYESGFSGFSTYYALEAVGVACIVIHAADVPTSQYDEVMKTDKVDAAKLVKSLKSGLLKGIYIHKKEDLDARAVIRLRKTIQKQLGGYKSRVKHLLYNNGVQLPEKYSKPGTCWSRAFIKWLKEDVVLLSSTRDSLDLLIDQVESIRNVSLNATRKVRKLSNTERYRTNIELLTSIPGIGVNIAMGLLTEIGDVKRFHKETEFASYLGLIPTSHSSGDKIVYGEKTFRGNKDMGPQIIEAAWVAISRDRGLGCAYTHYKKKMIPQKAIIRVARKLSNIILAVLKTGKKYEMYQWNEMQ

SEQ ID NO: 285353 - protein, 362 aa, unidentified
MDTSKLKISVAVADGGRNGEVRFFGDISSEPASVASMVAKLSKRGAKLHFCYEAGPTGYGLYRQIVELGHDCVVVAPSLVPKRAGDRVKTNRRDAVSLARLHRAGELTAVWVPDEGHEAIRDLVRAREAANDALKQARQQLQSFLLRHGRVYTGRTPWTRAHVRWLARQAFDHPAHHILLAEYCQAIEDAGVRLDRLTKLVVETAASWSMAPVVAAYQAMRGVAFMTAVTFVVEIGDVRRFDNPRQLMAYLGLVPSESSTGERVKRAGITKAGNMRARRVLVEGAWTYRFPARVSPAIQARLDGLPRAVREIAWKGQMRLCARYRKLMAAGKPKVVAVTAVAREMAAFLWAIGQEVAPTAKI

SEQ ID NO: 285354 - protein, 405 aa, unidentified
MSELEKGLVFAGVDTHKDTHTLCLLDHMGRAIGTFRFAADAKGYDALAGKIGGPATCVGVGVEGAGSYGAGLTRRLLELGYCVHEVTAPGRARRKPGRPKSDPADAEVAARQVLARANLSKPKDQSGWTEELRQLMIARDRLVQATSAMINAAKSLIVTAPEDLRRSLEGLSRKNLRSALSTLDPAAGGIILALGSLGKAWDLQDREADAIEERMKRVLEANAPALLAIYGCGTVSAAALAVAGGGNPERLKSEAEFASLCGVAPLLASSGKTERHRLNRGGDRRANRALYQIAVTRMSYDQRTKDYVGKRKRDGKSKKETIRCLKRYIAREVFRALRNPLEIKGPSWRDLRPARQALGIALVEAGKVLNVGFQRVSYAETGRLMNVRFLEEYDAWLKSQAKRES

SEQ ID NO: 285355 - protein, 312 aa, unidentified
MAQMVLTGGIDVSKEWLDAAVWPKKAELHVTRDRAGYAELAAWLRQHGVTRIGLEASGGYEIEVMDALEDMGFEVVRLNAQRVRMLARAKGRLGKNDRADAHTIAQAAAILVEQEPSQRRRDLDPLVEHLTYRKRLQDWMTDCVNQLEHLRDKALRARVTVRKASLTKELAQLDKRIADLVEKHEDWRALAKRLRTVPGVGPVLAHTLIALLPELGNLSRRAIAALVGLAPYDEDSGKHSGERHIKGGRAAIRQVLYMAAVSAMQHNPVITVFAQRLAGKKAKVIIVACMRKLLVTLNAMLRDGTDWQKRAA

SEQ ID NO: 285356 - protein, 366 aa, unidentified
MKRLVLKEGGKQAQRAQPRAPAVGEVVILGVDLSRSKWVYACRWGGHEQRRFGSPGELTHLQAVVREYQQRGCDVHVVYEACGFGYQIAWWVEAHNARVIVVAPSCVEKAPGAQVKTDGLDAGSLALKYERGMLKGIYIPTREQHEYRQLSRTYGQALKDRSRQQVRLRLLLQEHGYTPPAAGSSWGALERWVSAQQFAPPLGLCVTELMGLRTSAGSSARRLANELRAVGRLPQYVELGKALAAQSGVGRFTAIRFILEVGDIHRFATADSLPNYLGLAPKEYSSGDMVHRGRIRKCGPGSLRAWLVQCAWAAVRADKDGPLVECFKRLEPRVGRKRAIVAVARKLALRLRARWLAFEEEVQQAA

SEQ ID NO: 285357 - protein, 475 aa, unidentified
MKMRVDAGDKDVLLVSLTGLESQYIQEDVMVQSSGLSRGDKRRNAKVALLRELVPTSNAILSIDLADEKQAVVLADHDSRVLARQTVKAKTWRLGPVLEWGRRQAHKHGFADVTVGCEPTGHRWRVLDQLAAQRDMALVCVQPLLVGRARETEDYTRDKTDHKDAVLIARLVAQLDCYVPERADETWAELRQLGSYRDRLIAQATACVQQLRDLLECAWPAVLTAAADPFDSITWCAALAVVLERCDGRPERLARGGEQRFEAAVRREFGRWGGQRGPRRRILAAVFTALTDAAGVLAQRRGALQRSKWVLADWRATKTRLVQVETRMLEILDELGLTELVSSIPGVSTLGAAAILAETGDPTRFDSPRALVKHAGLCPRENTSGTMTGRSRISKRGRPRLRLAAWRAVWGALPNNPVMAARYRHLTSREHNRLNDGQARAAIAAALLRWIHVIVTHRVTWDAAIAGAAELPVAA

SEQ ID NO: 285358 - protein, 348 aa, unidentified
MATVTLIGLDIGKHSFHLIGHDPRGNPVLKKQFNRNSLIEFLAKQPPCRIVMEACCGAHWLARKLTGFGHTVQLIAPQYIRPFVFGNKNDFIDAQAICEAATRPTMRYVAAKSAEQQALSALHRLRESRIAERIQTNNQIHALLLEFGIALPVGVRGITQLPMLLMDETNGLPVKARQILQRQLDHYRLLKTEIDELDHEIATEARQDDVARRLMTIPGIGAITASQLSADAGNAKGYGNARDFAASLGLVPRQYSTGGKSKLLGISKRGDKSLRRLLVQCARVIMQNAPRWKSAMAAWTVALMQRRHSNIVACALANKLARVVWALLAKGGEYRPQARALTEMQTAG

SEQ ID NO: 285359 - protein, 465 aa, unidentified
MPRPPRRRSPKPRVSRSVLDRINPHAAGIDCGAAEHFVAVPPDRDATPVRSFATFTGDLYRLADWLTACRVTSVAMEATGVYWIPVYEILEARGFTVLLVNARHVKNVPGRKSDVSDCEWLRDLHIMGLLRGSFRPAEGIVALRAYLRHRTSLIESVGAHVQRMQKALIQMNVQLPLVVSSITGVTGLRILRDIAAGRTDPRALAQHRDYRCKASEAEIVAALTGHYQPAHLFALQQHLALYDTYQEHLTACDAAIEAHLQHLTATVAAPATPLPPARRKPTTHDNAPHFDMRMPLHQLTGVDLSQIDGIGPYTALRLLSEIGTDMTRWPTVKHFTSWLTLAPQNKISGGRLISSRTQPSANRAGAMLRLAAMTLGRTQTALGAFFRRLAFRVGRAKAITATARKLAILVYRTLKEGLIYADPGANAYDAQHRTQVLRRLKERAATLGFELVDRSTGEVVEGAVS

SEQ ID NO: 285360 - protein, 349 aa, unidentified
MKIIGCDFHPGYQQIAVLDLATGETEEKALSHERKEEVRAFYAGLEGPVRVGIEASGQSQWFERMLAELGHEVWIGDAAKIRASCERKQKTDRRDAELLLRLLAEDRFPRIWVPTAAERDARQLLLHRHKLVRMRTQVKNQLQALALNQGVQQKQKLWSEAGRKQLESLPLLPWASRRRAELLQLLDQLEASIAELDRAVTEQAQARPAARRLMTHPGVGPVTALAFTLTMGPAERLSRGKQVASYLGLIPSEHSSGGRQQRLGHISKQGNPFLRGLLVEAAQSAVQHEPEMRRAYQRLAQRKCRGLAKVAMARKLAVRLYWMLRLKVNYAQLIQGSHAGQPGTFCGRG

SEQ ID NO: 285361 - protein, 340 aa, unidentified
MSLVLQSFLPYPDSCLGTSPHQQGWDTKMAELSFGGIDVSKDRLDVLLLPEGLRFSVCNDAPGWADLIVRLRPLAVSAIGLEPSGGYERGIIRALLAAGLSVRRINPNKLRQFARARGVLAKNDRLDARLIAEYVAIMPTRVVRRDDAVEHLAEIVTMRRQLCDEHAAAMNQAAHLEDAMLRRLSKRRLVRLEADILLLDKRLAELVAADPRLAHRYRLLISMPGVGPTLAYTLLATLPELGQIDRKQIAALVGLAPYDFDSGKLKGHRCIYGGRMPVRNVLYMAALSARRYNPALKEFSNRLAAASKKSKVIIVAVMRKMIITLNAMLRDNTEWRPSSV

SEQ ID NO: 285362 - protein, 376 aa, unidentified
MREKLRFLGLDVHAQTIAVAVAEPDGEVRSLGTIANREDSIRKFIKKLGPAEQLRACYEAGPTGFVLYWQLAQLGVECAVVAPSLVPKKPGDRVKTDRRDALKLARSHRSGDLTAVWVPDEASEALRDLVRQREAAKQDQLRARHRLTKFLLRTGRRQPLGLKAWTEHYMRWLAQIRYSQPAQEVTLRDCLNEFEHMSARVKRLEEAILEVVKLAPQAMQEVIRGLQALRGVAHISAVTIAAELGNISSRFESARQLMGYSGVFPSEDSSGKRIRKGGITKAGNAHLRRIVVESAWSYRHLPRVGEKLRKRHEGIPAEIIEIAWKAQNRLHKRYMKLTMAGKDQRKTMTAVARELLGFIWAIGIKAEAACTLQMAA

SEQ ID NO: 285363 - protein, 320 aa, unidentified
MKNLAPNITKIAVGVDVSKDHLDCCIYPTEKLLRIPNTTGGLKKLVRKLLSGKGVTQVVCEASGGYERLMVKTLRKRGYKVWVVDPKRIKAYKDSKGRRVKTDPIDAKMIALFAGQESCDYEQCNPSEQEEDIKALANRRSSLVAMVINEKKRLQQESNIACKKSIEQTIRYLEKQIKIIDKKRKVIIEGQGNLQKKADIMQSMRGVGATTAHDLLSFVPELGKVENKAIAAIVGVAPETRQSGKYNGHAFIRGGRSAARKALYMAALTASRSNPVLSQFYNRLTSRGKPSKVALVGVMRKMIVTLNVMLREEKTWINYA

SEQ ID NO: 285364 - protein, 338 aa, unidentified
MKLYAGIDLHANNSVVVVIDEDDRILYQKRVHNELGALLQALAPYQATLQGIVVESTYNWYWLVDGLMAAGYRVHLANTTAIEQYKGLKHTDDESDARWLAHLLRLGILPEGYIYPKEERAVRDLLRKRSQLVRQRTSNLLSIQNLLTRNTGSALSGNRIKQLTIAEVEELLPQAELALAVKSNLAVLQCLEEQIEQIEAVVLAQLKLRDGFQPLLTVSGIGQILGMTIMLETGEIGRFATVGDFASYCRCVSSQKLSNGKRKGQGNVKNGNKYLAWAFVEAANFAVRYNAQIKRFYQRKQAKTNGVVAIKTVAHKLARACYYILRDQVPFAVDKAFA

SEQ ID NO: 285365 - protein, 355 aa, unidentified
MESTKYIGMDVHKDAISIAVLNSSGKLVMESIIETKAITILEFVHGLRGSLYLTFEEGTWAAWLYDLLKPHVTKLVVCDPRRNDYLKQGSKSDRIDARKLAELLRSNLLRPVYHGEHGVRPLKELARSYLTITKDQACVMTRVKAVYRSWAIPCAGKQVYGQRHRLEWLGKIQEPGVRRRAEFYYAELDALRSLRLVVRSELLLESKKHNVSTLLSQIPSIGPIRAALLIALLQTPDRFRTKRQLWAYSGLAIETHDSAENQYVNGQLQRSKKQSSIRGLNSNHNPDLKNLFKSASAVAAVKTGPFQTFYAALIGKGIKPEMARLTLARKIAAITLIVWKRGVSFDARYLNPQTA

SEQ ID NO: 285366 - protein, 360 aa, unidentified
MTSVKYIGLDVHKESISICVRNSVGKVVMESVIETKASTILQFIDGLRGDLRVTFEEGTWAAWLYDLLKPRVSGVEVCNPRKNALLKDGSKSDRIDANKLSEQLYMNNIKSVYHGEHGLRTLKELARSYLTINKDLTRVMNRVKAVYRSWAIPCAGKEVYAPRYRAEWLGKISESGVRRRAEFYYQQLDVLRLLRQEVRRDLLLEVKKHKAWKLLRQIPGIGPIRAAVLMAVMQTPHRFRTKRQLWNYCGLGLETHDSGEYRAVKGQLQRAKKQATVRGLNEDHNHDLKDIFKGAAMRASTAAGPLHDFYENLLAKGRKPTIARLTLARKIAAITLIVWKKEVRFDANYLKQQAAFICRQ

SEQ ID NO: 285367 - protein, 348 aa, unidentified
MSISLIGMDTAKSVFHLHGVDAQGKVLLKRKLKRDELIGFFEQQPRCTVVMEACGAAHHWARVLRGLGHEVKLIASDAVKPFVKRGKKNDPADAAAICVAASRPEAKFVMAKSSEQQGVLALHSVRSLLVKQETMLANAMRGLATEFGLVVPKGMGKLEELVALVEEDQSFPEQASRAFAELREHCRGTTERIAALEKQIVAHARQHDVARRLATIPGVGPITASLITATVGDGIGNFRSARHFAAWLGLVPRQHSSGGKTRLGKITKAGNGRIRTLLVLGATSMVYRAAHWNSTAGKWVRGLLERHPVRHVTVALANKNARIAWALMTRNEVYRAKGGAAPAATATA

SEQ ID NO: 285368 - protein, 351 aa, unidentified
MPKRTNAVAVSTIGIDTGKNTLHMIGLDEKGEIVLREKVSRSRIAARLVNVPPCLVGIEAGMATHYMARELVALGHVVKQVPPAFAKPFRQGHKNDFRDAHAVAEAVQRPSTRCVPIKTDDQLDLQALHRVRSRLVGDRTAVINQLRGFLLEHGIAVRQGHRFLRQQLAQILATRTDALSPRLIRIIGDLVEDWAHLDERIERVTDEIESLARTDSSCARLMTVPGIGPIIASAMVAAIGNGAAFAKGRDFAAWLGLVPEQLSTGDRTILGRITKRGNRYLRMLFIQGARAIQLHPASWAKHSFGPWLTAAARRLHCNVLTVALANKLARIALTVLVQARNYETRIAPAAT

SEQ ID NO: 285369 - protein, 421 aa, unidentified
MKPQAPEAFAAFVGLDWADAKHDICLQVAGSARREFLRLEHRPEVIDAWVCTLRTRFNGQPIAVCLELNKGPIVSALQNYDFLVLFPVNPLTVAKYREAFTPSRAKDDPTDAELQVEILLKHRDKLTPLVPQSPTMRALAQLVEHRRRLVGDKVRLTNRLTSALKNYFPHVLQWFQDKDTAIFCDFLSRWPTLKAVQLARRATLESFFRAHHVRSADVITTRIEAIKNAVALTTDEGVIAPNTLLVQALVAQLRVTLQAITDFDTAIAQRAQAHPDFPLFDALPGAGAVFAPRLLVAFGEQRERFPSAEELQKYAGIAPVTERSGKKSWVHWRWQCPTFLRQTFVEWAAESIRHSFWAQVYYQQQRDKGKAHQAAIRALAFKWIRILYRCWQERTPYDESTYLQALTRRGSSLLQNLAKAS

SEQ ID NO: 285370 - protein, 347 aa, unidentified
MDHIGIDLHKKESQICILRAESEPIEQRVRTTPARFADVLGDRPRARILLEASTESEWVARCLEGFGHEVIVADPNFAPMYAARTRRIKTDRRDARALAEACRLGAYRPTHRLSDAQRHVRGRLTVRDALVRTRTGYISVIRALLRQHGWRVASGSAEGFIRRVLALALPGRLLSELAPLLAVMRQVNQQLAYSDARIAAVARADERVERLQSVPSVGPVTAAAFVATLDDAGRFARAHQVEAYLGLVPREWSSGEGQRRGRITKAGHRRVRWLLVQAAVSILRVRHPGTAALRDWAVRLAGRRGRFIGVVALARRLAGILYALLRDGTRYDPTRLRPTPRAVPVAA

SEQ ID NO: 285371 - protein, 425 aa, unidentified
MSEKDYNRQVVKRESIGKDTLIMGVDVGNAWNAVGFMNKEGNVLGSCAKLYNSREGFEQFIRMTEGFKAKHGMNRVFIGMEPTGHYWRKLAYFVKEKGYEVRFVRTTALKHHRELDESSSAKSDKRDALTIANITREGKYIDTVIEDGVVRQLRTLSKVRERLLRYSVGAKNALHAALDDYFPELHEIFWSMNSRSLWAILERCPFPEDVVSMKQSVLTEMIAHSSRKKAGAAQKAKALYESAKKSIGVKRIGSADRYRVKICLEEVKRTVLMLKDIDGQMKSVLKEIPASEYLLSIPGIGPLSAAIFLGELGDPAYFQNARQIVKYAGYDPQESDSGYRISRKFISKKGRWLLRKCLFFMSMRVVVLTNYFQEYYQRKLQTKNRFGQLPRKKEILCAVAIKLIKVIFALLRDKRSFQDTVTIAA

SEQ ID NO: 285372 - protein, 357 aa, unidentified
MDREKYIAMDVHQASISVAVRDAAGKLIVESIIETKAAAILAFIRGIQGSLWITFEEGTSAAWLYDLLKPHVTKVIVCDPRKNALLNAGNKNDRVDARKLSDLLRAGLLTPVYHGESGVRTLRELCRGYLTINKDLTRVMNRLKALYRSWAIPCAGDKVYSPRHRNTWLEKLSEAGVRRRAEQLYQQLDALVQIRREARRELLAESQKHSATPLLRQIPRLGPIRVALLIALIQTPQRFRTKRQLWAYCGLALQTRASGEYRFTGGELQHSKRVPAMRGLNVNHNHDLKNVFKSAAMHVSTSTDPLGDFYRGLLAKGMKPTMARLTLAAKWHQSFYRFGRRSTLRSSRIETASSLSV

SEQ ID NO: 285373 - protein, 407 aa, unidentified
MSYFVGLDWATQEHAVCVINEYAQILWRTTIPHTAAGLAELRTRLARLASPATLLVAVERPSGLLIDSLVDGGFTVVPIHPNALKASRPRYAAAQGKSDAGDAFILADLLRTDGHRFRPLQPLSDETRALRALVRTRDDLIAQRVALANQLRALLESFWPGAAQIFADVDSPIALAFLSRYPTPHSAHRLDERRLAAFLAAHHYSGRRSATELLARLQQAPLVPCGEVERDAKGELVRAVVAILEPLLRQLHHLNSTIEHAVEAHADGPIVMSFPRAGRINAAQMLAELGDDRLRFTSYEHLAAEAGVAPVTQASGKHRAVTFRWACNKRLRVALTTFADNSRHASHWAAHFYQQARARGCDHPHATRILARAWLRVLWRCWQDRTIYDASRHRAAQPLLRTIAATV

SEQ ID NO: 285374 - protein, 323 aa, unidentified
MTHYVGIDVSKATLEVAEECSGKSKQYSNNPDGRSELARTLRAHDGQLHVVVEPTSTYHQHVVDALMDEGISFSLINPSRSKAFSRLVGRRAKTDKVDARLLMELGKSQHLMSSHVPDRDQERLKSLRRYLGQLEEDRTALNNRLEAFGDSPWTSPAVIESLRRRLNDLEREIDHLRDDLDKMVSDTPNWRRSVELLETIPGIGRSSAVLIVSELPAVQHCASAKVWVAYCGVNPEPRESGNTHYSKLSRMGMARVRSSLYMPAVSALRWNAPIKALGERLQAKGKTGKLRVMAAMNKLLRQCFGVLRTGTPFDPVLNQRTSP

SEQ ID NO: 285375 - protein, 302 aa, unidentified
MKKIAYVGIDYHLNSLSIAIVLEGSKKIHETIRLMNDDKTIAKYMKKLSNAYKINACYEASCNGYAFQRKMISWGYHCDVIAPSLIPRKSGERRKNDRRDARNLAKLYANGMLTVVHPPTEKEESVRSLIRCRIAFKESEKKVKQQINSLLLAQDLHRPLSKWTFRYREWLAEVEMSDKYLQQALDEYLGLLEYLDTRVRYLDKQIKEIASSEIYASSVKSLRAFKGIGTLTAMLLIAEITDFRRFPNPRALMAFLGLIPSENSSGDKQKGVSITKTGNHRCRKYLIESVQHYVKKPCLTRK

SEQ ID NO: 285376 - protein, 406 aa, unidentified
MQDAIVRFGSVDWAANSHAACIVDASGHIVDQFSVDHTAAGLATLVRQFQRQHVARVAIERPDGPVVEALLVADLEVVVVSSRAVKGLRTRYGLAGNKADRSDAYILADCLRTDGHRWASLQPDAPETLALRASVRSRKDLVATRVAIANQLRAHLQLVFPAAVSLFAAIDSPIMLRFLARFPSADKAAWLSERRVQAWLQANAYSGRRTPSELLERLRTAPKGVHGATAEAQAVVTLSLVRVLRVLVAEIAELETQIREQLAQHPDGPIFRSLPRSGTVRAAALLVEIGDCRARFPSPDMLAGLAGAVPSTRASGQHRVVTFRWTCDKKLRDALVDFAQDSVRASPWADQLYRRHRQAHKTHPHTVRILTRAWIGVIWRCWQDHQPYDPARHRALQRVLAPQGLT

SEQ ID NO: 285377 - protein, 427 aa, unidentified
MAAREKIGEPEFVAFVGIDWADQKHVWCLQAANSAKRENGELEHKPEVVEAWVSELCQRFGHGPIAVAVEQVKGALVYMLGKYECLHLYPVPSTMSASMRQALYPSGAKDDPRDADLLLDLLLQNRDKLRRLTPDNEVTRRVQNLVEERRKLVEEKTAQLNRLTGYLKVYFPQMLEWFAKLDTKLACEFLERWPSLEELQAAAPAEVRKFFRQHRGRHPELTEWRLQGIGQAMSAIRDRAVIEAKRMVVQVIARVLRTLLEGIAALDGKITEAAEAHPDFFIFQSFPGAGAALAPRLLAALGSQRDRYASAEEVQKYSGIAPVTERSGKKKWVHFRWACPKFLRQSFHEWAGHSIAQSVWARTYYQQQRQRGKDHHAAVRALAFKWIRIVFRCWQDGVAYDENRYLATLAKRGSPLIPVPAVAAPSL

SEQ ID NO: 285378 - protein, 400 aa, unidentified
MDWADEFDQVWVSDADGNKVTEMKVLQNTQGLSDFGRWLHERKAQAIELWAAIEKPHGRIVDFLLNHGVVVYPVNPKALDRARDRFRMSQSKSDSFDAYVLADFLRTDHARLRALEPDSAPAQELKIVTRDHQRLMRQKNRLLNQIEVTLKEYYPRPLEVFNDLETKIALDFLKAYPTPQALSQLNRRGWNRFAKRQHHLSEARADELWEKLNKAQLAVPEHVVRAKARLLAALVVQFEAALQAVKQYEEQVKGFFASMPAADLVKTLPGGKSGTTVPILWAELGDAKSRWESFRHLQAEAGAVPVTQSSGKSRFVQFRFACNKHLRYAIHWFSFNSLNRCEWANKYYRSQRAKGHSHPQALRALGAKWLKIIFVMWRDHKPYDENYHLANIARQQMRAA

SEQ ID NO: 285379 - protein, 426 aa, unidentified
MHDNRNERINQISEDTLVIGVDIAKCVHYACAVDERGREVKKSFSFRQSRQGFETFYATILKVMESHQKKNVVVGFEPTGHYWMNLSSYLTDRGIRFVLVNPLHVKQTKELDDNLQSKNDPKDARVIAKMIPQGYYSIPRDMTPIEAELRHGSAFRARLKKQGASTQNRIKRWIDLYFPEFISVYKSIGMNASTVLSSYPLPEDLVREDPEKLLENLRNLGGKHFSVKNLTKLLDVAATSIGYQESPEMARAEIQILLTQMKLLEEQLVSIEKQLVTLAKQMTDFDLFLSVPGIGENTVVEILSEIGAFSHYKSPRQILKLAGLTLVTNSSGKKEGNKRLSKRGRKRLRSLIYKAIFPILHAIPAFRSLYNYYSEHREHPVAKKEALLILCRKLIQVLHGLSKRGETFNEERMVADISFFGNQEAA

SEQ ID NO: 285380 - protein, 378 aa, unidentified
MSNCTRYLGLDVHAETITAAIAEGRGKIRSLGKFANRPEAVRKLIEKLDGGKNLKVCYEAGPTGYALYWQLTKLGVDCEVIAPSLIPKKAGDRVKTDRRDAEKLAQCYQSGELTPVWVPTLEHEALRDLVRQRAAGKADESRAKHRLVKHLLRRGLREPNESRAWTHPWWRWVQSLKFEHEAQQVALSDCIAEVLHMGERLARLDKAIDRLVASAPPHMQAAIEALQALRGVAKLTAVTIVTEVGTFKRFRRPTELMGYTGLVPSEYSSGQREAKGGITHTGNAHLRHVLGEAAWHARHRPWLNKRLKKLLPTLPAGVAAIAWKAQERLHKKFARMTFHRKHAGTVASAVARELVGFIWAIGSMAENQHVAKTKEQAA

SEQ ID NO: 285381 - protein, 370 aa, unidentified
MRLYQGQHAFYAGLDLHTRMMYLCVVNPEGEIVLHRNLKSEPESLKRALGPYLPDVVLGAECTFSWYWLADYCRQEKIPFVLGHALYMRAIHGGKTKNDKIDSEKIARMLRGGMFPLAYAYPKEMRATRDLLRRRCYFVRRRGELLAHLQNTFSQYNVPSPGMSMFYAVNRADLPACFEQDSVRRGVEADVKIVAALNEQIKSLDRYLIQHARVDDPLAYQQLQTIPGVGEVLSLVMLYEIQDVSRFANVGQFISYARLVSCAHESAGKRLGSGGRKIGNAHLKWAFGEAACLMLRDHQEVKRWVDRWEKQYGRRGRALNRLAAELARAVYWMLRRKQPFDLAKFLGLKATARARTDAAPARVEVAAVAK

SEQ ID NO: 285382 - protein, 347 aa, unidentified
MKVLLGIDPHKASIAVAAVVEAGGKLVERASFPQDRAGLRALERWAKRFPERRWAVENAGGLGRHLAVRLAAAGECVVDVPPKLSARVRVLSSGNARKNDGLDALATALAASRNERLAAVDPEVGSEVLRLLSERREDLVAERTRALNRLHGLLRDLLPGGVTRTLSADRAARILRAIRPKGGASVRLRRRLASEVLRDVRTLDRKIADLNGRIEAEVEASGTTLTEIFGIGPVLAARIIGTVGDVGRFPTKAHFASYAGTAPVEASSGEVVRHRLSLAGNRKLNYALHMVAVCQARSDVRGGEYYRKKIAEGKSRKEALRCLKRRVSDAVFKSLVADSQAPSRSAA

SEQ ID NO: 285383 - protein, 343 aa, unidentified
MKITRVGVDLAKNVFQVHGADRSGRPAWKRQLRRSNWLRVLLENLEPGCEIGMEACSGAHHWARELQSKGFEVRLIPAQFVKPYVKSQKNDATDAEAICEAMSRPSMRYVSIKTVEQQDIQAMHRVRSSVVGQRTAQANQIRGLVAEYGLAAPKQLSALRKAIPAWLEDAENGLTEGFRALLHGLWVELMRLDERIKELDLEIERIADAHPDARRLQRLRGVGPLIATALVAHFGDASHFNRGREAAASIGLTPRHHGTGGKNRLMSITKQGDRYLRSILIHGARSAVSQAHRKDDRLSRWVTKLKQRSHPNVAAVALANKTVRVAWAMLRNGTEFEPALAAA

SEQ ID NO: 285384 - protein, 434 aa, unidentified
MNVTNTTSFAATIGLDWADRKHDLWICPAGQGKPEHVRLEQKPEALHEWVAKLRQRFSNQPVAIAIETSRGPVLSALMAYDFIILFPVNPKCLKDYRAAFCVSGAKDDRTDSMLLEELVRLHRDKLNALEPDTELTRKLAGLVENRRHLVDERTRLVNQLHSTLKTYFPLALDLLEDQMNTLLAAEFLLRWPTLAALQKEKPTALRAFFHKHNSRSSKRIEERIQTVARAKPLTIDGAIIEPASALVGARAGMLRPLHKAILGLEEAIAKAMDEHPDAAIFRSLPGAGPALAPRLLVAFGTNRQRFASAADVAQFYGLAPVIQQSGNSKTVRVRYRCPKFGRQSFHENAACALKREPWARIFYEAHKKRHDNKHHPACRALAFKLTRIYFACWRDKKTYQSERYLQALQKNGSPLHLALKAQTTTPGEQPKKTA

SEQ ID NO: 285385 - protein, 342 aa, unidentified
MTSAVADDTTDQIVFGGVDSHADTIHVAVISDNGGHLADAEFATAAAGYAAALAFLSAHGHVRAIGVEGTASYGAGFTRAARSAGLDIVEVNRPDRAERRRIGKSDPIDAYAAARAALSGRASSSPKDDTVAGIRALHNAARSAVKARTAALNQITHILVTAPETIRAKFGQLKGADRIDALARLRPAGDAVHTAVLTALKSLARRVRELTAEQQSLTRALDSEVTVHNPGLRAVYGVGPDTAAQLLVTAGGNPERLRTEASFAALCGAAPVPASSGRTNRHRLSRGGDRAANAALYRIALVRMSGDPRTRDYVARQTAAGRTKKEIIRLLKRAIAGRSSAA

SEQ ID NO: 285386 - protein, 343 aa, unidentified
MAEIATVGLDLAKNWFQVHAADAQGRPVLRKKLARSKVLEFFANLPPCLIGMEACGGAHYWARELIKLGHEVRLMPPQYVKPYVKTNKHDAADAEAICEAVTRPSMRFVPVKTVEQQTMAQLHRIRQLLVKQRTMHVNALRGHLAELGIVRGQGRGKAGELVRLIEAAADDGIPAKVRQQLRHLVELLRDLERRLAELDRELGELAREDPVARRLATIPGVGPITATALAMTIGDIGRFRSGRHLAAYLGLVPKQHASGGKERLGRISKRGDTYLRSLLTHGARAVVRVVRARPDPSPGWIGRLLQRRPVNVAVVAQANRTARIVWALLTKGEDYRRPTAAST

SEQ ID NO: 285387 - protein, 406 aa, unidentified
MNAVGIDVSKGKSTVAIMQPFGVVVQSPFEVAHTDSELIALAKRLKKLPGETKVIMEYTGAYYQPIAYILHEEGIFVSAVHAQIIHDYGNDTIRRVKTDKADAVKIANYGISAWLKLRQWAPEDDARRQLKFYSRQYSKYGKLRIMLVNNFIALTDQTFPGVNELFSSAPRKSDGHQKWLDFAMEFWHCECVCGGTPAAFEKRYQKWCKKAGYRFSKEKAWDIFISACGHCCVLPNDAATKLLVQQAIRQINAVSETIAVIAREMKMIAEQLPEWPVVSAFFGVGEVLGPQLMAEIGDVYRFKKKGSLVCFAGLEAPPYSSGKFESKEREISKQGSPHLRKTLFQVMTTVLQRKPADDPIYQFLDRKRAEKKHYYSYMTAGCAKFLRIYYARVKEYLDKQEADAEG

SEQ ID NO: 285388 - protein, 338 aa, unidentified
MNYYAGIDVSLEASSVGVIDANGKIFRETKVASEPEALIGWVGSLGVSLARIGLEAGPLSQWLYAALRQAGLAVELLETRHVRNAFKIMPVKTDRKDARGIAELMRLGWFRPVHCKSMEAQETRAILTSRKLLQKMLHETEMSLRGVLRNFGLKVGKVAAGQFAFRIGELVEGHPTLAAIAASLLATRATLRREFNALEKRLRTMARTDPRARLLMSTPGVGMIVALTYVCAIDDPSRFKSSKTVGAHFGLTPTKYQSGETDCTGRISKIGDSSVRAVLYEAAHVILTKPVKGCTALKSWAMRIAKRAGMNKAKVALARKLAVIMHRMLADGTTFQPA

SEQ ID NO: 285389 - protein, 343 aa, unidentified
MKDTIYNHYIAIDWSIENMAIARMTKKSNKITAIDVPSDIADLQAYLKNLKGTKMLTIEETTTSQWLYTELKDYVDRILICDPNRNKLLNEGPKTDKIDATKLVQLLKARLMKEVYHSTDKFLYLRRFISGYEDLVKAGVRLKNQRYSLLRACGKRGFEGAGTKLDSEGDQFVLDCMDRQIEAHKQEKESYGKEFERLAKDYPEIRHQKSLPGIGPIHAVKIVARLVTPYRFADKGHFLSYTGLIKLEKISGGRSYGRKNSRYCRQLKGVYKTSIWAAIGGNNPINNYYKYLIQEKGYPEHKARHKACRKLAILSLGVFKSGKKYQPYRRDHVKGYQELKSGL

SEQ ID NO: 285390 - protein, 344 aa, unidentified
MANLNQFCDFTKLIGIDIAKSVFQIYSCDTQTGEITNMQVKRDKVLESLANCGKCLIGMEACGSSQYWARKLQALGHTVRLMDPKLVKPFVRHNKSDKADAEGVYHALVSGVRAVAVKTETERDIQTLLTMRALLVKQRTARINHVRGLLAEYGHVMPKSVDQFDKKVDECINSLEGDAVQLVIDTLRDTVKSIRDDQDRIKTLQREISRLANQTRNAKHFLTVPGIGETIMAYMCVLLADPTQFSSGRQFAAYLGLVPMHTGSGGKTVTTKIHGRCDKALRALLVQGAHAVARSKCRTDWVKNILAKKPKKVAMVAIANRMARQCWAVASKGQDWRRMPATAA

SEQ ID NO: 285391 - protein, 349 aa, unidentified
MTNANDRTGTAWAGLDVAKGTFDAAVHPAWIPGRPVPLPDLPKASFPRTGEGVARFVEWLDGTTPPAAGVRAVMEATGRYSVELAELLSAARPSLAPAIVDPKSACHFARSLRLRNKTDRSDAAALARFGAERCPEPWCPPTPEYGELQKMSRQRAFLVESLVTARNRLAETEAVPAVARVQKQVVTGLEKALARIEELMRKHVAKRPGLAGAVRRLDTIPGVAFVTATTVLGELGDLTRFPTSRSLSAFAGLSPRRFESGTSVHGRTRMCKQGSPRVRQILYMAAIAAVRRPNNRLARSYAAMVEAGKPRMLALGATMRKMLVIMRAMLANGTDYHDEPAPKRQGSVA

SEQ ID NO: 285392 - protein, 355 aa, unidentified
MNSVRYVGLDVHRDTISEAVLSESGRMIQQSILATRAAAILDFIGGMRGTLHVTFEEGTHSAWLYDLLERRVARLVVCNPRMNALLKSGNKSDAIDARKLAELLRADLLSPVYHGEKSAMEVQHLARSYALLTEDTTRVMARIKAIFRGQAIACAGQKLYGHKHRDEYLAQLGACALRRRAELLYQELEAVQQLRRQAKREMIVECRKYPETKLLCSVPFLGPVRAAVLIGRVQTPHRFRTKRQFWAYCGLALEMRDSGEYRMVDGQVERRKKPAQIRGLNWNHSHELKNLFKAAATTASFSNGVFREFYLGLLKKNMQPEMARLTLARKIAAIALKIWKKGEAFDAEQVKLQAA

SEQ ID NO: 285393 - protein, 351 aa, unidentified
MHYIGMDCHISTLDFAVVNDAGRLVKASSVATSVNNFMEFVRKVTPPRIVYMEEGTLAAWVLEICVLYREKLVITNPKENHWIGSSGQKDDSIDALKLAQLARGGYIKEIHHPVGQRRRFRELMIAYHDTVRSTTRIKNKIKAKFRQNGIQCTGVTVYSETHREEWKGKLPKDATLLLILKGLWRQLEQSEQTEKEILAAAKVQAKHYPEIKHFEDIPGIGFIHAATISAILETPYRFADKRKVWMYAGLGLMKRSSGGKLYSEKLTTDYNRLLKYTIKQAAEVAIQSKDNPFRRKYLDMTLLHGIASHRAKLTIARDMLATMLAMWKKGEKYDPEIREKRLTNRARSGTV

SEQ ID NO: 285394 - protein, 370 aa, unidentified
MSESSTIFVGLDQHKESITVSYVGADRSLEPICLGPIGPRTSDVDAMVRKLQSKGKKLVFAYEAGPCGYGLYRHLTRKGHTCLVVAPARIPRKPGDRVKNDKRDATNLCRLLRSNDLKCVYVPQIADEAIRDLCRAREDAVSDLKAVKHRIKSFLLRHEIRFNGKADWKTPHLRWLGEVKCETSAQQVVFQEYVRAMIQGFERVERLEIELTQHVKSWRLSPVVEALQALRGVRFTVAVTAIAELGDLTRFEKPRQLMAFLGLHPSEHSTGERRRLGGITKTGNTHARRALVEGAWAYRFPARVSKQIQARQEKLPEAVRDIAWRAQVRLCKRFQKMIARGKNANIVVTAIARELAAFMWAIAKQVPVAA

SEQ ID NO: 285395 - protein, 351 aa, unidentified
MPHKSTVHAVTAIGIDMGKNTLHMIGLDLRGAIVLREKVLRGRIASRLANLQPCLIGIEAGMATHYVARELAALGHDVKQVPPTYAKPFRQGHKNDFRDAHAVAEAVQRPTTRFVPAKTNEQLDLQALHRVRSRLVSERTAVINQIRGFLLERGIIVRQGVRFLRQQLPDILAKRTDVLSPRMVRIVTDLAGDWRQLDERIETVTNEIETLAKSDDNCRRVMTVPGIGPIISSAMVAAIGNGAAFARGRDYSAWLGLVPKQMSTGDRTILGRISKRGNGYLRTLFMQAARVILLRPANWPKHGFGAWLIRAAQRLHPNVLAAALANKLARIAWTVLAQERSYEARVTKAAA

SEQ ID NO: 285396 - protein, 421 aa, unidentified
MFKIFRKNCCGLDVHKTWIYACIGITDDNQRTVYHEARFSSFTKDLQRLSLWLQSHQCSDVCMESSGKYWIPVYNVLEQSFHVVLAHPKYTKPQKGNKTDRKDARWICDLFMCNMIKPSFIPPPDIRQLRDLVRYRRKLTNMITGEKNRAQNCLTVSNLKLDDVFADVFGKSSRSITEYILAHPGEKFDVAPFMDLRCKTSVEVVQDAVDGAVSHEQAVKLRECLDHMDQLQEHKSRIEQEILRLAEPYAVHLNLIRSVPGLGSDPMTPIAILSEIGADMSVFPSSKHLVSWAGCCPRNDRSANHVKSTRISQAGSCLKPLLVQVANALIRSKDHPEFGARYRRIKAHRGHMKAIIAVCKMLLTAIWHILSNGEVYNPDGFLSAEPYPAQKDRVLSTKQALDLLRSRGFIIKDLSENPATA

SEQ ID NO: 285397 - protein, 320 aa, unidentified
MRNTVGLDISKLTFDATAMVGKTEHSAKFDNDSKGLDQFSDRLKSLGYQNLHICMEATGSYYEEVADYFAQYYSVYVVNPLKISKYAESRFKRTKTDKQDAKLIAQYCRSAKESELVKRQKPTDEQYRLSRMIAAYAQIKSECAAMKNRHHAAKDEEAAKAYAQIIKAMNEQLEVLKEKIKEQTEKPNCKEGVKRLETIPAIGRMTAAVLFHHLTSSKFETSNKFAAFAGLSPQQKESGTSVRGKGKLTKFGNRKLRAVLFMPAMVAYRIRAFPDFIKRLEEKKKPKKVIIAALMRKLAVIAYHVHKKGGDYDPSRYKSA

SEQ ID NO: 285398 - protein, 360 aa, unidentified
MTLPVVADTEVRVTLGVDTHADVHVAVALDQLGRRLGVCTVATTPAGARQLLDWASQFGPVQRVGCEGTSSWGLGLARFLRGQGLAVLEVNRPSRQTRRRRGKSDSLDAEAAARAVQAGTATTVAKTADGQVEMIRALRVVRRSAVKARTQAANQLQSLLVTAPDELREQLRGLPGDRLVTAAAQLEASGEVATILAASQLALRSVAVRYQQLTAEMSALDQQLGRLVTQAAPALLALPGVGIDTAAALLITAGANPDRLTSEAAFAHLCGVAPIPASSGKTTRHRLHRGGNRDANRALWVVAMGRLRWDARTRAYVARRTAQGKTKREIIRCLKRFIAREVYHVLVPIPPAGGKDHPAG

SEQ ID NO: 285399 - protein, 409 aa, unidentified
MEAIVERCAGLDVHQATVVACVLVGAADLKPRKVTRRFGTTTSELEELAAWLRSEGCTHVGMESTGVYWMPIYAVLEGQFDLVVGNAAHIKNVPGRKTDVKDAEWIADLVRHGLIRRSFVPPKWQRALRDLVRYRRKLVESESAERNRLLRVLETGNIKLASVASDVFGVSGRAMLRALIDGTTSPEQIATLARGRLRQKAARLGLALRGRLEDHHRFLLKTQLERVERIEADIATVDARIDEAVTAHAEHRDRLMQIPGVDRVVAITIIAELGPDMSVFPTARHAAAWAGVCPGNNESAGKRTGNAKRRGNVHLMTALVQAAMAASRKKGSYLKERFWRLKARRGHKRAAFAVAHSILIAAYEMLKRRADYRDLGGDYLDRLNQTAVEKRCVRRLQAMGYRVHLEKAA

SEQ ID NO: 285400 - protein, 399 aa, unidentified
MSVNSPLELRVGVDVGCHSHNVAIGLSTGQILDEFDITHNPEGFRFFFSRIEKQEKKHNCPVAVAMEGFNGYARPLDTLVRGRNYRLFNVNNLKLARFKEIFPAPAKTDHIDARKCLELFQLRDHLPLAKAALLEVAATPLENDILKRLTRRRRRLVNEKARVLNNMQGDLQAVCPGLLEITADAGNLWFLRFLTSSESLVKLARLQRATLLKITGIGVRYAACIQSWQKNAHFSHEAELVGEMIQEDAYRILDLHDKIQAMEAKLDDIANRSVIAQKIETIPGFGAISKAELAGEIGTIDRFQDEGSLALYLGMATLDNSSGKQKGTKPPKHVNTRAKAAMMIAVDRHRKFIPESQRYYEKKRAEGKKHNQAIRALGRHLCRVIFKMLKQEKNYEIRK

SEQ ID NO: 285401 - protein, 452 aa, unidentified
MAANELVGDPGRSGRRRLSTAPRGRSVSRMRLRAERLVKAPDRTERKKRVIALSKRYTRFCGIDVAKRKHVALIIDRDGQCIARAQSFNNDASGYQSILARLKEAGGPRKILVGMEATGHYWYSLRDFLVDRRYEVAVLNPIQTAQQAKKGIRKSKTDKIDAGHIATLIKNGEHRPALVPGELAMTCRYLTRLRYAITRQGVRIKQLLWSRLHPVWPEYESLFATPFCATGRKLLATAPTPHDVLAIEQADLVELIRKTSRGKYGPAQVEKIRRAATDSVGTRRGIDGIRICIRSLLTQLEALQPIRKQLDDEIGALADRVPAYIHTLPGASVHSSVSLFGETDPVETFRSPGQLVAFAGLDVTVFQTGQYKAPRRRISKRGSPVLRHTLWQMAHRACYQEGDLRDYWLRRRGDGLSHRSTVTATAIKLCHVTWRILTDRRDYQPQRPTGNS

SEQ ID NO: 285402 - protein, 460 aa, unidentified
MKAQKKMKGKSGRAVRETVKLDALAQINLHAAGLDIGATEIYACVPEGQDVESTVRVFGTYTPDLQALADWLVHCEVESVALESTGVYWIPVFEILEERGLQVYLVNARQSKNVAGRKSDVLDCQWLQQLHTYGLLSNSFRPEEEVCALRAYLRHRGNLLRHRSAHIQHMQKALQQMNVQLTQAVSDITGGTGLRIIRAIVAGERDPQSLAQQRDPRCAKSEAEIAQALTGNYRAEHVFALQQALELYDFYTQQIHACDAEIERQFSSMASRVDVETHPLPAVTKSRAKNAPTFDVRTQVYRVSGVDLTRIDGIDAVLAQEIISEVGLDMSAWPTVKHFASWLRLAPRNDVSGGKVLRSQTGKTGNRAAQAFRMAAQAVQRSDSALGAFYRRLKSKYGAMQATTATAHKIARIVYHLLKHQEEYIDPGATYYEEQYRSRAIKNLERKAARLGMQVIPTAT

SEQ ID NO: 285403 - protein, 346 aa, unidentified
MGEVTTIGLDLAKHIFQAHGADASGAVVFRKKLRREQVLAFFAGQPRCRVAMEACASAHHWAREIGALGHETRLIAPAYVKPFVKRQKNDAADAEAICEAAQRPTMRFVLPKSAEAQGAAVIFRTRDLLVRQRTQLINALRGHLAEFGHVARKGPGHVAKLVELVRAAESDLPEEARSVLLITVEALEAVHARVRGLDRQIEARAKASPLARRLMTVPGVGPILATAMVALAPPPSTFRRGRDFAAWVGLTPRQHSSGGKERLGRTTKMGERSLRRLLIIGASSTLVAAVRDGARDPWLARLLARKPRMLVMVALANKMARVVWALMARGGILPSSDRGGGLTAVI

SEQ ID NO: 285404 - protein, 409 aa, unidentified
MRVMHCACAGLDVHQKTVVACTMVGEAGGEPKVEKRVFGTSTSQVLEMSDWLGQQEISHIAMESTGTYWRPVWAVLEGRFDLTLCNAAHIKQVPGRKTDQKDAEWIADLLRHGLLKKSFVPPQPQQDLRELTRYRAQVSADRSAVSNRISKLLEGANIKLGSVASEVMGASGRRMLEAIVQGEEDAYKLADLALGELKKKRPQLIEALHGRIREHHRTMLRLELAQWKFLDALIAELERAIEEALRPFLEAVNLLKTIPGFGDVSAAAVVAEVGANMDQFADPGHLASWAGLCPGNNESAGKQYSGRTRSGNRWLKRILCQVAWAASHTRDTYFAALFRRIAAKRGKKRAVLAVAHSLLVTIHALLNKHQTYQELGSDYFDRINADGLKRYCVRKLEALGHQVILAPAA

SEQ ID NO: 285405 - protein, 340 aa, unidentified
MTHRTIVIADHHKSVFVCQILNRDTGEARRSTLQSRRDELRPFLAGLPGPVLVFVEACRSWEWVSDLCDDLGIEFRLVNPRHMPETAKSVKKTDRADVDAMVTRFLVGKLPESRVASRVEREFRALTRELTGLRSEHRVMLQKIHALVDAQGMPATKKQFATNAWREQIREELSGDTWFLLNSLLERWDAIREERDRFEQRIKALGESLSNVALLQTIPGVGPGIAATIVAEVPNISEFKSARHFAAFTGLVPKVRSSAGKPRIGSITKAGPPALRWALTQSIFASQTSKDPTEPFLQYRRKRKKGKAPKVALCAAAHKLARIVWAMLTHQTEYRKTATA

SEQ ID NO: 285406 - protein, 345 aa, unidentified
MNRNTGMSAGQIIGTMNGLQVMGLDIANVQIKRAKVLEYFVNKPKSLIAIEACGGAHHWARELTALGHSVRLLHAKIVRPFVSGNKTDATDARAIWLAVQQPGVKFVGIKTAAQQATLTLHRQRELLMKMRTMQTNALRGLLYEFGATLAQGRKALFKDVERALEELSTQLPQMVRDSLREQVGRIKEMGEAMLEIEKRLALQLKADPQMQRIAQIPGVGLLTATAAIATMGEASAFKSGREFCAWLGLVPSQTGTGGKVRLGGISKRGDTYVRTLLIHGARSVLSHAKEPSPWLQQIKERRPANVVIVAQAAKMARTIWAVTAKEQSYQRGFQSVRPSAAMHAA

SEQ ID NO: 285407 - protein, 338 aa, unidentified
MKLYGGIDLHSNNSVIALLDEQDKAVYRRRLPNDLEIVISELAPNHEAIEGLVVESTYNWYWLVDGLMAAGYRVHLANTAAIVQYAGLKYADDDSDACWLAKLLRLGLVPEGYIYPKEERPVRDLLRKRSQLVQQRTANLLSVQNLLARNRGSSLGANRIKRLTYEDVDLLLPDADLALAVKSNLAVMRTLDGVIALLEKAVKARTKLRCEFEPLLTVSGIGQILGLTIMLETGEIGRFARVGNYASYCRCVGSEHLSNGKRKGRGNTKNGNKYLAWAYIEAANFAVRYNPQIKRYYQRKAARTNRIVAIKTVAHKLARACYYILRDQVPFDVSRAFA

SEQ ID NO: 285408 - protein, 422 aa, unidentified
MRSVALDVHLDFCEVAIVEGGELRSAGQIETKPQQIALFAQSLAPDDRVALEVTGNAWEIARIIEPHVAQVLVVSPSDTGIRQARAKTDRLDARTLARLLAAGSLDGVWVPDRWTWMMRRRLSRRSALVWARSRAKNQVHAVLMRQLVGRPPFSDVFGVKGREWLQGLELAQEESETVSAAMRQIEFFDSEISEVERLIAQAALESGEIKRLMSVPGVNVIVAASFMAAIGDIHRFESPRKLAGYLGLDPRVRQSGVGPATHGHISKRGSVRARHALVEACWTTVRQPGPLHAFYQRIRARRGHSVAIVAAARKLACLFWCLLTREEDYAYQQPSLTRKKLRRLEITAGAERYTPEAAGIWSANDAVRQAERELARQAEVAYARTVSDWHATQAVKVGASVTPGRASKKPLKGEAARQTTSP

SEQ ID NO: 285409 - protein, 391 aa, unidentified
MVCVGIDVAKDKHDCCILDSDGTIRADCITIPNNMDGFKQLLQTIRDCTKKSDKIKVGLEATGHYSYNILGFLLDNDLAVYVMNPLHTNLYRKSLSLRKTKTDRVDARTIATMLLSDVDLKSYTDTAYHNEELKSLTRYRFDKVRERAKLKQSVSRLVTILFPELEKLVPSLHIASVYALLSEYPGAKQISEIHLTKLTNLLATASKGRYGKDKAIQIRDAARTSIGSVMPAKFLELKHTIKLIRELTSEIDEIEVSIQKIMDELNPPILSIPGVGIQSAAMILAEIGDFSNFESPDKILAYTGCSPSTYQSGKLTNCYAHMEKRGSRYLRYALYNATKYVCHWNPVFAEYLAKKRAEGKHYNVALSHATKKLVRLIYALQKSGKAYLVAA

SEQ ID NO: 285410 - protein, 355 aa, unidentified
MTSTKYIGLDVHKESISIAVLNSAGKVVMECVIETKASTILQFIHGLAGDVHLTFEEGTWAGWLYDLLKAHVTVLVVCNPRKNALLKEGSKSDRIDARKLAELLYMSKLSSVYHGEHGLRMLKELSRSYLTITKDLGRVMNRLKALYRGWAIPCAGTQVYAPHYRSEWLGKIHEAGVRRRAELYYQQLDALRLVRQQARKELLAEARKHRATKLLRQIPGIGPLRAAHLVALMQTPHRFRTKRQLWTYSGLGLETHDSAQYRFVEGQLQRSKKPVTLRGLNGNHNHDLKDIFKGAAMRASTAAGPLRDFYEALLAKGRKPTMARLTLARKIAAITLIVWKKEVRFDANYLKQQAA

SEQ ID NO: 285411 - protein, 430 aa, unidentified
MGFIVPTDMHPEQDDQPIPYQWFVGIDWGSQRHQVCVLDGERRRVGERAIDHDGASLAQLADWLWSVSTGQPQRVAVAIEVPRGAIVEGLLERGFHVFAMNPKQLDRFRDRHSVAGAKDDRRDAFVLADAVRTDQPSLRRLHLDAPQLLRLRELSRAEETLLEDFRRSANRFRDQLHRFYPQMLALCSAADEPWLWDLIDLAPTPAHVALLSEEQVQRVLKAHRIRRVTAKEVLTCLQALALPVAPGAAEAAQAHCQFLLPCLRVLAEQLQACSQQVSALLHTLAAEPGDGEGPSDVALVLSLPGVGRKITAWLFAEAAQPIAERDYQMLRTHSGIAPVTKQSGKRRLVVIRRGCNPRLRHALYHMARVAMQCDAHFNSVYAALRAKGQRHGQALRNIGGRLLRILMAMLRHRTCYDASRIRREPVVQMG

SEQ ID NO: 285412 - protein, 411 aa, unidentified
MQVVHERCSGLDVHQKTVVACALTPNGQKLRTFGTTTDDLRKLARWLRAQDIRHVAMESTGVYWIPVFNVLEEELDLEEILVVNARHIKAVPGRKTDVKDAEWIADLLRHGLVRGSFIPDRNHRELRELVRHRQTLIRQHAQVLNRIQKVLEGANIKLASVASTINGRSCLEMLQQIVEGNQDPAAIAELARTRMRSKLPELERALSGTVRPHHRFMLATLLRQHEFLVEEIAAQDREVAERMRPFQAAIDLLDEIPGVGRRTAECIIAELGVDMNIWPSHGHLASWAKVCPGNNQSGGKRRNAHTGKGNPWLYHTLVEAALAAVRTRNSYFGAQYRRLKGRRQADDNRAIVAVAHSILVIVYHMLSDGTKFRDLGADFYGQHDREQIARRAVTTLNKLGYEVTLKSPLAA

SEQ ID NO: 285413 - protein, 405 aa, unidentified
MYDELAEGNVPEIWAGVDIGKTHHHAVVINAEGKRLLSRRVQNDETELLALIGDVLEISRDVLWAVDLNHGGAALLIGLLISHGQPVAYLTGLAVHRASATYRGEGKTDAKDAFVIADQARVRRDLGLLRPGDEIAVDLRTLTTRRLDAVFDRTRQINRLRAQLLEIFPALERSLELTNHGPVVLLTGFQTPAAIRRAGVNRIETWLKNRRVRGAAALAKTVVEAAQAQHTALPGEKLAAAMVVRLAKGVMDLDEEIAELDALIEARFREHPHAEVIRSLPGMGTKLAAEFIAATGGDMDAFASSDRLAGFAGLAPRPRDSGRVSGNMRRPRRYHRGLLRTMYLSAMVSLRCCPASKAYYDRKRNEGKGHKQALLALARRRLNVLWAMIRDGECFHASPPVTGAA

SEQ ID NO: 285414 - protein, 313 aa, unidentified
MSIPVVYVGADVSKASIDFRFQDQSFQLPNTRSGFSKLQARLLPLEGRVLPHVICEATGGYQNPLVDYLHEHSIAVSVINPRQVRDFARSRGILEKTDLLDARVLAAYGASNSPAPQNPRPPHMRRLAALLGARDHFVASRTEEKNRLQQCEDSWLRSQIERAIAFFDREIKKIEAQLLALRDSDPTLKANADRLDQVAGLDWRGSLGILGYLPELGSLNRRSVAKLAGLAPLNHDSGQFRGQRHIAGGRAQVRRLLYLASLSAIRYNRIFKDFYTKLRAAGKPGKVALTAVARKLLVLLNSALKNPNLSLAN

SEQ ID NO: 285415 - protein, 324 aa, unidentified
MLPTLGIDISKDSFHVELSVNDKLRHRRFSNRPAGFAELSVWLTKHKIARVHACLEATGPYSEALALYLHEHGHTVSVVNPARIKAFGQSELLRNKDDRPDAALIRRFCETQRPSAWTPPTPQLRELQSLTRQLDNLLETRQQQVNRLEASNAKSVVKSLRKLMAHLDAELQRTEQQIAEHIDRHPDLKQQCQLLLSIPGIGQRTAAKLLAEIEGLNKYESARQVAAYAGLTPKNNRSGTLRGRTRLSKTGNARVRKALFLPAIVAQQYNPIVRAFCQRLAQRGKTKMQIVGAAMRKLIHIAYGVLKTNQRFDPNHELLLKPVS

SEQ ID NO: 285416 - protein, 362 aa, unidentified
MSMARIIALDLGKFKTVACVMNALDRSHVFETIEMSPTAVHDLLARHATDPAGDTLVVFETCDCCGWVYDLCAALGLSASVVAANSEAWQWRRVKRKTDRDDALKLAKLALLDQLTIVHMPSPIQRQKRRLILHRRSVVSRRTQSRNAIRSIFSQQGIALVRGSKQWTKAGLTQLKAHAKPLADCDDLLDLWRGRLQVELDLMAAADEQLKLLDHQLDTLAAADDRIQLLQTIKGVGPRVAEAVVLHLDDPHRFSSAEHVAGYAGLVPKQIESGEMSRFGHITRRGPSLLRSMLVESAWVVWRHNPWAQAWVQKISRGSRARRKIAIVALARRLLTILWAMLRDNQPFRTPGGVPPTPSLTT

SEQ ID NO: 285417 - protein, 334 aa, unidentified
MEQITTVGIDLAKRVFALHGVDAGGRVVLRSIVRREQLLEAMAKLPPCVVGMEAGSGAHDWARQLQRLGHTPKLMAAKFVSPYRRKGKNDGNDAEAICEAVSRPGMRFVPIKSLEQQALLSLHRVRQGFIVERTATINRLRGLLAEFGVVLPVRAVVVRREACKAAESLPALGRRAIEDLLAHLRTLDERIAAYDRELEQQARQCEPARRLMKIRGIGALSALVIVATVGNARDFRSGRQFAAWLGLTPRQHSSGGKTRLGHITKRGDAYLRCLLVQGARSVLHTASRHADGMSRWAQTLEARRGYHRTLVAIASKNARIAWALLSRNEVLRPA

SEQ ID NO: 285418 - protein, 318 aa, unidentified
MDKEKVYVGIDIGKERIDVAVHSSEQRWSFSNDDVGITRAVSYIGGVCPVLVVLEATGNFQASLVAALAVAGITPAVVNPRQVRDFAKATGRMAKTDVIDAHVIAHFAAAIQPTPRPLPDTQAQELKDIMARRRQVSEMLTAERNRFGSGHKAVRERIQAHITWLQQELDEIDDTSRRVIRESPVWREKDDLLQSVPGVGPIVSATLLAQLPELGTLNRRQIAALVGVAPFNRDSGTLRGKRTIWGGRSRVRAVLYMAAIVATRYNPIIRNFYERLCNAGKAKKVALTACMRKLLTILNAMSKHRVPWNYKLPVVAVS

SEQ ID NO: 285419 - protein, 344 aa, unidentified
MKHYAGLDVSVKETSICIVDEVGRICREMKVVSHPEDLLAVLCDPAWRLERVGLEAGPLSQWLFSGLAEAGVPAICIETRHAKAFLKAQVNKSDRNDARGIAQMMRVGLFRPVHVKTLASQKRRALLAARKILQEKALAIENDIRGLLRNFGLKVGIVGVVGFEQRIHDLVEGVPELADIMEPLLAARRVLREKFAKLHRKVLLLARDNEVCQRLMTIPGVGPVVSLAFISTVDVPARFRNSKAVGPSLGLTPVLNQSGESHRVGRISLCGDEAMRALLYEAAQVMLTRVQKWSWLKAWAMNIAKRRGQKKAIVALARRLAVIMHRMWSDGTEFRWTREMAPTI

SEQ ID NO: 285420 - protein, 347 aa, unidentified
MRFYTKQHKFYCGIDLHAKKMYLCILDEAGEVRLHRNIKTDREVFLKVIEPYQEDVVVAVECMFTWYWIADLCTAEGIPFVLGHALYMKAIHGGKAKNDKIDSHKIAVLLRGGMIPMAYTYPATMRATRDLLRRRNHLMRKRAELYAHIQNTRSQYNLPDTLGCIAKPQNRNGIVERFEDPSVQKMINADLAVIEAYDPIIAKMERDIISMANHHDPVAYALLKSIPGVGRILGLVILYEIETIKRFPSVQDFVSYSRLVKCSKESNGKKSGTSGKKIGNAHLKWAFSEAAVLFLKGNDPGKRYLDRLTNKHGKGKALSILAHKLGRAVYFMLKQKKPFDQDTFLGL

SEQ ID NO: 285421 - protein, 325 aa, unidentified
MGLNTEQIQPQLIQFALGFDVSKATITFFDTHSGEICTLENSKVALKAILKPYAGRLDTLAICEATGGYEDNLLDVLGDLAIPAHRADAARVKAFIRACGANAKTDAIDARHIAEYGLSRAQSLPRWRPSQPREAKIKLLVLRRTDLVSMRVQEENRLKAPRNKPIARDIAGHITEIKRRIEAIDKQIETIMSLDKRLKDRKAILQTVPGIGKVIAPVLLALMPELGHIDRKQAASLAGCAPHARDSGARKGRRFTKGGRRQLRPLLFTAAMAASHSKSHLATTYKCLLAAGKSKLTALGAIMRHIIVIANARLKEYHIAQIRLT

SEQ ID NO: 285422 - protein, 414 aa, unidentified
MDVLVERCAGLDVHRDTVVATVRVPAEDGARNRRAQHTRTFATTTAGITALGDWLAEHEVTRSGMESTGVYWKPVYYLLEDQLEVWLINAEHLHNVPGRKTDVADSAWIAQMVEHGLVRLSFVPPPPIRELRDLTRHRRTLVEERTRVVQRLEKVMQDAGIKLTSVASALLTKSGRAILEALLAGQDDPDALAELARGRLRAKIPALREALAGRFRVGHHGLLVAQMLAHVDFLDAAIAELDTTLERAATPFAATLKRVCTIPGVSVRTAIMLLAECGADMTVFRTPAHLASWAGICPGNNTSGGKSRSGRTRHGSVPLRTALTEAAHAAARTKNTYLAAHHAQIRGRRGLPKAIGATRHDLLIAYWHVVHDQVNYADLGPDWAQRRRSTEHRTRRLVHQLEQLGHTVTLEPSH

SEQ ID NO: 285423 - protein, 408 aa, unidentified
MKRYYIGVDWGDRLHQMYIGDDEGKKVREMKVQESPEGLAEIGRWLDERRAEGIELWAAIEKPAGRIVDFLLDHGVEVYPVNPKAVDRVRDRYRMSDSKSDAFDAYVLAEFLRTDQAHLKVLRPSSEKAQELKMLSRDQRRVGRHKTRLLHQLTTTLKEYYPRPLEVFEDLETGIALDFLQQYPTPAHLGALKRKEFNRFATKQHHLSKQRCEELWEKLQKPQLAVPEHVVRAKAQLVEVLIEQLRAAIKAVKIYNHKVESFFASSPAAQLAKTLPGGKSGTLVAAIWAELGDAQGRWESSRHLQAEAGAVPVTKASGKSRVVHFRFACNKHLRHAMYWFSFVSVNHSEWAKLYYRRQRDKGHSHHQALRALGAKWLKIIFVMWRDHKPYDENYHLANIARQKMRQAA

SEQ ID NO: 285424 - protein, 472 aa, unidentified
MAKQRPDLRPIPQLLHESLYIGIDVGKERHVAGFVSTSLLQRHERFEGCPALSFENSREGFRALIERIRSLAPLEQCFVLLEHTGHYQLVLQQYLQELDLPVYLMHVQQRPAGLLKTDKRDALGLANHLYNQLEKGVQLGNKSQLVRRLTPPTQAAAQLKGLIRHRYELIQESTQRKNKLTAICDELFPEFTRICHNPNAPSALALRARFPTPQAVATASLAALQQARKGNLPSNAKLLELQRLATESIGTKDLIRQRGLLIEQHQLIQELLLIQAHVEQLEDEIGTIIAQAREGQILLSMGMGLVQAATIIATIGSIHNFKSAAALKSYFGWAPKVTQSGKTLDHSRLTPGGNRVMKQMMYWIVASAIKHESEWAKLYARLVETTCPYDERTGTRTGRKRVMGRIAGQMIEVMYALLKQDAEILSKTPPGKVLPAPILYDPVLHRQHREGHYRSSKSLPPPQTIDFLPPSF

SEQ ID NO: 285425 - protein, 359 aa, unidentified
MIVIGIDPHMKTHTAVAVDAASGRTLAEKTVSADARGHDELLSWARGLGRERFFAIEDCRHVSGRLERHLLPRGERLVRVPPKMMAGARCSARSYGKSDPIDAAAVARAALREPDLPEASLAGPEQDVRLLADHRDDLVGERQRIQKRLRWNLHDLELDLELPPRVLDRYVWLERIELALRSLPPSTRSRIALEQTRRCRELTAEIRALERETRALMRVLAPELLALPGCSALLSAQLVGQVAGASRFRSEAAFAMHSGTAPLPVSSGKSTRHRLNRTGNRRLNAVIHMIAITQARMHPPAIAFMERKKAEGMSPREARRCLKRHIARTVYKTMLHSEQARMGQVLQAEFGAEMLAVAV

SEQ ID NO: 285426 - protein, 318 aa, unidentified
MGTVMNLNSSVYIGIDVSGSTLDVAIHDTTEHFSVDNETAAIDQLVQRLIALGPTLVVMEATGKLELAVLKALCQAGLPAVAVNPRQVRDFAKATGKRARTDRIDAFVIAHFAAVIKPVVRPLNDVQTEQLQALLLRRAQLIDMLVAEKARLERAHVAAKESLNDHIKWLKQQLTVADKDIDSFMRASPAWRQKEDLLRSVPGIGPGAAATLIAFMPQLGSLNRREIAALTGVAPFNCDSGKHIGKRRIQGGRAIVRRALYMACIPALRFNPVIRAFYDRLRKAGKPFKVAMTACIRKLIVTLNTMVHNSTPWRPSAD

SEQ ID NO: 285427 - protein, 361 aa, unidentified
MKLDAALDTSATTTAICIVNSRDGEVVLETTVPTDPDAIFRVLEPYLARLHLVGHEATGWSAWLHRELEAHGVPMVLLETHHAARMLEAQRNKTDKNDARGLAQLVRSGWFKPVHAKSDKSNRLKLLLAHRRTLKRKLMDIENEIRQSLKMFGLMAGKRVQRSGFPSRIRALVAGDLLLEGSTDCMLRCWTVLWDEYRKLHTLLVRLAGSDELLRRLCGIPGVGPVTAVTFKAAIDDPVRFAKSKTVGAHFGLTPKRIQSGTSIDNDGHISRRGDGEVRTALYEAASAMMTRSKKHCALKAWGMRLAAKRGHKRAVVAVARKLSVIMHRMWIDGSHFRFAAVDREGKDGSAGSAAAASCAA

SEQ ID NO: 285428 - protein, 356 aa, unidentified
MTNIAHFNALRIVVGVDTHKDEHVAVAVDGIGTRLDEYRVPTTPTGYVRLERWATNIGDVAAFGVEGTGSYGAGLARLLSDLGHKVIEVSRPDRSTRRKLGKSDPIDAEAAARAVLAGVATGLPKSGAHGVEMIRVLKVAKDSAIRAKTQAGNQMLALVVTAPSNLRQALAGLSITRLAKRCAGLRPGNVTTATAATKLALRSIAHRHNQLTSEIKTINVELARLTAETAPSLVATFCIGTDIAATLLITAGDNPQRLKSESAFAALCGVSPIPASSGKTNRHRLNRGGDRRANAALHRVVIVRLRHEARTRKYMERRTKEGMTKKEIIRCLKRYVAREVFTILRQLGRQQLAQAA

SEQ ID NO: 285429 - protein, 345 aa, unidentified
MTTMNYIGLDVHKKTISYCVKDVSGRIQQEGKVGSTRRELDCWMKTLPQPWTVAMEATIFSGWIYDHLLPHATQIKVAHPLMLRAIAAAKKKNDQIDASKLADCLRCDFLPECHMMPRAIRDRRRTLRYRHLLVRQMVQMKNRVSGLLMETGVEYNKQRLHKVSYFRELLSANGEVPPSIRPLLKLSRETIERCQKTEYALVSSLQRDPVLADRIKRLRTVPGVGPITALTWALEIGDVSRFRSIKQAISYCGLCGDERSSADKAMRMPLSKQRNKHIQRALVEAAKLAPRQNHEMAVIYDQERQKGNSNRATLAVARKMVAYLLAVDRQQRDFVPAEERRTTAA

SEQ ID NO: 285430 - protein, 417 aa, unidentified
METTETVYRRIAGIDVHKKMLAVVVRVERGEQVDYVKRKFGATRAEILHLEAWLRAQGVTEVVMESTAQYWRPVWYGLEPHFKLHLTHPLKTRAPRGRKSDFRDAQRLADRWSSGDLQDSFIPGAEQRSWRWLTRTRVHLRKKLCILHSQVEGLLEQGGIKLSSVVSDLFGVSGWAMLEHIAKGVTDVDVLVKLARGVLCKKDSALKEALAGRLEPIYQLLLRQHMEQVRLLRKQIEELNRAIAEAMKDHISALLRLSKMPGVDLYSGQELLAEIGPKAAAFPSPEQFASWVGVCPGSQESAGVNYSRRSAKGNRYLRRLLCQVAWAAIHTKKSFFAGLFARLKPRVDGKGAAWAVAHRIAKVIWLVLHEEVEYKEKGPAPPNERTLVRKLRRMVKEFGQLGLDVRALLEQQLANPA

SEQ ID NO: 285431 - protein, 436 aa, unidentified
MSKSQNPTKEVIPIMKKRIYRRMPVNDFQPQSISAADVGGKLVFAIDVAKVDMVAALASASGSVLHTICWKAPEENPTVLSILRGYRTAGITVETVMEPSGTYGDVLRHQLEQHGFPIFMVSGKRTHDAKEIFDGVPSLHDAKSAAIIARLHADGLSTRLADEVAERRQLKAALAIMDLHQERYLQLVHRLESWLARHWPELPTLLDLTSASLMALLARIGGPADVAAHEKQATRLLRGIGHGLVADDKVAAVVASANTSVGVPLVGLERDALMAIADEAYRAHRAFTTAKTKVGKLAATTPAAALAPVVGHTTAAAVFAEVGDARSFPCTRAFLKAMGLNLKEKSSGTVHGQIKITKRGPSRVRQLLWLAIFRWIQKDPIANAWYQRKKQRDGGRASRAAVALMRKLAKGLYHVGRGGTFDSSKLFDTRRLQVET

SEQ ID NO: 285432 - protein, 354 aa, unidentified
MLIIGCDYHPSFQQIAFVDTETGECGERRLQHREEAEKFYRDLAATGMKVRVGMEASGHARWFERLLGELKVELWIGDATEIARKRERKQKTDRQDAQHILKLLLKDDFPKIWVPSGENRDLRQLLWHRHRMVQARTRIMNQLQAVALHEGLRCKKRLWREHGRQQLESFRLAPWASRRRQDLLELLDRLNPTIAELSQAIEQEAEKFPEARCLMTHPGVGPLTALAFVLIIGRAERFQCGKQIAAYLGLVPLEDSSGNRRRLGHITKQGSPMLRFLLVEAAQVTVRSLPEWRSKYFHLMMRRGRKIAKVAMARRLAIRLYWMWRKGWDYEQVKKFGSHAGQLGTGHGGQYNTE

SEQ ID NO: 285433 - protein, 406 aa, unidentified
MYVGIDVSKDSLMAHAMDQDGKDIFHSFKVRNNKPGCNKLIDFIYKHAKQSDFELIKVGMEATNVYWEHSHRLINNSEKLNSNFKLITYILNPKVVKKFKDAYNSLPKTDSIDAWVIADKTRFRVPKPTIPEEVYRPLRELTRFRYKLVKNIRSEKNRALSLVFLKFSDLKEDVPIDIFSEASMTILESFTLEEIADKDLEELAAFLHENSNNRLGGSTPLNKIITDLKKAARNSYRLKPKMNQAITQTLSMTFDNIRFLQSQLNRSKKVLARELKAIPQTLDTVDGIGVILTSGIIAEIGDIDRFHNQAALASYAGLTWTKHQSGSFVAEETSMTKTGNKYLRYYLVEAANSLRVHNDEYRSYYYKKYHESQKHKHKRALVLTARKFVRLVFALLSKGEIYQPRR

SEQ ID NO: 285434 - protein, 318 aa, unidentified
MRKVFVGVDVAKDKLDISITLDGLKYDPIQILNNESSILGFFDYLKTTYKKSELFFGYEATSNYMHVLQKLLTVHDFKQIMINPYMMSHYLKHLNSRKKSDLADSLGIAKYIQTLDQDEFKTIFNQSDKTLRKYTSSINLLRKLDTQLLNFVHSQKENPIDLLDSFLCALELKIKETKKGLEKEAEKVLKELFPHVIELKKEIKGVGYALLLELVPIFLKSQNYTLKQLQSFVGLSPKIFESGTSVHKKESMSKRGSSLVRKLLYLCTMSAIQYNEIIKEKYTRLVDGGKNKMVALVACMSHLFRAVYVKFHQGLINA

SEQ ID NO: 285435 - protein, 422 aa, unidentified
MSYCPVAGIDVSKRFSDMCILSPDNKIFAQEKIYHDETSINRANALLQKAERLFFSKPVIVMESTSHYHLILFQFFSEHGYDVIVVNPLQSNSMKDFSIRKRKTDRVDAFKLAMMYRTKTLRPSQIPQTATRALRQLCRHRAELLNDVSSYKNRLTALLDQTFPGYDKVFSDVGGVTSCAVLVRFPTPTILLVEEESELVEVIAAACKSGYSFAKKKAGLLISAAQKAQILGIHSCADETLIVCTIQMLRTLSESVLQIETAIDDLLAQIKEMRNNVSLLQSIPGIGSHSAALLLGEIGDISLFKKPKQLAAYFGLDPTERQSGSFRGTKNKLSKRGSSYARAALHMGIVNSICKRGKDSAANPVLLSYYEKKCKNKPAKVAQAASMHKLVFIIFAVLRDQKPFELKTPEQHAVEQGFVKAA

SEQ ID NO: 285436 - protein, 453 aa, unidentified
MRTDNHTMQAIKLHLGLDVHKDSITLAIAPADLPREIRLFGTITNDLHALEKALTRIRKAHPGSPLEVAYEAGPCGFGIARRLQQLRVPCLVAAPSLIPKQPGAPFKTDQRDARSLARLLRAGELTAVYLPEPTDEALRDLCRARTDAVDDLRRCRQRLKSFLLRHDYRYQGKANWSQPHMRYLRELVLPHPAMKAILEEYLQGIDAAHDRVQRLEASMLTLLEQWRLKPAVQALMAFRGFQLVAAMITVSELGDIHRFAHPRQLMTYLGLVSVEHSSGPHQRLGGISRCGNGHARWLLTECAEHYVLAPNVSKELACRQEGQPSQVRALSWKAQNRLHLRFSRLLARRVPRNKVKVAVARELCGFVWALLRTQECYRLSTGGAASETLAPRRRLVLSPRRTPSNQQTTFEPPHDLEIGHEVKRMGAAANPRGRYGTLHLETTPEPRVRTGPR

SEQ ID NO: 285437 - protein, 555 aa, unidentified
MYFTWSFILTVHFGIGIDTARFGHHVSFMDEQKRTAAAPFHFEESYGGYQKLLKILKALVAKADSVHLHIRLDVAGQYAENLITWLRKLDLSTTISIGTPAKNKAYREAHYDKRKADPVESLACARFAIVERPAESPVVPKKFSALRATVSALESEAKHRTRLINQLHSLLAHGFPELAKYVTDIDKGYCLALLLKHPTAKKIAAAKLETIMAIAHMKEDLAKTLHEAAKTSTASASCEIHQSLTSNKVREILDSKEKSAQLLKLMKKAWDSLPDGAYKRVYTIKGIGLQTAAALVAKIISIDRFQCDSALIGYFGIFPEEKDVSGTERDGSPKPGTIIHMCAKGNDLVRRLLYMAAQSASMHNPAVKALFARQAAQAKPYNLVIGHCMAKLLRQVFAVWTKDQDYDPDFESAAQQPATTEKENVVGPKSEAVKPHRQEVTTTQPSLAAKPNKGKRPPLNYVKLKSQLPIIDVLHRRNWQQRTSRGAQLRGPCPLHASQPEDRCFAVHTGKNTYCCHSCGCKGNAIDLVTALSKKETHEACWDWIELTNMEPPLL

SEQ ID NO: 285438 - protein, 356 aa, unidentified
MIANKVSRKSKNDNSSLTETESYDHYIALDWSERNMAIARMGKKDSVPKVIDVPTDLMGLKKYLSNLKGKKILTIEETTTSQWLYVELYSYADRIFICDPYRNRLLSDGPKTDRIDAGKLCKLLKNGMMKEVYHSTNELYELRKLVSYYDDEVRAGVRLLNQKSALYRAENKSWKKQEKLEASRVNKFIVAQLDEKIESYREKHKRYEKEFERVSKNNNVLRSLKTIPGLGPISSVTILSIVIDGKRFKSNNHYLGYCGLVKHQKQSGGRSYGRRLPRYSRRLKAVYVSAAVRVASTENPMREYYEYLLKEKKLPDYNAKNALARYIAKVSLGIIKSGEKYKPYKWRDNKKAKQAA

SEQ ID NO: 285439 - protein, 461 aa, unidentified
MAKKAKKVKTAKGAELRIVNPDAAGIDIADGIMQVCVPADRSKDNNRAFGAYTSDLHAISAWLRECGIKTVAMESTGVYWIPLFCRLQEDGLDVVLTNARDVKNITERKTDESDAEWLMLLHQYGLLKASFQPHNDAKRMRTLTRHRDTLSREASSIVLRMQKAMQQMNIKLTLVLSDITGKSGIRIIEAILAGERDPKKLADLADIQCKTPKEEIAKALEGNWEEDLLFVLRQNYDTFKHFCAQLDRCDTELEKLMENYRTEVAGTGRPSYSPTKKRRDYHKRKRNVGFDVERKAYDMWGVNVFEIPGISHQTALGLMSELGHDFTRKFPSSKQFCCWCNIAPNTKISGGKRISSHVPHRRNNVGLIFRSIASSLANAKNQLGNFYRRIRSRAGGKAAVIATAHKVAEIFFAMVANQTTYNPERVGIDEKVLLEKRIARYKRELERITGMHIEIGNACVP

SEQ ID NO: 285440 - protein, 444 aa, unidentified
MGSLRRGTERQYRDRRSITAGRAKEEVTTTQAYRYHAGIDWASDHHDVCVVDDNGTMLGEKQVEHSGDGIRECIDWLLQLAGGDASLIAVAIEVPHGAMVESLIENNLAVFAINPKQMDRFRDRHTVAGAKDDDLDAFVMADSLRTDQRCFHRVELDEPAILRLREWSRMEQDLQIDGNRLANQLWEQLRRYYPQTLKLSPAANEVWLWDLLESAPLPGDAAKLKPAKVKAILRAHRIRRVTAEQVLEQLRQPALRLAPGAAEAAGEHVLMLLPRLRLLQKQQAAAAQRIRGILEELCTAPPECEGREHRDAEILLSLPGIGPVIAATMLAEASQPLRDRDYQALRHYGGAAPVTRRSGKRKVIVMRYACNERLRNALYHWSRCSMQNDARAKQHYAELRQRGHTHGRALRGLADRNLAMLMSILKSGRLYDPARRGGAVAEAS

SEQ ID NO: 285441 - protein, 427 aa, unidentified
MFDNDYNRQVERRQRIKKTTLVTGIDIGNDFNAVAYMHKEGNILDRHPILHNSREGFDKFVRITENLKKKHGMKDVLIGLEPTGHYWRKIAYFAMEQGYAVRFIKTTSIKHERELNESSSAKSDIKDAITLANLTREGKYIDTVIEDGVSRELRTLSKVREKLSRQSTGAKNTLHAVLDDYFPELKKLFHAMHTRGLWAVLETCPFPEDVLKCDQSAIADIITKASHSKIEGNKKAKALYLEAQTSIGLKRVGDADRYRLTVCLNDVKRTDRMLHEIKKEMTELLHQLPASKYLLSIPGVGPISAAIFLGELGNPVHFHRAKQIVKYAGYDPQESDSGKRIGRKVISKKGRWLLRKCLYLMSVRAVRLSKFFQKYYQRRLKTKNRFGQLLKKKEALCAVAIKLIKVIFALLRDKREFQDTVRFALAA

SEQ ID NO: 285442 - protein, 421 aa, unidentified
MKQQASEAFAAFVGLDWADTKHDVCLQAAGTEHREFLSLEHSPEEINAWVQTLRTRFNGQPVAVCLELNKGPIVSALRNYDFLVLFPVNPLTVAKYREAFTPSRAKDDPTDAELQLELLLKHRDKLTPLSPQSPTMRALAQLVEHRRRLVGDKVRLTNRLTSALKNYFPHVLQWFQEKDTVLFCDFLSRWPTLKAVQLARRATVEGFFRAHHVRSADLIATRIEAIKSARALTTDDGVITPNVLLVHALVAQLRVTLQAMADFDNAIAQRAQDHPDFPVFDALPGAGAVCAPRLLVAFGEQRERFTCADELQKYAGIAPVTERSGKKSWVHWRLQCPKFLRQTFVEWAAESTRHSFWAQVYYQQQRDKGKAHQAAVRALAFKWIRILYRCWQEHTPYDESVYLQALKRRNAPLLHNLANLS

SEQ ID NO: 285443 - protein, 406 aa, unidentified
MSVQGVVTGDSPVVVAVDVGKRTVALSVTDAARHRLLGPVDFEMTGRGLDGILTLIKSRLAGMDVPVRVGIEAAGHYHRPLLTPSVWPADWQVLELNPAHVAEQRRVQGRRRIKTDALDLEAITELVLSGRGLPVTAREAVIGELGAWAAHRTRRVQARTATKNQLLGQLDRAFPGLTLVLPDVLGTKVGRLIAAEFTDPKRLAALGTARFIRFAAVRGLHVRQPLAERLVRAARDALTTADAAVARQVLAADLDLLTELTAQIDASEAEFARLLPLSPFATLTTTPGWGVVRAGNYGGALGDPHRWPGPSQIYRASGLSPTQYESAGKRRDGSISREGNVALRRALIDLGMGLWFNDAPSRTYAAALRTRGKHGGVIACAMAHRASRIAYAMVRDQATYDPGRWK

SEQ ID NO: 285444 - protein, 375 aa, unidentified
MCERAVLTNRPSLDLIPFVLKGLEPVGERGTDPVSSLNPNSCTGFEPEPSKEGSWMMAQNELVVVGIDVAKDKVDACIRSLSQRQTFPSTAEGRRDLIAWLRKHKVGKAVMEASGGYERDWAKALRGADLEVRIVDPKRVRSFARSAGRLAKNDAIDAEMIAWFAETFDEARGQAYDAAHEELVQIVNARQALLEQQTQMQNRCEHTVPIPVRKMHERLLKAIALEVTKLEAVIAALTKASPHFAETAEIIESVPGLGKITSAGLIAAMPELGQVSNEAISALLGVAPYDDDSGKRQGERQIKGGRRKVRNLFYMACMGAATQHNPVLKAFYRRLIAKGKKPKVALVACMRKLIVILNIMIARREKWDAGRYAVG

SEQ ID NO: 285445 - protein, 346 aa, unidentified
MRYIGLDVHQRRTTVATLDDQTGEVASRSVPTVELTTHLSAQPGELRIVLEAGGNSWFVAQQLLSCGWEVVVVHPAYTRPILATYGRAKTDRRDAEALVQAFARGQLEKAVIWMPGPWIADLRELTRGREQLVKQGTKLQVAIRQALQRWGESCPHAKLPGKHAQAWLDDLEVRLRPAQRAVLASLRRALAAHTAESDALSAEIEAWVRDHPDVQRLRTLIGVGVQTAAVIVAEIGDIRRFETAAQLRSYSGLVPHVKQSGERSFTGPLTKAGNAHLRRVMVLAAQHFVQSHATRDLRVRRWYARLVYRHGPNPAKVALARRLLDILFAMLRDGTTFDAERYALAA

SEQ ID NO: 285446 - protein, 421 aa, unidentified
MLTTLCVGGDIHQEQLQLRTIDQSDGHEVGEALTVQNNRPGADQAIAHLVQVLTQHGYTHLEFGLEATGLFWLPFYLYLQQSSALKPFQPTWVCFNPKLVAKFKEGVTLSEIKDDEHDALAVAERLRFGHLPVTYVPSQDYLALRMLTRYRYRLARQIAQEKQRALTRVFLKASEWQPGQPFCDVWGATSATLLTEFSVDEIAAMTLPQLTALIQEYGRKHFDDPQATARHVQRTLQNSFPVTADLDTALTVVLQVAWTHLRDLEKLMHRLDRQIAERMEHFSNPLLSVQGLGPVITAGIIAEIADIHRFLDHPQLAKFVGLVWRKRASGQFVAEETRLAKTGNVYLRYYLIEGANLMRQHNLEYKAYYQRKFAEVPKHQHKRALVLTARKLVRLVFALLTQNQSYVRPQAKSGQEVAPRA

SEQ ID NO: 285447 - protein, 350 aa, unidentified
MIIIGCDYHPGFQQIAFVDTDTGELNERRLGHREEAEQFYRQLKVSGKQVRIGMEASGHARWFERLLSELQFELWIGDAAAIRAKRVRKQKTDRQDAQLLLTLLLEDRFPTIWIPNPGNRNLRQLLWHRHRLVQMRTRVMNQLHVVALNEGVRLKKALWRPAGRAQLESLELACWSGRRRQDLLDLLDQLTAKIQELTRALEAEVEKRPVARRLMTHPGVGPLTALAFELVIGTPERFGCGKQIASYVGLVPSEESSGDRRRLGHISKQGNSLLRFLLVEAAQVTVRTNPDWRRHFLHLAMRRERRIAKVAMARKLAVRLYWMWRKQWDYEQMRKFGSHVGEPGNRQGVS

SEQ ID NO: 285448 - protein, 386 aa, unidentified
MDHATTLPVSERTYSREDCASLFVSLELSRSTWVATSLAPGSRKMSKHTLVGGDGRKLLDLLARLKTRAEQRVATPVKVVTIQEVGLDGFWIHRLLEPNGVESHLVDPASIAVPRRHRRAKTDAIDGETLLRTLMAWQRGEPRVCAMTVPPSPREEDRRRISRERATLLRERIQHTNRIRGLLFGQGITNYNPLHKNRWKCLEELRTGDGRSLPAHLKSEIVREIERLELVLRQISEVEAERDEILRPAQASSPAALLMRLKGIGAEFAAVLYLEGLFRHFENRRQLAAYAGLAPSPWKSGSIDQEQGISKAGNPRLRTTMVELAWMWVRYQPDSDLSCWFRQRVGSERGRIRRISIVALARKLLIALSRYVTHGEIPAGAVMKAV

SEQ ID NO: 285449 - protein, 311 aa, unidentified
MTDHTIGVDISKSHLDAFRLEDGAAQRFENSAPGFRALSKWLGKAPVARIVFEPTGPYHKAFEAALGENFPLVKVNPLQARRFSEAHGTRAKTDAVDARMLARMGAAFDLAPQESNSREARILRDLHVARTGLIKDRTRLRNRAQTQDIAVLKRQTRARLAQVERQIAELDAEIAALIEAQETTARSRDILCSMPGIGAITAAAMLILLPEIGTLERKQVASLAGLAPITRQSGQWQGKAFIGGGRKPLRDALYMPALVAVRHNPDLKAKYDNMRTAGKPAKVALVAVMRKLIEMANALVKADRKWTPKTA

SEQ ID NO: 285450 - protein, 397 aa, unidentified
MYIVGIDIAKRKHEAAVIDGEGTVIIKPFSFTNNCSGYNRLLAMLAKAKLPLDEVSFAMEATGHYWLALFTRLQKEGFRVQVINPVQTNSIRSFYIRQAKTDPRDALLIAEVIRFGHFSESTLHPENIYELRELCRGRHAIVSMQADVKRKVVALLDQVFPEYETAFTNMFGDTSMAILQTCPTPKELSEMRLEELCHLIEVSSHKRFRMAKAQELQALARGSFGFAMAGDVFSTMIRLYAKHLDFLKQQVREMDRKIAEIMETLDTPITTITGIGPTLGAYILSEIGDINRFSSAARLAAYAGIDPTMRQSGEYNGVRNRMSKRGSPYLRHAIWLAASLAVLHDPALKLYFQKKPDEGKPYMASVGHACRKMVSIIYAVMRDNKAYTPYIPNKISA

SEQ ID NO: 285451 - protein, 345 aa, unidentified
MQITTIGLDIAKRSFQIHGIDKTGAVVVAKALSRGRVLIFFSKLEPCLIGLEACASAHYWGRELGALGHQVHLIPPAYVKAYLRRNKNDAADAAAICEAVSRPHMRFVEVKSAAKQAARSLTRVREQLISQRTATVNSLRGHLAEFGIIEAAGLARARRLRAVIEDGTDRRLPDLARESLSILVEQIEGLDGKILDLDGRIAAWHKSNEVSQRLASIPGIGTLTAATFAQAVPNADFFRSGREFAAWLGLVPRQKSTGGKPRLGRISKRGDRRLRSLLVICASSVLQSLKRRKQGTAGAPWLARLMATKPPLVVAVALANKLARTIWAVMAHGQAYQPERGFLAA

SEQ ID NO: 285452 - protein, 343 aa, unidentified
MQMITTVGLDIAKSVFQVHGIDAEDRVVIRRQLKRRYVQAFFQKLPPCLVGIEACASSHHWSRELKALGHTVRLMPPAYVKPYVKRQKNDAADAEAICEAVSRANMRFVATKTPEQQSCLMLHRTRHLFIRQQTAVINVIRAHLAEFGIVAPVGRKGVEALLDVVANPTDTRVPAIARACLAALGAQLRRLKEQIVEFDRMIMAWHRSNEASKRLDAIPGVGPILATALVASVADPKVFRSGRNFSAWIGLVPKQHSSGGKDRLGHISKQGDRYLRSLFMAGALAVIRYAKIHGTKHRPWLTALLVRRPIKIAAIALANKMARMVWAMMARGERYKEPVALTA

SEQ ID NO: 285453 - protein, 340 aa, unidentified
MEQFSRIGIDLGKNVFHIHALESECGPAVTRMLSRTGMGKYFASISPCLIGMEACGSAHYWARELIAMGHDVRLMPPTYVKAYVKRGKNDAVDAAAACEAVSRPDMRFVAIKSEQQQAILMVHKARDLLVKQRTMTVNSLRGSLAEFGVVVAKGVHRVEELAEKAAAARLPETAMLAANVLLEQLVRFDAAIADLTRQIGKAKSDNATARLLTEIPGVGALFASRVTASVPDATVFKSGRDFAAWLGLTPRQDSTGGKIKLGAITKKGDRALRRLLVLGAVSVLRMARKRKGALADWLSALRARKRGKVAAVAVANKLARIVWAMMTTGEAFRTAIFARA

SEQ ID NO: 285454 - protein, 311 aa, unidentified
MHQSSTLYIGLDVHKESIAVAYVAKADHAEGVSLGNIGTRQCDIDHLIRKMQSKSTHLVFVSEAGPCGDWLYRYLTKKGHICWGVAPSLIPKKPGDRVKTNRRDAIKLARLMRSGDLTPVYVPQVEDEAIRDLCRAREDAIRDLQTAKLRLKAFLLRHDIRYTGQATWSPAHLRWLSDVVCPTPAQQSVFHEYVRAITDHTERLARLEQELTEHGQTWRLAPVVDALQALRGVPCTVAVTTVAELGDLTRFANPRQLLHYLGLTPSEYSTGERRQQGGITKTGNSHARRALVEGAWAYRYPAKVSRHLPLN

SEQ ID NO: 285455 - protein, 443 aa, unidentified
MARKNQKRFEIIHHDCAGIDVGSREHWVAVNPDRADPPVRKFLTFTDDLIALADWLASLQIKVVAMEATGVYWIPLFEVLDARGFEVYLVNSRATRQTSGRKSDVLDCQWIWQLMTHGLLSGAFRPADEVCSMRSLVRQRANKVADQAKTINRMQKALSQMNIQLANVISDITGVTGMKILQAINHGERDPHALAALRDRRIKADHATIARSLHGNWRVEHLHSLRQELACYDFLETQIADCDHAIAQALGLLPMRQEEVPAARKVLRSAHRSTAEQAVLHQALGRVMGVDLTAIPTIGVDTALVLASELGPDLSRFPTSQHFCSWLGVAPPTRISGGKSLPGRGPKVINRAAQALKQSASNARNDKSFIGASHRARLSRMDTGCAVKATAHQLARLIYAMLTKGQPYVEQGLEAYEEKSRSRQLRALERKAHKLGWRLEKAG

SEQ ID NO: 285456 - protein, 383 aa, unidentified
MSLVPSVPVTTTVPHTRIYPPLYPMMVGVDVSKDKLSCALVQRATQEMKWQMDVANSVAGIDQLVTRLTGDMARLFGGAPVPVALVVEPTGRYSDLIVRQAKEKGIPILLAPPARAKAFLNSVQSRAKTDPLDGIGLAYFGLSQVLRPFEVKSDAVEQIEQLLSARKSLSSSVAGFEMQRREMKYAAASLEPAIAVLKAQIKAIDKQIAEMMVETKARPAVPELAAARALDAVPGIGPVIAAAVATKLSSKAFTSPEAFVAYIGLDIAVRQSGKRVGQRGLTKQGDAELRRLLYLGAQANLKCKDAENPFKILYKRECDKGLKNTGALCAVARKLAKLCWSIHHNNTEYDPARVLTQPKLEKKQKIAAEEMSADQDTPKGTVH

SEQ ID NO: 285457 - protein, 349 aa, unidentified
MTAVHYIGFDVHKKTISFCVKTAAGEIVEEGSTPAERGALRRWAAARPQAWRGAMEATLFSGWIYDTLKPYGEQLEMAHPAKMKAISAGKKKSDTIDARTIADLVRCNLLPACYVAPSRIRELRRLLRYRSLVVSEAVRMKNKMAGLLMETGAVYVKEKLHRKKYFASLLEELEEVPESVIDLLRLSRGALEMFENTQKRLVRELLADPELTERIERLMTIPAVGEITALTWALEVGDPQRFRSNSDAMSYCGLTAALKSSAGKQQRGPISKQRNHWLQTTLIEAAKLAPRWNLQLAALHARELERGNRNRATLAVARKLVAYLLAVDKSRQPFQVRAPSEESTPKAAS

SEQ ID NO: 285458 - protein, 345 aa, unidentified
MTEVKYIGADVHSSSSFLVVLENSGEVWDKRRLPTTEKDLSVYLEGIPGRKIIAFEETNLARWLYQVFTSAVDEVVVCNPAKNTFTKNGPKTDGQDALHLARLLKAGYLKPVYHGDDPREQFRDLVSAYRDVIQDIVRLKNRYKALFRAEGTPLGKGQMVYKMEELQKQLKSREKSFIARGVYERLRALETQREAFLAEMKVRSRSFKEVRILRSIPGIDYIHAWTLVAYMVTPWRFANKYKFWSYCGLVKHKQISDGKVYGNKKAHGNNALKDVFRKAGLAAIRGTSGLRAYYDHLRLNGEVSHGPAYNAVCREVAALVRTLWKKGEKYNDGEYRKSKNLSHPT

SEQ ID NO: 285459 - protein, 368 aa, unidentified
MKKNTSKTKKRTTTAEAREKFASFVGIDLGDKHCEVCVFNGAGEVQERLRLTMKGKDLEGYFGKLGRSRVALEAGGQSRWVAEVIERCGHEVYVSNVRKVAYISASDDKDDPGDAYKLAELVHFKPQLLHPIQHRSREAQADLSWIRAREALVESRTQLVNTVRGMSKAFGERLGKCSVEAFPAKRAEQVPEEIRGAVAPLLEMIDQLNEKIAYYDQMEEHIARQRYEKHDLLRQVDGVGVHTALSFMLTIGEAERFEKSRMVGPFLGLRPRKKDSGESRPQLGITKAGDEYLRKTLTNCAHHILGPLGKDSDLRRAGQRICERGGKNAKKRAVIAVARKLAVLLHRLWITGEVYEPLRNSKKKAVAA

SEQ ID NO: 285460 - protein, 456 aa, unidentified
MKIPQSTIRLLTGRLVKILLNREVSTMKSNTQNAKIEAITEKTLVLGIDVGSETHYARAFDYRGIEYSKKPFKFSNTEAGFVTLKEWILDLKERHEKDKVVPGMEPTGHYWFNLGKFLQDNEMKPVLVNPHHVKKSKELDDNNPTKNDRKDPKVIAGLVREGRYMIPYLPDGVYADLRTASNIRFQLQAELTRIQNRISRWFNIYFPEYRMVYGKPDAKSGMLLLKAAPLPEDILTLGIDGVNQIWRDAKLRAVGKARAKILIEAAEHSVGSKEGAVSARMEIRMLLEDYESRNICLQEVMTLIEGLVKQIPMAEKLLEIKGVGIRTVSGFLAEVGDISRFNTPKELQKLAGLALVESSSGKHKGETTISRRGRKRLRYLLFEVAMSLVAKNPEFRELHNYYTTRRLNPLKKMQSLMAIAAKLIRVFYAMLTKGVDYDPKKMVSDIKRPAVYLQAA

SEQ ID NO: 285461 - protein, 343 aa, unidentified
MKNSNVMGIDLAKNIIQVCKVDKHGELTSNKAISPNKLKELLAKSVPSIVAMEGCGACHYWARLARKYGHDVRIISPRRVKAFLQGHKTDANDALAVAIAATQFGMVFSQIKEEEQQSLQTLETSRKFLDKELTALNNHIRAYLYEYGITMNRGQKSLRATMVIVLDDLDTRLPECLKSTLKVLWERYQLTVIQLKETERYRAALVKQLEPCKRLMALEGIGEVCAAMLYASMGDGREFKNGRQASVYIGLTPKQHSSGGKTYMMGIDKKGGNKALRAALYQGALSVISRLPNEPRTVKEAWLLKLVERAGIKRACIALANKTVRTAWALLATGKSYEPVLLS

SEQ ID NO: 285462 - protein, 359 aa, unidentified
MGYERTFVGLDVHARSVVGCAMDSVTGEVIQRRLGTDAGEIRHWLGELDGPVAVTYEAGPTGFGLARDLRGHGFRCLVAAPSKITRAPGDRVKTDARDALLLARLLKMGEIVEVVVPSVAAEAARDLVRAREDCRGDLMRERHRLSKLLLRQGIVYSGGQPWTGVHDAWLRRQSFDQPARQVAFESAYEAVVLTTGRRDRLDVAIEEMAADSEFTPVVNRLGCLRGVSTLTAFGLAVEIGDWHRFTGSSIGAFVGLTPSESSSGQSRSLGSITKTGNTHARRLLVEAAWHHRRRYVIGATMTRRWDRVDAAARTRGHQGNQRLHARWQRFDARSKRPSVANVAIARELAGWCWSLAIMT

SEQ ID NO: 285463 - protein, 357 aa, unidentified
MNSSKNISFTGSHFFVGFDAHLKNWKVTIRFNCIELKTFSMNPSPVELFNYLKKNYPGGIYHIVYEAGFCGFWALRKFRELGIDCIVVNPADVPTSNKEKVNKNDPIDSRKLARELENKSLKGIYIPDIYHEELRHLMRLRFRIVQNQTRVKNRIKGLLHTQGITIPLNFTGNSRWSASFIQWLKEINLNTDAGQFTLSNLILQLQQQREHNKNVLRQLRQQAKEKHIAAVIKALLSVPGVGFITAMSLYTEIVDMKRFSNQEQLAAFVGLVPSTRSSDETIYNNGISFRRNKFLRPIMVEAAWTAVKTDPAMTLKYRELTKRMKPQDAIIRIARKLLQRIRHVWLNQEDYVYSLVA

SEQ ID NO: 285464 - protein, 428 aa, unidentified
MSYRIAGIDVHKKMLAVVVSDVEIESEYQFERRMFSSNPEQLRSLAAWLVEQKAEEIVMESTAQYWKPVWGALERYWKPMCEKREGARRKSGTLHLAQALSNRGRRGRKRDFVDAERLVKRLVARELTLSFVPDAEQRLWRTITRKKYQLRRDLVRIHNQLEALLEEAHIKLSSLVSDLLGVSARRMLKALADGETNPAALAALAHERLRATPEQLCDALGACTELNPVYRRLLKMTLEHLQILEQQIGQLDQELATLLHPHQDAVQRLAEVPGFAVDSAQQIIAEVGPAAATFPSEKCLSSWVGACPGEEESAGVNYSHRSPKGNRHMRRLLNQTANAAVKAKGSIFEIIYRRCVPRLGHNQAIGVIAHRQCRLIWLILHQGTRYEERGPAVTKRSRYQRTWRMIRQLRNLGYRIELPNPDASQAQA

SEQ ID NO: 285465 - protein, 351 aa, unidentified
MEYIAFDSHKRYTLASVEKPSGGQSCELRLAHQPGSIRQFLSRWTPGSPVAVETIGNWYWIVDEIEQAGMVPRLVHARKAKLMMAMVNKTDKLDARGLNRLQRCGTLPTVWIPSRELRDQRELPRTRMVFSRTRTRLKNRIHATLAKYGLSIPQVADLFGKKGRELLPQVLAQLPPHTLFSTEQLLAQLDTVEHQIQQFERRIKEVFAPSVELARVMSLPAVGFILGAVILLEVGKVDRFPSAAHLASYAGTTPRVHASGGKMHYGQLRPDVNRYLKWAFLEAANVICLNHRHLPQRHVHRLYQRVASRKGYQKAIGAVARHLAEATYWILKKEEPYREPQASKKVSSTKG

SEQ ID NO: 285466 - protein, 368 aa, unidentified
MNYVGVDIHKKYSVLCAVDEVGKKVGEGRVEGNSEKGFARFFAGLEGPSKAVLEACWNWGLIHDLLEEIEEVEEVVLAHPLKTRLIAEAQIKNDRLDAYALGTLLRGELVARTHIPGRETRARKNLLRQRLYWARLRTMLRNRIHALLDRQRGMQLPQCSDIFGVRGLGFLRRLELGEPDGTLLREALALHDLIAQQIKAQEKRIVAEFEDEAEHRCLRSVPGIGATLAAVIGCEIDGILRFGSAERLCAYAGVVPTTYASGGKVVHGRLLPSCNKWLRWALIEASWVAIGCSAYFGTFYQQQRARGKKPNTAITIVARRMCRILYQLLQEKRDFEKQPPRAHSKSCPRLLRVKTDGTSATCLLKPGC

SEQ ID NO: 285467 - protein, 400 aa, unidentified
MIDTGDIDVYLGLDVGKGEHHATALTPAGKKTFDRRLPNSEPKLREVFAKLQAKHGTVLVIVDQVASIGALPLTVARELGCHVAYLPGLTMRRIADLYPGEAKTDAKDAFIIADAARAMPHTLRSVDLDDEMIAELQMIVGFDDDLAAEATRLSNRLRGLFTQIHPHLERVLGPRMQHPAVLRLLDQFGSPAQIRKAGRRRLVTLIRPKAPRMAERLIDDVFTALDEQTVVVPGTDAAALIVPSLASSLQAVLDQRKLLAHRIEELLEAHPLSKVLMSMPGIGIRTGARILIDVGDGTAFPSAAHLAAYAGLAPATRTSGSSIRGEQPSRRGNKQLKRAFFLSAFAALADPASRTYYDKKIAQGKHHTQAILCLARRRADVIFAMLRDGTFYQPPTPITP

SEQ ID NO: 285468 - protein, 332 aa, unidentified
MQYTYIGVDSHKDTHTAVFLDCFFEKLGEIVFDNTAAAFPDFLSAAETFKQDGTIFLFGLEDVSSYGRALARFLLNNRQPVKHVNSYLVSQERKNISIAIEKNDSIDAECAARLLISKFGTLSNATDDEQYWLLRSLVVQRDFIIQSNVRLKTYLHNLLTQDFPGYHNFFDGFEGKAALAFFTKYPSAGTLKGVSEEELGQFLCENSHGALKIERARKILKATDTTSTVHEIRNATINSTLQQYVFNMKELEKAEDALAKTYAEFGTTLTSMKGLDVPSAAQILSCIGDINKFSTPAKLARYAGIAPTTYASGKKDMQYSNQRGNRELNSPP

SEQ ID NO: 285469 - protein, 437 aa, unidentified
MSTPRHPTTRQAYLAFDIGKNLHWLGAYGGPGLQPLTPPQAVRANQAGFETAAAILTGLLTSGCFDRVIMGHEPTGVYHEAWARALFARFAEYLNGQAQPQLTYLFVNPYQTKQARQCRLGRNRKTDALDLPAIAQCLAEGAGAPAYLPDAETLPFAQWAAVWRQATRDQRRLTIRLLSELDQLWPGALVDVARFRNAHPDLEPPIPLVLSKPLERALIQALLQHCPNPHRIRAMSETELVDFLREHCGRGGPVNARRVLAWAQQALLPPPDITAILARRVQADFAQYQALAARLETLKADAEHLALNSPASVLTTVPGISPFLAARYLAGVGHAQRFASAAQVWAFAGFDPLSDDSGDARRAGQISGRGDPAFRDTLYLIGLHTSRNCPPIARAKQRAQRRGMGKVGAVIHAAHKANRLCWRLLYDQTTYDPACHR

SEQ ID NO: 285470 - protein, 366 aa, unidentified
MKKHNSNNQITTKGDQKETFAFYIGIDLGDKMSDVCVLDQVGEVSEQFRLRMKGTDFQTYFTAIPRSRVAVEAGAQSRWVAELVERCGHQVYVSNTRKVPYIHESDDKDDSGDAYKLAELVHLKPRLLHPIQHRSQEAQADLSWIRAREALVESRTQIINTIRGMSKAFGERLRKCSVESFTAQRAEQIPATIRAAMVPLLEMIDQLNEQIGYYDQMIHHVARTRYPKYWLLDQVGGVGVHTALAFMLTIGNPERFAKSRAVGCFLGMRPRKKDSGERKPQLGITKAGDGYLRKTLVNCAHYILGPHGPDSDLRRFGLRVCERGARNAKKRAIVAVARKLAVLLHHLWVTGEVYEPLRNSRKATAA

SEQ ID NO: 285471 - protein, 329 aa, unidentified
MRSIKTQQKLYCGIDVSGDTLDVCYQGPEGSLEWYKCTNTAEGFKEIWQLTGKLYHFVMESTGVYQLPFCFFLELKKARYSVVNALQIKRYIQMKLERNKTDKKDAFHICMYGVDHHPACYKMPSHLYFECRAINNAIETLTTEITSFKNKLHSLSKLDIDSKVIVTGYKKILRDLEAELKKFETELYKKLEAWQPVLVKQVRSVVGIGKRATAILIVTTQGFKHTQTYQQLISYAGLSPKEYSSGSSIRGKVRICKQGGSLLRHTLYMCALNAKETNGACKELFDRLVAKGKNKKLAVIAVANKLLKQVFGVVKNGCMFDRNYYKKTA

SEQ ID NO: 285472 - protein, 330 aa, unidentified
MFHVFGMDERGKIVIRKPISRMRLLSFAANLPICKIAMEASCGAHNLGRILTGYGHQVRLIPARFVRPFVKSNKNDYVDAEAIAEAVQRPTMRFVPIKTEDQLDLQALHRVRDRLVSRRTGVINQLRAFLLERGITLRQGRNYLHNQIPSILADAEQLFSPRMYRIVLQLLEEWKTLEQQIEKITKEIEGIASEDAACKRLLQVPGVGALVATAMVASIGNGSAFRKGRDFAAWLGLVPRQHSTSGKAKLMGISKRGNEYLRRLFIHGARSVMMHANRLRHSVGAWLAQLETRVHRNVLAAALANKLARVAWAVLATEKPFCRTPEMLAG

SEQ ID NO: 285473 - protein, 322 aa, unidentified
MNLIGIDVSNETFDIERRCGKVLSQREFSNSKAGHSQAIAWVQRGAEGARVCLEATGIYHLQLALALDRAPDIEVMVINPRAGRRFAEAQMVRAKTDKVDAAILLQYVERMRFTAWVAPSNQQLELQSLAHRLAQIRKEQVRERSRLHAAQRAGAHTRLAQRDIGEHLRYLKRHADRIQAAAIALMKQHECLAEDLQLLDSIPGIAELSAMKLIAELGLLAKGLSPAQWVAQAGLDPRPQESGTSLRTPRRISKQGNANLRAALFMPALAAIRTDPNVNAFYNALLARGKRKMQAIIAVMRKLLHAIWGVLHHRQEWDGRKF

SEQ ID NO: 285474 - protein, 377 aa, unidentified
MYRIIKIGMDVHSKNYTLCAMEPLIGEEDRIFANIQVTADYKNILMFIEQLKMKLGMSDEYDIQCGYEAGCLGYSLYNQLTAAGVKCVILAPTTMLTQQGKRVKTDARDALMIAQCLSYGGYHAVYIPTQEDDSVKEYLRMRDDHKEALKKIKQQINALCLRHGHHYEGTTWTIKHVTWLRKLELPSLYRETLDEYMASFDEQTAKIERFDQRIEELSSQEQYWEKVKKLCCFLGIKTHTALSLIVETGDFSRFAKGNTYAAFLGLAPGEHSSGEKTNRTGISKAGNRHLRQLLIEASRGICKGAVGHKSKELRARQNGNTAEVIAYADRGNPRLRSRYYKFIRHGKKKNVAVAATARELACFIWGMMTDNISYRMA

SEQ ID NO: 285475 - protein, 403 aa, unidentified
MNAVGIDVSKGKSMVSVLRPFGEVVAKPFEVRHTAGELRALADYLKSLDGETKVILEYTGRYYEPVAQLLHDAGLFVSAVNPKLIKDYGNNSLRKVKTDKADSRKIARYGLDNWVELRQHTPMDTIRYQLKTMNRQYGLYSKTKVSMKNNLISLLDQTFPCVNTLFSSPAREDGSQKWVDFAASFWHLDCVRGLSLAAFTQRYQKWCKRHGYNFSSGKAAEIHEGAKNQIALLPKDAMTKMLIHQAIEQLNATSKTVELLRTEMNRLAQQLPEYPVVMAMGGVGKSLGPQLMAEIGDVTRFAHKGSLAAYAGVDPGANQSGTREAKSTPSSKSGSPELRRTLFLVMSALLQTSLADDPVFQFLDKKRAEGKPYYVYMTAGANKFLRVYYGRVKEYLLSLEPTD

SEQ ID NO: 285476 - protein, 344 aa, unidentified
MNIATIGIDLAKNVFQLHGVNSQGKVALRRQIHRGQMRGLFVNLPPCLIGMEACSSAHYWARTLQSYGHTVRLIAPQFVKPYVKTHKTDASDAEAICEALSRPNMRFVPIKSIEQQSALSLHRVRQGFVRARTAQACQIRGLLAEFGLVMPRGIANIKQVPKLLQVAGKELPVPFCRLIERLLAHLKELDRQTRELEEQIVDWHERSEPSRRLAKIPGIGPITASALVASISDVRSFKNGRELAAWLGLVPRQHSSGGKPTLLGISKRGDRYLRTLLVHGARSVIVRVLKRDDQKDSWLKRLLERRHVNVATVALAHKTVRTVWAMLAHDREYCPNYKSLPVAA

SEQ ID NO: 285477 - protein, 337 aa, unidentified
MSYLGVDLHTNSFTVCYRSCQGKQRIGTFDIRRIDRFRKTLRKADEVAVEATGNTAWFVERICDRVSRVVVVDPHQFEVIRRSVKKTDKHDARTLAYFLSKDLLPEARMKSKENAQLHSLAGTRDKLVKQRTALVNKIYNVLNRHGLSWKKETLTTEKGLKSIMAFDWEPIVRMELEVLAEQIRSLTRSIKKLDDRISQEGKKLDGHENLTSIKGIGERSAAVLLSVIGDVNDFADEKKLAAYFGIVPRVSDSNGKIYHGRITKNGSKIGRTTLVQCTLAAKRYSPYLREYYDRIKRHRGSGKAIIATARKFLGIIYQTLKNDWIFEDFPNFVIANT

SEQ ID NO: 285478 - protein, 430 aa, unidentified
MGLIVPNAMHPEHDEQPMPYEWFVGIDWGSQKHQVCMLDRDRRRVGERVVDHDGASLARLADWLLTVAAGQPQRVAVAIEVPRGAIVEGLLERGFHVFAINPKQLDRFRDRHSAAGAKDDRRDAFVLADSVRTDQPSFRRLQLDDPQLLRLRELSRAEETLLEDFRRSANRLRDQLHRFYPQMLELCAAADEPWLWDLIDLAPTPAHAVLLSGEQVQQVLKAYRIRRVEAREVLTCLQALALPVAPGAAEAAQAHCELLLPCLRVLTAQLQACHQQVSALLHTLAEAPGEGGRASDVAIVLSLPGVGRKITAWLFAEAAQPLAERDYQVLRTHGGVAPVTKQSGKRRQVMMRRGCNARLRHALYHMARVAMQRDAHFSSVYAALRAKGQRHGQALRTLGDRLLRILMAMLRNGTCYDASRIRREPVVQRG

SEQ ID NO: 285479 - protein, 336 aa, unidentified
MTIIRIGLDTSKHVFQIHGVDENEQPVLRRQVRRSGVAKFFAKLPATRFGIEACGASHHWARLLRGLGHEVMLIPPQYIKPYVKRGKNDAIDAEAICEAMSRPGMRFVAVKSAESQAALTILGVRDLLVKQRTMLINAIRGHAAEFGVTAPKGPQQICELLRRLVVEESVPALAREMIGVLAGQVEALNTKLKEIEARLMAWHRQHQTSQCLATIPGIGPIGGVSFALKVPDPKGFRSARHFAAWLGITPREHSTGGRQRLGKISRAGDEDLRRLLVLGAMAVIQQAKKGRAAPWLLGLLARKPKKLVAVALANKMARIVWAMMVSGETYRRQTAA

SEQ ID NO: 285480 - protein, 340 aa, unidentified
MKANSKFFIGIDVSKPFFDASLMAVTDHQKRGIETARFDNTLEGLKAFGKWLKSFKVAMDPNTLVVIENTGIYHRLIWSFCNKKGLPLHIGNAAHIKWSFGITRGKNDKIDSIRLCKYACKESDTLKVSSALNPVLMQLKDFMTSRTRLLSQINSNKQYIKELKNINDPMVQKAVEKAHLAAIEGIAGSIKEIEALISKIIAENPELKNNYDLLITVPGIGHLTAVYLICCTTNFSAKISGKQLACYAGVVPFEHSSGISIKGRNRVHHMANKELKKLFHLSALSVIQYYPEFRTYYNRKKEEGKHPMSILNAIRNKIALRVVAVVSHQKPYVSNQLIAA

SEQ ID NO: 285481 - protein, 429 aa, unidentified
MKIIYPRVCGIDVHKKFIVAVICISESVEPVYLKKRFSTFHNDLIRFRDWLIQNDCQNVCMESTGKYYIPVYNILESHISNIVVANPKWVRAVKGEKDDDKDAKWIADLFKLGIVKSSFIPQKDFRILRELTRYKYKLVNMRSSEKNRYQNALTSGNCKLDMVFTDVFGKSASNIIDLILSDNPYTDEDILSKVHKNCKASPDMILNSINGTDLTPVQKSRIELVNNHIKQLSSNIQRLDKLIDLMIEPYEDYISFLCQIPGVSRNSAIIILSEIGVDMNQFTSTRRLTSWAGLTPSSNQSAGKKKSVRISRAGVYLKPCLVEVAHAAVKDTNHPYYANKFNKISKRRGKKRAYIAIARKILVAAYHMLLTGEIWNPADLAEVETPVEQRIKYVKNNLKSDIKQLLDIGLTVEELTLMIQQNANNIATQ

SEQ ID NO: 285482 - protein, 352 aa, unidentified
MSTTRYVGVDVGKERCRAAIMNKQGTMEKEFFFENNQKGINHLTSLLTCDDQVVMESTANLWLTLYEALDDKHIKTVLANPMKTKAIASARVKTDKVDAKILAHLLRADLIAESYVPPQQIREIRALIRHRLSLMKMRTMVKNKVHALTDKYGYRCEFSDMFGVSGLKWLRTLEMKDLDRLILENHLLHIEVINLQIGKADVAIKGKACEDEDVRLLMSLPGIDVRTALLLKSEIGLIGRFEGYKHLVSWAGLAPRVHQSGNVEWNGGITRCGSGILRWAMVEAARSAVRWDEKFCDFYGRVKARRGDQKAIVAVANKMLKVVWVMLVRREVYGGVNQRRYEEKLNSAGFDL

SEQ ID NO: 285483 - protein, 421 aa, unidentified
MKFKAQDKQNQLIENITVHHLVIGVDIAQEIHVARAVSFRGIALGSPLKFGNHHEGFKLFKRWIEDLLETYSLSRIIVGMEPTGHYWFSLARWLVDQSIEVVLVNPHLVKKNKENRDNTPSKSDHKDALVIADMVKNGYYSPVRFHSEAYEELRILMANRETVTKRLNSAVNQIHRWVDIVFPELRQVFKILTCTSAIATLRLFPLPKEISQLNTEQIINGWKQYVKRHAGVKRAGLLISLAKSSVGATQALHSYKLHLGQLLEEYDLAQRQLEQIEHELHLILERIPYAQKLLEIRGVNATSLAGVLGEAGDLSGYSHGNALLRHAGLNLAEASSGKWRGKMVLSKRGRPRLRHFLYLMTMCMVMTNPEVRALHHYNVEGKKLKKMKSIMKLCGKVARMLVGLAKSSEAYDSFRVFPQAA

SEQ ID NO: 285484 - protein, 338 aa, unidentified
MKLFFVGVDISKKKLDICVRDAKTIIQECTFPNSQKPLLKSIKSLINRLNCNLNEVLFCGEYTGMYIYPLVQSCKILGLDLWIEDPTQIKYSFGVQRGKNDKVDASRISEYAFRYQDKAKMFALNDDDLNSLKLLLSERDHLLVDKIKYSAQLSDQENYMSGKDFKDKSKRIKQLVVEFNRLLNEIDSKIESIFEHNEKLSSQRDLLCSVDGVGKRIAYEMIALTYGFKRFQNHKQFCCYAGLAPFQYTSGSSIYSKKKVSQRANKKIKSLLHLAAISVIRYDGEMRSYYLRKKDEGKNGMLILNAIRAKIVARIFAVVTRNERFHKDYLNPSFNIAG

SEQ ID NO: 285485 - protein, 340 aa, unidentified
MTMVTLGLDLGKNWIHMVGLDEDGRIVLRRRVGRDRLLAQTGNMASCLIGVEACCGAHHLGRSLEAQGHTVRLMPPHYVTPYVKSNKNDYRDAEATAEAVQRPTMRFVPLKTEAQLDLQTIHRVRQRLVGRRTALINQLRAILLERGITVAQRRRVLETRLPAILADERSGLSPRIRYLIEDLRAEWRDLDGRIDAFDAEFTATARREDACRRLCEIPGIGALNATALVAAIGNGAAFDKGRDLAAWLGLVPREHSTGGKQRLLGISKRGNKYLRTLLIHGARAALPHVAARDDALGVWLRSLLARVHRNVAVVVLANKLARFAWAVLTGERRYTETVGA

SEQ ID NO: 285486 - protein, 308 aa, unidentified
MNIKFLGVDLAKRVFQLHGINAEGEVVLKKRLNQKGLIEFIAKMPTCFIGMEACSTSHYWARKFKVLGHEVKLINPAFVKPYVKSNKNDEKDSEAICEAMTRPSMRFVQIKSIEQQDLQALHRIREQLISNRTALANQIRGLLSEYGIVLPQEIQNVRKLLPTVLDDASNELTNFSRSLFQELYVDFSYLDNRIKACDAKIAALFKSDERCQRIGDIPGVGNITATALISAIGDLNTFKNGRAFSAWIGLVPKQASSGQKQILKGISKRGNSYLRKLLIHDARSIVFRTKDKTDQRSLWIEQLKIGEE

SEQ ID NO: 285487 - protein, 397 aa, unidentified
MIAVGIDISKAKSTVAVIDSDGTVLASPFTMAHTQPEMEAFVTYLKGLGEPTTILMEYTGHYHYPVLKKLQDEGFPVCIVNPYQMKKYGDVEIHKAKTDKKDALRIAAYALEKSYKLVPYSSMEQKYEDLKFLSRQYSQRITYVAKLKVQLIALLDQTLPGITRILPLNSRNPEKCALLLFIKRFKSFDEIQRIGKARFLASYDVLAKKASERSASSKGLSIYELAVDSITTRGEDPYIWLSQNQCVDLLSATQNAADEIISQMRNIAETIPEYKVLRAMHGVGDRLGPIILAEIGDVHRFHSGKALNSYAGNDAPPYQSGQFESRNRHISKRGSSTLRKACYEVMQALKLIKPQDDPVYLFMLKKEQEGKPFNVAKMAGVNKFLRIYYARAMELYK

SEQ ID NO: 285488 - protein, 422 aa, unidentified
MQRAGFRVVGFDCAEEEHVAVLLDGEGEVEQRFKVVNRRDRIQECLARLILTLGEDATPVIVVESKRAHGRLVVEEAGRLGCEVIQVNTVALNHFRDLEGQPRKDDERDAYLAARMAYLRLRGCRELVEVTDEERALSRLTRSYTRLTGDRAQQMVRLRAVLLEVAPEMLHRSWEGPKPSSRAMMYLLERWPGFEGLERAQLRSIEKILHRCRYGQRAASVARLLRDMARRISLEPGERIAITLEINALVHQIAACDASLEKLFGEIARRVEAHPVGVKLLKMHGIGPVIAGVLVSELLPVARTATEAKSATYAGVTPLGRKSGKSLDTSHLTQGVNKRILHALYTSSVVAVKNSAIDRAYYNKKLREYAGHPKPHVAAFIALSRQRHKVVYKLMTTPARYDTEILIARHLDRIEEARKAVA

SEQ ID NO: 285489 - protein, 588 aa, unidentified
MTRTASLPCTEVGVGIDTHRYFHQAEFLYGDVQPAAPGLNFEESVEGYAQLRQALEKIVARHPDVHFRIHLDAAGQYAANLERFLRGLPFKMTFSVGEPARNKHYRQAIAPKRGKRDVTDSYACGRFAVVERPSATPDNPEAYRFLREIAGRLESRVRQTTRAVNGLHNVLSRVFPELATIVGDLGAQYVLKLLARYPTPEKIARAQRQSLLSIPYLTAKKADQIQAAAKRSVGSVCGEIAEQLVGSQVGEVKHAKRAEKQMEELLLMTYRALPRTPHVQVQTIIGIGELTAAVLVAKVVAIDRFQTKGSLVCYFGAFPEPNQSGRDKYGNSVAVGTMEMSQQGSDLVRRYLWMAAKSAAQHNPAVRALYARLQARGKRGDVAYGHCMRKLLHLVFAVWKTDRLFDPNHYPWEKAAPGTKAQEETAGRKQDLPEKEAITAADSNVDAPTTPVKQSNASQPAGNGRWIDFASLRQQVTIEQVLQHVGCLEEMSKRGPQRRGRCPIHAKPDERDRSFSADVSKNVFQCFNPKCATHGNVLDFWAAWRRLPLREAALDLAETFHLPTSPNREEEPVGKNRSSAPPLSGAGT

SEQ ID NO: 285490 - protein, 346 aa, unidentified
MDYFAGLAGLDVSVKETSVCIVDDAGKIVREARVASEPEALLQVLTNTIYRFKRVGLEAGPLSQWLYSVLAEAGLPVICVETRHMRAVLKAQINKTDRNDARGMAQMMRAGLYRPVHVKALRSQKLRVLLTHRKLLQSKAIAIENELRASLRNFGLKVGMIGTMRFEARIRELVERLPDLAVLVEPLLIVRRVIREQLGILHRRLLAIVRDDDVCRRLMTIPGVGPVVALTYRVTVDVPARFRKSEAVGAVFGLTPAKYQSGENDRTGAISRCGDEMMRIMLYEAAQSMLVRTTKWSWLKAWAMKIARHRGMKKAIVALARRLAVIMHRMWVDGTEFRWTRELPVS

SEQ ID NO: 285491 - protein, 383 aa, unidentified
MQPTRKEHFTPTEAILAVALELASDAWKMALQDGKHEKPAISTVSNEIASKRLAEAVLEIDKIKRKWKLPAKVRTVVLYEAGQDGFWIQRALEKLGYETMICDPGSIPVERHARRAKTDRLDAIKLVLCLRGWLRGEYDRMHIIRVPKIEDEAQRHLSRDRGELVKERGQHHDRMRKLLRTVGCWEPLNGNVGKHLKQGHYRCQDGSKLPAEMYARLERECERLALVEQQLAYLEDDLAHQLPEGTQERIDHLQKLKAVGAVGATRLVLELFWRRFDNRRQVGACVGLVPQPYDSGESRVDQGISKQGNRRVRSLLIEMAWFWLRYQPTSAIAKWYLQRTSGKGQNKRGKRSAIVAVARRLVIALWRYLEQGVIPEGAELKTH

SEQ ID NO: 285492 - protein, 430 aa, unidentified
MSYRIAGIDVHKKILAVVVSDVEVEVEYEFERRMFGSNPEQLRCLAAWLLEQEAEEVVMESTAQYWKPVWEALERYWKPIREKREGAGRRSGTLHLALAQSNRGRRGRKRDFPDAERLVKRLVARELTLSFVPDAEQRLWRTVTRRKYQLTRDHVRQQNQLESLLEEAHIKLSSLVSDLLGASARRMLQALAEGETNPTALATLADERLRATPEQLCDALGACTDLKPVYRRLLKMALEQLQFLEQQIGQLDKEMASLLSQHQDAVERLAEVPGLGVDSAQQIIAEVGPTAATFPSEKCLSSWVGACPGDDESAGVNYSHRSPKGNRHMRRVLNQTANAAARTKGSIFEIVYRRSVPRLGHNQAIGAIAHRQCRLIWLILHQGVRYEERGPAVTKQSKQKRTARMIRQLRSLGYRIEPPNPQQPSPAQAR

SEQ ID NO: 285493 - protein, 352 aa, unidentified
MNIIAFDSHKRYTFARIENENGQDVQEFRIEHRRGNIAGFLSRQPAGCPVAVETIGNWYWIIDEIEKAGMQPRLVHARKAKLMLGCINKTDKLDAKGLNQLQRSGTLPTVWIPPGDIRDKRELPRTRIVFGRDRTRLKNRIHSVLDKYGLQDAFEDISDLFGSKGRRRLRRVMEQLPEQTYYTTELLLEHLEQTQQKINGIEQRMKQLFDETADSRLLETMPGVGFILAVVILQEVGDIRRFGSAERFASYCGVTPRVHASGGKVRYGRLRPDTNHYLKWAFSEAGNSVAVNRERRPHRHVSRLYNRIRHRKNHAKAVGAVARHLAESTYWILSKGKAYRERGPLEVSSTGA

SEQ ID NO: 285494 - protein, 397 aa, unidentified
MYIVGIDIAKRKHEAAVIDGEGTVIIKPFSFTNNCSGYNRLLAMLTKAKLPLDEVSFAMEATGHYWLALFTRLQKEGFRVQVINPVQTNSIRSFYIRQAKTDPRDALLIAEVIRFGHFSESTLHPENIYELRELCRGRHAIVSMQADVKRKVVALLDQVFPEYETAFTNMFGDTSMAILQTCPTPKELSEMPLEELCHLIEVSSHKRFRMAKAQELQALAHNSFGFAMAGDVFSTMIRLYAKHLDFLKQQVREMDRKIAEIMDTLDTPITTITGIGPTLGAYILSEIGDISRFSSAAKLAAYAGIDPTMRQSGEYNGVRNRMSKRGSPYLRHAIWLAASSAVLHDPALKLYFQKKRDEGKPYMASVGHACRKMVSIIYAVMRDNKAYTPCIPNEISA

SEQ ID NO: 285495 - protein, 412 aa, unidentified
MTATNQFAAHVGLDWADKKHDVCVQFKNGERTFHVIEHTPEALDVWLTELHQKVKGRIAIAVELKKGPVVYALQKYPFITVFPVHALSLARYRQAFSPSGAKDDPQDAELALELMLRYPQKIKAIEPDNADIRLFQQLVEQRRQLVEDKRRFVNRIINTLKQYYPQPLEWFSHRGSLLLCELIIRWPSLQQLKRARRDTIRNFLNAKGGRAMALTEQRVASIDNAIPLTTDPSVIEANALMATALATQIKVVSEIIKTYDERIEALFDTLPDAELFKSLPGMGPCMGPRMLAALGDNRDRFNSAEEIQNYAGIAPVTERSGQKSWVHWRWQCAKFVRQTFVEWAAKTVNSSYWARLYYQGLREKGKSHQSAIRALAFKWIRIIYRCWKARTQYDEAKYLLALEARHSPLLKP

SEQ ID NO: 285496 - protein, 446 aa, unidentified
MEITYTHAAGLDIHKKTIVACCFTPGPKGTPQKEIRTFGTMTQDLLALAAWLTSKGITHVAMESTGEFWKPVYQILEASFTVLVVNAQHIKTVPGRKTDVKDAEWIADLLRHGLLKASFIPPLPQRDLRDLTRQRTNLVQDRARVVNQLQKVLEWANIKLASVVTDILGVSARAMLAAIVGGEAAQAVLVDLAQGRLRAKHVELEQALVGYVRDHHRFLLARHLIHIDFLDDEIARFDQEIETYIATETPSEPPAPPAPTPDSANPSGADVPTAAPPVVPWAEAVELLDTAPGIGRTAAELILAEIGPDMRRFPSEGHLASWAKVCPGNRQSGGKRYSSRTGKGSRWLRPVLVQAAWAAIRVKGSHLAAVYRRLVVRLGKQKAIMAVAHRLLVAIYHMLKDRVPYREIGTAPPSESAKRKLAERMQRKIEDLGYTVKLEPAAVVVG

SEQ ID NO: 285497 - protein, 448 aa, unidentified
MSNGSGVSRGDRNRNARLTKLREAVPITHAIVGIDLADKKQMVVVTDHDSRVLARRTFRCKAWELGAALDWAGQHATGHGFMGVTVACEPTGHRWRIVGQLATDRGMSFVCVQPTISSWARKSEDLTFDKTDDKDAVLIARLTGQLRCYLPEPVDETWGRLRHLGTRREQLLEVHVACVQQLRDLLECVWPAVLGSAAQPFKSTTWVAALSVILRRDGGDLDRTGRLGLARFERLVRAEVVRRGKTRPCLRIVRKVFAALSDPAGVIDHRPGALERAEWVLGDWDTARAQQVDVETRMVAVLDELDLTDLVTTIPGLSAVGAAAILAQTGDLSRFTSARAVVKHAGLAPRERMSGTFTGKARLSGAGRPALRTAAWRAVWGCLQTNKVYAARYRHLTTRDNKLKPTQAQTIIAAAILRQLHAVVVHRQAWDPVVAAGGTKSKGLVVAA

SEQ ID NO: 285498 - protein, 358 aa, unidentified
MQMQIKDLDFTGQNIYAGIDTHKKSWKVSIYTDILYHKTFNQPPKPEVLYHYLTKHFPNGTFYSVYEAGFCGFWIHDRLQSLGINSIVVNPADVPTTDKEKKQKTDRIDSNKLARQLRNRDLEAIYIHNRDILEDRCLVRMRRTLVKDLTRYKNRIKSKLYFFGIEFPEQFNRDRFYWSNRFVDWLSQLELNQESGTDSLRILVKQVKFLRKDLLEVNRKVRELSQNECYRERINLLMSIRGIGLTTAMIILTEIEDIHRFDNQEKLASYVGLTPTSHSSGDKDIHGAMVNRGNKFLKSVLIESAWIAVRVDPVLQMDFIGYSKRMKKNKAIVRIARKLLNRISFVLKNKVPYNDGII

SEQ ID NO: 285499 - protein, 428 aa, unidentified
MSERDYNRQAARRQRVSKATLIVGVDVGKAFNAVGFMNKDGNVLGSCSKLYNSREGFEQFVKMIEGLKARHRLRDVLIGMEPTGHYWRKLAYFAIEHGYEVRFVRTTALKHHRELDESSSAKSDRRDALTIANITRESKYIDTVIEDGVLRQLRTLSKARERLLRYSVSAKNSLHAALDDYFPELHEIFRSMGARSLWVILEKCPFPEDVVLMKTSILQEMIARSSRKKAGSARKAKALYEAAQKSIGVKQIGTADRYRLRMCLEEVKRTVLTLKDMDRQLKSMAKDIPSASYLMSIPGIGYLSAAVFLGELGNPAHFHNARQIVKYAGYDPQESDSGSWIGRKFISKKGRWLLRKYLFFMSMRVVVLTKYFQEYYHRKLETKNRVGQLPRRKEILCAVAIKLIKVIFALLRDKRSFEDTASAAVVIA

SEQ ID NO: 285500 - protein, 345 aa, unidentified
MYFIGVDHHKQSSTMTVLDDDGREVRTAKLLNVEADIAAFIRESAPDGFQAVLEAGRSSYVMLDFLRELGGEVRLANPYELKAIAHAQIKTDRRDSKLLARMLRTGMIPEIYQRELANREAQRVMRQRAFWTRLQVEVKNKVRVLLAQQREAVRLGVETLKESLFGPKGLEYLGQVELRDKDRRLMQELVAALRELEAHKKKSDGMVEALYQELPAAQLIDTVPGFAKTLSVMVAVEIGDIRRFWRVEKLLSYAGVVPSTHGSGEKTYQGHLKQGNIWLRWALIEAVHPATKSDPGLYIYYHRLASRKGANIAKAATARRLLTIIYRILIEERRYIPYLSKTSAA

SEQ ID NO: 285501 - protein, 320 aa, unidentified
MMAQVDLVVVGIDVAKDKVDACIRSLPLRQTCPSTAQGQRKLVAWLRKHKVNKAVMEASGGYEREWVRVLHQAGIEVRIVDPKRVRSFALSAGRLAKNDAIDAEMIAWFAETFSEAPSPTHDAAHEELQALVKARKGLLDLKIRLQNQNEHAAPGPVQRAYARILKSLAAEIAKLEAAIAVKIKATPDFAERAEIIESVPGLAETTSATIIAGMPEFGQVSNKISPALLGAAPYDDDSGHRRGERHIKGGRRWLRNAIYMPCLGAATQNNPVLKAFYRRLIAKGKEPKVALIACMRKLIVILNTMIARRQKWDPSRYALN

SEQ ID NO: 285502 - protein, 413 aa, unidentified
MDVLHPRCCGLDVHKSSISACILLREAGRVQKHQRRFGAMTQDLRELAEWLRQFGVTQVAMESSGVYWKPVWNILERQFTVVLANAQHIKNVPGRKTDQKDAEWIAQLLQYGLLRPSYVPCEIIRDLRDLTRMRASLSQEASRISSRIQKVLEDANLKLASVATNVLGKSGRAMLEDIITGEDNPEHLASLALGHLRVKIPQLRLALEGKIRSHHRFLLRRLLDQIQFVEHEIALLDERLEDLGRQRPDLAQAVARWDTIPGIDRVAAWALLAEIGDNMAQFPTAEHLASWAALCPGNHESAGKRLRGTTRQGSPWLRRMACQCAWAAARTKNTYLSSQFRRLAARRGKKRAIIAVAHTLIVIGYHLQKNQSNYDDLGGNYFDRIHSDGLKRYLVKRLEQLGHKVTLEPLATA

SEQ ID NO: 285503 - protein, 455 aa, unidentified
MLRAKKAKKLQTAKGVELKIVNPNAAGIDIADSEMQVCVPADRDGDNNRRFGSFTKDLNLISEWLHTCGITTIAMEATGIYWVPVYFKLESEGFDVLLVNAREVKNISEKKTDEADAEWLMLLHSYGLLKPSFQPEGSARQIRNLCRHRNSLLRSAAKEVLHMQKALEQMNIKLTNVLTDIVGKSGKLIISAILSGNHNPESLAQLADGRCKRSKEDIALSLEGTWDTDHLFELKQSYELYEFFLQKVAECDTEIEKMLSKYTAKIDMGMTDFVRSKKTIHKKNKVGFDVESYAYGVWGVNAMNIPGMSAGSILQLIGELGFDFVEKFDSPSKFCKWCNLVPNNRISGGKLISSRVPKRKNPVGQVFRQCANATRDMKNSMGFYFRRLKSRGGHMSAIVATAHKIAEVFYIMVKNKVEYDENKVGLSEEELLRRKIERAQRTLNILNEKLYGTAV

SEQ ID NO: 285504 - protein, 349 aa, unidentified
MVVVGADVHKRTHTFVAVDEVGRQIGSKTVAATTAGHHKAVAWARERFGVEVLWAIEDCRHLSARLERDLLTSGQSVVRVPPKMMAEQRRVARTRGKSDPIDALAVARAAQREPDLPVASHDETSRELKLLVDRRDDLVKHRTATINRLLWRVHELDPAIAPPERSLDLAKHQQALATALERFDGIVAELARDELADIVDLTSRINELERRNAARVREVAPSLLAMPGCGPLTAAKIVGETAGVTRFKSEAAFARHAGIAPIPVWSGNTRGRVRLTRSGNRQLNAAIHRIAITQTRLDGLGKTYYAKKKAEGMSTPEALRCLKRRLARIVFNHLTTDHAASATGLAAAA

SEQ ID NO: 285505 - protein, 391 aa, unidentified
MIFVGIDVAKDKHDCFILNSEGTVLADVFTIANNRIGFETLLSRIQSCSQGESKIKVGLEATGHYSYNLLGFLLDSGLATYVINPLHTNLYRKSLSLRRTKTDRIDARTIAMMLMSDVDLKSYSNTAYHNEELKSLTRYRFDKVKERAKLKSSVARLVNILFPELEKLVSSLHIAVVYALLSNYPGASYIANANTEELAETLCTASKGRYTKSKTAKIQVAAGVSIGSKMPAKSMELKHTIALIRELDKEISEVESAIDKITSQMDSPIFTIPGIGRHMGAMILAEVGDFSNFANADKLLAYAGLSPSTYQSGQLQNCYAHMEKRGSRYLRYALFNAAKYVCLWCPTFSAYLEKKRSEGKHYNVAISHAAKKLVRLIFAMQRSGKAFLADY

SEQ ID NO: 285506 - protein, 376 aa, unidentified
MNEFSNVFVGLDVHKDTIAAAVARVGRQEPEYLGTIPNTGAALQKLLRRINPDGEVLNVCYEAGPCGYGLYRDLTAQGHECAVVAPSLIPRKAGERLKTDRRDALLLARLHRAGELTPVWVPDLDQEAIRDLTRAREDMKSLELKCRQRLGAFLLRHGRVYAGKSRWTQAHFRWLEKVKFDSPWQQLVLQEYMDGVKAAQKRVEDLERHMRDALPSWSLRPVVEALMALRGVSLISAMTTLAELGDLTRFDSPRELMAYLGLIPSEHSSGGSRRQGGITRTGNGHVRRILVEAAWNYRFPARKTRVIEKRAEKAPERVQAMAWEAQKRLCKRYRNLMEAGKQKKQVTTAVARELAGFIWAIACEVKGKDHGSRALA

SEQ ID NO: 285507 - protein, 421 aa, unidentified
MYYVGIDIAKGFHVVSVIDDNETKVINKPFKINNDAKGFEKLLTILDSVTLDKSEFTIGLEATGIYGENLQEFLKSKEYLVKLLNPFQTTRYREQITLKKVKNDEIDSLVIALLLKSGKFSSGYITDDEYQSLRTLYRNRATIQADMKDVKKRILTQITVTFPEFESFIKPFNVTGLVLLDKYPTAHHYKHSSVDRIMKLFRHIQGNNFTQSKALQLLELSRESIYSGKAKDARAIAIRSSIRLLQMYLSELDIIEAEILSLLQNSSSTTQTNATTSVDEVGKEIEKTNSLIANLKTIPGVAEKTIAALISECGDLSRFPTIPKFIGYLGLFPDENSSGNSKYIGHLSKRGSPLAKHALYMSAVSCLIHNTQLKQLYDTKRSQGKSKKEALIAVSRKIATIIYSIFKYNVPYDPNRVFAKS

SEQ ID NO: 285508 - protein, 388 aa, unidentified
MNIVLPATAEQTAIRTQLGAIFVSLELSRSTWLVTSLSPGGGEKMSKHSVPAGDIAGLRERFSSLTEKACARTGKTVPIIVIQEAGLDGFWIHRALVSQGIESWVVDPASIATSRRRRRAKTDKIDGEALVRALLAYKRGEPRVCAMVRVPTPEEEDRRRLGRERKTLVGERTEHVNRIKGLLFSQGIPGYEPMRRDRRAKLDELRTGDGRPLPPHLKALLGRELDRLELLMQQIKAVEADRDALVVPERDGNQAPSQVAMLLALRGIGPEFANVLYSEGLFRQFGNRRQVAAYCGLAPTPWQSGSIDREQGVSKAGNPRLRFTMIELAWLWTRHQPDSALSQWFRERVKLDGRRKPTIVALARKLLVALWKYVTAGVAIEGVVMKAA

SEQ ID NO: 285509 - protein, 421 aa, unidentified
MKNSLARKMKQVPQGYLIVGVDPHKKRHAAVAITQDFTLRDRFKFDNTREGLESMINRARLKMTDVGCRGIMFAIETGGHYWRNIAYFLDEKGIPYRLINQYTLKRRREGKDLNRRKNDYRDSEVAAQLLCTGEYTESRIPQGVYAELRTAYNTYRRLVKERTRVTNLIKSLLDGLFPEFVKVCKDPCGLTAATVLSTCAIPGVIAAMSEEEFVALVKATNRPQLKRNKLKAIHNVAKTSIGIKAGAKSLAFEISFLTEKIELIKRQVAVVERRLIGLVDEAEEGKYLLSIRGLNYISVGGLLAELGCFKAYRSAKQMIKMAGSNPTESESGGKKKSRTPMSKQGRPVLRYCAWTAVVPMMRFNDDFRTWAKRLRERPVHANPLGGREILGAALNRLLRLAFALVKNRAYYSLPVAVPAIR

SEQ ID NO: 285510 - protein, 413 aa, unidentified
MDVLHSRCCGLDVHKSSISACILLREAGRVQKHQRRFGAMTQELQELAEWLRQFGVTQVAMESSGVYWKPVWNILEGQFTVVLANAQHIKNVPGRKTDQKDAEWIAQLLQYGLLRASYVPCEIIRDLRDLTRMRASLSQEASRIGSRIQKVLEDANVKLASVATNVLGKSGRAMLEDIITGEDNPEHLASHALGHLRVKIPQLRLALEGKIRSHHRFLLRRLVDQIQFVEQEIALLDERLDDIGRRRPDLAQAVDRWDSIPGIDRVAAWALLAEIGDNMGQFPTADHLASWTALCPGNHESAGKRLRGTTRQGSPWLCRMACQCAWAAARTKNTYLSSQFRRLAARRGKKRAIIAVAHTIIVIGYHVQKNQRNYEDLGGNYFDRIHSDGLKRYLVKRLQQLGHKVTLEPMEAA

SEQ ID NO: 285511 - protein, 331 aa, unidentified
MIVSDAKSPPTETTGPNRTVVGIDISKARLDVDSLPAAETPLTSFDNDAQGHAALISRLRELAPRLIVLESTGGYQRAVVAALAAADLPVVVVNPRQVRDFARAVGILAKTDAIDAAVLARFGASINPTLRPLPDAQATALVDLLTRRRQLLELHTAESNRLAQAVAPQVKASIKAVLKVLKKQIDSIDDDLDGLIQQSPCWLEKETLLTSVPGVGTQTARTLLGCLPELGQISRQAVAALVGVAPINRDSGTMRGKRTTWGGRKVVRSALYMAALVASRYNPVIRAHYQKLLAAGKAKKLALVACMRKLLVMLNAIIRTRTPWRTRLEIA

SEQ ID NO: 285512 - protein, 367 aa, unidentified
MKKISTVAMERIQIFKESQRTIGMDLGDRSSHYCILNEAGEVIWESKLPTTPKGIEEVFSRIPRSRMALETGTHSPWVSRQLTELGHEVIVAHARNVRLIGESSRKDDRLDARTLARLARIDPGLLSPVRHRSAKAQIHLTVIRARATLVSARTALVNAARGLTKSYGARLPKCGSEQMNREIAQGLSQELREALDPLVAEIESLNERIAEYDRRIEKVAKEAYPEAALLRQVKGVGPLIALTYVLTLDDPHRFRRSRDAGCFLGLRPGRRNSGMSEPQMHISKEGDRYLRTLLVQGAHYILGPFGQDSDLRRWGLKLAKRGGKNAKKRAVVAVARKLAVLLHKLWVSGEVYEPLRNNNHKVVAAVA

SEQ ID NO: 285513 - protein, 379 aa, unidentified
MSKIRFVGLDVHADTIAVAVAEQDGEVRSLGIIPNRLESIRKLVARLGPAQQLKACYEAGPTGYVLYWQLTALGVACEVVAPSLVPVKPGDRVKTDRRDATKLARSYRAGDLTPVWVPDAAHEALRDLVRTREDARQDQHRARHRLSKFLLRHGKRPPQEVKKAWTLKYMTWIQEQVHFDQPALEATLLDYIHEVEHMAERILRLEKAIAEAIQKAPSEIRAVIEALQALRGVAQLTAVTVVAELGSLSRFPSPRQLMGYSGLVSSEYSSGNRIQRGGITKTGNAHLRRVVIESAWAYQHRPWIGGFLLRRQRDLQLTPEVKEIAWKAQWRLHTRYKKLAAAGKKKPQIVTAVGRELLGFIWAIAVQTEATFPTDRKAA

SEQ ID NO: 285514 - protein, 382 aa, unidentified
MSIMARPNESTVSTGCLLLAFELGQRSWKLGFTVGMGQRPRIRQIPAGAVGAVATEIERAKKRFGLSSDAPVMSCYEAGRDGFWLHRYLVAIGVTNWVVDSSSIEVNRRARRAKTDRLDLAGLLNLLARYALGDQRAWRVVRVPTMAEEDARHLSRTLEALTQDRTRLMNRLKSLLATQGVSLPVTTQFLTRLEAARLWDGTPLPPGLLERLSRTWQQLQEVDGQMHDLKARGLTRPEHLTPATRLTVARLLTMRAIGPIGASVLATEIFCWRRIRNRRELGALVGLVPAPYQSGETDYDQGITRAGNAHVRRVIVQLAWGWIRHQPDSALTHWYQQRFGGGGKRLRKIGIVALARKLLVALWRYLEAGVVPDGAQLKSIAG

SEQ ID NO: 285515 - protein, 349 aa, unidentified
MGYLSGKVEFVIGVDTHKRSHTACVVDPNGGELAGATEPADATGYRRLLAFSLKQAPQRRVWAVEGTGSFGSGLTSYLLEHGEWVVEVDRPARPARRSGAKSDELDAARAAREALAQKHLTHPRRRGDREALRVLLRTRQGALKARCQALCHLKALVVTAPHGLRQQLRGLSTDALVGRCTRMRISSQQATERRATVMAMRATARRTQALQAEADDLESEIKSIVRTMAPVLLGEPGVGDVSAAEILMAWSHPGRFRSDAAFASLAGAAPIPASSGQVVRHRLNRGGDRQLNRALHIIVLSRLRHHDETRAYAQRRTTEGKSSREIRRCLKRYVARRLFKLLESTAMAT

SEQ ID NO: 285516 - protein, 370 aa, unidentified
MAKRSMFVGMDVHKESIDISLAEEGRDGEVRHYGVIPGDLEAVAKAVRALRAPNRRLRFVYEAGPCGFGIHRYLTDQGEDCVVVNPSSMPKRSGDRIKTDRRDGDALARLHRAGELTAIYIPTPDDEALRDLVRAREDAVGLSTQAKHRLKAFLLRQGRRYPGRAGWTRPYRRWLADLSFPLAPQHIALQEYRDTIDETERRVERLTDQLRQQTPAWRWAPVVDALQALRGVSFVTAVGLVAEIGDIRRFTHPRELMAYLGLVPSEYSSGPSVRRGGITKAGNPHARRLLAEAAWAYQGVPRIGRQMLYRQEALPKTVCDIAWKAQLRLTSRFRKLVARGKAKPKVATAVARELTGFIWAIAREVPPPPA

SEQ ID NO: 285517 - protein, 342 aa, unidentified
MRIVMLGIDLGKNLCSLAGLDETGAVVLRRRMKRASVLPFTAQLETCTVAMEACCGAHHLGRQLVAQGHVVRLMSPAYVQPYVKAQKNDERDAEAIAEAATRPTMRYVEIKSEAQLEVQSLHRVRGRLVAERTALINQLRALMLERGIAVPQGRSKLVRYLPEILADERNGLGPRLRRLIEDMREECRSIDRRIKGYDDELAERVRNEDTAKRLIKIPGIGVLTATALVAAVGNAQTFSCGRDLAAWLGLVPRQATTGGKPRLLRISKRGNGYLRMLLIHGARTALPGLAKKDTPLGRWVKALLARAHRNVVTVALANKLARIAWAVLARERQYVTVQAIGK

SEQ ID NO: 285518 - protein, 315 aa, unidentified
MDISSQSLDARIGREGAFAQFPNTTEGIAALASFCQAHQVELVAMEATGGYEQLAFAQLSEQGLPVAILNPRAVRQFAQSMGSLEKTDRIDAAMIAWYAEVKKSQPTCLAPENQQHLRALVTRLRQLTDIRTAQLNQQRLVTDRAVQASFKKLLAVLARQIKQLEQQIAALLDKDPLWRELNLAFRTIKGVADRTVARIMAEMPEIGRLSNKKISKLAGVAPLAQDSGKHQGKRAVRGGRASVREILFIVASVVGRYEPDFIAFQQRLRAAGKPPKVVRIALAHKLLVRLNAKAREVRQLLHAQRDHIALPARPS

SEQ ID NO: 285519 - protein, 414 aa, unidentified
MEQIHDRVAGLDVHRDSVVACVRATGPRGGAVADRERFGTTTAQLSHLKGWLTDRRVSLVALEATGVYWKPVYYALEHRFAVWLCNAQHVKNVPGRKTDLSDAEWLADVVAHGMIRPSFVPPPAIRELRDLTRYRKSQIDARVAEVQRLEKALQEACIKLTSVASKVLTQSGRAMVEALIVGQRDPAELAELALGKLRPKIPALREALAGHFGPQHAVAARRIGDHVDFLDASIAALTEQIDARTESYRGVFQLLLPVPGFDRLTIDTVIAETGADVSRFPSPGHLAKWAGVCPGNHESAGKRRPVGVGPGNRWLRRALIEAARAAARTGGSYFGAQYRQIAQRRGPNKAAVAVAHSLSDLIWHLLSTGECDQDLGNDYFQRRRDPEREPMRLVRQLEQLGYRVTLTATPPPAA

SEQ ID NO: 285520 - protein, 329 aa, unidentified
MARMQGKTTSDISQLFAGIDVSKAHLDLRLSCERRSRRFTNDPAGFAAIDAHLRARTSSDVPCLVALEPTGRYHFPVWRALHEAGHGVAPLNPLHVRRFAESDGELAKTDAIDAAVLARMAVQRQPAAKPPPSKEQLRLKALTTSIADRTDRRAMLKGQRAEVRDPLIAGFDEAEIAQLSGAIDALKAERARLINANPESARVAEILCSMPGIGEASAHRIIAEMPEIGALDKKQAAALIGAAPRVSQSGKRDKRRRTKGGRRRLRAALHMPALVASSANPDLKAFKQRLKAKGKSNAVILTAILRKLIILANALVAQNRTWTPKMPLT

SEQ ID NO: 285521 - protein, 354 aa, unidentified
MTRITTIGLDLAKKVFQVHGVDAEGKVIVARQLRRKQVLAFFAKLPPCLVGMEACGSAYYWAREIEKLGHTVRLMPPKYVKAYVKRGKTDAGDAAAICEAVSRPSMTFVPIKSIGQQGLSMLHSVRSKLISQRTQLVNAVRGHLSELGIVAERGLLGLAELAAVVRDKTDERLPVAARAALLVMVNQIEMVGAEIAKLDTAMRKENKANDLGRRLETIPSVGPVIASAFRARVTKPELFKNGRHLAAWIGIVPENDSTGGKPKQKGLSKKGDRYLRALLVSGAMAVVRQAKMRPERYPWVANLLTRMSAKQAAIALANKNARIAWVVMVRGGVYEAGHRAPVYRGAALPVPAVA

SEQ ID NO: 285522 - protein, 315 aa, unidentified
MSGVNAAIEVSKHELVVRLGSDGEQFSEPNQLPAIKRIAKRLLHPGCERVLIEGGSYQSALIAGLRSAELPVVVVNPRRVREFARSMGQLAKTDNMDARVLALYGERSQPPVRELPDEQSQTLRVLWIRRAQLIEMLVMEENRVEHVPERAKAVHRNLRSHIDYLRKQIKQADEDLDREVRSSVLWDKYEMLSSVPGVGPVLSIALLSDLPELGRLNRGEIAALGGVAPFNCDSGTFRGQRRIEGGRPRLRRVLYVATLAAVRCNPVLKPFYLHLRRVGKPAKVALIAAARKLLTNLNAMLKTKTAWRPPCQVAE

SEQ ID NO: 285523 - protein, 520 aa, unidentified
MVKRVSRELGRPRHFLEANRHGSNRYRKLPEDPSALRLRPLGDEMQTLQGIAKRSGYRNRSGDASIGGKSETLEVSQPHLQEVIPMSRRAYRATRVNDVNWEQIARGKEGLGVTLGVDVGKFDVLVVCRWADGRFERPWRIKNPWEIPTLVALVRQVKTDRKLVMAMESSGTYGDALRQALGDNGIEIQRVNGKAAHDYAEVFDGVPSQHDGKDAAVVAELAALGKAKPWAYQAADSWEEELTYWVEEMVAQRQMVTLWQGRLEGLLARHWPEASQVLKLSSGTLLRILKRYGSPQALAEDAEAAKQLARWGRSLLSPEKIEKLLAGARSSVGVRVGQWQKRQIQEYAEKALAARQQSDRAQRRLAQLAEGQTVLQAQGKVVGVPTACVLWVSTGDPRSFDSAAAYRKAMGLNLVERSSGTYQGTLRISKRGSARTRQWLYFASMRLVQRCGVRPWYEAKKARDEGDARRVLVAVMRKLAVALYHVGVRNEAFQPRRLFGRIGRRSGKSAECSVSGKEPA

SEQ ID NO: 285524 - protein, 345 aa, unidentified
MQTITTIGLDIAKSVFQVHGVDAQGKVIVRRQLKRRYVLAFFQKLPPCLIGIEACASSHYWSRELQALGHTVRLMPPAYVKPYVKRQKNDCADAEAICEAVTRASMRFVATKTVEQQSCLMIHRTRHLLIRQQTAVINAIRAHFAEFGIVAPVGRTGVEELLKVASDGNDKRLPDVARVCIAALGAQLQMLKARILEFDRLIMAWHRSNQVSKRLDELPGVGPALATALVGSIADPKAFRSGRDFSAWIGLVPKQHSSGGREKLGGISKQGDRYLRSLFVAGALAVIRYAKKRGSKHRPWLAALLARKPTKVAAIALANKIARMAWAMMAKGERYKQPVALAAAW

SEQ ID NO: 285525 - protein, 408 aa, unidentified
MTAYRFYVGIDWATAAHRVVVLDADRRSLHDRTVPHEGVALETFAHWLVELAAGQASDVAVALEVPRGAVVDVLLARGVHVFALNPKQLDRFRDRFTMAGAKDDRRDAQVLASALASDPPAFRRLEPEDPLILELRELSRLEDDLRQELSRLTNRLREQLHRYFPQVLQLVPAADEPWLWALLERAPTPSTAQHLPRATLRTLLSRHRIRRVDADAVRAILRTPALPVTTGTVHAAQHHLAVLLPRLRLVHQQHAECATLIEGLLERLGNSQEHRDVPILRSVVGVGRVVAATMLAEASRLLAARDYHGLRAQAGVAPVTRQSGRRTLVVMRYACNPRLRLAAYYWGQSAARHDPFSRAHYQHLRARGHSHARAVRGIVDRLLRVLMAMLTAGTLYDPTRRGPVTDAA

SEQ ID NO: 285526 - protein, 373 aa, unidentified
MKKVIYYGAVDVDDSHFNVALINSRNGELFHFKCNSNVGAMIKKIQQKNISLKDIKLCYEATYLGYTLYRELKSKGTRCEVIAPSLIPKIPGKKVKTDRLDCIKLAKHYLKGMLTPVHIPDEEDEKVRDLIRSRKLLVDQVKKIKTHIISLCKRMGFDYRKHRGTSKAAYWTQIHYKWLEKTINQLPENSPLRLNLSGLLSTCNNTETFISSYDEQISLIAELPEYKDKVKALNCFRGLKTLSSLTLTTELGDIRRFPHPSKVTAYSGLSIREYSSGGKELRFGITKQGNHILRTVVVEACQFAFKPPKVSKNLQERRMGADPESINIADRCMHRLSKKSIRMFMNRKHRNKIKVACAREMLCFVWEALHKAA

SEQ ID NO: 285527 - protein, 320 aa, unidentified
MQTPNQVLNVGADVAKDEIVAACSDGSLPVRKVANQRTALRSFLKTLPPGSRIGMESTGIYHELLADLACKQGLVVYVLNPKDARHYARGVGLRSKTDRVDAELIARMIEREHANLHPWIPPTPEQREIDQLIKRRSRLVTMREGLSMSLKGLDAFNADLKATRKRFNQLIAHIDQRVKALIEANPERREHVRQLRTINGVGPLVGAALVNTLERTPLKSADAFVAFTGLDPRADDSGQHRGRRRISKRGPSELRRLLYLAAMAAKKTVTWKPVFEHYRGRGLSGTEAVIILARRIARTAWSIYTYKTEFDPMRLTKGLT

SEQ ID NO: 285528 - protein, 321 aa, unidentified
MDKVTTVGIDLAKRVFALHGVDGAGRVGLRKTMRREQLMQTVAALPPCLIGMEACSGAHEWARRFQELGHTVRLMAPVFVAPYRKSGKNDGNDAEAICEAVARPNMRFVPIKSTEQQAVLSLHRVRQGWIEERTATINRLRAVLTEFGVVLPNRAQHVRRGARAAAEALPELARRAVEDLRAHLGVLDERIAAYDRELEAHARASEAARRLMQIRGIGPLTAVAMVATVGNARDFRSGRQFAAWLGLTPRQHSSGGKTRLGHISRRGDAYLRCLLVQGARSVLLTAMRHSDRMSRWALSVQARRGYHKALVAIAAKNARIA

SEQ ID NO: 285529 - protein, 423 aa, unidentified
MAYRIAGIDVHKKKLAVVVADVEVEEEYQFEQRWYGSNPAQLQLLSEWLMEQQVEEVVMESTSQYWKPVWEVLERHWKPMCQRREGAGRMSGTLHLAQALSNRGRRGRKKDFRDAERLVKRLVSQELILSFVPDAEQRLWRTVTRTKYQLRRDRVRLQNQLEALLEEAHIKLSSLVSDLLGVSARRMLQALAEGETDPAALAALAHENLRATPAQLREALGACTELNPVYRRLVKMALEELQLIEQQIGQLDQEIASLLRQHQDAVERLAEVPGLGVDSAQQIIAEVGAKATTFASAKNLVSWVGACPGDEESAGVNRSKHSPKGNRQMRRILNQAANAAVKHKGSIFEIVYRRLVLRLGHNKTIGAIAHRLCQLIWIILHRGVRYEERGPAVSEKSKRLRTTRMIRTLRNLGYRVEPLGNPA

SEQ ID NO: 285530 - protein, 411 aa, unidentified
MQYFIRKEGMPMLSIGIDVSKGKSTVCGMKPGGEIVYTPFEIQHTMEGMSELLSLLRGSGEEVRAVLESTGSYHCPVVAALLENGIFVSVINSLRMKRFCSQSIRKVKTDRIDAMQIALYGLAYWQELQPTRLPEDTYRELQLLARQYYQMTSMLIKAKVDFNALCDQVLPGMQELMNDHAGRHKLSDFVLRYRHTTHILEMGETRFRKDYCKWAEKKGYRNCERMAALIFATAQNGIPVLPNAPSTQIVITEAIRVLHTVEASRDAILTQMQALAKTLPEYSLVREMPCIGDTLAPRLIAEIGDVRRFHSKRALIAYAGIDAPPYQSGKFCANNRHISKRGNRYLRKTGYEVMQSYVMHKPANDPIFTFIEKKRGEGKSGKLAMVAGLNKFLRVYYGKVTELYRSLPAIE

SEQ ID NO: 285531 - protein, 344 aa, unidentified
MTSMNFIGLDIHKKTISYCVKDAAGAVLAEGTIPSTRQSLDDWIRTLHQPWTVAMEATMFTGWIYDHLLPHAAAVKVAHPLMLRAIAASKKKTDRIDASKIADCLRCNFLPECYMASTEIRERRRTLRYRKLLVRQNVQLRNKVSQMLMESGVVYNKQKLHKVGYFKELMTTNPDIREGLRPLLTICRETIVRLGKTEGALVRSLARDPLLSDRVERLMTIPAVGPITALTWVLEIDEVARFGSVKQAISYCGLCAAERSSAEVVKRMPISKQRNKHLQSVLVEAAKLGPRLSPDLALVYEAEKQKGHANRATLAVARKLVAYLLAVDRSRREFVVAGEPRAAA

SEQ ID NO: 285532 - protein, 321 aa, unidentified
MDHFAGLDVSVKETSICIVDETGRIVREVKVASEPQALLKVLGNQAYRFKRVGLEAGPLSQWLFSALAEAGLPAVCVETRHMQAVLKAQINKTDRNDARGIAQMIRAGLYRPVHVKTLRSQKLRMLLTHRKLLQSKAIAIENDLRGTLRNFGLKVGMVGKARFEARIQELVENFPDLGVLVEPLLVVRRALREQIVLLHRRLLAIVREDEVCQRLMTTPGVGPVVALTYRATVDVPARFRKSKSVGAVFGLTCSKYQSGEIDWSMLHSKKWSWLKAWAMQIARRRGMQKAIVALARRLAVIMHRIWVDGTEFRWTREVAAA

SEQ ID NO: 285533 - protein, 368 aa, unidentified
MKNVTTYVGIDAHKKDLFVAMLVGTEKTSVTWQLPNEAKAVHRLVRKLEREAPGPIRVFYEAGPCGYALQRQVTTSRVSCDVVAPALIPRKPGERVKTNRRDARKLVELGRAGLLTAVQPPTREDEAVRDLARARDDAREDLQRCRHRLGKLLLRRGLHFSGRNWTRAHRQWIDGLEWAHAAERAVVDDYLLAIDHTEARLQELDKRLAEIAETEPYRNPVGWLRCFRGIDTLTAMLILAELHDFRRFASAPALMAYLGLVPGEDSSGEKHRRGRITRTGNALVRRLLVETAWHYQHRPSVGVVLTRRRKGQPARVIAIADKAQQRLCRRFRNLAAEHKPAPKIAVAIARELAGFLWAALQPTPVPTK

SEQ ID NO: 285534 - protein, 416 aa, unidentified
MFAVGVDVANGRSRVAVLDGMRNIVAKPFEVAHTAQGFAALVEKLRQLDGEVRIVMEHTGRYYESFAMSMHRAGFFVSAVNPLLIKNYQGGINVRKVKTDKADAQKIAQFALDKWTILPHYTPMDTIRYNLKTLHRQFQLASKTKTALSNNLIALLEQSYPGANRYFDSPVRTDGSQKWVDFVDTFWHVDCVARSSEHAFVERYRKWCKRHGYIFSEQQAIQLHADARQKIPLVPKSDTCKLLVREAVSQLNAVSRTVETYRAEMDRLASQLPEYETVMGMTGVGKSMGPQLMAEIGDLRCFAHQKSLVGFAGTDPIKEESGDKVSQSAPSSKRGSPYLRKTLFVIMTILLQLQPQEDPVYQFLDKKRSEGKPYYVYMTAGGTKFLRVYYGKVRDCLKAKGLWEVPASASQEVNPG

SEQ ID NO: 285535 - protein, 368 aa, unidentified
MKEVTTRYVGLDVHKATISIAVADDGVAPVLFGTIANEATAVHKAVSQLKRGGKLVSAYEAGPTGYGLHRQLTQLGVDCVVVAPALIPRRAGDRVKTDKRDAIALARLLRSGDLTPVWVPGQQDEALRDLVRSRFDAKDDLRRAMHRLAKFLLRQSIQAPPGIKPWSARHLQWLETLRLDHPTSQLVFQDYRVAVHAARERVRRLEADLERCAEQSPRLGTILALQVLRGVAFLSAVTIVAEVGDFRRFPNAPRFMSFTGLTVSEHSSGQSRRQGRITRAGNRYLRHILVQAAHNARFAPSLEGDLKRRLKDVPADLVALSVTAQNRLHRRYRHLDRRIGRHKAVTAVGRELAGFVWAIGQRMEASAA

SEQ ID NO: 285536 - protein, 283 aa, unidentified
MNQIIRIGMDTSKHIFQLHGVDAAEQPVLRKRLRRKQVLAFFAKLPPTVIGMEACGASHYWARELGRLGHEVRLIAPQHVKPYVTRNKNDGRDAEGTCEAMSRPTMRFVPVKTAEQQAALMLAGIREQLIARRTQLSNTIRGYAAEFGLTAAKGLDKIEPLLRQIAQDESLPALARELFAMQRHQYAQLQTELKVIEAKLMAWHRANACSRRLAQIPGVGPIGATALVMKTPDPRAFASGRHFAAWLGLTPKDHSTGGKTRLGKSLAPATRSCAGCWWRERPQ

SEQ ID NO: 285537 - protein, 366 aa, unidentified
MLHKLNSAATLIQRTTTEAPRDHMYYIGLDVHKRTISYCVKDAAGHVHQEGKIGSTRCELDSWIKTLPQPRMIAMEATIFTGWIYDHLLPHAEKVKVAHPLMLRAIAAAKKKNDKIDAAKIADCLRCDFLPECHMAPTAIRDRRRMLRYRNLLVKQMVQMKNRVSGLLLETGVSYNKRRLHKVGYFADLMATNEEVEESIRPLLKISREHIVRAQRLDYALVSSLEGDPQLAERLKRLRTVPGVGPITALTWALEIGDFTRFRSVKQAISYCGLCGDERSSADKVMRMPLSKQRNKHIQRVLIEAAKLAPRECHELAMLRERELEKGNPNRATLAVARKMVSYMLAVERRKQDFVPAEEFKCRAAA

SEQ ID NO: 285538 - protein, 344 aa, unidentified
MDHFAGLDVSVKETSICIVDDAGKIVREVKVASEPEALLAALKNPAYHFKRIGLEAGPLSQWLFSALAEAGLPVICVETRHMQAVLKAQINKTDRNDARGIAQMMRVGLYRPVHVKTLRSQKLRMLLTHRKLLQSKAIAIENDLRGTLRNFGLKVGLVGKVKFEARIRELVENLPDLAVLVEPMLIVQRTLREQIVILHRRLLAIVRDDEVCRRLMTTPGVGPVVALTYRATVDVPARFRKSKAVGAVFGLTCAKYQSGEVDRNGRISRSGDEMMRVMLYEAAQSMLRSKKWSWLKAWAMQIARRRGMKKAIVALARRLAVIMHRIWVDGTEFRWTREQATAAA

SEQ ID NO: 285539 - protein, 344 aa, unidentified
MEHFAGIDVSLKDSSVCVVDAAGRIVREAKVASEPEALVAWFGGLGFAVTRIGLEAGPLSQWLHAGLSGAGFDAGLLGTRHVKAALSAMVVKTDRKDARGIAQLLRMGWFRPVHRKSADAQEVRALLVGRKLLQSKLRDVELSIRGILRGFGRKVGEISKGRFAARIRELVAGHEMLETVTGAMLAAREALLAEFMRLHRRMLAIVRADAVCRRLMTVPGVGALVAVTFKTAVDDPGRFSSSKAVGAHFGLTPKKYQSGETDVTGGVSKVGDAMVRTALYEAANVLLSRTTRFCALKVWALAVARRRGAKRAKVALARKLTTVLHRMWVDGSTFRWSKEAPAAA

SEQ ID NO: 285540 - protein, 302 aa, unidentified
MSKAWIDFCDTQGRTKRVDNRPEAIEAAFVGPWADAAFLVCEATGGYENALMQTAAKLSLRLRRVHPSRARAFAQATGRLAKTDPLDAAILARFALFTFDEPAPPAPSAQAQELAAMVSRLNQLTDLRQSEICRAKLAPGKAIKATIDLMLKAIGEQMAAMQKAIDAFIAADATLAENARLLRSCKCVGPKSVQMILALLPEIGKLNRRKIAALVGVAPITSKSGSSIDHASIAGGRKALRDCLFMAALAASRHNPTFRAFGERLTAKGKPHKVVIVAIMRKLVTTLNAMIASRQTFQSALT

SEQ ID NO: 285541 - protein, 408 aa, unidentified
MERMVERSCGLDVHKKSVTACVRAPGAGGGQGQEVRTFGTTTAELLLLRDWLEAHAVTAVAMESTGVYWKPVFYVLEDRFRCVLANAGQIAQVPGRKTDVQDCIWIAQLLEHGLIRSSFVPPRPIRELRDLTRYRKAIIEDRTREVNRLHKVLEDAGIKLAAVASNVLGKSGRDMLQALVAGTTDPETLAQLARGALRKNLPALRQALAGRFRPHHAALLTHVLAHVEYLDEAIAQVSVGIDEALRPFAEAMTALDSIPGVSRRTAEVLLAETGGDMAVFPSARHLASWAGLCPGQHESAGKRRSGKPRQGNRWLRATLLEAAWAATRTDTALAARYRRVMRRRGHKKAIIAVAHAMLVIAYHVLHDRTTYRELGPTYDEQRQATRARRRAIHTLEAQGYRVVLEPAA

SEQ ID NO: 285542 - protein, 349 aa, unidentified
MKETVLKEALGIDVSKATLSMCLGVMQSDLSKDFIPREDVSNDLAGFKELSKWLKRSTKGMEKPIVVMEATGVYHEGIALYLHGQGYRVSVMQSGRVKRYAQSLDQRSKTDALDSKMLSMLGCERELSTWEPPSDLMQHLKSLSRERSTLIKERSIENNRQHAIESSNYQDKRAQKRFKQRMMLLASQIEEVELQMHELTQSDADLSKKIAYPMSAPGISFITAITVVAETSGFALINSGKQLTSYAGYDVVLRDSGNFNGQTRISKKGNKHIRAVLHMPSMAAIRFNPTMKVFYQRLKPKKVKPIVALVAVQRKMLILMYTLWTNEENYDGEYEQKKAARKQVPCCTG

SEQ ID NO: 285543 - protein, 337 aa, unidentified
MKYCGIDLHSNNSVVVVSDEEDRMVLQKRLPNDLAQILAALEPHQHELAGVGIESTYNRYWLGDGLMDAGYQVHLAHPAAIKKYEGLKHSGDFADAAYLAQLLRLGLLAEGYIYPREERGARDLARKRMQLVRYRSAQILSIEGILMRQTGARMKGEAVKRLTAEQVDEFAFAPDVALAVEANRAVSQALGQQIEALERRRKERVSLRPEYRLLKSVPGIGDTLATTIMLETGSISRFAQVGNFSSYCRCVDSLRESNGKKKGEGNTRNGNKYLAWAFVEAANFALRYCPQAKSFYDRKKSKTNRVLAIKALAHKLARACYHMLREQKPFNVHLCFG

SEQ ID NO: 285544 - protein, 408 aa, unidentified
MDLTPMHKRVIALDVHQAKITACAVVEHDDGRVEVAKRDFGAFKRDRRALAEWALQMAPEVVVMESTGVYWKSPFAALEAVGIIAWVVNARHVKAVPGRKTDMADAQWLATLARAGLLRASFIPPVQMRQLRLVARQRQKLVGMCSAEKNRLHKVLVDAGIRINVLVADIHGASARAMVKALIAGKPMHEVLDCKGRLRAGRDELFDALSTEQFSVVHRFVAEEIMQHIEQLEQRIARLDQYLLEGLRPWQPQLKLLQTLPGIDEQGAAMLLVEIGADMSVFGNAERLASWVGICPGNNESAGKRKTGRIRKGNAWVRRLLCEFAQAAARTRCALKAKFEALAIRKGRKKSVVALAHKMLRTVYAMLANGTHYQDKEVDYEALNVQRNAPRWIKMLRKHGFIATPAAA

SEQ ID NO: 285545 - protein, 339 aa, unidentified
MALYGGIDLHANNSVIALLDAHDQVVDEKRLPNDLNTILAYLAPYHAELTGLVVESTYNWYWLVDGLREAGYRVHLAHTAAIKQYEGLKFSNDQVDARWLAHLLRLDILPEGYIYPKDERAVRDLLRKRAQLVRQKVTQMLSIQSQFARHTGHAPGANRIRQLCEHDLEGQFADAYVVLAVTSNLRILRCLESQIQCLERAVLRHMRSKPEVHWLKTVPGIGDILALTILLETGTIARFTSVGDFASYCRCVKSQRLSNGKVKGQGNTKNGNKYLGWAFVEAAHFAIRFDPGIKRFYQRKQVKSHKLVALKTVAHKLARACYYIIRDQVPFERSKAFGL

SEQ ID NO: 285546 - protein, 429 aa, unidentified
MQNESTPGARGPVFCGVDTHADSHWLCVLDWRGRKVLSRQFPADAAGYEALAGAIAAAGEPACVAMEGTSSYGAGLTRHLASLGMPVREALSPARTQRRRPGQGKCDESDAERAARAAMSGSRLGTPKSQDGWVDGVRCMLAARSGAVKARTSAINTARSLLTTAPEGLRSRFRGMAGPRLMEELPSVRAEGALGAALGALADLWAAARDAALDMERAIEASLEENCPALLAMYGCGPVSAAKLAVAAGDNPGRLRSEASFAAICGACPIPASSGKTVRHRLNRGGDRQANSALHEIARQRVMRDPETAEYAERARARGKSDREVMRCLKRYVAREAYRALMRPHEIRRPADASELVAARRAARVSQVRAASILGTSEKYISMLERGQRELKPIRRAYEAWVEAGLPLDWDRQAFEAEREMDSKKHLAK

SEQ ID NO: 285547 - protein, 375 aa, unidentified
MSTNLRNVGLDVHAETIAVAVAEPGGEVRPLGIIPNRPEAVAKLVRKLGPREHLRVCYEAGPCGYVLYRQLTRLGVHCDVVAPTLVPTKPGDRVKTDRRDAAKLARCYRAGDLTPVWVPDAAHEALRDLVRAREVAKHDQLRARHRLTKLLLRQGIRPPEGVKPWTQRYRRWLDAVPFDQPARRATFGDYLHEVDHAAARLERLEQALAEAVQAAPAALRGVIAALQTLRGIRLVTAATIVCEVGPLSRFTHPRQLMGYSGTVPSEHSSGATIHRGGITKTGNAHLRRVLLEAAWAYRFPPKCAKGLRQRQRGQPEAITDMAWKAQQRLCGRYRRLLARGKPTPQVITAVARELLGFIWAIGVAAERAGTAAAAA

SEQ ID NO: 285548 - protein, 348 aa, unidentified
MRNQPLGAVVYGIDLGKTSFHVVGLDGSGRPMQRITLSRTSVFRFFGNASAALIGMEACPGSQWLARKLQALGHTVRIIPAQFVKPYVKSNKNDTIDAEAIAEAVSRPTMRFVQVKQTEQVDLQALHRARDLAVNTRTRLICQIRAFCLEYGITMRSGAGVFKLDLPKVLADEANDLTPAMRQLVRDLWEAVQQLESRIHALTREIEAIAHRSDLARRLVTVPGIGPIGATALLAAAGDGKQFRRARDLSAWLGLVPAQHSTGGKATLLGISKRGNSYVRRLLIHGARSCVIHLDRNRDRLGMWLNELQRRMPINKVIVALANKMARIAWVILTRPGALYERRDPQFA

SEQ ID NO: 285549 - protein, 343 aa, unidentified
MEQITTIGLDIAKSVFQVHGIDAAGAVVVRRQLRRRQVLAFFKKHPACLVGIEACATAHHWAREITALGHEVKLMPAKYVKAYVKRNKHDAADAEAICEAVTRPTMRFVPIKTPEQQALLMVHRTRKLVVRQRIALVNAMRAHLAEFGIVAGVGRNGVNKLLKLIEAGDDDRVPGPARDCLLALRDQLILARQQIADADKRILACHREDELSQRLEEIPGVGPLIATALVASVPDPYVFKSARDLPAWIGLVPKEGSTGGKERPGHISKAGDKYLRSLLMIGAFSLIKRAKLGGGTRRVWLLELMARRPIKVAAIALANKIARIAWALMTKGTRYREPTPRAA

SEQ ID NO: 285550 - protein, 403 aa, unidentified
MTKYHVGVDVGKYRHHVTIRDISGDTYCKSFSLTNDREGFDEFISSLEKLSVDKNDFLIGIEACPYGVNLSYFLLGVGFNLVEVNPFRAGQFRKAQGKKAKTDKIDSRTIAAILSLGDHKILSIPNPILDNLKDLTRFRTDLVNERATMIIHLQEALSILFPEFNSVFRQLDSAGSLAVLATFPGPEHIIAAGEETVGKTLSLASPHRMGRGMARRITEAARNTVGVIQKQPGLGIKISILAKRITSLQLTIRELDKQITEMFDSLPCKLQGFPLGRAPTLAAIVSEIGDIHRFPTLKKFLSHLGWCPQTFQTGNFRLEHPRMSHAGNKYIRRLIWMLSVFGVRVVPLYREYFQRRVLEGKAKMHILIAVGRKILSTLYAMLKKGVPYDPNWEENGHIAVAGR

SEQ ID NO: 285551 - protein, 344 aa, unidentified
MEHVGMDLGKRQSHACWLSEGGEIRHLRIRSTREALTTEFGGRRGRILIEATSMSEWVARLFESLGGWDVVVACPNYAPMYAERTRRVKTDRRDAEALMWACVKGNYRPVHRLSDEARLLRMTVKVRKGLVRARGKAAVQAKALLVPHGIQLETGRPCYFPERLLAADLSPALRYELAPLVDLVTHLNDPISRTEERLKEIAKQDPCARRLATVPGVGPVTAACWIASLDTPERFANGEQAVAYLGLVPSEWSSSEMRRQGRITKVGPSDLRELLVEGAWHVLNHPTPDAASLRAWALRIATRRGRNKAVVALARRMARILFAIWRDGTSYSALRTDAKKVAVG

SEQ ID NO: 285552 - protein, 407 aa, unidentified
MKHEQRVVYGGVDTHQDVHVAAVIDELGVLLGTRSFPTSLLGLKSLHRWLTGHGPVVKVGVEGTGTYGLGLQRVLQDAGVEVVEVNRPNRQLRRAKGKSDTVDAESAARAVLAGQATATPKRHDGIVEAIRMLLVAHTSTKQALQKIDGRIRGLTITAPEALRVDFAGLSAPARAERAVRLRPGSDHREVTSATKLSLRTLGRQRQMLAADLKSLEVELEQLTTEANPGLRQVPGVGPIVAATLLVTVGDNPERMTSEATFAALCGVSPVPASSGKTVAMRLNRGGNRQANSALFRIALVRMSQQDKATIDYVQRRTAQGLSQKAILRCLKRFIARQSYRHLVDPRPAIRTDDLRARRQAIKRPLREVADALNTQIMAISCLERGTNHNADLATRYRNWLQQQETAA

SEQ ID NO: 285553 - protein, 360 aa, unidentified
MKKPAHQLIAEVPVRRSKVEMTIGIDLGDVWSHYCTLNEEGEVVDRGRFRTSPKGVEKWFIDVPPARVAMEAGTHSIWISEHLQELGHEVIVANVRELRAISHSDRKSDQVDAEKLARYARLDPKILRPISHRTVAQQEALTLIRARNVIVRLRTAAVNAVRGLAKPCGYRLPASSTLCFAKRCMAVLPPGLAQALGPVLEQIATMTVKIKHYDRLIKRLTETEYTETQALIKVYGVGQLTALTYVLTLGSKERFQRSRDVGCYLGLRPRRSQSGDRDPQLGITKAGNVYLRSLLVECANHVLGPRGKDSTLRQWGLHLASRGGKQSRNRAIVAVARKLAVLLHRIWVTQEPYIPFYAAA

SEQ ID NO: 285554 - protein, 310 aa, unidentified
MEQSFIGIDVAKDRLDVHARPNGEAFAVTRDSKGLEHLVERLRAMTPALIVLEATGGYETVVASALAAAQLPLVVVNPRQARDFARATGKLAKTDTLDAAALAHFAEAVRPEPRPIPDAQAQALGELVARRRQLIEMIVAEQNRRRHLTRKRLIKSVDRLQAVLQKELTALEIDIDETIRGTPVWRETEELLTSVPGIGPTTARMLIAELPELGQLDRRELAALVGIAPINRDSGTRRGARSIKGGRASVRAGLYMATLAATRHNDVIAKHYRHLRDLGKPAKVALVACMRKLLGILNAILRDQTPWQNA

SEQ ID NO: 285555 - protein, 390 aa, unidentified
MGSHTFIPRDYDVFAGLDVDKRSISVTFTDHQGFLKSLRMPYSVGHLLSHVRKHFPDKKVAFAYEAGPTGYGLYDGLKAQAYKCVIASPSMIPKAPGQRVKTNRLDSRGLAENLRGGQLKGIHVPSPVYRQLRHLTQLRDTLVSEAAAMKQRIKSLLLMEGIEFPPAPAGSQWSLLVKEKLRKLPCSHPVRFKLDQLLDSLAFAEQQVLKTTKEIRRFCQTDPELSQCIKYVMTVSGIGWIVASHLLARIGDWRELKNVRQLGGFLGLVPTEHSTGERTERGAITHTGDGRLRSKLIQASWSAIRQDGELREFFRSVAKTHPRNIASRVAIVAVARKLSGRISVVLMKQRPYVVREKVQSAPLTQEETVPQGTPRRQAELGEKTSERFDP

SEQ ID NO: 285556 - protein, 322 aa, unidentified
MRYIGIDVSKATFVVAYSSDKGGEIRTFNNTTAGIRQFIGTLPKDGSIHCVMEATGNYSALLLYMLNVAGITVSMENPLKVKNFAKALLSTVKTDKSDARLITLYGEKMNPRPFKVQGEAILRLRQKRTVIRQLTKQITAMSNLRGSLACLPVPDKGATHTVDETIKFLEKKRDRLQSELTDLVEVEFSRQLALLTTIKGIGITLATALIITTGGFTYFQNAKQVSRYLGICPTYEQSGTSVNIRGHINRNGDAYTRGLLYVAAWTASRFNTKCGETYTRLRQNGKPGKLAMIAVANKLVRQAFAVVTHDKEYVDGFVSNRP

SEQ ID NO: 285557 - protein, 370 aa, unidentified
MGKYSEVFVGIDTAKKKHAVAIADAGRDGEIRYLGEIDSAPATVERVIKKLASKYEKVRICYEAGPTGYGLYRQIITLGHECTVVAPSLIPKKAGDRIKTNRRDAVTLARLFRAGELTSVWVPDAVHEAVRDLVRARDTAAADVRKKRQQLLSFLLRHGRIYSGSKHWTRAHSRWLAAQAFEHPAQQIVFQDAVDAIEDCVSRLHRLEEQLYAIVPNWSMAPVVDAYQAMRGVSFIVAVTFVAEIGEVRRFENPSQLMAFLGLVPSERSTGDNVRRAGLTLAGNRRARRALVEGAWTYRYQARVSAKLQKRLEDIPKPVRDIAWKAQVRLCGRFRRLAAIGKKRPVIVAAIAREMAAFLWAIGRHVAPAS

SEQ ID NO: 285558 - protein, 411 aa, unidentified
MIKENYIYVGIDLHKETHTAVMIDCYNQKLGEITFPNRPAAFPKLVTKVKKCNTDGKEVVYGLENAYGYGRALAVWLIDKGYLVKDVNTAISHRQAKHRGAMYRKSDSDDAKAIALATLNMLDKLPDACPNDAYWSLGQLVHRRDNIMKQRTRLVNQLHEQLCIAYPSYKQFFNDISRPTALYFWEHYPSRKYLKGKSVEDLRAELVPVSHNKCSTKTCEKILDAVASDKVKNNAYQDARDMVTLSIVSDLQHYDSQLTEVDKMLEQMYKMLGCTLTTIPGVNVITAVKILAEIGDIKRFSNANKLAQFAGIAPLHLSSSGKGKDVATKQGNRRLQATIYFLAIQMVQVSSKGTPRNPVVRAYYEKRKAEGKTSQQALICISRRLISIIYGMLKHGTEYRMPVVESAGENR

SEQ ID NO: 285559 - protein, 374 aa, unidentified
MDKVGAVGYLDRPQAAVSPVVPWFTKTDTEHGTLPHCRNSPNTRLGHFKPAFARKGATTMNPSVPNLYLGIDVSKDWFDAYLLPTGQSWHVSTKLGEPERWIKELPAPICLAVLEATGGLEKQIAAALHQAAIPVAIVNPKRIHFFAKALDKKAKTDSIAAQTIAQFAQHLKPTPKPMSSTEQQNLNELMMRRSQLIDNLIAEQNRLASVRCKSVRSSISKHLRWLQKQLKDIDELINQAIKNSPIWLANEQLLSSVPGVGNITARSLLAHMPELGSLSRRQVAALAGLAPHTRQSGKWKGKAFISGGRANVRKTLYMAALSASRYNPAIKPFYLHLLKQGKSPKMALTACMRKLLTMLNAIIRDQKSWSFANL

SEQ ID NO: 285560 - protein, 349 aa, unidentified
MSQTLSDAVAVIGIDIGKNSFHIVGLDRRGAIVLRQKWSRGQVEARLANLPPCLIGMEACVGAHHLSRKLKAFGHDARLMPAKYVRPYSKGQKNDFRDAEAIAEAVQRPTMRFVATKTTDQLDLQALHRVRERLVSQRTGIINQIRAFLLERGVAVRQGLRFLRVELPRILAAPPDVLSTRMISVIEDLAQDWRRLDERIDHLSGEITALARQDVGCERLMSVPGVGPIISSAMVAAIGTGDVFSRGRDFAAWLGLVPKQISTGDRTILGKISKRGNRYLRVLFVQAAWVVLIKPQSWERHGLKSWIEAAKKRLHRNVLAIALANKLARIAWSVLAHGRSFETSKLATA

SEQ ID NO: 285561 - protein, 335 aa, unidentified
MHYLYYVGLDVSKETFDASLVAFEDANEMAHRKFANSRKGICSCLHWVEKRHGILLDDVIFCAEDMGSYISEMAVCASDRTLNFNFSLISPLVIKYSMGIARGKTDRVDARRIAEYAITHYRKIALYLPAEKELCQLRTWLILRAHLAKQRVAKLVLLEKLDYKEKFADVSIQRSMLQEEIAYAETHMKTIEREMKELIAADSNICRNYKLLTSIKGVGPITAIVMLCSTLNFTKITDLRKFACYCGLAPFEHSSGTSVRGGCHTSSMANRDIKVQLNRSALIAIRCDPQLKAYYERKVAEGKHKFSVLNAVRAKIAARCFAVVRRGTPYVALQI

SEQ ID NO: 285562 - protein, 340 aa, unidentified
MTDVSMIGIDLAKNVFQLHGATSDGGVVFRKKLSRSKVLAFIDAQPRCVVAMEACGGAQHWARQIGAMGHEVRLMPPRYVKPFVKRQKNDQADAEAIVDAASRKNMRFVAVKDEDQQARAMRHNMRCQLKRQQTQAINLLRSYLAEFGVVVPKGKANVTRLSALIEAPECTLPPLVVELARDQLERIDDFARRIAALDRAVREEARADATARRLMTIPGVGPMTATALRALAPPPETFRRGRDFAASLGLTPKQHSTGGKPRLGRMSKEGPDEVRRLLITGAMAVVRHARRKGTEDPWLARQIARKPTILVAIALANKMARIAWALMVHGGVYRAPATTS

SEQ ID NO: 285563 - protein, 396 aa, unidentified
MYIVGIDIAKRVHVACVINRDGEVIIKSIKVPNTVEGFDNFITKLREITADFSEFEFGMEATGHYWLNIYTNLVELGCNVHVINPVQSDALRGLYIRKTKNDAKDSMIIADVIRFGRYRESVMAEPDLLEMRELTRQRFYIVDSISDLKRKTLTLLDRVFPEYPTLFSDTFGTTSLELLANCATPEDIVAIDTDKLVEMLRKASRGRFNHDKAEKIKETARNSFHAILATNSASFMLKQFVEQIRFLENQVSEIDAMIANYLAKFNTPITTITGIGNTLGASIISEIGDIERFDSPDKLAAFAGIDPSVIQSGNFTGTRNRMSKRGSPYLRRAIWLAACAAIMHDPAIKAFYDLKKSQGKHHYTCVGYICRKLVNIIFAVLKSGNPYQPVFPKSAV

SEQ ID NO: 285564 - protein, 311 aa, unidentified
MPTKLPPTYVGLDISKDQLDYCLSETAEGRCAYTPAGRAELILKIRTLPGARVVCEASGGYEKLIVAELLQAGIEVCVVQPGRVRAFAYAEGLMAKTDRIDARLLRRFREKITLRLAVPGDPAATTLRELLEHRRQLTTQLTEVVGRLPLAGLTLGKLLAAQQKFLDRQIAEVERMIKQLIDQDPDLKKKSARLQEITGVGPVLSATVLAYVPELGQIESPQLSALLGVAPYPDDSGQHCGHRHVRGGRAQVRHVLYMAAVSASRSNPILAAFYQRLRAKGKSAKVCLVAVMRKMVCLMNNMIQNPDFVLA

SEQ ID NO: 285565 - protein, 353 aa, unidentified
MEDIKYIAFDAHQETSVISVLNAAGREVKTAILPTQPQPLIAFLEGLRGTLYLTFEEGTYAAWLYDLLVDRVDKLIVCDPRRNALLKEGNKTDANDARKLAELLRLGSLHAVYHGSRSMRPLQELAHAYEALRDDTTRVMNRIKALYRGRGIDCSGRGVYTKGQRANWLERLPAGATRLRAELLHEELDQVRSLRRRARVALLAESRQHTVAARLRQIPGMGPLRVALVMAHLQTPHRFRSRKQLWAYIGLGLVQRGSSEYRMKEGRAVRRPHALQLRGLNPNHRPELKEIFKSAALTAIRRPGPFKRYYDARIPQGVDPAILRVTVARKLAALLLHLWKKGGHYRAQGSEQA

SEQ ID NO: 285566 - protein, 412 aa, unidentified
MNPVVGLDVSKGESQVQAFLDKGKPYRKSFSIKHTLDGLVRLLEFLREIEKLADGKQPSVILESTGQYHMPVIQFLEEQQYVYIIVNPLISHRARSTNLRKVKTDAIDAYQLCELYYKEELEPYKKRGIHLLNLRNLTRQQETVSSTAVQTKLQLQSILDQIFPEYRGVFGDLYSKISLQILSIFPTSKEVLSVSESDLTNKIAELCTTRSEKWAKEKAIKLREAALRNPFQNNLYQSHIFNLRMFINIVLQYQEHLSKLAAEIDALAKEIEEYEIIQSIPGVGEKIAATIISEIGEIERFNHPKKLVAFAGIDPSVYSSGRFTASINRITKRGSSRLRQALFMAVQCGIRDARKQKTSEEIIPRNKKLRKFYDKKREEGKPFRVAIIACANKLLHWIYALLKRKEDFQNAV

SEQ ID NO: 285567 - protein, 406 aa, unidentified
MGFRVGIDWGGMRHAVCVVDEAHGTIAARFEVAHTAAGLAELERQLAKFGPPSALPVAIERPSGLLVETLIEAGHPVVPIHPNVVKASRPRYRAAGGKSDRSDSYLLADLLHTDGHRFRPLQPCSDEIKALRTLVRGRDDLVAQRVALANQLRSLLDSFWPGAGALFAAIDSPIALAFLQRYPTPGSAARLGEKRLEAFLAQRRYCGRRTSGELLARLKTSPAGLAGDTEAEAKGELVRALASMLETLVAQIAKLSSCIEHALADLPDGAIITSFPRAGRICAAQILAEFGDVRERFQTADQLAAEAGVAPVTRQSGKSRGVVFRWACNRRLRRAVTCFADNSRHASAWAAEIYRRARARGCRHPHAIRVLARAWIRILWKAWTDRTTYDPDAHAAARRLASLEPA

SEQ ID NO: 285568 - protein, 261 aa, unidentified
MVIVGCDFHPGWQQVAVFDSGTGEIRELQLRNSEGEAERFYGSLPSPALVGFEACGNTHWFEDMLDRLGHEVWIGDAAEIRASYVRKQKTDKRDAAHILKLLMEGRFPRLWRPSKADRDLRQLLIHRDRLVGVRTRVKNGLHHLMLNKGVQLKRKLWSKAGQKILHELPLEGWAAQRRTDLLQLLRTLDPQIEELDVAVERAAYANERARLLMTQPGVGPITSLAFVITMGDVTRFPSGKQVSSYLGLIPSEHSSSKRRRL

SEQ ID NO: 285569 - protein, 343 aa, unidentified
MQTVTTIGLGIAKSVFQVHGVDAAGEVVVRRQLKRRQVIAFFQMLPSCLVGMEACASSHYWSRELQALGHSVRLMPAAYVKPYVKRQKNDATDAEAICEAVTRPNMRFVATKTPERQSGLVLHRTRHLFIRQQTAVINSIRAHLAEFGIVAPIGRNGVEELLNVVADASDKRLPNVARACVAALGAQLRMMKTQILEFDRMIRAWHRSSEMSMRLDHCPGVGPALATALVATVAAPKAFRSGRNFSAWIGIVPRQHSSGGKDRLGSMRKRGERYLRGLFVAGALAVIRYAKIHGTQHRPWLTALLARRPTKVAAVALANKIARMAWAMMAKGERYKEPVALAA

SEQ ID NO: 285570 - protein, 507 aa, unidentified
MHKDTVETTVSVHAGFALDARNFIGIDLHSNNIVVCVLRNHVNPRTGQLEKKKVWTGKIALQYGLEAVSSKLSEFCSQPHVAVVESTYNWYGLADLFEARGWHLLLADPTTVKTNAVKMSNDFSDAEFLADRLRLASLRTAVPLSRAARAFRDLVRLRCSLMQDRSRYSVKLINMLNNQLYISTNRIELDDAAAYLEEHGTLEPSLLDSLNDVHICAKVRALLRQMNGLSVDIELIEKQIAQAATAAPVHCHNYIGRLLTIKGCGDVLATVIASEIDDIARFPSARHFVSYCRLAPTERFSNGKLKGEGNAKNGNATLSWALTELANFVVRYNPVAKRKFDRLLAKHKKRVRAIRPIAAILARAIFHMLRDNQAFDIARAFDKLPQHEIDRLAQDKQQRQEAKKKKAAERSRKALERPTEKPASKAKAGSFSDLQEAQPVQSVPLRKTPSDSKPKTRRRKAAMPADMNGLVQNIDRTDEYAAAIAELKALCENVPTMSEGSEPAMGG

SEQ ID NO: 285571 - protein, 350 aa, unidentified
MKKFIIGIDFSKETVDASIVQKEQPETLIAYKKFRNNLKGVDGLIAWAKSKVAQDGEIIFCGENTGTYSTLFSDELTDRGFIIWIEHSMNIVRGMGDVRGKDDKTDSLRIASYAARFYDKMKPYVRPKDETRVLKTLLAKRDRLKSFLKAEITNTKENPLMLQDSNIASSINEFFKRLEESLRKELKELERMILDVVMSSSEYAKNFNILTSMKGIGLINAVALIVYTDNFTKFNFNHRKIATYWGVVPFKNESGTSVRRGTHVSPKCNSWLKALLTEATLCAIRYNSRIKAYHDRLMARGKAIGIVLNNCKNKMLKILVAMVRDSKIYSDMDVSKDPHTTTTTNSIVVC

SEQ ID NO: 285572 - protein, 369 aa, unidentified
MGDRIRYVGLDVHKEGIVVAVAEGGLRGEVRDYGRIANTPAALRRLAHQLGQDGLTLRFCYEAGPCGYGIQRQLSALGHECVVVAPSLIPKRAGDRVKTDRRDAASLARLHRAGELTAVWVPDPGHEAMRDLVRARLDAVRALRRARQQLSGFLLRQGCHYGRPAWTKLHRRWLAGLKFDQAVHHIVLEDYIAAVEAGEARRDRLTAQIEAMLPDWTLAPVVAALQTMRGMALVNAATLIAELGDLSRFANPRQLMAYLGLVPSEYSSGASIKRGSLTKAGNSAARRLLIEAAWCYRFPARISRELRLRQEEQPRPIREIAWKAQLRLCARYRKLARNGKPAKVITAAIARELAGFIWAIARRVPPAAG

SEQ ID NO: 285573 - protein, 341 aa, unidentified
MQQQVNTVAIDLAKKVFHLVGTDTTGKILWRKRLTRQALMPFMAQLPPVTIGMEACGGSHYWARRFREHGHEVKLMAPQFVKPYVKTNKNDMRDAEAIAEAVTRPTMRFVPPKAIEQQDIQALHRVRERLIGARTALINEVHGLMYEYGIVIPKGVSKFRQAVVNKLDSDQDKLTALSQEMFQKLVEEFVTLAAQIAYYQEKLETLGQKHAECQRLMTVPGIGPMTATALVAAVGDIGIFKNGRQFAAWLGLVPRQHSTGGQTRLLGISKRGDSYLRKLLIHGARATLRWAQLKTDRRSQWIRGLLERRGWNRTVVAVANKNARIVWALLSRHGVYSEGVI

SEQ ID NO: 285574 - protein, 391 aa, unidentified
MRYNIGVDLAKRKHSAAVVEQGGERLLLGFEFKNDEEGFASLLAKLAEVGAECEESGVCLEATGHYGRNLIAFLEAHGYDVFEVNPLLTSNWRKAMSVRKVKNDAVDAEALALWLLAGNPTERRRAKSEMDDLRSLSRSRTSLSHIVGDCKRKAHAVIDVVFPEFHGFFSDDFGKAACYVMRKWGSAANVARARADSIEKAMREAAGKKFGREDAERLKALAKSSVGQPSGPLEFQLRQLVAQIEFTQGQMKELDAELEGLLGGSPITTIPGVGTVCGAGILGEIGDASRFSSAAQIVAFAGCDPSVFESGEFEGTRAHLSKRGSPHLRWYLWLAADRARMSDPVLRGYYLKKRSEGKCHKVAVSAVVRKLCTIIFAVLRDNKPYVCPAAA

SEQ ID NO: 285575 - protein, 405 aa, unidentified
MEKSWWMHSKHTGGNSMCYFIGIDVAKYKHDFIILTDKGEIIQSPTTFSNNEAGFKELLDSLSKLDHSQEIKIGLESTGHYHKNLVKFLEDNNYQANILNAYLVHKFIEARTLRKQKNDKLDCRWIAEYLQSVEFKTYQNKSYTSEQLKSLTRERDKLVLRRNQEYVDLTNALDLIFPEFKIIFDNRFSKTAIFLLNEYPSAKEISKISTKDLDKFKKKHKGTRLNKISSAIAQAKATIGHPNESISFIIKTVTKLIIGLTEVIEDYEKQISKLLDKMNTPLLSIAGVGKISAAAIIGEYNNFDGFPDADKLLAFAGLECSRYQSGESDYHGKMVKRGSPHLRYVLMNLAIALKNFNPLFHTYYLKKKEEGKPYRVALNHVVRKFLRVAFKLVSTNTKFDINLAK

SEQ ID NO: 285576 - protein, 355 aa, unidentified
MGITMFSSVTRIGLDLAKHVFQVHAIDASGVVIVAKAVRRGKLLEFFGALPRCVVAMEACSTAHHWGRALIGLGFDVRLIPPAHVKPYVRRNKNDAADAAAICEAAGRPGQRFVRVRSIDNQAQLMRHRTRELLVGQRTQLLNALRGNLAEIGVIAPQGPQHAFALRSLLADGADENGEVVLPDVVRSALAALGNQIDALDEEITRIDKELSAQVKADPTARRLMSIPGVGPIIASAILASVQDIHAFASAREFSAFLGLTPRQNSSGGKERLAGITKMGDRYLRTLLVSGACSVLFRCKRHDDALRIWANQLRARKQGSSGFKVTAVALANKVARIIFAVLTSGGKYELRAIAA

SEQ ID NO: 285577 - protein, 341 aa, unidentified
MGTAATCFAGIDVSKDTLDCCLLVPGGKAKEHTFANDPPGHVALLAWADRHAAGRPVHFCLEATGPYSEAPATALADAGRLVSVVNPTRVKYAGLARGRGNKTDKADARLIADYAQRERPPAWQPPSPEVRELQGLVRRIDDLTEAAAREKGRLASPALTAAVRKSVARTVRFLEREAARLRAAAAALVAATPALRADRDLLESIPGVGRQTATTILAELPAVDRLPTAQSAAAYCGLSPREFTSGTSVRKKTRLSKAGNPRLRKALFLPTQTAVRFNPVLKGFFDRLVAAGKPKLQAIGACMRQLVMLCYGVLKNRQPFDRLGRQEPPLDNTLPGSARLS

SEQ ID NO: 285578 - protein, 345 aa, unidentified
MLKIVYPICCGMDVHKSFVVACIASTNEQGVTTYKSKRFSTFTGDLHQCADWLSENNCKDVRMESTRKYWIPVYNILESTCNIVLAHPKYVKAIRGKKTDKRDAKWIADIFKHDLVAGSFIPPADIRQLRDLVRYRWKLTNFTTGEKNRAQNCLTVSNFKLDDVFSDVFGKAASAITDRILENPAEKITDVSCFRTKGMKATNEQVLAAVDGEMCEEQAEKLRIIRSHMDNLELCKANLESLILETAEKYLPQLNLVMTVPGIRSFAAIGIISEIGVDMSVFPTSKHLCSWAGLTPQNNESAGKKKTTRISRAGVYIKPLLVQCALCAIRAKQFPEIRNRYLVRN

SEQ ID NO: 285579 - protein, 353 aa, unidentified
MPAIKPPIVPLKYVVGIDIAKDSFVACLGYLEVGQQLHFGKEVTFDNTASGFADLLQWVAKHQAADSPRWFVVEATGVYYEELAYFLADNQQLLSVLLPNKVKHFARSTEQKSKTDQLDARLLCRLGLERALPAWQPPTPALRQLRGLARERQVLTRQGAQLKTRAHAYAHSYQPDRRTLARLAAQQQFVVQQLKALDQDLADLLTAEPELARKLAHLTSIPGIGLTTAIVVVAETSGFVLVENERQLTSYAGLDVVQRQSGLSTPATRISRRGNVRLRTALYLPAVSSLRYNPQQMAFYARLRARQPSGKPGVIAVMRKLLVLCYSLWKNDCPYDPHYHPAHVAEKEVAPTT

SEQ ID NO: 285580 - protein, 415 aa, unidentified
MEVMHPRCAGIDVSKRDAKVCIRIQGSSGRRTSSTVTTWGAMTNQILALRDHLAAQQVTVVIMEATGDYWRPFYYVLETDFEVLLVNARSVKNVPGRKSDVSDAAWLADLGAHGLVRASFVPPEPIRQLRDLTRTRTHITAERTREVQRLEKLLESAGIKLSSVATDITGVSGRLMLQALIDSNGTADPVVMADLAKRRMRSKIPVLTEALNGRFTAHHAFLARLFLDRIDAHTRDIAALSERIDGLMTPLLPARELLESIPGFSQIIAEIFIAETGGDMTQFPTPEQLASWAGLSPGSHESAGRVKSTKTRPGNRYLKGALGVAALNQAKSKNTYFSARYRRLASTRGPMKALVAVEHAMIIAAWHMLSNAEFYRDPGADYYTRQDPAKTRARAVRQLEALGYQVTIQPAQQAS

SEQ ID NO: 285581 - protein, 347 aa, unidentified
MKEQSNRSEFTIGLDLGERRHRFCVLNGKGEVVEEDTLGNDRASLVRLTARYSGALAVMEAGAHSPWISRYLEGLGWEVIVSNPRKVRAIYQHERKSDRRDALMLARIGRMDRALLYPVCHGSEEAQQDLLRIKLRDSLVRARVALINSVRFSLKSLGYAVSNPSSERFHKVAMETLPEVVREMIAPSVQALAELSGRIAVLEHEISLLARTKYPQTLWLQQVPGVGAITALYFVLKIEDPKRFKHVRDVGAYTGLCPRRDQSGESDPQLRISKRGDAYLRRLLVSAAQYILGPFGPQSALREYGLRLAADGTTRAKKRVVVAVARKLCVLLLSLWKNQTPYQPYPA

SEQ ID NO: 285582 - protein, 334 aa, unidentified
METKVTNFVGIDISKLSFDAAIISSGQTDNVAHRTFNKHTEFNAFLQWLEGFNVHLDSTTVVCMEFTGLYNASVLKDLLNEQAQVWMIMPMDIKRSGGLQRGKSDKIDAQRIALYALRHQDKIRLYEPLNETTEQLKQLLAQRERLVDSLTRLKVPIEELKQEGLKELAKQLEQALKSAIKGLEKSIANTNIAIKETIAANASIATQVERLISIPGIGPITALSLIVYTDGFRRLLNAKKLACYCGVVPFEHSSGTSVRGKHRLSYMANQKLKKLLHMAALAAIKSDGELQNYYLRKVNEGKNKMSVINAVRNKLVHRAVAVIREERLFIKRAA

SEQ ID NO: 285583 - protein, 366 aa, unidentified
MKKTSTVRVNGNRIFKGHKLTIGLDLGDRCSNYCVLDEAGEVLLEQKLATTPEAMKQTFERIPRSLVALETGTHSPWLSRLVKELGHEVLVAHAQKVELISKSNRKDDRHDARTLARLARIDPELLGPVRHRSAKAQIHLTVIRARAELVSVRTALVNAARGLAKPHGERLPKCGTEQVSRELATKLSAELREVLEPLLKEIESLNERIKEYDARMEKIARESYPQVALLKQVKGVGTQIALTYVLTLDDPQRFAKSREVGCFLGLKPGRRDSGESQPQMHISKEGDRYLRTMLVQGAHYILGPFGEDSDLRRWGLRLAERGGKNAKKRAVVAVARKLAVLLHRLWVSGEVYEPLRNSHKAMRAVA

SEQ ID NO: 285584 - protein, 346 aa, unidentified
MEHYAGIDVSLELSSVCVVDAQGKIVKEAKVASEPEAVVAFFEAPGFAVKRIGLEAGPLSQWLHAGLKEAGFETVLLETRHVKAALSAMTVKTDRKDARGLAQLLRMGWFQQVHAKSMASQEVRALLVGRKQLLGRLIDVELSIRGILRGFGLKVGAVTRKGFEARIRELVTGQATLERIAEAMLSARAALKAEYEKLHKAVLAIVREDAVCRRLMTVPSVGPLVAITYKSAMDDPSRIAKSKAAGALFGLTPKKYQSGEKDVTGGITRTGDEMVRTALYEAANVLLSRITRFSKLKRWGMDVAKRRGSKRAKVALARKIAVILHRMWIDGTTYRWAEAKPIAAQA

SEQ ID NO: 285585 - protein, 392 aa, unidentified
MYIVGIDIGKNHHEASIVSPEGKQIGRSLRFATTHKGADSLMSFIFKNIGNSPCVFGMEATGHYWYPIYSFLKAKGYTIYVINPIQSDSLRKMYIRQTKNDSIDSFLIAEVIRFGQFGTTSMADENILAMRQLCRYRDSVISSRTEIKLRIGTIMEQIFPEYEKQFSSLWVSTSMGILEKYLTPENIENTPIDELFEIIKDKSHNRLTRAKAISIKEAAADTFGIKIAQDAFSFQLKQLIDRMNFLDKQIEALDCQILEYYEKFDCYLHTIPGIGIIGAATILAEIGDISRFKNSSSLIAFAGIDPTVRQSGEFNSTHNHMSKRGSPYLRHAIFLAATTCSFHNSPLNAYYKKKRDQGKHHLTATGAVARKLTTIIYAVLRDSKPYEPKKFC

SEQ ID NO: 285586 - protein, 353 aa, unidentified
MDTIIAFDSHKHYTLASVETKDGRMIKEQRINHRLGSIKEFLADFPPGSPVAVETIGSWYWITDEIEQAGMKPELVHARKAKLMLGSVNKTDKLDARGLNKLQRAGTLPTVWIPPAELRDGRELPRTRMVFAVQRTRLKNRIHSVLAKYGLQGKFEEVSDIFGGKGRKVTNRCLCLLPLQTRWTMQLLLEQLDIVEQRIKAIEDRMADAFEDSEDIRLLKTLPGVGPILSVVISQEIGDIRRFENCERLASYSGVTPSVHSSGDKTRYGPLRNDTNHYLKWAFSEAGNSVAVNRGCYPHRYVVGLYNRVRVKRGHSVAVGAVSRHLAESTYWVLSKKESYRERGVGCVLPKGA

SEQ ID NO: 285587 - protein, 345 aa, unidentified
MKHYCALDVSVKETAVCIVDETGKICRETKVATHPDDLILVMKDPKWQIERIGLEAGPLSQWLYEGLAKAGLPVICIETRHAKAFLKAQPNKTDRNDARGIAQMMRVNLYRPVHVKTLTSQKHRALLTARKLLQEKAIAIENDIRGLLRNFGLKVGLVGKVKFEERIKELVEDRPELREIMQPLLTARKLLREEFTRLHKKVLDLVREDEVCRRLTTIPGVGPVVALTYTATIDIPARFAHSKAVGSVLGLTPRLNESGESKRVGRVSCCGDAMMRSLLYEAAQVLLANVKKWSWLRAWAMNIAKRRGRQKAVVALARRLAVIMHRMWSDGTEFCWTRESLPVAA

SEQ ID NO: 285588 - protein, 503 aa, unidentified
MGPLAYVRGVEASVSLRSELRGRLWSNHFGWQSLFDVGHAPVGEHWTKSRPADQSLTGHPMSFDRLKRTQRRKRLPGHKLKPSRATLFVQNSKPHLSMKPTYFLGIDAAKHKMRATLSNRSEHVLFEKELSVQATGLRQLLAAIKRQVKDPEQLLVLIEATGLLHLNWSAALTKAGYAVAVINPLIARRLYTLQNSIRDNKSDPIDARGLCTIGLLHGEKLLAHYRFSLRPEQFTLQRAQSVRKALRSALTNLKKTYQSLMDLSFPELGGLLQLDGVGIRQLLIQAPTPAAIAGKRLCTLENNWMVRPKAAALKALAADSMADPDLAAASGPALVALLQSVAAMEGRLHALDQQIAKLACTSVDPQTKALIETIPGFGPVNAAKTLAWLPTEILHSGSNRKVAARLQAFMGNDPRLRQSGQWKGHTKMSKRGVEMLRTAFFQSAFSAAHNDPELRAYYQCKRAQGKTHQVALSHLMRILTRRLVAVLRSGKPYQSHYNLKNAA

SEQ ID NO: 285589 - protein, 339 aa, unidentified
MQVTTVGVDLAKNVFQVHGITETGEVVFNRTIRRAHLLAFFKDLPACLVGMEACGSSHYWARQLSALGHDVRLIPANYVKPYVKRGKSDAADAEAICEAVTRPTMRFVAIKSEEQQGVLFLHRARDLIVRQRTQLGNMLRGLLAEFGIVIAQGIGSSVKFAKGVLEGGLPRIPEVAVDVLTNLSNQLVALHLRVRWYEMRMRLQARQDPRVTLLRTIPGVGPVTASAIVATVGNARQFKSGREFAAWLGLTPLNRSSGGKEKLGRISKMGDRYVRRLLVTGMTARLRQMKTHPERVGSWTLDLLARKPARLATVAMANKTARIIWAILTKNERYRPHSA

SEQ ID NO: 285590 - protein, 382 aa, unidentified
MQASTVDTPTAGHCGTIFVAIELSQKTWLVTLHSPDRDRISRHKLEGGDHAGLLAQIEKVRARAAQKLGSVLRVVGCYEAGYDGFWLHRLLEAAGITNFVFDAASIAVEQRSRRSKTDRIDGELLLRTLMAYLRGEPRVVRIVRVPSVEQEDARRASRERDRLVEEQTAHTNRLKALLRLAGMAVGNPRRRDWLAWLERQRDWRGEPLPPHLLAEVKREHARLMLLREQLAALEQAQAAQDITVPAPMVERRNKLQRLKALGPAFSTTLVNEVFYKDFRNRREVASYNGLSPSPWKSGGIDREQGISKAGNHRARVKAIELAWLWLRHQGDSALSCWFRARTANAGKRARRIAIVALARKLIVALWRYLTTGLVPEGAAMKA

SEQ ID NO: 285591 - protein, 368 aa, unidentified
MDSPFANGIECAKLEESTTSNQHKGGVIMKGTTMGIDLAKNVFEVYVEAESGAVIERKRLSRKKLLSWFANRPPALVGMEACGGAHYWARELEKLGHTVRLMAPQYVKPWVQTNKSDQADARAICRAMQEPGMRFVALAGEAQQAVQAVHRVRSRYLGNRTALVNQIRGILLEYGVAIPQGVGAVRKALSLLLTEERWSPLVRQFLLEQQAELTDWDTKIEVVTARIKRENATQPICHRLEQARGIGPLGASALWVKAAGQPYQHGRHFAAALGLVPKHTGTGGKIRLGGISKRGDRYLRQLLIHGARAVVRQVGEKPDRLSEWIRRLVARRGMNKAIVALANKNARMAFALISKDQPYDVAKMCEAV

SEQ ID NO: 285592 - protein, 314 aa, unidentified
MAAGTVQDVGIDVAKRWLDVAVFQTQEQARFDNDKDGWAKLSKWLKGRNVRAIGMEPSGGYERGVAKALRKAGLPARNVNPHKLRHYARVLGRLAKNDRIDALLIARYTAELPTRPVQCDPIAEQLADLVVARRQLSDDKVSLANQLEQVREPTVKRIFTQRLRRIEFDIALLAKRMADLVASQPAFAARDRLIQSFHGAGPVFSHTVLALAPEIGQASRREIAALAGLAPYDFDSGTFKGRRIIWGGRHAVRRVVYMAALTASRSNPVLKAFHQRLIAKGKEPKVALVAVARKILTILSAMIQNNEPWNPNRS

SEQ ID NO: 285593 - protein, 438 aa, unidentified
MSNKVIFNLDELFISVGIDVGADFSWMSIALPNQQFVGKPYKILHNSIDSLTTAVSKIKEAEELYSLESRIFLESTGIYHYPLFCYLRDKGFNCSVINPIITKNSTNINIRKVHNDRFDSKKAALVGLKPDLKVSLMPSDLALNCRNLCREYYDLMDNRSAYVNKLQGELRMAFPQYLGIFSKVTINTSLTLLETYTSPSAFLKADKQEIIDIIKSTARFGLTYAQNKYNAIIQAATDANQFGYIIDSNIKRIRLYISFIRKYDEEINSILESLHELVDANEDSDFVKQIHLIETFKGAGFLSAVSIMGEIGDFSAFSKPKQLFAYFGLDPAVKQSGKFEGTKVQMSKRGSAIARRVIHTLTLQSISISRNREAKNPVLREYYLKKCDSKPKLVAMGAVSHKVCNMIFAILRDNKPFKIIAPQEHIQQYNSAKCDIAA

SEQ ID NO: 285594 - protein, 433 aa, unidentified
MNSPSQASSLHPLDAPAACIGFDWGDSVHAIALHVPGQPIETLQLDHSPERLIAWLDSLQERFRGAFVDIAIECTRGAVVYCCQAYHWVRIFPVHPTTSSKQRTAFRPSGAKDDTHDALVLLDILLNHRDRLRQLHWDEPDTRLIAELVAARRKAVDRRTLLSNQLTSTIKDYFPQALGLFGDNPTAPIAIGFLRKWPTLIDLQASSDAVISRFYRQHNVRSETLIKERIQAVRQSKSLTLDEPIVSTRSRVAHLLVDEIEVVQSHIAEFDSVIAAAFARHGDHAIFHNLPGAGAVMAPRLLAAFGSDRSRFPKPEDAQRLFGVAPVTESSGQRSWVHWRYGAPRFLRQSLVEWAGQSILYSAWAKAHYEQQRKGGSSRSAALRSLAYKWVRILWKCWTTRTLYSEKHYLAQLVKRSSPIAPRALELAQEMGL

SEQ ID NO: 285595 - protein, 378 aa, unidentified
MPSEYIVHIAIELSLSSWVVAVRLPGVEKSRLHHIEGGDTAALLALIAAERLRASAKLGQTIDVACCFEAGRDGFWLHRLLTANGVHTYVLEPTSVLVNRRARRAKTDRLDAEGMLRVLAAWLGGDRQVCSMVRVPTPEEEDAKRPHRERELLVQERQRIENRIEALLFTQGIRRRPSLRSWVRDMDELRTGDGRAIPPLMRAELDRFRRRLVIVLELIREVEAEQVSALASAADNETVQKIIALQRIRGIGENFSAVLAREVLYRSFANRRQLASYVGIAPMPYQSGGMDRDRSISRAGNPRARTTLIQLSWLWLRYQPGSTLATWFRERVGTLKGRTRRIAIVAMARKLLIALWRYVETGVLPQGVEISHEANAMV

SEQ ID NO: 285596 - protein, 331 aa, unidentified
MTDDTPNSVGVDISKAHLDAYMVPAGKAARFSNDAAGLKALIAWVEHPVRAVTYEPTGRWHRAFEEALFQAELPLARVNPLQARRFAQAIGQRAKTDAVDARMLAQMGAALDLRRTEASSPARRALEELQVARDALVKDRTAALNRQKQLQHPLLRRQNTNRLAQIDRQLTAIDTEIGKCCAEDAVLTRRTEILTSIPGVSRVTAAGLLTQMPELGSLDAKAVASLAGLAPVTRQSGTWAGRSFIQGGRARARRLLYMPALAAICYNPELRAKYRQLVAQGKPRKVAVVAVMRKLLVLANALLGQDRCWQQDRPGRGSAAAPSASMPFVEA

SEQ ID NO: 285597 - protein, 412 aa, unidentified
MQDILTCVMGLDVHRDIIVACLVKGAVDAEPEAETRTFSTLIPEMQKLRDWVIEAECRNIAMESTGIYWQPIYEMLESCFDGEISILVVNARHMKNVPGRKTDMKDAQWIATLLRAGLLKGSFIPDKTFRELRHLTRYRKSVVHDITAQKNRIDKFLQSSGFRFTAFLSDTFGASGRNIIRHLIERGSIDRKALDKCLKTKTRNRIDEILVALNGSLSVYQRRFLNMVFLHLEDLEAHKHTIEDEITEEVLKHTDALNLLCSIPGIDVTAAAAIVAEIGTDMSAFPDSQHICSWAGLSPGNNESAGKRKSVHINKGNPYLKSMLCETAWIMASHRKLHLSGWYWKVKQRKGAKRATIALARKVLSIIYTMLKTGTPYSEECFEQRRQRCERKRANRMVNELQKLGYTVVAPD

SEQ ID NO: 285598 - protein, 381 aa, unidentified
MKSLIYVGMDVHKESYSLCTYLISSGEFIGETKMDAKPSLIKQYLNEMKNLLKDKGYEEIEFITCYEAGCLGFSLYKELVKFGVNCKIVAPTTLHKSADSNVKKNDRRDAKMLARNLAYGTCSFVHIPDEIDQETREYIRMRMAHKREIKRIKNMINSFCLRSGHKYEGNCWTDKHISWLKNLELNDFLKSILVEYVDTYDILMTKLDRIEGKIEEISLSERYKESVDKVSCLKGLTRQGALTIIYEIGDFSRFNTTNELCSYLGLVPGEHSSDGKGPSLGITKFGNTIVRTQLVESAKSITLGIKWIKSKRLKQRQKGMPLDIISYADKASKRLFDKYHSLISRGVHCNKAVTAIARELACFVWGMMTNNVSERKVGTVN

SEQ ID NO: 285599 - protein, 407 aa, unidentified
MKKIAGIDVHKQVLMVVIADAAHPELVLQKGQFGTGQAELERLRMVLQQAEVTEVVMESTAQYWRPVGSELEPHFTLHLAHAQSNRAPKGRKSDWADAKRLVKRFAAEELFLSFVPEPEQRDWRMLTRARYALIRDHVHLQNQIEALLEQASIKLSSVVSDVFGVSGLRILWALSQGQTDPAKLADLADGHLRCGREVLVDALRGHFGEVHRHLLEQALQRLRMLAEQVAALNQLAAKRMQPHASTVQRLIEVPGVGAEAAQAIVAEIGPTAAAFPSSAQLASWMGVCPGTQESAGQNYSGRCAKGNRYIRSVLCQVAHAAVRTKGSHLQTVFRRFLAKLGCYNQAIWAVAHKICKIIWHILHNGARYLESGGALNPKAVQKAIQHHLKALSRLGYVLPSPTPDPQV

SEQ ID NO: 285600 - protein, 341 aa, unidentified
MTIGIDLGDVWSHYCTLNEDGEVVDRGRLRTTPSGVEKWFTNLPKARIAMEAGTHSIWVSEQLQEMGHEVIVANVRELRAISHSDRKSDQVDAEKLARYARLDPKILRPIAHRTVAQQEALTLIRARNLIVRLRTAAVNAVRGLAKPCGYRLPASSTLCFAKRSLAVLPRALVQALGPVLEQIAEMTKKIKHYDRLIKRLTETEYPETQALIQVYGVGQLTALTYVLTLGSKERFQRSRDVGCYLGLRPKRSQSGDRDPQLGITKAGNIYLRTLLVECANHVLGPHGRDSTLRQWGLHLASRGGKQSRNRAIVAVARKLAVLLHRIWVTQEPYIPFYAVAA

SEQ ID NO: 285601 - protein, 347 aa, unidentified
MGKSIADLSSVTTVGLDLAKHVFQVHGVDASGRVIVAKALRRKDVLAFFAQLPECLVGMEACGSAHHWARELIKLGHDARMMPPAYVKPYVRRQKNDAADAAGICEAVTRPSMRFVGVRTLENQAALMHHKLREMLVAQRTQLINALRGHLAEIGVIAAQGLKNARDLAGVIKAEGDETIPACVRAALAPLVRQLHALDQEIARSDQTIAAMARDDEMARRLMTIPGLGPVTASAMATSVQDVSVFSGPREFAAFLGLTPRQNSSGGKERLGRVSKMGNRYLRKLLVVGAHAVLYHRKPHDDALRSWAKKLMQTKPFKLVAVALANKMARIAFAIMLGKTSYSAAPA

SEQ ID NO: 285602 - protein, 366 aa, unidentified
MSSVTPAAGPIHLGMDTSKNTIVVGILMPGDEVPVIDRIWNEEGAVRHLVSRLGDPAALRACYEAGPCGFELHRLLASMGVACDVVAPSLIPRRAGERVKTDKRDASRLARLHRAGELTPIRVPAEAEEAVRDLVRARAALLADRKRAQQRITAMLLRHGRVWRSGSYWTQAHEQWIAGQRFGEPALAAALGHYRAALDTRRAELDAIEAELAPWTARPPLAEAVARLGCYRGIAELTGLVLAAEVVDWRRFASARAFMGFTGLVPAEYSSGERTRRGSITKAGSEPVRTALVEAAWSYRHKPAIGVTLRHRQHDAAPDTLARSWRAQRRLYAKYKTMTARGKPAGVAVTAMARELAGFAWAEMTS

SEQ ID NO: 285603 - protein, 447 aa, unidentified
MEAKGKQIHVDSMDEEIVARVAAIDVAKDSGMVCTRVPHPSQPGRRTTTVWSVSARTNSIIAVADRLAEEHVERVVLEATSDYWRPFYYLLEARGLVVWVVNARDVKNVPGRPKTDKLDAIWLAKLNERGMLRASFIPPVEIRQLRDYTRLRVDLTAERSRNIQRLEKLLEDALIKLSSVATNMMGVSGRAMIEALIAGERDPRVLAELAKGRLRIKRIALIEALTGRFDEHHGELATVLLSQIDGLSAQIEHLEARIEELIADMPTAQAPPAAPDPDDAGEPAYLAAVDRLDEITGVGRHAAQVIIAEVGLNMAIFPTAAHLVSWAKISPRANQSGAKTRAGKTGKGNPYLKSVLGEAAASAGRTNTFLGARYRRLARRIGKLKALVAVARSILVIVWHLLTDPTSRYRDLGPQFFDNRIRPERRKINHIRQLEALGYTVTLTPAA

SEQ ID NO: 285604 - protein, 381 aa, unidentified
MAAKKNKTSSRVVIGVDPHKRIDAVVVLDELGAVLAREIVPHTSAGFKTLMAQARQFPQRVWAVEGCNGVGKNLAHRLVAVGETVLDVSTRKSSLVRALATNSGRKTDDTDAYSIALVGLRSTDLPVVVRDQQTELLRLLSHRRRELVGLRTQAVCRLHRELAILIPGGASSRLLATRIRALLNGIRPHDEVDRLRKQLARDQLADLVAIDQRLAAINIEIRDAVRATGTTLTEIFGIGPVNAAMILGEVGQVARFATRHHFAAYNGTAPAQWGSGGDTHDRVNLGGNRRLNHAVHIAAITQARYPGPGRDYYQRKLADAKTAKEALRALKRRISDSIYRQLLADAKAREAEGTGPGGQVGAALSSSAANRSPPNPGGPTS

SEQ ID NO: 285605 - protein, 412 aa, unidentified
MKDLLEISCGLDIHKEKIVACILTGPLGKPTHSEIREFTTLIPDMLALRDWIISENCHHVAMESTGIYWIPIYEILEDAFSGDITLLVVNARHMKNVPGKKTDMRDSEWISTLLRAGLLNASFIPEKRIREFRDLNRYRKSIIRDITSQKNRVEKFLQSSGFRLSSFISDILGASGRNIILHLMEHGRIDKISLDSYLKTKTRKRIDEILMSVNGTLSEHQKSFLKILMCHYDSMKEHLIEIETHLQEDMLPFALQIEQLNTIYGISTTASCAIIAEIGTDMKPFKTAEHICSWAGLCPGNNESAGKRKSTSITKGNPYIKSMLCEIAWVIAGKRNTYLSAWYWRIKQKKGARKAIVALARKLLVIIYTMLKQGTNFDENCFEVRRKNCEQKQLSRYIRELEKHGYTVEAQV

SEQ ID NO: 285606 - protein, 430 aa, unidentified
MKSNTQNAKIEAITVKTLVLGIDVGSETHYARAFDYRGIEYSKKPFKFSNTEAGFVTFKEWILDLKEKHEKDKVVPGMEPTGHYWFNLGKFLQDNEMKPVLVNPHHVKKSKELDDNNPTKNDRKNPKVIAGLVREGRYMIPYLPDGVYADLRTASNIRFQLQAELTRIQNRISRWFNIYFPEYKTVYGKPDAKSGMLILKQAPLPEDILTLGIDGVNQIWRDAKMRAVGKARAKTLIEAAEHSVGSKEGAVFARMEIRMLLEDYESRNIRLQEVMTLIEELVNQIPMAEKLLGIKGVGIKTVPGFLAEVGDISRFNNPKELQKLAGLALVENSSGKHKGKTTISRRGRKRLRYLLFEVAMSLVAKNPEFRELHNYYTTRKLNPLKKMQSLMAVAAKLIRVFYAILTKGVDYDPKKMVGDIKRPAVYLQAA

SEQ ID NO: 285607 - protein, 375 aa, unidentified
MNEHSEAFVAFDTSKLRNAVAIADGGRDGEVRFFGEIDNTPEATAKLVRKLAGKYERLTFCYEAGPTGYGLYRQIRSLGETCSVVAPSLIPKKPGDRVKTNRRDAVSLAKLLRAGELTAVWVPDEGHEAMRDLTRARETAMIDLRSKRQQVSAYLLRLGRHYPHKHKTWTKAHLNWLASQKFEYPQQRLVFEEMMLAMRLAQERLLRLEEAIRGAVPEWSLAAVVTALMAMRGIDVIAAATLLAEIGDLSRFRTPHELMAYLGLVPSEDSTGDTVRRGSITKAGNTRARRMLVECSWSYQHPPRVGAHKQHKVDAAPPAVREIAWKAQCRLYKRYRALIRRGKLKTVAITAVARELAGFIWAINREITTARGVAR

SEQ ID NO: 285608 - protein, 466 aa, unidentified
MSGKRTRRKGQSRGRKELPKSLRRVNLDAAGIDIGSKSHYVAVPEGRDEHPVRKFRSFTTDLRRLADWLEKCGIDTVAMESTSVYWIPLYEILEERGFEVILVNARDFKSVPGRKTDVLDCQWLQELHMYGLLRGSFRPDAEIAAMRAYVRHRDMLVKNASRHVQHMQKALSQMNVQLHNVISDVTGATGMRIIRSIIHGNHNPEVLAEGRDFRCKASRETIVESLSGNYRPEHVFALRQAVELYDFYQQQMEAVDKELEKLLHELEETSPEREEIGPARLKRRKGNEPNFDIRTRLYALTGTDLTQIPAIGPYSALKIISEIGGDMTRWPTVDNFTSWATLAPRNKITGGKLISSRTRSSANRFAEVLRMAAMTIGKTDTYLGAFYRRKAARIGKAKAITATARKLAVIIYHMIARGVPFQDPGLEAHDEQHRQRVLKNLKRRAKSLGFQLMPDDPLDDACGAVT

SEQ ID NO: 285609 - protein, 471 aa, unidentified
MGHDRSRIDQQHRKKRKIVSPSLLKRINRNAAGIDCGSETHYVAVPPEKDPEPVRSFRTFTTDLNRLADWLEGCGIKSVAMEATGVYWIPIFEILEQRGFEVVLVNARHLKNVPGRKSDVMDCQWIQELHSVGLLRASFRPAAEIASLRAYLRHREKLVQGAASHIHRMQKALVQMNLQLHHVISDIMGVTGMRILRDIVAGVSDPKALAAHRDNHCRASAEQIAASLTGNYRPEHLFALRQNLEMFDAFQRQIQACDAEVESVLNALAAVSKRRPNAPPPAPRCKPRFSDNEPRFEIRDPLFRLSGADITQIDGIGPYTALQLIAEIGTDMTRWRTHKHFTAWLTLAPRNKVSGDRLISSKTQPSANRAAVLLRMCAMVLGRTSTALGAYYRRIAYRIGKPKAITATARKLAVLVYRVLSGDLNYDDPGAQAYEESHRTRTLQNLRNRARTLGFGLVDLETGEAIRGTVS

SEQ ID NO: 285610 - protein, 312 aa, unidentified
MFLGIDVSKARLDVACRPAGLAGQYPNDPAGIAALVARLAGLTPTLIVLEATGGYEMPLAAALAAAGLPAAVVNPRQARDFAKATGRLAKNDKIDAACLAHFAQAIRPQPRPLPAAEVRALDALLARRRQLLDMLTMERNRLGMCQDRHVAADLEAHIRWLQERVRDCDGALKEAVQASPVWREKEDLLRSIPGIGPVASRTLLAALPELGQLSGRQAAALAGLAPYDDDSGTRTGQRFVQGGRADVRCVLYMAALAAAKHNPALKAFKERLARAGKKAKVILTAVARKLVVLANAVLKSRRPWDLKLALPR

SEQ ID NO: 285611 - protein, 370 aa, unidentified
MRKSIMYVGMDQHKESIEIATADEGRDGEVRRYGRIDGELDSLDRVVRKLVASGKELRFVYEAGPCGYHLYRYLRSRGLECKVVAPSLIPKKSSDRVKTDRRDAVNLARLERAGELTAVYVPQVEDEAMRDLSRAREDAKRAETRARQQLLALLLRHGLKYSGKTAWSQPHLRWLARIKLPQPAQQIAFQEYVEAISEAAARVERLTTQMRMLLPQWRLAPVVEALQALRGVSFVTAVITIAEIGDLTRFTNPRQLMAYLGLVPSEHSSGPHRRLGAITKAGNSHLRRVLVESAWAYRLPARVTPIIRRRQEQLPKAACEIAWRAQLRLCARYRRLTLKGKTKQVVVTAIARELVAFMWAIAVAVKVTAA

SEQ ID NO: 285612 - protein, 348 aa, unidentified
MNKRIAVDLAKSVYQVAESVRAGQVSQRKRLNREAFRRYIQDQAEPVEWLMEACGTAHYWGRFAQSQGHRVILLHARYVKPYRRRNKTDRNDCDAILEAARCADIHPVPVKTHEQQQLQQLHGLRETWKKSRTQRINLLRGIFREMGLEAPAATAAFLHAASELVERPEVVALRGQLQIVLAEINLYEQCMVECEQQLQRWHADDAIVRKLDEVSGIGLLTASALKTVVGQPERFASGRQLSAWLGMTPREYSSGNRRRLGQISCLGNTYVRTLLIHGARAALLAAQRLYCRTPERLTQLQRWAVATAARIGHNKAAVALANKLVRICWAVWCHERRFSGNWQSSRPA

SEQ ID NO: 285613 - protein, 437 aa, unidentified
MDFDTQTNKNPVRALRRRVLVAQLYISANKYYFNMHKTSGLDVHKDTVFCGVYNGKVHKDVKEYSTLTNSIVCMGEYLKNEGVKQIAIESTGIYWIPVWNILEEMGFELTLVNPYLIKQMPGRKSDIKDAQWIATLLHKGLLRGSLVPCKAIRELRIYSRKYIKLQQRQTSVLQDLERNLEMCNIRITSFVSNISGKSVINIIKQIVEGETDPEELIGYVHGRIINKHKRNTIKESLKGFITPQHRYMLELSMEELELLEKHTESCLNKMRELCQKYYQKEFSLLLTIPGISETSAMIVIAETGADMRAFENSGKFSGWTGLRPRNDESAGKYKSTATTKGNRYLKTVLVQIAWAASRTKGSYFKEKFTRLSIRKSRKKALIAIARKIGVVIWNVLFYQENFNTKKLIVYEPVKVQAKMNYHQKEFERLEKLLKVNA

SEQ ID NO: 285614 - protein, 345 aa, unidentified
MLDTETGEVVNLTVMHEGDKVREFYTQLPRPVLVGIEATGSMHWFLNLMEELGIKCRVGHPATIRAAAPRKQKNDRLDADLILRLLVENRFPAIWLPTKELLDLRALVLHRHQWVRIRTRIQNALQAIALANGLRRGPSLWSYDGQAKIAFLPLQPHASYRRSMLQEMYRKMEEEIENLTLRVAEQANQRPRAQRLMTHPGVGPVTALATEVFLGDPRRFVDGKALASYVGLIPREYSSGARQRFGGVTKQGSPLLRFLWCEAGAHAVRRDPELKRFYRRKLVQKGLGKARVAVARKLGIRLWIMLRDEIDYQEFCRRGQKQHSGAACAGMPEVAYGANSHRPVD

SEQ ID NO: 285615 - protein, 416 aa, unidentified
MRRVRAFCGIDWASDHHDIAVVDETGSLLARARIDDTAEGLDQLLRILAEHGDSPQGPIPVAIETSRGLLVACLRATGRPVYAINPMAAARYRDRHTVSRKKSDHLDAMVLANILRTDAAAHRALPADSEVAQAVAVLARAQQDAVWDRTQAGDKLTSHLREYFPNYLAAVGSRREGIYHPIARALLAAAPTPRQAAKLTRPQLRAVLKKAGRKNTIDKEVERLHSALRASQMRHLPLVEEAMGHQALALLRQLEAACASADDLAEAAVKAFEAHADAEIITSFPGLGPLSGARVLAEIGDDRTRFADARGLKAYAGSAPVTRASGKSVSVAARRVKNQRLAGVGYMWAFSAMAHSDGARAHYDRRREAGDRHTAAQRNLFNRMIGCLHHCLTHQVPFNEAVAFPTPREPRLALAA

SEQ ID NO: 285616 - protein, 328 aa, unidentified
MGREPSPVKQGRVTMENVPGPQFAGIDVSKDRLDVAVWPSGEAFAVNRDEQGLTELCQRLNALNPATIAMEATGGFETMVAASLAAAALPVAVVNPAQIRGFAKALGKRAKTDAIDAAVIARFAGATRPAIRPLADEKTQMLQALIARLRQLIGMRTAEKLRLGRAPSKPLRKSIERIVKALDRELGWLEGDIDAAVKASPVWREKEDLLSTVPGIAGKIARTLIAGLPELGSLGGKQIAALTGLAPFTRQSGRWRGKSFIDGGRAHVRAALFMGAMVAMRFNPPLKAFRDKLIAAGKPKKVAIIAVARKLLTILNAILRDRKPWQNA

SEQ ID NO: 285617 - protein, 355 aa, unidentified
MSIVAHSHPFVVGVDTHARNHVFAILAAGTGELIDTRDFPTTSVGICRAIAWVARRTEADADTLWVIEGAGSYGAVLAGTVAAEGFPVAEAPRMDAKKRRGVGKSDALDARQIAAAALPLPLEKLRRPRVNDGVRQALRILITARDAMITERTRSVNALTALLRTHVLGLDARKPLSGAQITDVSRWRSREEELSLSIARAEAVRLAKRVLELEDQLKANEKQLTELVQISEAAPLLQETGFGPVAAATCLATWSHQGRVRNEAAYASLAGVNPIPASSGNTVRHRLNRGGDRSLNRALHMVALTKMAHDPETRKYVEKRRAEGHTNREIRRCIKRYLARRVHRTLNASCTTNAA

SEQ ID NO: 285618 - protein, 413 aa, unidentified
MLLFIGDDWAEDHHDLELEDETGRRLAKARLPEGLEGITRFHALVAQHAPADWADLPSEEVAGRVVVGIETDRGPWVTALRAAGYRVFAINPLSSARYRERYSTSGAKSDAGDAHVLAEIVRLDRDHHRQIAGDTDLVDAVKLVARAHQTAIWERTRQVLRLRSALREYFPAAIEAFADLSATDTLILLARAPSPVRAGKLTRSQVVSALRAARRHHVQTKADALLAVLRAPGLRQPSTTEAAYAAVVVGQVGIITALNVQITQLEVVVAEHFGRHPAADIYLSQPGLGVVLAARALGEFGDDKKRFADARCRKNYSGQSPITRASGKKTIVLARYATNRRLGDALHQQAFSALGASPGARAYYDALRARKIGHHAALRQLANRLVGILHGCLKTGTKYDENTAWEHQNVAAA

SEQ ID NO: 285619 - protein, 345 aa, unidentified
MIYVGMDISSKSFVVHAISERKAIVFRGEIEPTRVALKNLMSELGRETKLVVMEAGNQLKWIALTLKAIRGVHLHVVHPNEMKWISESSGKTDRIDARKMAELARGDLLPRKVHIVEGTVRDLRELVSARHQLQSKRVALINAIRGYMLQEGYKLPEKFFQRADWRVRLEKAKLGEVTKRIVESMMAAVEAIAQSEEELTREIVAIEDERIELLETMPGIGKLSSRVILAALDNAERFDDRKAVAKYGALTPTIYQSGGVTHMGHINRDGRHEVRRVLLQCAHTVARMKSYGSRPLREFFERVMKKRGKKIAVVALARKLLTIAYGVLKSGNPYDPKMLLPVSSR

SEQ ID NO: 285620 - protein, 400 aa, unidentified
MLSIGIDVSKGKSTVCGMKPGGEIVYAPFEVQHTREGMSELLSLLRGSGEEVRVVLESTGSYHCPVVAALLENGIFVSVVNSLRMKRFCSQSIRRVKTDQIDAMQIALYGLAYWQELQPTRLPEDTYRELQLLARQYYQMTSLLIKAKVDFNAICDQVLPGMQELMSDHAGRHKLSDFVLRYRHTTHILKMGETRFRKDYCKWAEKKGYRNHERMAALIFATAQNGIPVLPNAPSTQIVITEAIRVLHTVEASRDAILTQMQALAKTLPEYSLVREMPCIGDTLAPRLIAEIGDVRRFHSKRALIAYAGIDAPPYQSGKFCANNRHISKRGNRYLRKTGYEVMQSYVMHKPANDPIFTFIEKKRGEGKSGKLAMVAGLNKFLRVYYGKVTELYRSLPAIE

SEQ ID NO: 285621 - protein, 388 aa, unidentified
MLPSIHHASTEQTASDSPDLTLYASLELSRATWLVTCLLPEKDRMSKYSTPGGDGGALLGLLERMRARAQQLTGRPAKVVMIQEAGLDGFWVHRLLEANVIESHVVDPASIAVPRRRRRAKTDAIDGETLLRTLLAWTRGEPRVCAMVVPPTPEEEDRRRVCRERAILLQERIRHTNRIKGLLAGQGITDFNPLHKDRRQLLDAARTGDGRPLPPQLKAEILREIELIELLLRQIADVEAAREVLAGPKAAKAPSPVVLLEQLKGIGPEIASVLYLEGLFRSFGNRRQLAAYAGLAPTPWRSGTVDQEQGISKAGNPRLRSTMIELAWLWQRHQPASTLSRWFHTRVGNERGRIRRISIVALARKLLIAVWRYVTQGEVPEGAVLKAA

SEQ ID NO: 285622 - protein, 426 aa, unidentified
MKYTQNEKILQIKETTLIIGIDVGSEKHYARAFNFRGVEYGKLLIFDNNAEGFAKLEKWTAMIVESNGFTEVILGMEPTGHYWFNLAENTMKSGMRIVLVNPHHVKKSKELDDNNPTKNDRKDPKTIAMLVKDGRYIEPYIPEGIYKELRSAMDSRWRLVKELSAVRNRISRWICIHYPEFTKVFEDWEGKAALLILNECPTPKKVVEKGIEGIIAIWKKHKIRAVGIKRAVRLLESAKTSIGTSEGLVSAENELSMLLEDYESKMRQLERTMALIEELAMQIPGFEKMLEIKGVGLVVAAGFLAEVGDIFRFSHPKQIQKLSGLSLKENSSGKHKGQTTICKRGRKRLRYYLTFGIMPLLSKNEEFRTLHQYYTTRKERPLKKMQSLVALSNKLIRIFYTILTKDIAYDPQKMMSDIKRPEIKAA

SEQ ID NO: 285623 - protein, 372 aa, unidentified
MDEGIKVFVGLDVHKDSIAMAAAEAGRAPGRQIGTIAHDVNKLIKALAKLGEPGAMHVVYEAGPTGYGLQRLLAARGSRCEVVAPSLIPRRAGERIKTDRRDALRLAELSRAGQLRAVWIPDTTDEAIRDLQRAREDAVNARTQARHQLKGFLLRHDIRFPGRSSWTKTFYRWLGTLNFGATSSQTAFTEYVQAVQACDERVARLSAALCASIQGWRFEPVVLALQALRGIDVLSAIGLVAEIGDIQRFDHPRKLMAYLGLVPSEQSSGERVRKGSITKTGNAHARRLLTEAAWNYRFKPRIGYQAQRRQEALSQTVRDIAWKAQLRLSQRFSKLLARGVQVNKVCVAVARELSGFIWDIARNSTPAQATSE

SEQ ID NO: 285624 - protein, 348 aa, unidentified
MSQLLSTVTVIGIDIGKNSFHVVGLDGHGAPVLRQKWSRGQVEARLANMPPCLIGMEACVGAHHLSRKLKTLGHDARLMPAKYVRPYSKGQKNDFRDAEAIAEAVQRPTMKFVATKTAEQLDLQALHRVRERLVSQRTGVINQIRAFLLERGVAVRQGFRFLRAELPRILTAPPEVLSPRMVRLIGGLAEDWRRLDERIGCLSGEITALAHQDAGCERLVSVPGIGPIISSAMVAAIGTGEAFSKGRDFAAWLGLVPKQLSTGDRTILGKISKRGNRYLRVLFVQAAWVVLIKPQSWERHGLKRWIEAAKKRLHRNVLAVALANKLARIAWSVLARSRIFEASKLKAV

SEQ ID NO: 285625 - protein, 363 aa, unidentified
MEEEKRRYVGIDLGKREYTMAVIGKNRKMAIHHGKTCIQGRQALYRLLEPTDKIALEAGNLAFIMAREIMERIGSEVRVLNSAKLPLIWDAPTKTDKEDAMKLAHLIEDRRDEKLPIVPLPSEKELERRKMISSYGREMNNRTRLLNTLHAIFVHQGHTTVVKKNIATAERRRQAIQVLTGHEREEAEWLLKYLELHEQRINELRVKIKEEAKNDEDMKRLQSIPGIGPIVAYAYVAHVGDGSRFSKGAQVSNYIGFVPRLDYSGTIQRHGHITKRGNGYLRGLLVQAAWTMTLSKKGGSLSTRYKYYTLCQEVSKKKTIVSIARKLAELMYSVLRNKTIYEVRKWDGPKDKPAVITVQTMCA

SEQ ID NO: 285626 - protein, 385 aa, unidentified
MYYVGIDIAKDKHDCAIIDSEGNVLDSFTFGNNKIGFNAFSNSISKFLPLEITIGLESTGHYGFNLIDFIDSLQLPLIVLNPLSVNLYRKSLTLRKTKTDKIDCMVIAQMIRTGEFKPYTPVSYHLSELKALTRHRYRLIKEQSRLKISITRLIQILFPELPHHVWSIHQKSSYVLLSKYPSASLIADVHLTTLTTILSNASRGKYSKDKALEIRDAARNSIGSTRVSFQFELVQNIELIRKFKSEINILDNEIKKLMLEIDSVILTIPGISYTLGSIIIAEIGDISRFNNSAQLLAFAGLEPGIHQSGGYTSDRQKMVKRGSRYLRYALLESARLIAMRDPVFKEYMKKKLSEGKHYNIAKSHVAKKLVRVIFKLLSTETKFNR

SEQ ID NO: 285627 - protein, 341 aa, unidentified
MSIVGAFDVHRRQLTFEYLDTVTGELKRGRIMPADRPHLRAWLSRFAGQRDVQFALEGCTGWRYVVEELYAAGITPHLAEPADTAALRGKKRHAKTDKTDTRHLRVHLMAGDLPECWIPPQHVLEARATARLYKDLVDERGGWHQRVAATLFHHGVPAAVSVAKPDGRAAAEQAFLSPAGRQAVETGLRQIDRLTAELEPLRRQLDMLSRRQPGCAALRAAHFGIGAVTSVAIWAELGDVRRFGNSDDVVRHTGLDITVYSSDGKRSAGHLSRQGPPLLRWALYEAAKCAARPAAPDYGYYTAARDDRLPSEATLSVARKLARRCYHTLRELGEEAMAPAA

SEQ ID NO: 285628 - protein, 409 aa, unidentified
MDGLIERCAGLDIHQATIVATVRVSDDGGGRRIVTHTFGTMTGDLLVLREWLHAYGVTHVALESTGVYWKPIYYLLEDGFTLLLVNMRHLKQVPGRKSDVKDSEWLAQLLECGLLRGSLVPPAPIRDLRDLTRYRKKQIEDRTQEINRLYRVLETAGVKLASVMTDVMGRSGRAMVDALLAGTTDPTVLADLARGRLRSKIPALRLALQGQFRPQHAFLIGQILTKIDFLEEAIATLSEEIDRQLAPFAAVVDRLTTIPGWGRRTATTILVETGSDMSHFLTAGHLSSWSAMCPGLNESAGKRRTGKTRDGNRYLRGALIESALAATRANGTALQARYRRVKSHRGHKKAIVAVGHQMLEIAYYIMRDGTTYHELGAEYFARRDRERTRRRSVRQLEALGYRVTIEEAA

SEQ ID NO: 285629 - protein, 351 aa, unidentified
MLAELVDHVIGVDPDRDWITVAAVEARTSGVLATERFPASDDGYRDAVLWADAHSVTSERAWVIEGTASYGRGLSVVVQRRGEWVIEFDRAERKAAKDGAKSDALDAIRAAREALGRERLAQPRAHSGMREAIRVHTVTRAAAVRARTAAINELKALVITADDDLRRQLRGLSTEKLVERCAKFRETATRDVDQRCTRMAMRALGRRIEHLDSEVTDHDRTLKQLLDQAAPRLIAERGIGYLTAAAFYLARSHPGRCRNEAAYARLAGSAPIEATSGQTQTRHRLNRGGDRQLNRALYLVAVTRQRCCPTTKAYVDRRTAEGKTERETTRCIKRFIGPTRLASPRASRNRT

SEQ ID NO: 285630 - protein, 361 aa, unidentified
MPAQINKLDFKGQNIYAGLDVHLKSWQVTLLNDQLTLKTFVMPPEPEVLSNYLQSNYPGASYYSAYEAGFSGLWTHHRLCNLGVNNIVVNAADIPGTQKDQLQKEDKRDSRKIARSLREGSLTAIYTPSESTLNDRSLIRSRKALVRDMIRFKLRIKSFLYFYGIQLPEQFKDSNKHWSKRFMTWLEAIPMKENSGHLALKALVDEVRSQRELLKNIIREIKSLSENDTYRDRAKLLCSIPGIALITAMFILTEVEDINRFPNAERFASFIGLIPMTHSSGSKEKVGEITFRSHNYLRSAFVESAWIAIRRDPALLMAYQNLVKRMEPNNAIIRIAKKLANRTYTVLKYNKLYEYNKTDNL

SEQ ID NO: 285631 - protein, 344 aa, unidentified
MTAVMIGVDPHKGSHTATALDATEHELACLRVRAGRRQVEQLLAWATPFEARTWAIESANGLGYLLAQQLVAAGEVVLDVPATLAARVRVLSSGQSNKNDPNDARSVAIAAMHAPMLAAVRVEDHRTVLRLMAKNHTDLARWRNKICCRLHALVAELVAGGISKEVVVSDAFALLESIHPEGVAAIERHRLAGQLADELVHVDDQLTLAKANIRTAVAASGTTLTDIFGVGPVVAAMLIGYTGDPFRFPTSGHYAAYTGTAPIEFSSAGRVVHRLSRRGNRRLNHALHIVAVTQIRHAHSPGHGYYDRKRAQGKTPREALRSLKRRLSDIARRQLVDDARRAAD

SEQ ID NO: 285632 - protein, 339 aa, unidentified
MRLYVGADLHANNIFVGVIDKKGKRLEQKKLPNDLPVILEYLKPRRKEIVGIVVESTFNWYWLVDGLMGSGYQVHLANPSAIQQYSGLKHVDDKHDAFWLAQMLRLEILPEGYIYPKEERPIRDLLRKRRHLVKLRTSLLVSLQNIISRNCGIQFRANEMKLLKEDRVSPLLEGNEDLALAGKTSKETLDQLTRQIHRIEASIVQRVELKESYRYLLTLPGVGKILALTIMLETGPIARFAQVGDYASYCRKVPSRWTSNEKTKGKGNQKNGNKYLAWAFSEAAEFARRYDDQARSYYSRKMRKTNFMVAHSALAHKLSRAAYYVMKDQVPFMPGKLFS

SEQ ID NO: 285633 - protein, 356 aa, unidentified
MKNSKLDFTGQTISVGIDTHKKDMVITPRCQGMQLKTISMDPEPEQLVRYLHKNYPNARYESVYEAGFSGYWMDRKLRAAGIKNIIVNPADVPTKQKEKRKKTDKIDSRKLARELSAGNLEGIYIPSEEHEAIRALSRLRKQITKDQTRLKCRIKSLLNFVGITLPENSELKHWSGKFIKYLSEIEFKHKAMKITLERLLESLINGRQILLGIVKNLREIVKENAEMKKITGYLQSVPGIGFITAITLYTEIMEIKRFGKFDELSSYVGFSPSTDSSGEKDKVIGLSKQQNKYLRNMLIESSWLAIRKDPALLQAYGNLVRRMSKQKAIIRIAKKLLSRIMYVWRNEKHYVCAVVS

SEQ ID NO: 285634 - protein, 323 aa, unidentified
MAPPTALPLAAGIDVGQRLLDLGLAPSGRTTRYRNETHDIGRLVAQLQQTGVARVVLEAIGSYAQPLVLALVAAGLSVGVVNPRRIKAFREAEGGRAKTDRLDARLIARFALCMPEAVRPLPDAAARALKDLSTRRQQIVTMRAMEKTRLKQAREPAVIASHQACISALDAACAAVEAELDTRIQADPARTAARRLLLSIPGIGARVASVLICDLPELGQRDRKSIASLAGLAPHVSQSGNAPPRAMIAGGRPCVRAALYMSALVAVRHDPGFKAAYDALRDQGKPAKLALIAVARRILVSANAVLKASTPYKPQNAQKTLDP

SEQ ID NO: 285635 - protein, 341 aa, unidentified
MQITTIGLDIAKNVFQVHGIDGAEKVIVRKQLRRGQVMAFFEALAPCVVGMEACATSHYWARELTKLGHEVRLMPAKDVKAYVKRNKNDAADAEAICEAVRRPTMRFVRIKSAEQQGQLMLHRARDLLMRQRTQVINALRAHLAEFGITAAQGREGIKELLAIVAQEEGSRLPSDAHASLTVLAAQLQAVQTMIGSLEKRIVAQHRSNEASKRLETIPGIGVIGATTIAAVVPDPRVFRSGRDFAAWIGIVPRQDSTGGKQKLGPISKQGDQYLRRILIVGAHAVLRRARQQPETYPWLTQLLARRPFKVVAVALANKMARIAWALLAKGGTYRAPQLVAA

SEQ ID NO: 285636 - protein, 323 aa, unidentified
MSKIIGIDVSKQTFDSAILNEEDKIATQKFTNNPKGFASLLKLLQPGDHVVMEASGPYYCKLAHFMYKHNIKVSVVNPLVIKRFCQMRLTRAKTDKKDAVMIARYAVSEKPELWKPDEIINTRLKQINSTMDLYEKQLTMLNNHLEALEQMPIADQEVKRQTKKQIKALQKSIGKLDSEQSGLIETHYSATYTALTSIPGIGRKSAILLIAVTNNFKKFDHYKQLISYLGLSPRIYESGTSVKGKAHICKMGMSRIRKTLYMCSWSAKFFNHFCKQLYERLKLKGKPERVIKIAIVNKLLRQAFAIGKNVSSFNENYQPKLGF

SEQ ID NO: 285637 - protein, 410 aa, unidentified
MEVLYQRCAGLDVHKKTVVAAVRLVEGNKVVTEVRTFATTTVGLLALSDWLAETGCTHVAMEATGVYWKPVWHVLSDGEIELVLANAAHVKNVPGRKTDVSDAAWLAELLAHGLIRASFVPDGQTQELRVLLRTRKQLVREQTRHTQRIHKTLEDANIKLEAVLSDVLGKSGRAMLDAMVAGETDPVRLAALAHPNVKCPQAKLREALRGRVTSHHRFLLQLHLGQIDRLDAAIATIDREVEANLVPFRTAVELVSTIPGVSTLSAEVIVSEIGLDMSRFPTAGHLLSWAGLCPRNDQSAGKRRSSRLRKGAQWLKTTLVQCGWAAKNKKGSYLQAQFLRLRSRRGPQKAVCAVAASILTAAYHMLKDGTLYSDLGADHFNRRSKTTQAQRFVNRLKHLGYAVELKPLAA

SEQ ID NO: 285638 - protein, 347 aa, unidentified
MNYIGMDSHISTLDLKVVNDSGKLKMASSIPTSASNFIEFVKSVPRPRQIYVEEGPLASWLLELCVQNKEILVITDPKRNRWIGSSGEKEDPIDAGKLAQLARGGYVKEIHHPVGQHRRFRELMTAYHDTVKSTVRIKNKIKAKFLQNGIQCTGETVYLPGHRTEWRNKLPQEPVLLVIIDSLWQQLDQIQENQETILSEAKSQAKRYPEIKLIDEIPGVGFIIAATIVAILETPHRFADKRKVWAYAGLGIVKKSSANKTYSEHLGKEYNRLLKCAVEEAAQAAVNANNDNAFRRIYLDKTIRQGIASHRALLTIARDVISTAWAMWKKKEHYNPEIDKKKIDVEA

SEQ ID NO: 285639 - protein, 338 aa, unidentified
MMIIGCDFHPRFQQIAFIDQETGEFGERRLSHPDEAEEFYRSLAGRQVRIGAESTGNFRWFRRLMEELGHEFLLGDPSTIRAASPRRQKTDKRDARHILNMLVEDRFPAVWQPPVENDELRQLLLHRCRMVRMRTRVKNQLDSMAKNEGLLSSRVWSPKRRQEIEALALPNWYAQRRSDLLGVLDELNKRIKPLDEAVLQAAEENTEARLLMTHPGVGPVVSLTYVLTIGDWKRFPRGKQIGSYLGLIPAEESSSDKRRLGHISKQGNTLLRWLLVEAAAKAQRYDPGWHRQYVRLSMNKHHGVAKVAIAHKLAVRLYWMLRSGQDYKQVMERGSHVG

SEQ ID NO: 285640 - protein, 355 aa, unidentified
MDSKKYIGMDVHQASISIAVRDATGKVVVESIIETKATTIVEFIRGLKGTLWVAFEEGTSAAWLYDLLKPRVAKVIVCDPRKNALLNAGNKNDRVDARKLSHLLRAGLLTPVYHGENGIRTLRELGRSYLTVNKDLTRVMNRLKALYRSWAIPCAGEKVYSPRQRNAWLEKLSEAGVRRRAEQLYQQLDALVPIRREARRELLTESQRHPATPLLRQIPRLGPIRVALLIALIQTPHRFRTKRQLWAYCGLALQTRASGEYRFSGGELQHCKRLPALRGLNVNHNHDLKNLFKSAATHVSTSTDPLGDFYRSLLAKGMKPTMARLTLARKMAAIVLSIWKKGARFDPAELKRQAA

SEQ ID NO: 285641 - protein, 337 aa, unidentified
MKSWSVTVLSATSVLKKFSQNPAPEALHGFLTRSLSGAEYHSVYEAGFCGFWIHERLTALGIDNIVVNPADVPTKSSEKLRKSDAVDSGKLARSLRANELKGIYTPDSVSLEMRSLIRLKNSITKDTTRQKNRIKSQLRCLGIGIPQEFLEPFSNWSKRFFAWLKEVETLTPSDRQALDIQLRHLEELRRQKLEMARALRALAKADRFREPQRLIMSVPGFGQTTGMAFLSEICDITRFRNAEQLAAYIGMIPMCHSSGEKDGTGDITVRKHAVMRCNLIEAAWVAIRQDPAMNLFYTEQCKRMPKSKAIVKVARKLVNRLYFVLKHQTEYVNSVVS

SEQ ID NO: 285642 - protein, 373 aa, unidentified
MPKYSTAFGMDIHLRSTTVCALDADTGEAVTRRFPGNPWGEIAGWMDGFPGPSLAAYESGYLGFAPQRELAGLGVECVVAAVSKIPRSAADSASKNDRNDAARMAKAILAHDISPAWVPSPEVEGIRDLAGAYDGAAARLATAKQRLLAFLAKRGFVYGGTTPAGNPRKYWTYDFLRWLDKVRPEDDGGVRTLAALRNEVEAAAEARADLLSEYRAAVDASPIAAEVAALQSIKGCAFALAAAFSAEVGDFTRFRSGRQVTAYFGLAPSQRSSGDSVRLGGISGAGNALVRKLAVEGSWCYAAARHQPKLMPRDTGVPLEIRMHGRKGSERLLRRREEMLARGMPAAKANAATAAELVRWLWALGMMCREGAE

SEQ ID NO: 285643 - protein, 471 aa, unidentified
MPADRAPGQLAVSIGQAQEVAAVSRPQVIDDQEHERVHDRVAAIDVAKDTGMVCTRAPHPSRPGARRASVQSVKARMNTIRTLGRRLRRDGIEIVTLESTSDYWRIWFFVLEACGLTVQLVSAAQAKNLPGRPKTDKLDAMWLARLTENGLLRASFVPPKEIRDLRDYTRARTRLIHERSRCWQRLEKLLEGALIKLSSVASKLTTLSAQDMIKAMIAGQRDPEVLAGLARRTMKAKHDALVQALDGMFDDHHGELAALLLDQIAALDAKIDQLGARAAELTAALPAAWGIDADGSTGPGAGTGPGAPVLDAVARLAEIPGLSPGLARAIIAETGLDMSRFPTAAHLVSWAGLCPSARQSGPRSRTGRKGRGDTWLRGALGQAAVNAARTPTFLGERYGRIARRRGKAKAQVAVARSILVIIWHLLAHPAARFTDLGPGYHQSRTETDRKLRNHIRQIQALGFTVALTKTG

SEQ ID NO: 285644 - protein, 461 aa, unidentified
MKTKTTKSKNKSKKISVDAGWQTINPHAAGVDIGAREHWVCVPAQSAPNPVRKFGTFTADLEAMAQWFKECGVTTVAMESTGVYWIPLFQILERAGLEVLLVNARQTKNVSGRKSDVLDCQWIQKLHTYGLLQASFRPADPYCVLRTYLRYRDELVGFRSVQCQHLQKALQEMNLQLPQVLSDVTGVSGLAIIKAILDGERNRSKLAGMVSVRVRATRAQIERALVGDYRKEHLFVLRQAYDLHQIYEAKILACDEQLVAEAARLPQKVDVKLLPPPARKPGRRQSQDQMAGQDLRELLYEKFGVDLTAIEGVGVLTGLVLLTEVGPNLDRFPTEGHFASWLGLCPDNRISGGRVLSSRTRRVVNRVSDALRMAAYTLERSQSALGGFCRHMKAKLGAAEGITATAHKLARIVYAMIKHGEAYVREGQEAAEKKYQENQLRTLKKMAKAAGMELTPIQSLA

SEQ ID NO: 285645 - protein, 389 aa, unidentified
MEARTVNNLPPAAPHDDAVRCLLAIELSKKSWIVAVNTPLSDKVSRHTLKPCDGKELLDLCERIRTRVARETKQRVEIVSCYEAGYDGFWLHRLLEAHGIRNYVIDPASLQVDRRARRAKTDRVDVERLLRSLMAYLRGEPKVWSVVRVPSVAEEDDRRLHRERGRLISERIQHVNRIKGLLAIHGIYEYQPLRRDRMQQLERLRTADGRLLPPRLMAEILRELQRLELVIGMIKTIEAERDAIASAKTEAEHTSAKKIQDLAKIKCIGPEFANTLVGEVFYRSFDNRKQLASYVGLTPAHFQSGAMCHDQGISKAGNAKARTVMIELAWLWLRHQPDSPLSVWFRERVGKLKGRIRRITIVAVARKLLIVLWRYLETGLVPESAALKL

SEQ ID NO: 285646 - protein, 341 aa, unidentified
MNATTYGLDVAKRAFQLYWVDVQSGEIVNRRFARDELIGFLAQRPAGRVALEACGSGHWWARKIKALGHQVVLLHAKFIRPFVQTNKTDAADARAIWTAAHQPGMRTVAAKTEDQQAMLALHRMRALLVKFRTMQVNQLRGLLYEFGATFRAGRVAGLAEIRARMAELQDALPEAMLFSLQDQLKRIEGLQSDIDTLENQIGTWQKQEAACRAIAEVPGIGRLTATALVATIGDAKTFKSGRELASFLGLVPRQSGTGGKIRLGSISKRGDPYLRTLLIHGARSVLWCHAKVPTPWQKGIKERRPANVATVAMANKMARTAWAILAHGVAYRRNHVSVRPA

SEQ ID NO: 285647 - protein, 410 aa, unidentified
MTKIIVAQAAPVLAAIDIAKARHEVLIAIPDKKRRRRFTVLNELADFNRLVTVLKEYGRPVRVAFEATGNYHRALAYHLATAGFEVKLVSSVALARTREALNNSWDKNDPKDAQVILHMMEIGNEQYYCDPLVCGTNDIQELSKTHDIVSKSKTELWHRVLTHYLPLYFPEVDRFHRSSRSDWFFAFLERYPSPHFITAMGKDAFTADAWDVIGRKVAKERLLADIYETAKSSVGLPVAPDSDAIRMFRLVLGEGRSLIAQRNQIEDRAIALLKDLPDYQLLTSIPGIGPINALTILAEAGDLRRFGHHRQFLKFCGMDLATIQSGTFRGQTKLSKYGNARLRRTLWMAGQVAILQRTNSFRDKFERYIAKDRHNTHLRRKAYIAIAAKMARTVHGIIKHGEPYRPFFEG

SEQ ID NO: 285648 - protein, 370 aa, unidentified
MAKRSMFVGMDVHKESIDVSLAEEGRDGEVRHYGVIAGDLEAVGKVVRALRTPNRRLRFVYEAGPCGFGIHRFLIAQGEDCVVVNPSSMPKRSGDRIKTDRRDGDALARLHRAGELTAIYIPTADDEALRDLVRAREDAVGLSTQAKHRLKAFLLRQGRRYPGRAGWTRPYRRWLADLSFPLAPQHIALQEYRDTIDETERRVERLTDQLRHLTPPWRWAPVVDALQALRGVSFVTAVGLVAEVGDIRRFSHPRELMAFLGLVPSEYSSGPSVRRGGITKAGNPHARRLLAEAAWAYQGVPRIGRQMLYRQEALPKTVCDIAWKAQLRLTSRFRKLVARGKAKPKVATAVARELTGFIWAIAREVPAPPV

SEQ ID NO: 285649 - protein, 407 aa, unidentified
MAITCGIDWAESHHDVALMDDRGSIVARARIATGLSGFGELMSLLAEHCDDPRQVPVAIETDKSLIVVALQAAGLVVHAINPRAVARYRERHGQSGKKSDPGDAALLADVLRTDLHQHRPLPQVSEGGRAVKALARQHQEAIWAVHQTTSRLRSVLLEFYPQALQAFPNLKHKAALSILAAASTPELGTKMTARRVVALLHRCGRRNDESLVEQILADLRTPAIRQPAAVEAALGLAVAGLIGIITAMHASIAQLEDARAAEFDRHPKSGVLRSAPGLGPVLGARILAEVGDDPNRFATADGLRAFAGTAPVTRASGRSRHVAARRVRNKRLADACHWWAFATLTKSPGAREFYDRRRAAGDHHNAALRNLANKLLGRLWWCLQHDQEWDDEAAWPARETAPAALAA

SEQ ID NO: 285650 - protein, 402 aa, unidentified
MNAVGIDVSKGKSMVAIMRPFGEIVSAPFEIKHTASDIHSLVELINSVEGESRIVMEHTGRYYEVLAHQLSEANLFVSAINPKLIKDFDNDSLRKVKSDKADAVKIARYTLDKWQNLKQYNVMDELRNQLKTMNRQFGFYIKHKTAMKNNLIGILDQTYPGVNTYFDSPARSDGSQKWVDFASTYWHVDCVRKMSLNAFIDHYQNWCKRKKYNFSQSKAEEIYGKAKELVPVLSKDAITKLIIKQAVDQLNSASTTVESLRTLMNETASKLPEYPVVMAMKGVGTSLGPQLIAEIGDVSRFTHKSAITAFAGVDPGVNESGSYEQKSVPTSKRGSSDLRKTLFQVMDVLIKTHPQDDPVYQFLDKKRAQGKPYYVYMTAGANKFLRIYYGRVKEYLSSLPES

SEQ ID NO: 285651 - protein, 340 aa, unidentified
MNIKRIGLDLAKNIFQIHAVDHHEHVVLRKTLRRDRMIAFFTQLTPCLIGIEACGSSHYWARELTRLGHTVRIIPPQRVKPYLKGQKNDANDAEAICEAISRPGMRFVAVKTERQQTLQAEHRVRARLIRARTALSNEIRGLLAEFGLILPTGIRQLRKALPEILSQQEQWDDRFMRLLCELSEELKILDERIARHDGRLQQAARDDIRIKRLLAIEGMGPVVASALVAAVGDGRQFKSGREMAAYLGLVPRQHSSGGKERLGHISKRGDSYLRTLLIHGARAVLNACKNKTDRRSRWLQALSERRNRNIATVALANKNARIAWAILSREEDYHGLQAAG

SEQ ID NO: 285652 - protein, 360 aa, unidentified
MEGNQERSAGRIVGGVDTHKDLHVAAVVDELDRVLASQCFATTRHGYKQMLAWMRGFGSLQRVGIEATGTYGAGLLRYMQKAGIEVLEVTTPDKHDRRKRGKNDDLDAQNAAHAAFAGKRTVTPKSRNGMIESLRVLKACRKTAVAARRVALQMIQNTIVCAPDELRELLRTMTRMQLIRTLAAWRPDLTDYRNVTSAYRITLKSLGRRYLELHDEIADLDTMIIAIVDELAPNLVARNSIGHESAAQLLLTAGDNMQRLRSEASFAALCGVSPVPASSGKTTRHRLSRGGDRAANSALHIIAIGRLRTDPRTQAYVARRITEGHSKLEAIRCVKRYIAREVFSLIKQRPKESHPASSLV

SEQ ID NO: 285653 - protein, 406 aa, unidentified
MDVIYPRCAGLDVHKQTVVACARLSGDGAPKQEVRTFPTTTSGLLALADWLESLGVQHVAMEATGVYWKPVWHVLEGHFVLVLANAAHVKNVPGRKTDVNDAMWLADLLAHGLIRASFVPPVAVQELRTLTRTRKQFVRERGSHAQRIEKILEDANLKLSSVISDILGKSGRAVLKAIIDGEVDPQALVSHIGRVKATRAELLEALRGHVTAHHRFMLKLHLDHIETLDKAIAQIETEVGLGLEPFRRAAKLLSTMPGLSSVSAHVVVAEIGIDMSRFATPGHLLSWACLCPRNDESAGKRRSTRLRRGGKWLKTTLVQAAWAAIKVKGSYLQAQFHRLRARRGAKKAIIGVAASMLTAAWHMLRDGTEWHDLGAAHFDRADATKTANRLIRRLQQIGYKVEATPA

SEQ ID NO: 285654 - protein, 452 aa, unidentified
MGKNRAYRATAVKSVHLEEVTRSREGQAATVGVDVGKEEARVVVRWEDATFERPWRVKNPGEVRELTDVLARLSKGRSLRIGIEPTGTYGEAFRQAWTDAKLGVHRVGGKAVHDYAEIFDGVPSQHDGKDAAIVAELVALGKCSPWPYRASTAAEAEMGYWVDWLDAQQTTESMWIGRLEALLARHWPEATRLLRLGSVTLLEAMARYGGPGKLAEDQDAAGVLAGWGGPGLTEEKIEALLRSAAGTVGVRPCGYDLKQVQRCATMALSAHREVRKARKELVRLGEGNAVLQRQSEAVGMATACVLWVTLGDPRDYRCGEGYRKAMGLNLKERSSGKHEGKLKITKRGASAPRRWLYFAAMRWCQRGSVRRWYERKKAKDKGRGEGALIAIVRKLALALYRVAVDDKPFDASRLFPGCGKRVNQARGENGGTDEKEDAGSAKRRPKRATGGV

SEQ ID NO: 285655 - protein, 348 aa, unidentified
MTASHYIGFDVHKKTISYCVKTAAGEIVEEGCTPAERGALRQWAAARPQPWRGAMEATLFSGWIYDTLKPYGEQLEMAHPAKMKAISAGKKKSDTIDARTIADLVRCNLLPACYVAPPRIRELRRLLRYRSLVVSEAVRMKNKMAGLLMETGAAYVKEKLHRKKYFARLLEELEEVPESVIDLLRLSRGALEMFESTQKRLVRELLADPELTQRAERLMTIPAVGEITALTWALEVGDPQRFRSSSDAMSYCGLTAALKSSAGKQQRGPISKQRNHWLQTTLIEAAKLAPRWNPQLAALHARESERGNRNRATLAVARKLVAYLLAVDKSGQAFQVRAPSEEPTPKAS

SEQ ID NO: 285656 - protein, 362 aa, unidentified
MKNTSTAIGHQDGLTVGIDLGDEYSQLCVLDEEASVVEAGKIRTTEAALHQRFAGLEPCLVVMEVGTHSPWVSRLVASLGHECLVANPAALHQKGRKKTDKVDAEKLARWGRSDPEILQPVQHGGAEIQADMALVHSRRSLIEARTKLINRARGLVKSYGDRLPKCDADYFAGKVRDFVPRELEAAVEPLLQTTDWLTTQIKALDDQVETLVAGKYGSATAPMQQVTGIGPVTSLTYALTIRDPGRFRKSRQVGPYLGLTRRQDQSGDSDPEYSISKAGNVYLRQLLVQSAHYVLERGPDSDLRRWGLRKAEGGKKAKRRAVVAVARKLAVLLHHLWLTGEAYEPLRGKEAVAAGLPRSDAV

SEQ ID NO: 285657 - protein, 373 aa, unidentified
MDKNITKVVMDTHKKRHTVAMVSCETGQMEVFSVNNTAKDIKKMVGKIQKRSSGPIHVCYEAGVCGFVLKRQLEALGCQCDVIAPSLVPTKPGDRIKTDRRDAKKLLGQFIAGQLTVVHPPDAAQEAAREITRCRQAAQEDLKRIRHQLLKLLNRHGYLYREGNHWTQKHHKWLQSLELDPSDLRLVFESYFTELRHCISRLKGLDQEVDRLADRPEYREIVGLLRCFRGIDTLTAITVLTEIFEFGRFDSPRKLMCYLGLVPSEYSSGENSKRGGITKAGNKRVRRLLVESAWHYRHRPFASKALDRRRQDQPQWAIDMADKAMSRLYKRYWHLINRGKMPTKVCVALSRELAGFIWAILHEHRNRQARQSA

SEQ ID NO: 285658 - protein, 411 aa, unidentified
MQVIYERCCGLDVHKRTITACRLRWLGSEWQKEIRQFGTMTKDLLALSDWLVKEGCTQVAMESTGVYWKPVYNILEGQVELLVVNAQHLKAVPGRKTDVRDAEWIAELLAHGLLRGSFVPPPSVRELRELTRYRSSVVRDRARTVNRLQKVLEAANIKLASVVSDIDGVSARLMLEGLVAGQRDTEQLASLAKGRLKEKHRQLVEALSCRLQPHQSYLIAEHLAQIDYLEGAIERLSGQIEEKLRPFEQQIGWLDTIPGINRRTAEVLWAETGGDMGRFASARHLASWAGMCPGNNESAGKRRSGRTRKGSPWLRHCLVEAAHGAAHTKNKYLRSQYHRIAARRGKKKALLAVGHSILVIAYHLLTRKQAYADLGANYFDERDRQAVTKRCVNRLQKLGYEISLEKLQMAA

SEQ ID NO: 285659 - protein, 429 aa, unidentified
MRTESTPGARGPVFCGVDTHADSHWLCVLDWRGRKVLSRQFPADAAGYEALAGAIAAAGEPACVAMEGTSSYGAGLTRHLASLGMPVREALSPARTQRRRPGQGKCDEADAERAARAAMSGSRLGTPKSQDGWVDGVRCMLAARSGAVKARTSAINTARSLLTTAPEGLRSRFRGMGGPRLMEELPSVRAEGALGAALGALADLWAAARDAALDMELAIEASLEENCPALLAMYGCGPVSAAKLAVAAGDNPGRLRSEASFAAICGACPIPASSGKTVRHRLNRGGDRQANSALHEIARQRVMRDPETAEYAERARGRGKSDREVMRCLKRYVAREAYRALMRPHEIRRPEDASELVAARRAARVSQVRAASILGTSEKYISMLERGQRELKPIRRAYEAWVEAGLPLDWDRQAFEAERKMDSKKHLAK

SEQ ID NO: 285660 - protein, 346 aa, unidentified
MDYHPSDQYIAFADTETGECGERRLNHGDGEAERFYRDLQQRAVSVRVGMEATGYSRWFERLLAELGIEVWIGDAAKIKTKRVRKQKTDRNDAQLLLGLLIENNFPRVWVASPENRDLRQLLWHRHRLVQMRTRILNQLQALAMNEGNRRKKKLWSAQGRAQLEKLPLATWASRRRQDLLELLDRMTPAIAALTAAVEQEAKKRPEVLRLMTHPGVGPITALAFVLIIGTPERFPCGKQIGSYIGLIPAEDSSAGRQRLGHISKQGNALLRYLLGEAAQAAVRCDADWRRRYVHLAMRREKSIAKVAMARRIAVRLYWMWRNGWEYGQSVAFGSHAGQLVTGHGAH

SEQ ID NO: 285661 - protein, 342 aa, unidentified
MKQYVGLDVSQKETSVCVVNEVGQVLFEGKAKSDPGALTALLRKRAPQAERIGFETGAMASWLWHELRRVDLPVVCIDARHAHAALSVRMNKSDQNDARGLAELVRVGWYREVKVKSEESQKIRAILVARSRLVAIRRDIENQVRSLIKEYGLLFPRAIGKQFRNQVSELLGEDHQLLGVIAPLLSIHEHICEQQSKFDDEVRRFAKSDETARRLMTVPGVGVVTALAFRHTIDDPSRFRSASTVGAYLGLTPRRNQSGETDTSGKISRWGDRLLRSYLFEAATVLLYRTKKWSSLKAWGMKLAKRIGVKKAKVAIARKIAVILHCIWVDGTSFDWGQAKPA

SEQ ID NO: 285662 - protein, 409 aa, unidentified
MDGLIERCAGLDIHQAMIVATVRVPDDAGGRRVVTHTFETMTVELLALREWLQAFGVTHVAMESTGVYWKPIYYLLEDGFTLLLVNMQHLKQVPGRKTDVQDSAWLAQLLECGLLRGSLVPPTPIRDLRDLTRYRKKQIEDRTQEVNRLYRVLEEAGIKLASVMSDVMGRSGRAMLAALLTGTTDPAALAELARGRLRAKIPALRQALVGQFRPHHAFLIGQILTKIDFLEEAIATLSDEIDRQLAPFASTVERLTTIPGWGRRTATTVFVETGGDMSRFPRAAHLCSWGAVCPGSDESAGKRRSGKTRDGNRYLRGALIESALASTRAKGTALQARYRRVKSHRGHKKAIVAVAHQMLEIAFYIMRDGTTYHELGAEYFARRDRDRTIRRSVKQLEALGYRVTLEEAA

SEQ ID NO: 285663 - protein, 321 aa, unidentified
MAYFRDVVGIDVSKQNLDLYVLSGQQRRTVANTAAGYGDLVSWLKSLGVRMAVMEASGGYERDVAKALRQAGFDVRIVDPKRVRHFAKAAGRLAKNDRIDAEMIAEFGAVFAAAQRCEIPLDAKREHLAGLVAARQALVGHQTSLQNQISACPKGPARQALAAALKPIPASIKQLDRLIAKAIAAHPQFAALAARLDTVPGVGPVTIAALIAWLPELGRLDRRALAALVGVAPFDDDSGKRTGQRYIKGGRGKLRNIAYMAVMGAATKHNPVLKAYYDSLLNRGKLKKVALIACLRKLLTILNTMVAKQQDWNPASMAIAA

SEQ ID NO: 285664 - protein, 397 aa, unidentified
MYIVGIDIAKRKHEAAVIDGEGAVIIKPFSFTNNCSGYNRLLAMLAKAKLPLDEVSFAMEATGHYWLALFTRLQKEGFRVQVINPVQTNSIRNFYIRQAKTDPRDALLIAEVIRFGHFSESTLHPENIYELRELCRGRHAIVSMQADVKRKVVALLDQVFPEYETAFTNMFGDTSMAILQTCPTPKELSEMPLEELCHLIEVSSRKRFRMAKAQELQALARGSFGFAMAGDVFSTMIRLYAKHLDFLKQQVREMDRKIAEIMETLDTPITTITGIGPTLGAYILSEIGNISRFSSAAKLAAYAGIDPTMRQSGEYNGVRNRMSKRGSPYLRHAIWLAASSAVLHDPALKLYFQKKRDEGKPYMASVGHACRKMVSIIYAVMRDNKAYTPCIPNEISA

SEQ ID NO: 285665 - protein, 397 aa, unidentified
MITVGIDISKAKSTVAVIDSDGTVLASPFTMAHTQPEMEAFVTYLKGLGEPTTILMEYTGHYHYPVLKKLQDEGFPVCIVNPYQMKKYGDVEIHKAKTDKKDALRIAAYALEKSYKLVPYSSMEQKYEDLKFLSRQYSQRITYVAKLKVQLIALLDQTMPGITRILPLNSRNPEKCALLLFIKRFKSFDEIQRIGKARFLASYDVLAKKASERSASSKGLSIYELAVDSITTRGEDPYIWLSQNQCVDLLSATQNAADEIISQMRNIAETIPEYKVLRAMRGVGDRLGPIILAEIGDIRRFHSGKALNSYAGNDAPPYQSGQFESRNRHISKRGSSTLRKACYEVMQALKLTKPQDDPVYLFMLKKEQEGKPFNVAKMAGVNKFLRIYYARAMELYK

SEQ ID NO: 285666 - protein, 355 aa, unidentified
MNSEKYIGLDVHQATISVAVLDSTGKVVMESILETKAATILQFLAGLRGTLSVTFEEGTCAAWLYDLLKPHVAKLVVCNPRKNALLKDGNKSDRIDARKLAELLRSNLLTPVYHGETGLRPLRELARSYLTIVKDVTRVMSRLKAVYRSWAIPCAGRDVYYTRHREQWLGKIREAGVRRRAEQLYQHLDMLQHLRQQARRELLVESRNHSATAKLREIPFLGPIRSALLVALIQTPNRFRTQRQLWAYSGLGLETRTSGEYRFVEGQLRRSKKLASIRGLNQDHNHQLKNLFKSAATMASVRPGPFQDFYEALLAKGIKPTMARLTLARKMAAITLTLWKKGESLDAKKLKSQAA

SEQ ID NO: 285667 - protein, 439 aa, unidentified
MPTPSLPVLDSTAAAIDVGSEQLHTSIAGGPPKIFGTTTGELHALRDYFLAQGVRSVAMEATGIYWLCPYEVLEKAGLKVVVVNGKYVKNLPGRKTDMKDCQWQATLHAHGLLQPGFVPPEHIRRLQDYLRLRADHIVMAGSHEQHMQKALERMNLKIHDVISDLTGVSGLKMVEAILAGERSAMALLALCDPQIQKNKAGRLRAALEGTWKDEHLFALRQAHELWQFYQKKIAECDGAIEAVLKELAGPEDPKAPAPPSTKRGGVNAPQIGGLHALLWRLCGQKDPTTLPGVADYVLLQLIGEVGTDLGKNWKTEKHFTAWLGVAPGSRQSGKRRGSQKRGRNRAGRLFCVIARSVGRSVDKALGGFYRRIKGRQGGLVANQALARKLAEMFWRLMVHGRAYVEEGLKKYEEKVLQTEQRLLQKLAAKYNLVLQPKAT

SEQ ID NO: 285668 - protein, 375 aa, unidentified
MLLRERVSVSCTGGSPGGGAPCSVSGRGICRCRRWLRMKVMHECVAGIDVHKDMIKVAVRSPGAKAWTRKTEVFTFRTFYGVLREMARMLRGRGVTHVAMEASGVYAEPVCYALREEDFDEVLVVNPAHIKAVKGHKTDAKDCARIAELLGCGLLRGSCIPPQELKELRDLTRYRSKEVQARTSEIQRRHKALEPAGIKLGSVASGITGKGPSLMIDALIDGERRGPVMADLAQGGARTAGKMADLSMALEGRFTDHHALMAGLHRDAIRGYDAAIAALDTRIAEKAAPWQRETGLLKTIPGFGDVVAQAWIAEIGPAPHEWFGSREKLASWVTLAAGNYISAGKRKHGRTGDAGAYVKPMLVQAALTPNPAFCR

SEQ ID NO: 285669 - protein, 337 aa, unidentified
MDYFAGLDISMDETHVCVLDREGVVVRESKTASTAEAIAGELAKAPSCRRIVFETGRMAPILFHGLSQLGLPVVCVESRQAHQALKSLATHKTDRNDARGLAHLARTGFFKPVHVKSLSAHALRSLIVARKKLVGQRVTLENQIRGLAIVFGIRLPRALTAAFIDQALKTSEGVAGLSAAMRGLIAARTAVMTAVAAIDADMRRMARASAACSRLMTIPGVGQLTALAFVAAIDDPSRIRRSRDVGAYLGLVPRRYQSGEVDYVGGISKCGDRRVRTLLYEAANVMLTRYKGQLKLKDWAFAIARRSTMRKARVALARRLAIIMHAMLRDGTEFTSA

SEQ ID NO: 285670 - protein, 346 aa, unidentified
MRTLKQVVGIDVGSKELVVCFGRILSNLDKKLCQYGNFRNTDQGLIKLYQWVQSHASMESPLHYVMEATGVYHEKLAYFLASKGCSISIVLPNKISNYFRTLEVKTVTDSTCSEAITLFGLERNLELWQKPDPTYKWLKQLTRERDQLVQERTMVKNQLHAEQAEAEPNKSSIERIKERISVLQRQEKEIMDELKLLVKESSTLKNETDNLTTIPGVGLLTAVTVLAETNGFEMIRNKKQLVSYAGLDIKEKQSGISIQGKPTISKRGNRYLRKSLHLPALAAIRHEEHYANTFTRLVSRHGIKMKAAVAVQRKLLELMFIIYRSKQRYDPQYHLQKHQANKVDTN

SEQ ID NO: 285671 - protein, 345 aa, unidentified
MQPMYYIGLDVHKRKISYCVKDGSGRIHAEGSISATRLDLDHWRRSLPQRWSAAMEATMFTGWIYDHLQPHAAALKVAHPLMLRAIAAAKKKNDRIDASKICDCLRCDFLPESYMASTAIRERRRTLRYRNLLVRQMVQMKIKTSALLMEAGVSYNKQRLHKAGYFRELLATNPDIDEGLCSLLRLCRETVVRLGKNESALVRSLEHDSLLVERLERLMTIPAVGPITALTWALEVGDVQRFSSIKKAISYCGLCGAEKSSGNTVQRTPLSKQRNKHLQTTLIEAAKMAPRNSPELAMLYDKEKQKGNANRATLAVARKLVAYLMAVDRGKRNFQRAETSSSIAA

SEQ ID NO: 285672 - protein, 363 aa, unidentified
MKIIGCDLHARQQTVAMLDTKTGEVVNMTLKHEGNNVREFYATLPRPVRVGIEATGSMQWFVNLMEELGIECLVGHPAEIRAAEPRKQKHDRRDADLILKLLVENRFPAIWLPSKELQDLRSLLRHRHQWVRMRTRIQNALQSIALANGLRRGSSLWSQAGQHTIASLPLAPHTAYRRSELQALYEKFETEIEKLNQRVEEQASERPGARRLMTHPGVGPVTALATEVFLGDPARFADSKALASYVGMIPREYSSGGRRQRLGGLTKQGNPLLRFLWGEAGAHAVRRDPELKRFYRRKLNQKGFGKASVAVARKLGIRLWIMLRDQIDYNEFCRRGQMQQKSSDACAGMPETRYGANNHRPID

SEQ ID NO: 285673 - protein, 343 aa, unidentified
MDHFAGLDVSVKETSVCIVDDTGKIVREVKVASEPEDLLQILSNPAYHFKRIGLEAGPLSQWLFSALAEAGLPAICVETRHMRAVLKAQINKTDRNDARGMAQMMRAGLYRPVHVKTLRSQKLRMLLTHRKLLQSKAIAIDNDLRGTLRNFGLKVGVVRTVKFEARIRELVTNFPDIAAMVEPLLIVRRTLREQFCVLHRRLLAIVRDDDVCRRLMTTPGVGPVVSLTYRATVDVPARFHKSKSVGAVFGLTCAKYQSGEVEWSGRISRCGDEMMRVMLYEAAQAMLRSKKWSWLKAWAMQIARRRGMKKAIVALARRLAVIMHRIWVDGTEFRWTREEAAAA

SEQ ID NO: 285674 - protein, 344 aa, unidentified
MNKIIRIGMDTSKSVFQLHGVDEEEQVVLRKKLRRSQVLAFFATLEATRIGLEACGGAHYWARELRALGHEVVLVPPQYVKPYVKRGKNDAADAEAICEAMSRPSMRFVPVKSDEQQAAQMLLGIREGLVRRRTQLSNTIRGHAAEFGLVAAKGLAKLEPLLERIAWDEGLPELAKELFQTLGADYARLDAELQEIEAKLMAFHRHNELSKRLAQVPGIGPVIASVMAIKVGDPKAFRSGRDFAAWIGLTPKDHSTAGKVRQGGITRAGDEMLRSVMVVGAMALIQQVKRGRGRPSPWLVELLKRKQPTIAAVALANKTARIAWKLMVSGERYTQSRLLTSKAA

SEQ ID NO: 285675 - protein, 394 aa, unidentified
MKLVGIDVGKNSHHFCVMDKETGEFNVAPTSFSNNKEGFDFLINSLKPYSKKSILIGMEDTGHYHVALLKFLLSNGYTVALINPKTTDLTRKMEGGITKNDKLDTITICDVLDTPERKKQYRITKVDRFDLYEQRQLTRHHHNLKEELNVYCNRLQKSIDLVFPEFNTLFSSKYSIVYMNLLKTFGSAEAIASTDIRTIRKCFEIKGRGNRISLTPEKLKECAKNSIGISSEVETIQIKHLVSQIMLIKEQIAEIDKKIEEFSIKNNSPILSIPGISHFSGTSILAELGDIGNYSKPSQIIKFAGVAPYHYESSQYNAQHTGITKKGSKYLRKTLYQIILTVINNNPVFKKYYRLKISQGKGHRCAQGHCIRKLLRIIYHLLETGQSFDPALLR

SEQ ID NO: 285676 - protein, 462 aa, unidentified
MANEDQKGRPECSEAIDEGFPVLRGNVAGIDVGSEEHWVCAPARTGRGREVAVFAATTPGVEQLAAWLKDRDVTSVALESTGVYWIVPHEVVEAHSFDVVLVDSRWLGRVTGRKKTDRRDCEWIQRLHSCGLLRGAYRPVEQVCMLRTLVRDRGTLIAERADWVRRMQKTLDQMNVRVHRAVANVDGATGMAILRAIVAGERDPHQLATLRDPRCRKSEAQIAEQLTGHWRDDHLFSLRQALKMYDALSDTIAAYEREILRYLETMTSVDRRDDQAPPPTSPTKAQAIKSRGQDPLRHALYRMSGVDLTTIDAVGVETVSVVLSEYGPNLSQFPTEKQFVSHVGLAPHAPRSGGKVVKKKKKPGSASARVGAALRMAATSLRHSQTALGAYYRQVARRAGADVAVFATARKLAQHLYRVLRWGQPYVDEGAAAYDKRYQLARAKRLAATAKDLGYKLIPVEA

SEQ ID NO: 285677 - protein, 419 aa, unidentified
MSFKILKNNCCGLDVHKTWIYACIGITDSNGRTEYKQARFSSFTKGLQELCDWLVKYNCNDVCMESTGKYWIPVFNILEKNNLWVTLSHPKYTKPQKGNKTDRKDAKWICDLYMCGMVKPSFIPPADIRQLRDLVRYRFKLTCMITGEKNRAQNCLTVSNFKLDDVFSDVFGKSSRSITEQILQHPGETFDVAPFVDGRCKTPIEEIQAAVDGAISMEQAVKLRQCLNHIDELEKHQAEIEREIFRLSDKYESILNLIRTVPGFDKNPLTAIQVLSEIGGDMSVFPTAKNLILWAGCCPRNDQSNHKIKSTRISRAGSYFKPVLVQVANALIKSKKHPEFTTRYRRIKARRGHKKAIIAICRMILTAIWHILTDLKPYTPEGFLESRPVNASKVLTTSQALNLLKQRGYVIKDDTVSVT

SEQ ID NO: 285678 - protein, 328 aa, unidentified
MKTKAKFIGIDVSKNTLDICIVSELQESFVIKNTKKEILKFFKTHLSKTSKDYVCIENTGKYSWLLMEVMPEFQCFFYVINPLHIKRSLGLVRGKNDKVDAIRIAQFIKKNNEESQSYIPLRNEIRLIQVLLSERRLRVNQKKQLATKNKENILLTNKKVAKFLTTKNNRLIKELKKQIKDIETQINQLISQDESLNKLTTQLKSVPGVGNILCWNIIVKTNEFKTITTPRKLACYSGVVPFSNSSGVSIFGNNRLSLYADKNLKTLLHMGALSAIRLENNLSLYYKRKVAEGKNKMSVLNAVRNKIIHIIFALVKNQTFYQNRLEVS

SEQ ID NO: 285679 - protein, 345 aa, unidentified
MKHYCALDVSVKETAVCIVDETGKICRETKVATHPEDLISVIKDPKWQIERIGLEAGPLSQWLYDGLAKAGLPVICIETRHAKAFLKAQPNKTDRNDARGMAQMMRVNLYRPVHVKTLTSQKHRALLTARKLLQEKAIAIANDIRGLLRNFGLKVGLVGKIKFEERINELVEDRPDLHEIMQPLLAARKLLRNEFTKLHKKVLDLVREDEVCRRLTTIPGVGPVVALTYTATIDIPARFAHSKAVGSVLGLTPKLNESGESKRVGRVSCCGDAMMRSLLYEAAQVLLVNVKKWSWLKAWAMNIARRRGRQKAVVALARRLAVIMHRMWSDGTEFCWTRESLPVAA

SEQ ID NO: 285680 - protein, 360 aa, unidentified
MNRNANHNMSAGQIIGTMNGLQVFGLDIAKQVFQLHTVDMQTGEISNIAIKRGQLLTHFVNHARCVIGIEACPSANYWAREFERIGHKVLLIPAQSVRPFVTGNKTDATDARGIWLAVQQPGVKFVAIKTSAQQATLTLHRQRELMLKMRIMQTNALRGLLYEFGATFAKGKVALLSEVEAAIDSLSAHLPVMVQDSLREQVLRIKALCEDIAKIEQRLGLILKADPAMQRILQIPGVGPLSATAAIATMGEASSFKSGREFCAWLGLVPRQTGSGGKVRLGGISKRGDAYLRTLLVHGARVVLTRAKEPSDWLTAIKGRRPTNVAITAQAAKTARIIWALSAKEQPYVRGHKSVRPVMA

SEQ ID NO: 285681 - protein, 445 aa, unidentified
MTFRIIGIDLAIRGDHLAQIYDDGRPNGRAIRFRHDQPSLAAFVQTAVMGLRADDHIQAIMEPTGMSWFPVAHHLADAGVTVARVKGKRVKALRRYLSEHAKTDMADAQILAAIPSFGGPRLDPVHIPDPQSHALQRLIKQRSRFQNEIADARRRLLDLIRWASPRLEAVLPDLGTRLSLALLQKWFHPSDVLKARRTTFAKYVGAHAGGNHPRSGPFVETLITGLREAAQYAQDLHGTHIDFSELQFQIATGIENVLKKIQPVEDFEQHIADLYKHLDPQALLLSVPGVGRHLAPTLIGILQNIERFHSEKHLRWFCGLFPRRADSGGVERAGQTLIQGGNNRIKHALYLAADTARKTDPELAELYWRLMTAKGHHHKQALCAVANRIVNRIFSVLKRGKPYEVRDREGNSITLCEAKAITLERYTVGENSRAGRRSNRIEKNS

SEQ ID NO: 285682 - protein, 350 aa, unidentified
MTITIAVDLAKTVFELAITDDQGRLAERKRLSREAFARFFVNRPPCRIVMEACGTAHHWARTFQAQGHTVKLLPPQHVRPYVRRNKTDRADAAALLEADRCPDILPVPVKSEAQQGLQGLHRVRSAWMATRTDRINTLRGLLREFGLPLPQGPSAVLERAPALLAESEGPIPPALRPALAELIAEIRTLETRIADLEKQLRHQAKQRPDIQRLLAVPGIGLLIATALVAAVGAMEAFRDGRHLAAWLGLTPKESSSGQRRHLGRISKRGDRYLRMLFIHGARAALLAAANQRASASRPLSRLQQWALDLAARVGHNKAACALANKMARIAFAVVRLGRTFDGDFVPVQAG

SEQ ID NO: 285683 - protein, 376 aa, unidentified
MERIIYIGIDVHKDTNTAHMFGRLDDVVIDYEIGTIASGANHLIKAIRKTIKEFNLGDCAVQTGYEAGPTGYGLCKALQKAGYMCDVMAPTTIKRAPGERTKTDRRDARMLAIALATDTYKSVHILDDKDISTREFTRTRNTRKNELKKAKQYLLSFLLRLGKTYPGSGSYWTHKHWEWLETLDLQDGYLNYSLKSYMQDIKDLENKIQMMDSMIEQIATTDERYKDKVGKLMCFTGVETYTALSIVCEIGDFDRFPDAKSFSSYIGLVPGQDSSGQRQRYTAITKTGNSRVRKLLVEATKGIKRSSVYNKSARLVERQAGQSPEVVAYADKCRQRIKHKTTNLETRNGKNVNVATAAGARELACFVWGMMTGNIT

SEQ ID NO: 285684 - protein, 401 aa, unidentified
MKSVLSVDVAKNKSIAMLMNSRGEILIDSTEMKHDLEDFESMKCKINELHLENLTIFMESTGTYHLAVERYFKENGFNTLVINSLTTKNNYDTIRKTKTDRKDCYRLAKLFFVNEVTYHDLSKKDLYANLKALTRQYFYLTQQNVSCKNRYKRLLNICFPELEEVFKGNRIYEDTVLNFVQQFPHADIIKSKRIDALYNNLYKTNERHIRQYKSIANRIKDASINSYPGVDVNHEDVRNLVDMAKVVQNNNNIIAELKEKMIGIAGESKYFNIVKSFYGIGDVFATELLGELGDITRFDNVKQLIAFCGLDPTIIQSGKSINVHGTISKRGNKYARWILFNCSQMIVKMCAKQYPEHPVYIYYQSKKAEGKHYYESLTACSTKILRMLYSMCKNNKTFLEK

SEQ ID NO: 285685 - protein, 356 aa, unidentified
MNHINKLDFTGQQIYIGMDVHKRSWSISILTNQFEHKTFTQPPEVNVLVNYLKRNFPGAAYKSVYEAGYSGFWIHDRLQEQGVQCMVVNPADVPTKNKERATKTDRVDCRKLARTLRNGDIHGIYVPPRTKVEDRSLLRTRNGMIRKQTRCKNQIRAILCFYGIPTPDDFATRSWSKRFINWIESVQMERASGNMALKVHLEELKHLRRIITEMNRAIRALAASDGYRDNVRILKTVPGISTLTAMTLLTELYDINRFKTLDRLCSYVGLIPNTESSGETDYQTGMTDRRNAQLRLILIESAWIAVRKDPALMMAFNDLCKQMTKTKAIVRMARKLLNRIRYVLRHQQEYIPAVVQ

SEQ ID NO: 285686 - protein, 348 aa, unidentified
MIIIGVDFHPEFQQIASVDTDTGEFQEKRLAHREDAETFYRALAGQKVRVGMEASGHARWFEGLVAELQFELWIGDAAEIRAKRVRKQKTDRQDAQLILRLLVEDRFPQIWVPSWENRDLRQLLWHRHRMVQARTRIMNQLQAVALNEGLRCKKRLWRERGREQLESFRLAPWASRRRRDLLELLDRLSPTIAELSLAIEQEVEKCPEAQRLRTHPGVGALTALAFVLIIGKAERFGCGKQVASYLGLVPLEESSGNRRRLGHITKQGSSMLRFLLVEAAQVTVRSLPEWRSKYLHLMMRRGRKIAKVAMARKLAVRLYWMMRQGWDYEQVNKFGSHAGQPGHRDGVQ

SEQ ID NO: 285687 - protein, 467 aa, unidentified
MAIEETEEAGPFVERVAALDIGKAGLVACLRVPAESGGRRRRQEVTDWTTMTADLVNLADHLVCQGVELVVMEATGDYWRSPYYVLEAAGLRCWLVNARQVKHLPGRPKTDKIDSVWLCKVAERGMCSPSFVPARPQRQLRLFTRYRIAAVRERTREMQRAEKLLEDAQLKVSVVASDLFGVSGRTMLGALVAGERDPEVLADLARGRLRRKRTELVRAFQGSFEDAHATVLAMILDRVDRLDTDIARLDASIAEAVAAMADRAPTQDRSGPGGGAPSPDAAGPPPGGPAPESPPQAGDGARLGPAERLAEIPGISLQTAHTILAEVGTDVAAFPTAAHLVSWAGLAPKANQSAGRSSPARTTKGNRYLAGALGQVVFSLARTQTFFGDRYRRIRASRGPQRAVVAVSRSVLTTIWHLLNDPDDRYRELGADYHRNRQDTHKQAAAAVRRLERLGFEVTLAQPAAAI

SEQ ID NO: 285688 - protein, 331 aa, unidentified
MSTICGVGIDVSARDLTVSVASKTTQSFENNAKGHRAISRLVLRCAKGDVQICVEATGSYSLDLCFHLQSCGLRVMVANPRAVSNFAKAMMSRSKTDPMDAEVLREFAERMPFVEWVPPAQAALELRAASRRLDSLSNMLTREKNRLHAARATKTTISIVSDDLKSSIKHFEGRMERLIKKIESFIKTEPLLHARYRRLQTVRGIAARSAIRLLGELATMPADMSPKQCVAHAGLDPRQHQSGSSIDRPARISKRGNRYLRSALYMPAVVASQHDPIIKAFYERLLEKGKKPLQALVAIMRKLLHGIIGMLKTGTDFDAQRLFPNIRVQGV

SEQ ID NO: 285689 - protein, 367 aa, unidentified
MKKISTVVAKQTKNFPDRKLTIGLDLGDRSSWYCVLDEAGEVVLEQKLGTTPKAMKEVFGKMPRSRIALETGMHSPWVSRVLSELGHEVIVAHARNVRLIGESRRKDDRMDARTLARLARIDPQLLAPVQHRSAQAQAHLMVIRARAGLVRARTSLINTARGLTKSYGERLRGCSPRNMNAEKARQLSPELQAALEPLLAAIESLSERIYEYNQQIEKIARESYPQVARLKQVKGVGTLIALTYLLTLEDAQRFRKSRDVGCYVGLQPGRRNSGQSEPQLHISKEGDPYLRTLLVQGAHHILGPFGADSDLRRWGLKLAERGGKNGKKRAVIATARKLAVLLHRLWVSGEAYEPLRNSRAMRLPAAA

SEQ ID NO: 285690 - protein, 393 aa, unidentified
MKNVLAVDVAKGKSMVSLISSCGEVLIEPYEVNHSINDFSNLLNRIKNLKLDNISVIMESTGIYHRPVERFFLENNFKVFVINALYSKMYKRNLRKTKTDKLDCISLSELFFTTDFREYIKPDDIYLNMNALSRQYHALDELCVNLKNRYKNLVYLCFPEYELIFKNKAIYSELALSFIEKYPHADIISNTRIDSLQNFFKKNGFRHWKKKPITIKEYAINSYPSVSKDDEITSSLSQIARLINTYQKEIETIKYKIIFLGKKTKYFESINSIFGIGEFTTSLIIAELGDINRFRNIKELTAYCGLDPSIKQSGKSINIKGPISKSGNKYLRKILFISILNILSLTRLCHTENDIEIYYRKKRNEGKHHYVATIACTTKLLRHIFVLCKQLDK

SEQ ID NO: 285691 - protein, 339 aa, unidentified
MAALYCGIDLHSNNSVVVVMDGAGKVVYRRRLENDLERIQQALAPYRQELSAVVVESTFNWYWLVDGLLEVGYPVELANTAAIQQYSGLKHTDDESDAAWLAEMRRLGILPTGYIYPKAQRAVRDLLRKRAHLVRQRTANILSIQNLMQRNTGGRMKSAGVKALAPDQPGQLLENPDVALAVASTVRVRACLDTEIATLEKVVLERVKLRPEFIKLKTIPGVGDILGLTIMLEAGTIGRFPSVGDFASYCRCVNSTKLTNGKKKGAGNVKNGNRYLAWAFVEAANFAPRYSAAIQRFYQRKQARTNTVVAIKTVAHKLARAAYYILRDQVAFDVSKAFA

SEQ ID NO: 285692 - protein, 426 aa, unidentified
MEQHEHYAALIGIDWSDRKHDVCLVDAATGSRELSVISHTPEALNEWARALRARFSGEKVAICLEQSRGSLIYALLKYDFLVLYPINPQTLSKFREAFTPSRAKDDPSDAEYMVELLIHHRERLRAWTPDDERTRTLQLLVEHRRRLVGDQTRISNRLTALLKGYFPQVLQWFPDIRTKMVCDFLLRWSSLDALAGVRRATLLKFFREHNSQRTETVEKRLAAIKAAVPLTTDKAVINSSVVMVRALVSQMKATLAAVKEFDAQIEELCQTHEDFELFASLPGAGKVYASRLLTAMGSNRERWATASELLRFSGVAPVIERSGKSSWTRWRYFCPKFIRQAFVEYAGESIRHSEWAKAFYASQKAKGKSHQAAVRALAYKWIRIIWKCWQTREKYDEARYVECLRKKGSKLVAEPASAEAGTGELA

SEQ ID NO: 285693 - protein, 347 aa, unidentified
MDEYAGIDVSLEHSSVCVVDSNGKIMREAKVASDPEALTAFFGSLGVELKRIGLEAGPLSQWLYAGMKAAGLAVELLETRHVRAAFKTMPVKTDRNDARGIAQLMRLGWFRPVHCKSAAAQEVRAVLTARKLIQSKRVDIEMSLRGILRGFGLKVGATTPKRFAGRIRELVAGHATLQAVAEALLSAHAVLLRELDGLEKRVRTIAREDSRVRLLMSAPGVGALVALTYVAAIDDPSRFRSSKAVGAHFGLTPKKYQSGETDITGGISKIGDGAVRTALYEAAQVILTRPIKGFGLKSWAARLARRAGPKKAKVALARKLAVILHRMWVDGTPFSPDRECGQVVTMA

SEQ ID NO: 285694 - protein, 415 aa, unidentified
MMTTRSTKEELRVRRKMLEEFEIDHRPEGFQEFFSRIEAQRKKRNCAVSVAMEGYNGHARPLDSLVRQRGYRLYNLNNLKFARFKEIFPGAAKSDRIDARKGLELFQLSDHLPLAKEVLQEVSGTAPENEVLKRLTRRRRRLVNERVRVVNNLQADLQAVCPGLLEITGEASNQWFLNFLLSADTLPQLARLKRSTLLKIPSVGVKSAAIIEHWQKRAHFSQEVEWVSEMIQEDAKRCLELDEKIKRLQAKIAEVAKNSKIAQTLRSIPGFGAVCTSELAGEIGTIERFASEGSLSLYLGMSMLDNSSGKYQGTKAPKHVNTRAKAAMMIGVDRHRKYVPESQRYYEKKRSEGKKHNQAIRALGRHLARIIYKMLKQEREYEIRPEKGDTKAKVGPRSFVKTKIRRPKISSKETK

SEQ ID NO: 285695 - protein, 415 aa, unidentified
MALKIVYKICCGIDVHKTFVVACIASTNDKGITSYESHRFSTYTSGLKTLLQWLLDRNCKDVCMESTGKYWIPVYNILESDCSIVLAHPKYVKAIRGKKTDKKDAKWIADLFKHDLVAGSFMPPADIRQLRDLMRYRFKLTCFKSSEKNRLQNCLTVSNIQLGNVVSDTFGKSAQAILDKLLENPADTSFDLEPLVYKSLKKKLPELRDAIDGYITPEQAGKLKVIKAHYENLESRKAELEELILALAAPYQQELTILQTAPGISSPFTAIGIISEIGTNMKAFPSAKHLCSWAGLTPTNNESAGKKKSVRVSKAGCYIKPLLVQCANAVVKSTKHPEMRNRYLRLKKRRGHKKAIIAIARMLLTALYHMLKNGENYNAELYQKSDLLPVDREITVEQALMIARNQGYKIKSATA

SEQ ID NO: 285696 - protein, 308 aa, unidentified
MTNFIFAGCDLHEETLVNRIAIGQQPSERKTVGNSRAGREKLIAGLKRESDKHGGARIIFGYEASGEGFGLHDQMVEAGIECYVLAPTKMESSVKQKRNKNDDRDAERILKRLRAHKLAGEELPSVWVPDLQTRDDRETVRARQDLGDKLSSVKVQLRSLLQRHGIEKPTGVGKPRTKSHQQWLEQLSGDSQLGVGVRTALGSLLRQVRHLEQEIQQLDEAVDQLSRKPHRQAVVDALDQETGIGRLTATAYAVEVADFTRFRRGRQIGAYWGMAPSSDESGEVNDRKGHITRQGSPRIRKLLCQATW

SEQ ID NO: 285697 - protein, 464 aa, unidentified
MTASKQLWRNRKERKEWARRLQSEDPGLEVVHPHAAGIDVGNSAHYVAVRPDRDAEPVRRFECFTADLHRLADWLQSCGVKTVAMQSTGVYWIPLYEILEERGLEVYLVNARHTKNLPGRKSDVQESQWLLKLHTYGLLNNSFQPVSEIRVLRTYWRQRGEHVREAATCIQRMQKALTQMNVQLANVISDISGLTGQAIIRAIVAGERNPLKLAALSDPRVHASQEEIAKSLEGNWRSELLFVLQQEVDMYDTYQKRIAECDQRLQKHLASLTHPLQLQPPTQKPTTKKPAAKNAPRFDLSSELQRVTGVDLTRIDGIDVMVAQTLLSEVGLEMSRWKTESHFASWLGLCPDNRISGDKVLNRGTRRVVNRAATALRQAANTLMRSRSYLGAQYRRLRTKLGAPKAITAMAHRLARLVYRMLKYGQTYVDKGTDYYEERSRQQQIQLLRKRAAKLGLQVAEIHA

SEQ ID NO: 285698 - protein, 411 aa, unidentified
MVREPGRAIGLDVHREFCEVAICEEGKVRSAGRVESSPEALGALAASLGPDDRVALEVTGGAWAIVAILEPQVAKVIVVSPGDTGIAQARAKTDRLDARTLARLLWAGELEPVWAPDELTRLLRRRLARREQLVRARSRAKNEIHAVLMRCLVAKPPVSDLFGKNGRRSLKGLELPVEEAETVEACMRHIEFLDGEIAEVERVIARYALSCSDARRLMSVPGVNVICAATFLAAVGDIGRFRTSRQLVGYLGLDPKVRQSGSSPAKGGPISKRGSGTVRWALVEAAWSVVHQPGPMRAYYQRLRARRGHQIAVVAVARKLAVLFWCLLTREEQYAHQQPSLTAKKLRLLEIRSGAPTMKGQRTGTFATREKMREAEQALALAAEASYVRMVRDWQAAAPKKVGASVTAGRA

SEQ ID NO: 285699 - protein, 347 aa, unidentified
MRFYTKQHKFYCGIDLHAKKMYVCILDESGEIRLHRNITTARDVFLGVIEPFREDIVVAVECMFTWYWIADLCKEHRIPFVLGHALYMKAIHGGKAKNDKIDSHKIAVLLRGGMIPMAYTYPATMRATRDLLRRRNHLMRKRAELYAHIQNTRSQYNLSDFLGRIAKPHNREGVVEQFEDPSVQKMIDADLAVIAAYDPIIAKMERDIISITNHHDPVAYALLKSIPGIGRILGLVILYEIETITRFPSVQDFVSYCRLVKCRKESNGKTYGSSGKKIGNSHLKWAFSEAAALFLKGNEPGKRYLDRLTNKHGKGKALSILAHKMGRAVYFMLKNKEAFDQNKFLGL

SEQ ID NO: 285700 - protein, 359 aa, unidentified
MVDRSLLGLRARHIALVAIASPTSPNSYLGLRARINKAGIKEKKIMAQSLFVGIDVSKARLDIALSAGDQFFSIAYAEEELAGLIDKLRSSSPQLIVLEASGGLERPLVAYLAEAGLPVVVVNPRQVRDFAKATGKLAKTDKIDAQTLARFAEAIKPEQRPLKDAERQHLADQVARRRQIVGMISQEKNRLSRASGQVRADVEHHIAYLKERLDRSDKDIEKTIKATPLYQDTVELLCTVPGVGPVTSASFVAFCPELGNLDRRQIAALSGTAPLNRDSGTKTGVRCVWGGRKELRNQLYMATVSAIRCNYKIKQFYLRLTIAGKKPKVAITACMRKLVTILNAMVKQRKPWNISPASN

SEQ ID NO: 285701 - protein, 434 aa, unidentified
MGSRSHFVAIGQDDDQVREFGAYNEDLNSLAQWLISNDVKTVAMESTGTYWQNLYTVLQGAGLEVILCNGKFTKNIKGKKTDVQDCQWIQKLHTLGLLSGSFLPDEASEQLRTYCRHRANLLGLAASTTHKMQKYLQLLNLRLDIVVKDVTGLTGLSIIHAICSGESNPEKLASLRNGNCKKSEKEIAKALQSNGRKDYLFTLTQEYRLYLSLQEKIKECDQEIEKMLQEQINGDDEKKQHFIEKKVHKRVNKNTPKNIDINLLAYQYYEGVDLLAIEGVSHATILTLMSEIGTGINKFATAKEFSSWLRLSPNTKISGGRVLSSKVAKGSNRLKIALRNAANAIGNLKDTALSNFFRRIAFRKGRVSAISATARKLAVIIWNMLVKKVPYRPETDYEFLDQKRKRKVMEMKKLIHKFDITPDDLGLQLNINNL

SEQ ID NO: 285702 - protein, 342 aa, unidentified
MKTVTTIGIDLAKNSFSLYGVDAQGKPVLSRILSRAGVVRFFANLPSCLVGMEACASSEYWARTIESLGHEVRRIHPRYVKAFLLGAKNDANDAAAICEAVQRPNMRFVPHKSPEQVDIQCIHRIRQGYVKSRTALVNQVRGLLAEYGIVMRQGISAVRNQLPALIADGENGLTGLMRQNLASLYESLCFLDNRVLEQDKLLKSVVNENEACQRLMQVPGIGIMTATILLSVAGVASNFKNGREFAAYLGLVPRQNSTGGKIRLLGISKRGDSYTRALLIHGARAALSRLITGHTPEHRRNPWIVELAARRGKNRASVAMANKTARIAWSMLTQGTEYKHAA

SEQ ID NO: 285703 - protein, 296 aa, unidentified
MEHYAGLDVSLKEISICVVDGDGRVIARGACPADPEGVAGWSCNRSLTPHRVVHESGQLSIWLQRGLTRMGLRAICIDARKAHKSLSARPNKSDASDAEGLAQLARTGWFTPVYIRSEDADRLRKDLEGHIRGTLKTFGIRMTGVGQGRQRQTFRDQLAVAGETDPMLRAIADGFIATHATLCQAAADLDSAVKRLAHDNPVARRLMTIPGVGPVVSLNFIALIDDPGRFRKASDVGAFLGLTPKRHQSGEIDWTGRVSKCGDRAMRRLLFEAASSVIHRVQRFSALKSWAVRLAA

SEQ ID NO: 285704 - protein, 346 aa, unidentified
MLADQVDYVVGVDPHRDSHALAIVHVLSGAVVFETTIAASSQGYAEALQLVDANAPGRRAFAVEGSGSFGAGLTRFLSSRGERVLEVSRLRRERRSGGKTDALDAVRAARSVLGQERPATPRAGGERQALQALVAAREGAVNAKCAGLAQIRDLLITTPEPLRSGLRPLTQAPLLRRLAATRPEGRRDPELRGSMLALRSVARRVLQAEERELGRQIEALTRKLAPQLLDQPGVGPHAAAQLVLSWSHHGRIRSEAAFARLAGAAPIPASSGQTVRHRLDRSGDRKLNRALHMILITRKRAHPPTIAYIERRMHEGKTRREANRCLKRYLARSLYRLLAHGAPLTT

SEQ ID NO: 285705 - protein, 368 aa, unidentified
MHPDAAGIDIGNESHYVAVPPSRDSQPVRRFGCTTAELKAMADWLKQCGMRTVAMQSTGVYWIAVYDILEQAGLEVYLVNARETKNLPGRKSDVQESQWLMKLHTYGLLRNSFRPSQEIRRMRTYWRQRNDLVRAAGRHIQRMQKALTQMNLQLANVLSDVSGVTGQAIIKAILAGERHAHKLAAFRDCRVKASEEEIARSLEGNWQEDLLFVLKQEQAGYEFCQKQMTECDRQIEQYLQQREDRSRGASLPEEKRKERLKKKKGNAPQFDLRAELFRISGTDLTRIDGIDVMTAMTILSEAGWDRSKWKTEHHFVSWLRLCPDNKVSGDKVIGKGRLPTNNRVTIALKMAASTLWASNTYLERSSAD

SEQ ID NO: 285706 - protein, 341 aa, unidentified
MDTHEDAHVAVALDQLGRWLGELAIPTTRRGYAQLLEWASGFGVIDTFGVEGTGSWGAGLSRWLRAEGLVVIEVDRPDRKTRRHGKSDTIDAEAAARAVLSGKATTVPKTGDGPVEMIRILRMTRRSAVKNRTMTANQMSSLVATAPEALRTQLRGLSTGKRVALAVKFRTGEDLSNVLEATRYGLRELARRYQHLAEQIDRLDGQLDRLVADTAPDLLAKKGVGTHTAAALLVTAGDNPERLAHEGSFAHLTGSAPLDASSGKQQRHRLNRGGDRDANSALYLIALTRLATDEDTKLYMNRRLAEGKTKREVFRCLKRYIAREVHQCLVNNPVIQPALDT

SEQ ID NO: 285707 - protein, 409 aa, unidentified
MQVMHPRCAGVDLGKDVLVACARVQEAADVGRECRSFGTATRELLELSEWLVSLGITHVVMEATGSYWKSVWHVLEGQFDLTLANPAQIRNLPGRKSDVNDATWMADLLAHGLVRGSFVPPAPIEELRELTRTRKQFVREIGRHTQRIQKILDVSGYKLTGTITDVLGVSGRAIVKALIAGEKKPERLADLAHPRLKVSRERLVEVLYGRLTARRRGLLGMHLTLIETIEDSIAQLDQEIEKAVQPFRSLVTRLKGVPGLSDVAVPALLAEIGVDMDRFRTHRHLLSWARVCPRLHESAGKVHSTRTLKGAVWLKTLLVQAAWAGVRSKNSYLRAQFLRLRARRGSQKAIVAVAASILTAVYFMIRDGSEYRDLGFHYFEQTDNTRAAGRLVARLQNLGFNVAITKAVA

SEQ ID NO: 285708 - protein, 355 aa, unidentified
MNDAKYIGMDVHQATISVAVRDSRGNLMMEAILETKADTILQFMHGLRGSLSVTFEEGTWAAWLYDLLQPHVARVVACDPRKNALLKVGNHNDRMDARKLSELLYLNKLSPVYHGEQGIRTLKELARSYITITRDLTRVMSRLKAIYRGWGIPCAGQQVYAPHYRPEWLAKISEAGVRRRAELHYQQFDVLAALRQQARRELLAEARKHPAMRLLQQIPSIGPIRAALLIALIQTPNRFRTKRQLWAYCGLALRTYTSGEYRFVAGQLKRSKKVLAVRGLNINHNHDLKNIFKGAATRAAATSGPFQDFYQACVASGVKPHLARLTLARKIAAITLLVWKKGVRFDAEHLKQQAA

SEQ ID NO: 285709 - protein, 351 aa, unidentified
MPRTSAVQVVTTIGIDMGKNTLHMIGLDTRGGIALREKVPRGRITSRLANLPPCLIGIEAGMATHYVARELAALGHDVKQVPPTYAKPFRQGHKNDFRDAQAVAEAVQRPTTRFVPAKTNEQLDLQALHRVRSRLVSERTAVINQIRGFLLERSIIVRQGLRFLRQALPDILAKRTDVLSPRMARIVADLASDWRQLDERIEAMTDEIKTLAKSDDSCRRVMTVPGIGPIISSAMVAAIGSGAAFARGRDFSAWIGLVPKQMSTGDRTILGRISKRGNSYLRTLFMQAARVILLRRASWPKHGFGIWLAHAAQRLHPNVLAAALANKLARIAWTVLAQQRGYEARITKAAA

SEQ ID NO: 285710 - protein, 382 aa, unidentified
MITVATRVHPLVVSRAYEGLSNVIGNGDAPMSYDYHIGVDYHKAYTHLVVQDHGGKVLRSGKVKNDPRSLAGFLAPYLENSHAVMEASRNWTVMYDWLDELCDDVVLAHPLKVKAIADAKIKTDKIDATILAHLLRADLIPQAYVPCEVARELRQALRERIFFVRLRTMVKNRVVTIFDRYPEQTRALREMSDLFGKIGRGQLALLSVSTIDREHIDRALAFIDDINHRIRESEKTIRRFSSDNADVKRLKTMPGVGEFFARLIAAEIDDVSRFRSAKKLAAYAGLVPSTYASGGKCWNGRIIKAGNKWLRWAFVEASIPAMRAEPALKFEYERLKATKGANRAKVVVARKLLTIAYQMLRDQRDYERRDALERPSSSSRLS

SEQ ID NO: 285711 - protein, 411 aa, unidentified
MPHIVVGIDVHKKLLAVVLADAAEGELRFHRRMFGAGDGELRRLSTWLSETGAQEVVMESTAQYWKPVWRALEGQCQLALAQAQSNKARRGRKSDYRDAERLVRRYLADELVLSFVPDREQQLWRTLARSKVRWTRDRSRLQNRLEALLEEMGIKLSSVVSDLLGVSGTRILRAIADGAQDCAALAGLAEPTLRATAEQLCDVLRSASDVHPRYRLVLRQLLAQVDLASQHIAELDRELAGALEAHAAAVQRLAAIPGIGVDAAQQIIAEVGPAAERFASAEQLCSWVGSCPGEQESAGESHSDRSPKGNKPMRRILNQAANAAVKVKGSVFQARYCRMMARDPKAHPVAIWAVANHICRVVWVLLRRGLLYEERGARPDPRVAHRRAHRLLRQLSRLGYKVTLETAPMRT

SEQ ID NO: 285712 - protein, 405 aa, unidentified
MERKQKDWFGPHRLYLGIDVGKSFHWAVGLDPDGSIRISRRLDNRQEDVDALLDEAGEGALVIVDQKNNIGSLVVRRCRAKGVDVGYLPGKAMKNAREMFPGTAKNDRIDAEAIAQTGIGLRTAIRPIAETDDLGASVSLVSSQLSYATRRATMARNRLHAVLLESDPAFEAAADLSSAWQLEAMAGFGGAKGLAAAGRRRYCTLCARQGVPAQARDAFWKAAMRSASSAFHPDAEDMLARSLAREILEADSERTELSAELGRLLQDDETYRCLLTIPGIGPKTASALATSIDISLFPGDSKLAAYCGLAPADHDSGSSIRSQRDAHGGNKALKNLLIFSCNSLVGTKNRFGRYYDACVARGMRHSKALKAVARKRLRVIYAVMRDRVPYVEPPADNVEKSPATA

SEQ ID NO: 285713 - protein, 376 aa, unidentified
MNKCHSNTELSSHEGTRCQFNGGTGAIKSAVGRMRPVCALGIDVHQDFYVVVEQVDGTNPKPPQRFPKQAFLRWAARLKENTGAEVHAVYEACGFGFSLQRQLSSLGVQCHVVCPQKLDEQNRRVKTDGLDAKALVLKLDRFVQGNRSALALVRVPTEEEEQKRAIHRQREQLVKARKQLEAQGRSLMVNHGLEPVQSWWKPRAFAALPVPQWMKELLANSQPILVALQQKIASLTIQLQSSATPKQPRGLGLMTSVIIDREIGDWRRFSNRRQIGSYTGLCPGEYSSGNTRLQSCVTKHGNPRLRAALVELAWRLVRFQPNYKPIVKWRQILAKGALATGAARKKAIVAVARQLAVDLWRIKTGRLRAEELGLIN

SEQ ID NO: 285714 - protein, 341 aa, unidentified
MMKLYCGIDLHSNNSVVVILDEADKVVYQKKLNNDLASILGQLSIYKDKITAIAIESTFNWYWLVDDLMEAGYTVKLVNTAEVQTYSGLKHTDDKDDARWLAHLLRLKILPTGYIYPKEERAVRDLLRKRSQLVRQSTTNILSLQNILARNTAQSLSSYKIKKLDDVQAEKLLDDPNTTLALKCNLNVIRCLQSTIAEIETTVLQQARIRAEFKQLLTVSGIGEILGLTIMLESGDMSRFPKVGNFSSYCRCVKSERLSNGKKKGEGNRKSGNKYLAWAFIEAANFAIRYNDKIKAFYQKKKVKTNGIIATKAVANKLARACYHVLKDQVPFDVNKSFSRW

SEQ ID NO: 285715 - protein, 391 aa, unidentified
MSMYFVGIDISKYKHDCCILSAADQQIVSKFTITNDKDGFEQLLTSLNSLSNPEDIKIGFEATAHYALNLELFLENANHSFMEVNPILIKEYKKSTTLRRTKTDSVDCESIARWLMTVEYKPHSKGFYHAYSLKSLTRLRDRLIRQRSFYLVKITNVLDHTFPEFKPFFNERLSKTALYLLENYGSAEKMARMNSASYDKLRCISRGKFSIQQFLSLKELAANTVGVNNSIFDLELSSLLTLYKALSTEINILETEIIKLIEEVHPHYMSIPGIGPISAAVIYAEYGDISNFSNPGQMLAFAGMEPGINESGTESHSGRMVKHGSSQLRFVLLNACLPLIRFDLTFATYYAKKRAEGKKHRIAITHVAKKLIRVIYALERQDVDFNCQKLR

SEQ ID NO: 285716 - protein, 421 aa, unidentified
MNQLLGEPYTAYIGIDWASSKHDICLQVAGGEEREFERIKHTPEAIEEWAQALYQHLGGPIAVALELSEGPIVSALQKYDFLVLFPIDPKRLAKYREAFVPSGAKDDPTDAEFAMDYLMRHPEKLTALKPESVPMRKLRYLVEARNRIRGDQSRCVNRLIQALKQYYPQAVDWFNDHNTLVFCDFLKQWPTLATVQRARKARLERFFKEHNVRFARLIEDRIQAIKAATPLTRDEAVIEAHQLQVEILVEQLRLTIKAMKCFDAEIAAIAAQFPDYGLLYTALPGAGKVIAPRLLAAFGEDRDRYNCAAQLQKRSGIAPITKRSGNSTWVHWRFQCPKFLRQTFIDFAAQTINKSAWAGAYYRQQRAKGASHHMAVRALAYKWIRVLYRCWQERTPYDESKYLETLRRRGSPLLKQLAEAA

SEQ ID NO: 285717 - protein, 353 aa, unidentified
MEKVTRVGIDLGKHVYQVCGMEASGAVVFQRQVKAPRLMELMSRLAPCLVGMEASCGAHHWAEKLRELGHDVRMMSPQFVRPYVKSNKSDYHDAEAICEAVSRPTMRFVPYKTKERRALQQIHRSRETMIGVRTQLSNQLRGFLREYGIVLPQGLAVIKREVPAIASDPERALPGDFRALLYMQHQALMQVDEQVADLTAMLERESKENPLCERLMSIPGIGPMVSTALVASVGSGWAFGSGRQMSAFLGLVPRQESTGGRTVLRGISKRGDRYLRALLIHGARAVLRTAHKGERTRLKEWALDVKRRRGANVATVAVANKLARIAWAVLRHDERYSDERHVGGRARVSRAAA

SEQ ID NO: 285718 - protein, 396 aa, unidentified
MRFAGIDIASEEHVVAVVGEREEVLVRPTAFAEDAAGHARLLELLGPPEELLVAMEATGHYWKNLFVVLAAHGYRVALLNPLRTHRFAGEDLRRAKTDAIDALGIARFAAQKRPAATALPDAATEELRELVRLRDRTVQEQGDKVRQLHRLVDLGFPEFRRHVRTLDSQLATAVLRACPTAEAFRRVALKRLAGLKYDGRHRVGKDLAQVLVRAARDSVGQHHGPAYQIQVRYLCDDLDTLRARLRDLEGDIEGTLRAHEVGSLLTTIDGIGPQTAARLVAELGDPARFRSPGALAAFVGVVPGTSQSGKHRPTRAGLSPVGHAMLRHALWMPTLTAVRVNPWLRAHYQRLRARGKLPKVALVASMRKLLHAVYSVAKNRRPFTPLLPPAPLPPHA

SEQ ID NO: 285719 - protein, 346 aa, unidentified
MLYAGLDLSRQRLDVHVLDEAGRTVEVAAVRPDADALRTLANRILCHGGEVSAVIESMTGSRFVHDQLELAGPDVAIADAVKAKGIAPLAAKTDKIDAHVPAELARRDLVPEIWLPTPGVRAERERARFRLHLVHHRSALKCRIHATLMTFGHTVPVTDLFGTSGRELLAGFELPEPWATTLATSLAMLDELDERIDECGRELARLGADHPYIPLLMTVPGVGPVTAYTIASEIGDIRRFASPKKLTRYTGLCPLVRRSGNRDFRGPLAKNGPKYLRPALIEAATHAARDACYRDRYERTKHRLGRGRGAKVARIDIARQLAEAIWHVLSKNEPFAPAGPAILLVA

SEQ ID NO: 285720 - protein, 317 aa, unidentified
MEKVYIGIDISKDSLDVAIHGVKNLMHTSNDQAGIQKVVRLAKKRNAAMVCFESTGGYEMPLYVALSEAGVPVAAVNPRQIRDFARSMGKLAKTDTIDARVIAHFASANPDLKSKPISNTQDLKEIVNRRVQLMEMITMESNRLRGASNDLRAGIEEHIAWLKHEIEDMDSDLKKRIEQDPIYQEKDSLLQSTPGIGPIVSAALISQLPELGNLNRRQIAALVGVAPLNRDSGMFKGKRIVWGGRGRIRTVLYMATLVAARYNPVIRRFYERLVMTGKPKKVALTACMRKILVILNAMLKHHTTWSNTYSSEMSLCH

SEQ ID NO: 285721 - protein, 346 aa, unidentified
MSHKTTASVAHTIGIDTGKNTLHLIGLDDKGAIILREKIARGRIAARLANVPRCLIGIEAGMATHYAARELSALGHDVKQVPPAYAKPFRQGHKNDFRDAHAIAEAVQRPSTRCVPVKTDDQLDLQALHRVRSRLVGQRTAVINQIRGFLLEHGIVVRQGLRFLRQQLPDILAKRSDVLSPRMIRIIEDLSGDWRHLDERIQHVTEEIEVLAHGNESCRQLITVPGIGPLIASAMVAAIGNGAAFAKGRDFAAWLGLVPKQMSTGDRTILGRISKRGNRYLRTMIMQGARVILLRPANWAKHSFGTWLTAAANRLHHNVLATALANKLARIAWTVLMQARSYEARV

SEQ ID NO: 285722 - protein, 343 aa, unidentified
MEHYAGIDVSLERSSVCVVDATGRIVREAKVASEPEALVDFFRRLGLPLARVGLEAGPLSQWLHAGLAGAGFEAVLLETRQVKAALSAMIVKTDRKDARGIAQLLRMGWYRPVHRKSPPAQEVRALLVGRKLLQGKLLDVELSIRGLLRGFGLKLGEVSKGRFAVRVREPVAGQPTLERVIGPMLRAREALRSEYLALHRAVLAIVREDAVCRRLMSVPGVGALVALTFASAVDDPARFRRSRDVGAHFGLTPKRYQSGETDVTGGISKVGDAMVRAALYEAANVMLTRAGRFSTLKRWALEVAKRRGARRAKVALARKLATVLHRLWADGSEFRFGKEAAAA

SEQ ID NO: 285723 - protein, 345 aa, unidentified
MSIVGGLDIHRKQLTFDYLDTVTGEVRRGQIAPADRAHLRAWLARFAGRDDVAFAVEGCTGWRYVAGELAAAGVAAHVGEPADTAAARGRKRHAKTDKTDSRHLRVLLAEGRLPECWIPPAQILEYRALLETYHDLRTEHTAWVQRIHAVFFHQGAPRLGEGALRTEAGLAALRAAAAAHLSPAGQLQVATALDMLAALDARMDVVRKRVLDAARHLTGAKVLTTRLYGAGPVTALALTCWLAGADRFSSSRKAVRFTGLDITVWSSDRKGPPGRLSRQGPPVLRWAVYEAGKTHARSSAPDHGYYAAVKDRKNGKRAALSEARKIVRQACHILTELGDDALTAA

SEQ ID NO: 285724 - protein, 312 aa, unidentified
MTLHRFVVGIDISKHHLDVHDQRDGTTRRIANAPDAAGALAAALCGEDCLVVFEATGRYDAVLAQALAAARVTHARVNPEQARHFARALGYKAKTDTIDARMLAELGQRMPLRLHLPPTPARAQLAALSGRRDQLVAIRKQERTRVGDQDDALLAETLEQHLAWLDQTIVRLDRAIAEAIAADEALANTDALLRSVPGVGPVTAAVLIAQLPELGLRNPKTIAALAGLAPYNNDSGAFVGKRSVRGGRVRVRQALYMAAVSAARASSHIARFHHRLRTAGKPPKLAYIATARKLLSVLNAISRTQTPFLDTP

SEQ ID NO: 285725 - protein, 317 aa, unidentified
MPAASVFVGIDVAKAELVIAVRPSGERWTAANDEASIQGLLKRLRRHAPTLVVLEATGGYERTAVAALAAARLPLVVANPRQVRDFARATGQLAKTDRIDADTLALFAERVRPEPRPLPDEAAHALDGLLTRRRQILGMLVAERNRLEHAVPAVRHGILQHIRWLERQLRDVDQDLDRNIHASPVWREKENLLRSVPGVGPVVSRTLIGDLPELGTLPRKQIAALVGVAPMARDSGTLKGKRLVWGGRAPVRAALYMAALVATRRNPVIREFYQRLLTAGKPKKLALTACMRKLLTILNAMIRANTVWRHLDQTETA

SEQ ID NO: 285726 - protein, 329 aa, unidentified
MSNDDFHACFYLMNLRGESKRKGKVRVFKNTPTGFKSLVDWIEKNRVASSLELTITVEATGVYHEQLSYFVHDKSYPISILLPNTVKAFAKSLNTLSKTDQIDAQTIARMGVERKLRFWSPMSPLMRDLKGLSRQRQAFIKQKIALTNQLHADEKRAKPVKSNIKRGRKMISIYIKQIEAIEKEMKELLRKDEQLKVSVKRLCTVPGVAFITAATFLAETDGLTLFSSESQLIKYCGYDIKRNDSGTSVHGRTSISKAGNSHIRGSLYMPSMSAMQLEGPFRESYFRVVDRTGHGKMGLVAVQRKMLKVMFACHKKQEDYDPNYSKNRA

SEQ ID NO: 285727 - protein, 374 aa, unidentified
MSAGKKFIGLDVHQDTIVIAVADDGVDREIRYFGTIANRPEALHAALKKIGQDGAELRVCYESGPCGFVIYRFLAQIGVTCMVISPSSMPRRPGDRVKTDRRDAQTLARLLRAGELAAVWVPDEAHEAVRDVVRARRQAKDDLGSAKSALKSFLLRHGRRFTGKAIWGKAHWGWLSEQKFAFPHQQFVFEEYKRRIHDLMDRCSRLDDVLREAVSGWVLGPLVHALQALRGIKLTAAATLVAEIGDLHRFQNPKQLMAWLGLVPAEHSSGKRIKRGEITRSGNAAARTMLIESAWHYRFPAREGRSLIDRNAEIPEHIRAIAWKAQVRLCAKFRRLVASGKQTVKVVTAVARELAGFIWDIARQTPAVAVETRR

SEQ ID NO: 285728 - protein, 312 aa, unidentified
MAMLSFCGIDVSKDRLDVVVLPQGWFFSVSNDTAGWAELVARLRPLTVSAIGLEPSGGYERGIIRALLAAGLSVRRINPNKLRQFARARGVLAKNDRLDARLIAEYVAIMPTRVVQRDAAVERLAEIVTMRRQLCDEHVAAENQAAHLEDAMLRRLSKRRQMRLEADIRLLDKRLAEMVAANVALAQRYELLTSMPGVGPVLAFTLIALLPELGKMSRKQIAALVGIAPYDFDSGKLKGHRSIYGGRMSVRNVLYMAALSASRYSPALKAFHNRLADADKKSKVIIVAVMRKMITTLNAMLRDSAAWQPRSA

SEQ ID NO: 285729 - protein, 457 aa, unidentified
MEKSKRQKVRSPRRSLVPMNPDAAGIDVGATFHTVAVPPGRADQTVRSFRSFTGDLYALADWLKSVGVKTVAMESTGVYWIPTFEILEERGFEVLLVNARHVKNVPGRKTDVNDAQWLQQLHEHGLLRGSFRPRDEVVRLRALLRHRERVIEYAAAHIQHMQKALMQMNVQLHHVVTNITGVTGMKIIKDILKGVRDPNLLAQHRDARCKQSLETIQEALTGNYRPEHVFALRQSLELYEFHHVKVAECDVEIEAILRVLNQGRQAPAEPIPEMRHAPSKNEPDFDVRSALYTLLGADLTQIHGLGAYSVMRLIAECGDDLRKWPTAKHFTSWLTLAPGNKISGGRVLSSKTRRSSNRAAVLLRIAAVNIGRTQTALGAFYRRLAARAGKMKAVTATARKLAVLFYNALRHGLSYVDPGASYYEQRYRQRVVHNLQRRARQLGYTLIAARATPNGVS

SEQ ID NO: 285730 - protein, 374 aa, unidentified
MKDHSEAYVAFDTSKLRNAVAIAEAGRTGEVRFFGEIDNHAVATAKLVRKLAGRYARLTFCYEAGPTGYGLYRQVRELGHECLVVAPSLIPKKAGDRVKTNRRDALGLAKLLRAGALTAVWVPDAQHEAMRDLTRAREAAVADLRSKRQQVSAFLLRQGLCYAGKKSWSKAYMNWLARVRLAHVEQRIVFEEMLLAVRQAQERIERLEEAIRAAVPDWSLAAVVTALMAMRGIDLVAASAFLAEIGDLSRFQTPRQLMAYLGLVPSEASTGDTIKRGPITKAGNSRARRILVECSWSYQHPPRIGAAKQAKVAAAPEAVRAIAWKAQTRLCGRYRTLTRKGKRKTVAVTAVARELAGFIWAINRELASTAAVAA

SEQ ID NO: 285731 - protein, 354 aa, unidentified
MIIIGVDFHPEFQQIASVDTDTGEFQEKRLTHCEEAEKFYRAVAASGQKVRVGMEASGHGRWFERLLAELQIEMWIGDAAEIRAKRVRKQKTDRQDAQLILRLLLEDRFPQIWVPSWKNRDLRQLLWHRHRMVQARTRIMNQLQAVALNEGLRCKKRLWRERGRQQLESFRLAPWASRRRRDLLELLDRLNPTIAELSLTIEQEVEKCPEAQRLMTHPGVGPLTALAFVLIIGEANRFQCGKQVASYLGLVPLEDSSGNRRRLGHITKQGSSMLRFLLVEAAQVTARSLPQWRSKYLHLMMRRGRKTAKVAMARRLAVRLYWMMRQGWDYQQWSKFGSHAGQPGNRDGVPSNTE

SEQ ID NO: 285732 - protein, 391 aa, unidentified
MIYIGIDVAKDKHDCFITNSDSEVLFKAFTIFNNLDGFNDLYQKIESVMDDVTKVKVGLEATGHYSYNLLGYLIDKGLPTYVINPLHTNLYRKSLSLRQTKTDKVDARTIASMLMSDVNLKSYSDTFYHNEELKSLTRYRFDKVKERAKLKTSVSRLVCILFPELEKLVPTLHMASVYALLSEFPSAKHVATAHLTRLTNLLSKSSKGRYGKDTAITFRDSARASIGSNMPAKSLELKHTIKLIQELDSEIDEIENEIKIIMDEINSPILSIPGINYRMGAMIIAEIGDFNRFDSPDKILAYAGFSPSTYQSGQLDGAYAHMEKRGSRYLRYALYNATKYVCHWDPTFAAYLAKKRAEGKHFNVAISHAVKKLVRVIYHLEKTKQQYIKVA

SEQ ID NO: 285733 - protein, 425 aa, unidentified
MKNTQNQKISQIKNETLVVGIDVAKETHYARAFDYRGIELAKLLKFSNTAEGFKLLDQWMQDICKQKGKTEIVAGFEPTGHYWFVLGDHLKHQGHKLAIVNPFHVNRTKELDDNSPSKNDSKDCKTIAMLVKDGRYREVYIPDDIYQELREAVAERERLQEQLTSIHNRVVRWLDIRFPEFQKVFKDWRRNAALITLRSFPTPEKIVEAGARKICETWKTEMKRPSFKRAEALVKVASNSIGRTSGKLASEASLKNLLAQYDLYCKQYEALEQLMLELLMQVPNASKLLDIKGVGLSTAATFVGEVGDISRFQDPRQIQKLAGFNLVANSSGKHKGKTTISKRGRKRLRHKLFFAMIAILAHNPEFRLLHQRNLTRENNPLNKMQSIVALCGKLIRIFYALLSKGVDYDPEKMLNDIHQPVQQAA

SEQ ID NO: 285734 - protein, 485 aa, unidentified
MSNVVYRRCCGMDVHKDTIVVCVLPPDGADGIPARKTYRTFRNELTRMRVWLKLLKVTEIAMESTGVYWRPVWNILEDQGFRLLLVNPAQVKALQGRKSDRRDAKRIAEYLQDGRLDPSFVPPHEIRELRQLLRHRLSLLQQRGESHNQIRDLFETANSKLSSVASDLLGLTGRCIIEAMIAGEDSPELLSWKVKGKLRKKEKEVKETLKGCFNEFHRMMLKAHYSLYQFLTRQVEELEAEMARRMQPYAEQVNALATIPGVEKIAAWHLIAELGADMSVFPDADHCASWAGVSPGSCESAGKQLSSRTKKGNQYLRRILTQSAWAASHCKQGYLRAFFHRVKARRGWARAVIAVAHKILVIAYCILKTGAPYQDLGDDYFDKLHPERTAKRLVRRLERLGLTVNVVPANLNPRFQESQRLKFSRDCGAGRLSICADGKDPEKQSQDPTKVSRAPRVLDSRIRYRWRTWICVTRLEEGWFELLTT

SEQ ID NO: 285735 - protein, 341 aa, unidentified
MKKTEYVVGVDIGAESVSIAALKGPDGAGLAELSVTNDPEGFEGLKNWLTKHNLTVENAAFCLEATGVYGEALCYYLCSRGFRVAVEPPLKVKRAFQQSAHKNDTVDARQIAEYGHRFYDELSWWTPPVAVLEQVRVLLTAREQFTGQKIANVNALKALERKTITTRIAIQAYEQAIARLTENIKQIDQEIKRLVKQDDSFNRMITAITSTPGIGMLLAANLVVMTSGFARTRNHKKIASYTGISPIEHSSGTSVYRHPRSRRYGPSRMRKLLYLAAMSVSTHDPTFRRYYLRKVAEGKPKRLVLNNISNKLLKVVCALVRSESTYIHNYRSVQPLLLKTA

SEQ ID NO: 285736 - protein, 343 aa, unidentified
MKVTTVGIDLAKQVFQIHGVDEHGKTTIKKQLRRAQMAEFFINMLPCLVGMEACGSSHHWARKLQGMGHTVRLMAPQYVKPYVKTNKNDAADAEAICEAVGRPNMRFVPVKNIEQQSILAVHRVRQSFVQARTAQANQIRGLLGEFGLVLPQGIHHIAQKVPELLEDASNELPGSFRLLILRLLDHLKELDKQVQELECQIVQWHREHEDSKRLEQVPGIGPITASALVASLGDVKSFQNGRQLAAWLGLVPRQHSSGGKQNLLGISKRGDTYLRTLLIHGARAVVQVADRKPDHSPTCRWASKMLRRRNKNITAVALANKNARIVWALLAHGRQYQTDYVPA

SEQ ID NO: 285737 - protein, 354 aa, unidentified
MHSENIAAYVGLDVHKETLAVAIAAPERLGEVRYYGTINNEAQAVRRLFQKLQGLYGNILSCYEAGPCGFRLYHQLTAMNIKCQVIAPSRIPKSPTDRIKNDHRDAISLARLLRAGELTPVWIPDLTHEAMRDLIRARAAAKRDSRVARQRILSMLLRTDKHYAGKHWTGKHRTWLANQSFSQPSQQIAFQHYCQSLEQIEDRILQLDQEISRLLPEWSLCNLVCQLQALKGVGQLIAITLVAELGDFSRFSNPKQLMAFLGLVPGEYSSGNSIRPRGITKVGNSELRRLLYEAAWSYRTPAKVGAWLIYYRPDSVTQYSKDIAWKAQQRLCSRYRSLTAKGKKITSSHYGGGS

SEQ ID NO: 285738 - protein, 337 aa, unidentified
MGLYCGIDLHSNNHVVTVIDDSDRRVYERRLPNELARTTAALEPFRNELTAIAVESTFNWYWLVDGLMDAGYEVRLVNTAAVQQYNGLKHTDDEHDAFWLAHLMRLGILPTGYIYPKTERGLRDLARQRMRLVQHRSSHITSIQGQVWRSTAVRLRSTTLKGEGTQSWPELTDPDVALSIDTGRAAIAALTVQIERLEAVLLKRMKLSPEFRLLQTVTGIGPILAMTIALEIGTVARFPGVGEFTSYCRCVDSQRLSNAKKKGEANRKNGNPYLAWAFMEAAHFALRSLPAAKRFYDRKVRQRHKLIAIKALAHKIARACFYILRDQVPFAPERLFV

SEQ ID NO: 285739 - protein, 336 aa, unidentified
MKQITTLAIDLAKTVFQLHGVDERGVAVLRRQVRRTQLLALIARLPACLIAMEACASAHYWGREFSRLGHRVKLIPPQYVKPFVKGSKTDRNDAAGICEAALRPDMPQVALKSEEQQGVLALHRIRQLLEKQRKQLANQLRGILGEFGIAIAASMKALREALPEAKEQVPSLLRPTLEQACERLSELERQCKVHTEQIEACAQNNALCRRLMRERGVGPISASAYVATLGDPRHYRNGRQVSACLGLVPRQHSTGGKAVLLGITKRGDKYLRMMLIHGARSVLRHAKGKSDPLSDRLNELARRRGVNRAAVAMANKNARRLWAIWRAEGQELAAAG

SEQ ID NO: 285740 - protein, 412 aa, unidentified
MNLVYERCAGLDVHKKTVVVCAIIAGVKGQRSKEWRTFSTMTPDLLRLRQWLKELGVTHVAMESTASYWKPIFNVLEGHLEVLLVNAQHLKAVPGRKTDIKDAEWIADLLQHGLLRPSFIPPASQRELRELTRYRISLSEERSRLINRLQKTLEDANLKLASVASDIMGRSARDMLAALLVGEVDPTVLAELARGRMRSKRDLLAQALQGQFKSHHRFLIAEQLADIDALDEAIERMSTEIAERLRPYEPQIQHLSTIPGIKRRLAEVILAEIGSDMSRFPSSRHLASWAGMCPGNSISAGKRLSGKTRKGSPWLRSALVEAAHAAIHTKDSYLSAQYQRLFVRRGGKKATIAVGHTLLVIIYHLLSEDTDYQELGGNYFDEWDRQAVQKRLVRRLEKLGYQVKLELTSPAT

SEQ ID NO: 285741 - protein, 344 aa, unidentified
MKDVQIIGVDLGKNGCSLVGLDHAGQVVLRRRVRRDGLTLAKLPSAVVAMEACCGAHHLGRLLVAQGREVRLMSPEYVRPYVKAQKNDDRDAEAIAEAATRPTMRFVALKSEAQLDVQVLHRVRDRLVGQRTSLMNQTRSILLERGLVVAQGRRALLDALQAVEEQGEASKLSGRVRLLLADLLDQWHALDSRIAALDEEFTEMARNDPAARRLATIPGVGVMNATALVAAVGDGRTFSRGRDLAAWLGLVPRQATTGGKPKLLGITKRGSKYLRKLIIQGARAALPSLARSPTPLGAWLRGLLARAHGNKVVVALAAKLIRVAWALLRHGTSWSWAPSQLATA

SEQ ID NO: 285742 - protein, 305 aa, unidentified
MAHPASPQVTVGVDTHLDIHVAHAKDALGRRLGTRSIPTTPAGYGELLDWARGLGQVTAWGVEGTGCYGAGLARLLRDHGQAVVEVNRPDRSARRRRGKSDPLDAEAAARTVQAGEATALPKAGTGQVEMIRCLRVARATAMKARTQAINALKALLVTAPAELREQLRGLPAARLVATAARLEPGPLASSTAAAKLALCTLARRYQALSGEITTLSGELERLTAIAAAPLVGLFGVGADSAGALLVAAGDNPDRLHSEAAFSMLCGSSPIPASSGKTTRHRLNRGGDRQANAALYRIVVVRLRWH

SEQ ID NO: 285743 - protein, 346 aa, unidentified
MLADTVDAVIGVDTHTDTHTACMLDHLGRQISAITIPADPGGCRVLLAWAQRNTPGPRLAWAVEGTRSHGLGLARMLQAEGHAVVEANRPARASKRPGGKSDPADALRAARDALAAERHAQPRADGAREALRILLAARAQASTARTAAVNSLKALLLGAPASLRESLRDHSTAQQVRKCRTLRVTARQQIAEATLRAELRRLAGHITNSDRELRANQVKLEELVRQVNPALLDQPGVGPMSAAQLLVSWSHPGRCRSEAAFAALAGASPLQASSGKIARHRLNRFGDRQLNRALHVIVNWRMLHHPETKDYLTRRRAEQKTDPEIRRCLKRYAARQLFRLMEASAT

SEQ ID NO: 285744 - protein, 341 aa, unidentified
MAEYVGLDVSMKETALSIRRDGKRVWRGKCASDPKLIAEVIRRRAPGVARVVFETGPLSVWFYHALTAEGLPAICIDARHAKAALDMAPNKTDAHDADGLAQLAEVGFFREVRVKGFDSMLGRTLVAARNRLVQITTELSNQIRGLMKTFGLVVPAGKGSRFEAHVRALLADQAGLAPILLPLLEAWRAMRLRAAELGRQLVASARHSEACQILMSVPGVGAVTATSFATAVEDPENFRRSRSVGAWLGLTTRRYQSGEVDYDGHISRRGDTHLRGLLYEAATVLLTRTSAESSLRTWGLKLKERIGFKRAAVAVARKLAVVMHAMLRSGQLFDRTAGMAA

SEQ ID NO: 285745 - protein, 326 aa, unidentified
MTVLSSRDNTFIGIDVGGASFEAAWHRGGCTQYANRPDAIAAFVERLCAGPRVERIVIEPTGGHEKSLVRALRRAGFRVELVHTSRFKAYRALVGAHAKSDTSDARLLAAYAAAPDEVRGRAGQHVELPDDEQREELAELASRRDQLKQMIHAESCRLTTVRSEQVRREIEFHLETLQASARDTATAMSRLVRARADLSNAKKLLRSIKSIGDTSALTLLALLPELGRIDNKAAAALVGVAPFVRKSGTMNAPARIAGGRAAVRNVIYMAAVTASRHNPVLKSFYERLIAAGKPTKVALIAVMRRLVVFANAVLKSGQPWRGALAA

SEQ ID NO: 285746 - protein, 351 aa, unidentified
MKKIAYLAIDVHARHCVLGRMDFNGTFIGNKTFATSEQNIIEALKAVKAKEKYLALEESNLAYWAAQVARPYVTEVICSDPKENALIYRSPNKRDKVDTHKLCRLLRLGELKRVYHPENDDRAIFKAAVQHYIDLRDQQVVLKNKIKAKYRHWGVIDVAGEALYGIKNRGDYLKRIKHLHIRNQLGRLYALTDQTESMQKQALKSMKQLGRRYREIKEFKKIPGIGEILAHIFDAFIQTPDRFANKRQLWRYCRLGITDRSSDGKPLGFKRLDRSGVSELKSLTYQAWLCAMKSDNEIRRFYSRSFRRTFSRVHARLNTQRKIIAVMYGMWKRGQAYRPQLFLDSLETGVV

SEQ ID NO: 285747 - protein, 346 aa, unidentified
MTHSTTVGVDLAKNVIQVSVISARGKELLNRSLTRRKFAEFLGKQQPALVAFEACATSHYWARVAQRHGHVARIIPAKAVAPFRQGHKTDSNDALAVAEAARRPNIKEAPMKTIDQQGLQAIQRSRDLLVQESTALSNHMRGLLMEFGVVIPQGFAALRRMLPEILEDGDNEVPDMYRPTLHRLYTRFLELRDDIQSMNVEVKELVKQHPDCKRLTALEGVGPISAVLLYASLGTGEAFSGSREFAAYLGLTPRQFSSGGKTNIVGLSKKIGNCRLRSVLIQGARAYVHKLKEPRTSKDRWLMDLIERAGHGKAAVALANKNVRTAWAMLTQGTEYQRRPQLKVAA

SEQ ID NO: 285748 - protein, 359 aa, unidentified
MRTQSNKLNFEGENIYVGIDVHLKSWNVTIYTEYLHHKTFNQPPVPSILRDYLNTNFPGGTYYSAYEAGFCGFNIHFELKKLNINNIVVNPADIPTSQKEQILKNDSRDSMKIARSLRANELIGIHVPFIETLENRTLIRTRDVMVKDMTRFKQRIKALLYFYGISYPPEFERSTSHWSRRFLKWLKEEVSLNTANGNDALSLLIREVEQQRVLLLEINRKIHSLAVSEKYVKEIELIRSIPGIGLVTGLTFLSEIEDIERFTNTDKLAGFVGMIPTCHSSGEVENYGEMTFRKKTILRRCLIESSWIAVRIDPALTRCFSQLCKRMEPNKAIIRIARKLLNRMYYVLKKRQKYECGVV

SEQ ID NO: 285749 - protein, 422 aa, unidentified
MRSVALDVHLDFCEVAIVEDGELRSAGRIETKPCQIELFASSLGPDDRVALEVTGNAWEIARLIEPHVAQVLVVSPSDTGIRQARAKTDRLDARTLARLLAAGSLDGVWMPDRWTWVMRRRLSRRGQLVRARSRSKNQIHAVLMRQLVGRPPVSDLFGVGGREWLKGLELAEEERETVDAHIRQIEFLEKELAEVERLIAGAALESAEIKRLMGVPGVNVIVAASFLAAIGDISRFESPRKLVGYLGLDPLVRQSGVGPATHGHISKQGSVRARHALVEACWTTVRQPGPLHAFYERIRARGGHSVAIVAAARKLASLFWCLLTREEDYAYQQPSLTKKKLRRLEITAGAERYTPKAAGIWSANDAVRKAERELARQAEVAYARTVRDWHATQVEKVGASVTPGRASKKPLKGEAARQTTSP

SEQ ID NO: 285750 - protein, 340 aa, unidentified
MSIVCGFDVHREQITFDLVDQVSGEVRSGRITPVTRAALSAWLAALESARLRVALEATTGWRFVVEELEQAGAQAVLAEPAETRALRGPKRRAKTDRADARHLRELLERETVPRSWVPPAHLQELRTLVRLRHSLAAERRVWLQRVQAQLFHQGAPPARGRLLGPGGAAASAELSPAGRELVACAERVCTALESEIAQLDGRLAVWARRHPACRALQTLYGVGPTIAVTLYAEIGDARRLRSSRKLVRLAGLDVTVSESADKRSPGRLSRQGAPILRWAAYEAALSACRRGSPDQGDYRLLRERIGHGRATLTIARKLLRRAHHVLVAVGDDLLVPLSHP

SEQ ID NO: 285751 - protein, 343 aa, unidentified
MEHYAGIDVSLESASVCVVDATGRIVREAKVACEPETLLAWFRKLGIEMTRIGLEAGPLSQWLYAAMHDAGLAVELLETRHVRDAFKAMPVKTDRNDARGIAQLMRLGWFRPVHCKSLPAQEARALLTARKLLQAKEHDVAMSLRGVLRGFGLKVGRTTPLTFAGRIRELVDGHPTLMTVAEALLAARDVLAAQLQGLEKRLRSLAKEDGRARLLMTTPGVGVIVALTFVAAVDVPERFRSSKSVGAHFGLTPKKYQSGETDVTGRISKIGDAGVRAALYEAAHIILTKPVKGSALKSWAARLAKRAGMRKAKVALARKLAVVLHKMLVSNTPFAAEKAAATV

SEQ ID NO: 285752 - protein, 380 aa, unidentified
MPEAVIGLDVGKSSHWACVATRDGEILLSAPVANREGDLDSLFGRFPDALVVVDQSRNIGALALARAKAAGMSAAYLPGLAAHGAARLFAGDAKTDERDAMVIAKTALGIPDALLPVGDPGPTVAAARALAAQRNFLTCENTRSKNRLRSILLESCPAFEALVDLSDGPQLRLMASLGGAWSVADAGPRRTAALTRGAARGKIEALVRSTASSTRPDAAAIAAEDRAVRLLARRISENSAEIDVITAEISALLEGDDTYRCLLTVPGIGPKTASELAISIDIEDFPSHDRLASYCGLAPRNRQSGTSISSVTASRQGNKRLKNLLIFSCNCLTRTEGRWGDYYARCRERGMPHGKALKALARKRLKVIYAIMRDRVPYAA

SEQ ID NO: 285753 - protein, 429 aa, unidentified
METMEVLHRCVSGLDVHKKTVVACRRRLLDSGKVEKEVKTFATTTAALLSLLEWLGEWRVSHVAMESTGVYWKPIWNILEGHMELLLVNARHIKTVPGRKTDVKDCEWIAQLMQYGLLRASFVPSPEVRQWRDLTRHRTKLSDQHTAVVNRLHKVTSGVGLTLLEDANIKLSTVISDIMGVSGRRMLRALADGESDPIALSAMGDKRLKATPEELHASLLGQVQEHHRFMLSTLLDQIDFLEQQMTRLDERIEVQMRPFEEAISRLDTIDGVDRWGAQCLLAELGPDMAQYPSADQGQPQGHALSSWAGMSPGNDESAGKRRSGKTPKGNKWIRRTLTQSAWAATKRKGGYLSAQYRQLAARRGKKRAIVALGHTILVAAYHMLKDGVDYHDLGSDYFDQRRRTRTMQHLVDRLERLGYEVKLEPKQAA

SEQ ID NO: 285754 - protein, 367 aa, unidentified
MKVVYQTCCGVDVHKSFLVATIIKTTSGVEPSYHKKRFSTFNNSILQFKEWLIKNQCRDVCMESTGKYWVPVFNLLEDEINVTIANPKWVKAVKGNKDDTKDSKWIGNLFRLGLVPGSYIPSKPIRILREFTRYRYKLTSCRSSEKNRYQNALTVCNVALDSVVSDIFGKSATSVIDYLIEQSDNSINHEEIASRLLRSLKKKSDSVIESIEGYQMTDSQKYRMRLVRAHMDYITSTINDIDTMIDSLIAPHENAVQLLCTIPGVDRNSAITIISEIGTDMAQFSNSKRLCCWAGLTPGNNESAGKKKSVRITRAGVYLKPALVQIAHAAVKSDKSPYYKAKYERIAKRRGKKRAIIAIARMILTAI

SEQ ID NO: 285755 - protein, 319 aa, unidentified
MNNSGKEIHSMEVSSKPSGLEKIAEYMGDEEYAVLMESSTYSIRVHRFFADRGVPAHTAHAKYLSMITKSDRKTDKIDASHLARYLRLWMNGELPLSMSYIPDRDAEAKRALCRLREDLTKDIGDCIRKIKSHMSAIGIEIPYPVSSAKTKKFLEYLRNWHFKDITLMNRLDMLESLLRKANEINKEMEIIGKHDENVRLLMTIPGMGMQSAVQIMSMIMDINRFADQEKLCSYFGLVPRVRDSGGKESHGHMTKTGDPMMRAVLDRVTYVHVCHCDSSITEFFNRKSNENKKKALTSASRKMLCMIYAILTRRTGFAA

SEQ ID NO: 285756 - protein, 354 aa, unidentified
MIIIGCDFHTRMQVIAMLDTETGEVVEKRLDHESGEAKAFYEGLKEPALVGIETTGYTRWFAEMLEELGHELVVGEAAKIRAMKTRKQHHDRGDAEHILNLLMRGDFPKIWLPPAEERDVRVLIEHRHQLVELRTRAQNGLQAIALGYGLRRRGRLWSQAGLQELQKIPLREGMARRREDLSKLVRQLTVWIKELDQRIEEEVARREDAQRLMTHPGVGPQTALATVLVLGPAERFPDKLHLTSYLGLIPQEESTGGRQRFGHLTKQGNRLMRFLLVEAAQTASRYDPRLKRAYRRLAFRKGAAIAKVAVARKLAIRLYIMLRDGINYEEFCRRGPQESGRGSHAGMLGDVALV

SEQ ID NO: 285757 - protein, 343 aa, unidentified
MEAYAGKQFVGIDLHRRRTVIVRTTEAGEVLETVRIVNDVQRLASVMARAGRCPEVVLEATYGWYWAVDALQAGGANVHLAHPLGVKAFEYRRVKNDVRDAQDLADLLRMGRLPEAWIAPPPTRELRELVRHRAKLVRLRSHCKAEVHAVLAKCGVQVLMSDLFGLAGTELLDRLDLPAPYAARIASVRRLMDDMDFEISVFAGLVRGRMAKEPGYAAVQKIPGIGPTLGAVLVAEIGDVSRFASASKLTCWAGLTPKHHESDTHVRRGRITKQGSRLVRWAAIESVKRVPKASPVGVLRERVADRRGPNIGTVAAARRQLELVFYALRDGHVRALEHQPEAA

SEQ ID NO: 285758 - protein, 502 aa, unidentified
MAGEPRTVDSFTPSCDKQDGENVQTLYAYGVGIDCHSRFIQVCVLCNKGTEVIRFEKDFATGWDQLRAAKLWILDMLAANLPAATPSPADRLEYTLESTGCYHLPVVRALGGVPHIVNPLLANPNRRKTDVLDARMLAHHAICGLWPASFLPPDEVQELRVVWAQRNEAKRLSTRCINRSNNLILRWGHTFGATIAPSSTLGIAALEDLAAGKLPGLQGVSDTPLPLGARAVLTTLLATRRSLVAESQRFEQLAVSLAKSLECTIRGGELRKGSEVLTLLQTVPGIGPVTAMLWLVEIVEPTRFPCGKAVAAFAGCDPTLKVSAGKVTSTVRRKGNARLHTALMQAAGSLITRNKESIGRWGYQIWKRKKKGGFKTACGAVARRLAIAMWHVHSKCEPFSYQGYNFWRQPSLPDVSLSEMGLSPYVFRKFQELGLVTSQRVVDAFNSSLASTPGVGQQCLLEVSLWLQTQMERQNQGQSQVLSQASGVETQGNKGSTSSALS

SEQ ID NO: 285759 - protein, 347 aa, unidentified
MKFYTTFNKYYCGIDLHARILYVCILDERGSKLVHQKIKVDKHELLKLILPYLEDIVVGVECMHCWYWVSDLCAEHNIDFVLGHALYMKAIHGGKAKNDKIDSYKIASLLRGGNFPLAYNYPAQMRSTRDLLRRRTRLVQHGAQLKAHIVNTNSQYNYPPLELHMKNKCVRQEFQTRFDDQAVQRNVNFDLAILDAYAEELKKLEYYLESKAKKHQPNYYAQLRTIPGIGLILAMTILYEIGDINRFESVQKFSSYCRLVKCKAESAGKTYGTSGNKIGNGHLKWAFSEAAVLYLRGNDKARRYLNKLQKRMSKAKALSVLAHKLGRCVYFMLKNKTVFDDDRFLKS

SEQ ID NO: 285760 - protein, 415 aa, unidentified
MWFAGIDWADEHHDVAIVDEAGQQHGTLRVAHSAAGVEALVTFLRGYSQRTARADALPAPAPDPEQVACIIETTHGLLITALLEAGFPVYPVNPKTLAHWRKPAGAKTDRIDAYLLARKGRSDLGELRRLEPDSPLVQELKLLTRDQDALVQTQTRLVNQLTACLKAYFPSALTLFGKLHQGATLAFLQRYPTLEQAEAASVEELTAFLRAQPRFPSPAAAAQRIHGCVHQSHLRADPVTTRVKARLTQALVAQLVPVVEQIAAYDAEIERLFRRHPDAALFVSLPGAGKRLAPRLLVGWGDDRGRYTSAQSMQGLAGTAPVAFQSGKYSKAHKRYACIKPLRNALYQFAWQSTREAWALAYYQRKRQEGKSHSVALRALANQWVRLIHAIWHTQRPYDEAVFRAAQQAHALPAA

SEQ ID NO: 285761 - protein, 412 aa, unidentified
MYNIAGIDVHKKMLAVVIANARDTELQFECRKFGTTVSELRHLSAWLQERGVQEAAMESTAQYWKPVWIALEGQCRLHLAQARSNRGPRGRKTDFRDAKRIVSRLLSGDLILSFVPEREQRWWRTLTRSRHQLREDRVRLQNQLENLLEEVQIKLSSFITDLLGKSGQRILRALAEGESDPARLADLGNWRLRASKEELREALCGQLQPLHRQLLSLYLERLDLIEAQMDTLEKSIARELHAHQEAVTRLVEIPGIGVDSAQQIIAEIGPDAAAFPSAAQLASWVGVCPGRQESAGESSSNRSAKGNRTMRRLLSQLAHAAVKKDGCRLQIVFRRWLPRMGYGKAIWAVAHRLCRVIWKVLHDNVPYIEKGVETNPKAQKERCRRLVAELRRLGYQVELPARAPGPIPDPGV

SEQ ID NO: 285762 - protein, 387 aa, unidentified
MGKTMSLASSAAAVDYDETLILAVDTSNKSWVVAAHVPGFGHIKAKQTTAPTADALAIAIEGYRRRAATSGRVIDRVIVVYEAGYGGFWLARWLKSRGIEVHVMQPSSVPVERRKRRAKSDKIDADLLLRTLLAWLRGEPRVCSMVAVPEEAEEDARRYSREREELIRERIMLSNRVGAILATLGIDDYNPLRRDRRVRLEALRTALDQPLPEHARAKIVRIIDRLELVLSQVSVLESQRDAVLEEKAPEEAERMIKALVLLRSIGAQSATVLVYEAFIRRFASGKALGCYAGLTGTPFNSGGSEREQGISKAGNRRLRAAMGELAWLWLRYQPESALATWFKERLAGAKGRLKKVLLVALARKLLIALWRYATDGVVPVGAVLKPA

SEQ ID NO: 285763 - protein, 386 aa, unidentified
MQTVADRPEAPTAIRTDLGAIFVSLELSRSTWLITSLSPGGGEKMSKQVVRGGDVAGLLERFARLREKTRARTGKVFPFVVIQEAGLDGFWIDRVLQNEGIESHVVDPASIATSRRRRRAKTDRIDGEALVRALLAYKRGEPRVCAMVKAPTPEEEDRRRLCRERKVLIVERVRHVNRVKGLLFSQGISGYEPLRRDRRERLDTLQTGDGRRLPDHLKAQVRRELDRLELLLEQIKAVEAERDVLLAAQRVAAPAAMLLDIKGIGPEFAAILWSEGLFRHFDNRRQVASYAGLAPTPWQSGSINREQGVSKAGNPRLRTTLIQLAWLWLRHQPQSALALWFEERVKRNGGRLKKTTIVALARKLLVALWKYVTAGVVIEGVVMKRT

SEQ ID NO: 285764 - protein, 366 aa, unidentified
MASMPNPTSQVNPTSMSSRVVVGGIDTHKDLHVVAVIDTAETVLATHSFSTTRAGYRALVKWLRTFGEVARIGVEGTGSYGAGICRHLTEVGIEVLEVDRPDRSDRRRKGKDDDLDAISAARAALHGRRVSIPKSKDGAVESLRVLRVTRQTAIRARRNALQLLRMTIVAAPEELRDQVRNLTRMQLIRTCAAWRPETTNAADPVAATRIALKSLTRRILELGDEIAALDELIKPLVTALAPQLLARAGIGIEVAGQLLVTAGDNRDRLRSEASFAMLCGVAPLPASSGMTRRHRLNRGGDRQANSALHLAVISRIRIDEKTQAYVAKKTAEGHSKLEIIRCLKRYLAREVFYLLNAPADEPVTVA

SEQ ID NO: 285765 - protein, 423 aa, unidentified
MKPLSDRPFTAHVGIDWADAKHDVCLQAADSKQREFDRFAHQVGSIDQWAKSLHQRFGGPIAVALELAKGPIVYALQKYDFFVLFPINPATLAKYREAFQPSGAKDDPTDAELALDLLLRHPERFVPLKPQSVAMRTLLSLIEQRRELVDDKTRVTNRLGHALKQYYPQALDWFEQRDTILFCDFLSRWPTLSAVKRARKAGLKAFFYAHNGRRPKLIDDRIDSIRAATPLTHDMGVIAPYRLQVLVLVEQLRVTLHAIDRFDRQIAAVAATLPDYALFSPLPGAGPHLAPRLLAAFGEQRERFMSADELQKYSGIAPVTERSGKKRWVHWRWQCPTFVRQTFVEWAGQTINKSFWAGVYYRQQRDKGSSHHAAVRALAFKWIRILYRCWQAGTPYDESTYLNALRLRGSPLLKQLHPTPENA

SEQ ID NO: 285766 - protein, 409 aa, unidentified
MIEAVIERCAGIDVGKKMIAVCVMTGPAAERPRIEKRKFGTTVKELEDLGHWLTSQEVTDAVMESTGNYWKPIFNIIEEAVRVHLANAQQVKNLRGHKTDMNDSQWLAHLLRHGMIRPSFIPPPDIRQLRDLTRRRKQLVNEGTRERNRIQKILEEGNIKLGNVLSDLFGASGQAMLEALVENRTTAEEMAQLAKCSAKRKIPDIMASLQDHRMTDHLRFMVRHSLELLGFLEFQIQELDTAIMSLAEKCYPQQFRLLQTLPGVGQDAAAGILAEIGPDMKPFPTAHHLASWAGVCPGNNESAGIHKSGKTRRGNPWLRSLLVQTAWAATRKKDSATKARFENLKPRLGAKRAVVAVAHFLLLAAHQALTSGAAHPEQILEHLDSTQKKRRIRYHSKCLHRLGVRVHTV

SEQ ID NO: 285767 - protein, 457 aa, unidentified
MAKKRQSPNQASKLDPIHPNAAGIDIGAQNHWVCVPSGRANECVRRFGCYTADLYGIADWLTESGVETVAMESTGVYWIPLFQILETRGFEVKLVNAHHVKTLPGRKTDVLDCQWLQQLHSYGLLSGSFRPEDEICVLRSYIRQRDSLIRSASVHIQRMQKALTQMNIQLHQAVSDITGTTGMAIIRAIVAGEHDPKVLAAKKHHRVKRSEAEIAAALNGDYRKEHLFVLQQELHLYDVYQSQIAECDRHIEKCLSQFNDKIDISQLPLSPPKHTRHKPQGNEPAFDLRTHLYRMSGVDFTRVDGLGVLTVQIILSEVGLDPSRFPTVKHFTSWLGLCPGSRITGGKIKSSQTRPVVNRAANAFRMAAQTAGKSNSALGAFYRRLRSRLGSPKAITATAHKIARIFYRLWTTGGDYTDPGMDYYEQHYRERMVNNLHKKAQAFGFELIPQSSENLVS

SEQ ID NO: 285768 - protein, 342 aa, unidentified
MQITTIGLDIAKNVFQIHGIDAKEKVVVRKQLRRSQVIAFFTALPPCLIGMEACATAHYWARELRKLGHEVRLMPAKDVKAYLKRNKNDAADAEAICEAVRRPTMRFVQIKSAEQQGQLMQHRTRDVLIRQRTQIINAMRAHLAELGIVAAQGEAGVNELRAIVADDRDERLPIDARASVIVLATQLEALQTLIGSIEKRIKMQHRSNEASQRVETIPGIGVLGATAIVATVADPMIFRSGRDFAAWIGLVPRQDSTGGKQKLGPISKQGDRYLRRILVVGAIAVLRRARENPGKYPWLTQLLTRRPFKVVAVALANKMARTAWALMAHGGTYRAPELAEAA

SEQ ID NO: 285769 - protein, 392 aa, unidentified
MSLIEGCAGLAGAEPQTWGTGLMNNIVFVGLDVHKATVAVAVAEGPRGREVRALGNFINHPDHIKKLVERLAKGGRSLSFCYEAGPCGYGLYRQLIGLGHECAVVAPSLIPMKAGDRVKTDRRDAVMLAKLHRAGELTAVWVPDDAHEAMRDLIRARSTAVRVLTKARQHLQGFLLRHGRVYAGKTGWTLAYRRWLTTIRFDHVAQQVVLQDYINAVTSAEERVERLIKQITDLAENWSQAPVVAALQAMRGVGFVVAVTVVAEVGDFTRFANPRQLMAYLGLVPSEHSSGSTVHRAGITKAGNALARRALIEGAWTYRMQARVSRKLHDRIDGLPQTVRDIAWKAQVRLCARYRRLAATGKPKVVVTTAIAREMLGFIWAIAQNVQTLRVI

SEQ ID NO: 285770 - protein, 338 aa, unidentified
MAIVMGLDQHRAQITAEWLDTVTGEVSRGRIVPADRSGARKFLARFGGQGLEVALEATTGWRFVVEELRRVGAEVHLAEAAQTSALRGSKQHAKNDRADARHLRELLMAGRLPECWIAPGHLLDLRARVRLRHTLVDERGEWQQRMQAVLYHHGLPKRAGLLTGANRSWLEKLPLPAAAREQITVALAMIDAVEVQVVPLERELRSYSHRQAGCKAIQAHYGIGPLTSVVILAELGDPRRFSSSREAVRYGGLDITVHASDKRRAPGHLSRQGPPVLRWALYEAAQTARRKTSPDHAYYRQAAERLGDNRALLSVMRKLLKRSYHTLRELGDDALAPA

SEQ ID NO: 285771 - protein, 370 aa, unidentified
MLDTTTFVGLDVHARSIKAVSLDVMTGEVRAATFGYDAGAVAEWVRSVDPGARCVYESGVTGFDLQKRLSGLGVDCVVGAVSKMIKPSADRRRKNDRNDAEFLARMLSVGNVVEVWVPDDEREAARDLTRALEDARDDLSRSKQRLSKFLLRHGFVFDERTPTGRRKGNWTRAHWSWIESIRFAEGADEEVLAYYVDAVRRAAEEKARLEGLVEGEARKPRWRRRVDSLRCLKGVDTASAADLVFEAGEFSRFRNARSFAAWVGLTPSEHSSGESDRRGAITKAGNKHLRKTLVEAAWHYLTCSGRPKDLAKGQAPDRGARRHAAKGVRRLVERREALLARGVHGNKANVATARELACWVWAVGLMAEEA

SEQ ID NO: 285772 - protein, 333 aa, unidentified
MVEGTLGSHHKEGSKKMSKHSMICAGIDTGKRKLDVAVKGRADELQVDNTPDGHRALSGWLRRHRVKRVGIEASGGYEQAVVAQLRRVGFEVVVFQPAQVRAYAGFQLQRAKNDKIDAALIADCTAAIQQIHAPPDPRLAPFAKHLTLIEQVTEDVSRLKNRRESCRDRRIGRLWSEEIARLNKIIRSERKQLVAAIRQHPDLAERLDLIASVDGIGLPTAVAILVRLPEIGRITREQVAALAGLAPYDNDSGDRVGTRCIDGGRERLRKSVYNATLAACFRWNAQLIAIYERLIAAGKTHKVARIACARKLLIYVNTVVERGTPWVKNPAAA

SEQ ID NO: 285773 - protein, 348 aa, unidentified
MVTIGVDPHKQTHTAAAVDAVGRELSNRTERAEQDGFGALLVWARQLAPEERIWVIEDCRHVSGPFERFLLDHGESVARLAPRLMADARQSVRERGKSDPIDARAVARAALREGLDMLPTARLAGPELEIRLLVVHRERLINARTRLINELRWQLHDLWPDYKIPKRALTAGRWQRSVAQRLARAEPTARVRIARDEIRRIRDLSVTIDELAQQLSRLVAHVAPQLLLERGIGVLIAAKLIGEIAGIGRFASDAQLARLAACAPIPVSSGRTDRHRLDPGGNRQLNHAVHMLAITKIIHDPETALYIAKQRSRGKTNREAIRSLKRHLIRRIYNLLRDPDQVTVTVCT

SEQ ID NO: 285774 - protein, 289 aa, unidentified
MTEHTIGVDISKFHLDVFRLEDGAAQRFENSAAGFRALVKWLGGSQVARIVFESTGPYHKAFEAAFADRYPLVKVNPLQARRFAQAYGTRAKTDAVDAVDARMLARMGAAFDLERQAPSSQEARVLRDLHVARAGLIKDRTRLRNRAQTQDLTILKRQTKARLVQFERQIVELDAEIATMIAAQESTARIREILCSMPGIGATTAAAMLTLLPEIGTLERKQVASLTGLAPVTRNPANGRDSHSSQADASLCAMPSNAICPRWQQYGSTRISKPSTDICAQQENQPRSQ

SEQ ID NO: 285775 - protein, 350 aa, unidentified
MIIIGCDFHSRFQQIAMLDPHTGEVIERRLEHENGEARKFYAGLATPARIGMEATGYAQWFERMLAEQGHQLWVGDAAEIRAAMVRKQKTDSRDACHILDLLLKDRFPQIWIPSTEERDVRQLLRHRHKLVCLRTSLKNQLQAMAMGHGICRKKKLWTAVGRKELQGLSLGPWASRRRQQLLDLLDQLEPVLEELDQAVIREAEKRPAAVRLMTQPGVGPVTALAFVLTIGPAERFPKSRKLVSYLGLNPSEESSGGRQRLGAISKQGNTMMRSLLVEAAQTASIYDPELRRNYQRLKFRRGSGVAKIAIARKLAVRLYWKLREQPSQVPPAPMQGSPAVSVVGESLSSF

SEQ ID NO: 285776 - protein, 344 aa, unidentified
MEEYIGLDVSLKETAIAIRRNVKRIWRGKCKSDPSCIAALLHERAPAAKRVVFETGPLSIWFYHALTDAGIPAICIDARHAKAALDMAANKTDANDADGLAHLAEVGFFREVRVKSYDSMLTRTLVAARTRLVTICTELSNQIRGLMKTFGLVIPAGKGATFGANVRILLDGQLSLSKIILPLLNAWRSMREQASDLSKQLMAVARASQSCRLLMSVPGVGVVTATSFVTAIEDPENFKKSRSVGAWLGLTTRRYQSGEVDYDGHISRRGDAHLRGLLFEAATVILTRSSADSGLRTWGMKLRERLGFKRAAVAVARRLSVIMHAMLKTGQLFDRAIGMGVANG

SEQ ID NO: 285777 - protein, 346 aa, unidentified
MTIVEAARGVTGGVDTHLDVHVAAALDPLGALLGTERFDTDPAGYLALLTWLEGFGALTKVGVEGTGSYGAGLARFLRRADVEVIEVDRPNRAERRRSGKSDPLDAVEAARAALGGRAKSISKSKDGAVEAIRVLVVAKRSARAARVKALTQMRHLVITAPDQLRCRLRGMTVTALTAEAARLRPSRSGDPVMAAHKASLCSLARRIQGLDDEIAELDQRIEKLLEATAPELLGCFGVGPDTAAALLVSAGDNPERLRSEAAWAHLCGVAPIPASSGKSNRHRLDRGGDRHANSALWRIVMVRIAHDPETTAYFERKVKEGRSKRDVIRLLKRYVARELYPYLPRG

SEQ ID NO: 285778 - protein, 467 aa, unidentified
MSSESCNFFWDYDPDIKPAMILRMPKCVPERECECARTSDRHLPISGNDNMNAEKEIVCGADIHRDFLVATMISRSGLKLQEQFGMDQDGLLAFRSWILDHRCLRVAVESTGNYWYPIFCILEGHVEFILANAFQIRNIEGKKTDRLDSERIAIYCLNDLIKPSRIYPKDYRDLRSITRSREALVNARSKLKNQIHQSLAVCCIKLSSVISDSFGKSGRYIIEQLLEGKTIEQIISMIPSKRIKKKADELRKAIRNGLDPVQILLIKTNLDAIDYLSEKIKLLDAEIAIKVKPFEEDLNIILSVPGIGLTSAATILAEMGDYKDFQDADKLAMYFGIVPAVYQSAGKLRTGKITKRGSKHMRRILVQVAKAISKTKKSSKLKRFFLRVFTRSGKKNVAAIALARKVLCIIYHLLMKREDYQEPEVKKNKPKIPSCVSPLSMMDIDEMIKTISQAGYLVKKGLSEGCG

SEQ ID NO: 285779 - protein, 346 aa, unidentified
MMIIGCDYHPSWQQVAWVETETGECGERKLVHATGEAKVFYQQLGSPALIGMEATGNSQWFIELVEDLGHAIWIGDAAQIRASYVRKQKTDKRDAAHILRLVVENRFPRLWTPDREQRDLRQLVLHRHKLVEMRSRVKNELQHLAMNKGMQKKATLWSQAGQQRLRELPLKPWAWCRREDLLGLLGMLNQQVGTLDQAVQKAAEEHAQARLLMTQPGVGPNTALAYVLTLGDVTRFRRGKQVASYLGLIPREESSGGRQKLGAISKQGNRLLRSLLVEAAQIAVRFDPGFRKQYLHRCHQKPKGVAKVAAARRLAVRLYWMLRTQVAYPEIVRIESSPRVPRVGAS

SEQ ID NO: 285780 - protein, 388 aa, unidentified
MQTVADRAEAPNAIRNDLGAIFISLELSRSTWLITSLSPDGGEKMSKHSVPAGDIYALLARFSEFKQKAFARTGKSFPIIVIQEAGLDGFWIHRVLQNEGIESHVVDPASIATSRRRRRAKTDRIDGEALLRTLLAYKRGEPRVCAMVKAPTPEEEDRRRLCRERKILIAERVKHVNRIKGLLFCQGVSGYKPLRRDRRQRLDELRTGDGGLLPKHLKAQIGRELARLEQLLEQIKAVEAERDALLAAQRVTARAPPAMLLNIKGIGPEFAAVLWSEGLFRHFDNRRQVASYAGLAPTPWQSGSVDREQGVSKAGNPRLRTTLIQLAWLWLRNQPQSALALWFKDRVSRNGGRLKKTTIVALARKLLVALWKYVTAGVVIEGAIVKSA

SEQ ID NO: 285781 - protein, 446 aa, unidentified
MKKRIYRRMPVNDFHPETISHSDLGGKLVFAVDVAKVDMVAALAAADGRVLHTICWKAPDQNPLVLSILRGFRGADITVEVVMEPSGTYGDVVRHQLEQSNFPVFMVSGKRTHDAKEIFDGVPSLHDAKAAAIIARLHADGLSTRLRDEGPDRRQLRAALAIMDLYQERYLQLVHRLESWLARHWPELPTVIELTSSSLMALLARIGGPADVAAHPEQATKLLLGISHRLMPDHTVAAVIACARASVGVPLVGLERDALMAIAEDAYRAHRAFATAKTQVDRLAAATPAAALAPAIGHTTAAGVYAEVGDARSFPSARAFLKAMGLNLKEKSSGTVQGQLKITKRGPSRVRQYLWLAIFRWIQTDPIANAWYQRKKQRDGGKASRAAVALMRKLAKALYHVGRGATFDSSKLFDVRRLPLAPRTTIPTGDLLLQRNLCPGQERHLS

SEQ ID NO: 285782 - protein, 415 aa, unidentified
MALKIVYKICCGIDVHKNFVVACIAKTDKQGVTTYERHHFSTYTKGLKQLLKWLLDRNCKDVCMESTGKYWIPVYNVLEHDCSIVLAHPKYVKAIRGKKTDKKDAKWIADLFKHDLVAGSFMPPADIRQLRDLMRYRFKLTCFKSSEKNRYQNCLTVSNIQLGNVVSDTFGKSSQKIIAKILENPDDTSFDIGSLIHGSMKDKLPELELAIDGYITPEQAAKLKIIKEHFDNLEARKAELEELILALANPYQQEISIILTAPGFKNTFTAIGIISEIGTNMEAFPSAKHLCSWAGLTPTNNESAGKKKSVRVSKAGCYIKPLLVQCANAAIKSKKHPEIRDRYLRIKKRRGHKKAIIAIARMLLTALYHMLKNGENYNSDLYQKSDTLPTTREITVEQAILMAQFQGYRIKSATE

SEQ ID NO: 285783 - protein, 398 aa, unidentified
MGCFVGIDVGKSKHDYAVVDAAGARLASGEFTGDAAGFEKLKRTLLKFDVEIIGMEATGHYWRNLWHALKHADFKLKLLNPTATVYFRRMSLTKHKTDALDAVCIARYMATIRPDERGLGIEAQEQLRSLARAQATLAEQITESVNRLHKQLDLSFPEFPKLLRRLDSPKSLALLESYPTAHMMGRSRKLADKKYGQQNHRIGAVLANHLQDAARSSFGCAQTASDALLIRQSVSHIQLLRGQTKVLIQEMENLVREQDQDAAHLLSVPGIAIKSAAAVIGEVGDIHRFDTPKKLTGYIGAHPRFHESGNKSGHPRMSKAGNKRLRRILWQCTIVAMQHNPIIKALYEKKLAEGKKKMVAIGHCMNKLIHIIWAVLTYQENFDPNGGMRSQMLAQNKA

SEQ ID NO: 285784 - protein, 462 aa, unidentified
MHKRGNKGRRKSNKPSPQSLPVIRPKVAGIDIGSREHWVCGPALQDGGVNVRVFFTTTSSLNQLADWLIEQGVESVAMESTYVYWIPVYELLESRGLEVVLVNARQLHNVPGRKTDMQDCQWLQLLHSCGLLRGSFRPGESICRLRSLHRQRCNLIEQRSRTVQWIQKSLDQMNVQVHRAVTDITGKTGMLIVRAIVDGERDPLKLAAFRNHRCKKSEEEIAEHLTGTWRDEHLFNLASALRLHDTLQAEVELFDLRILEVLIELQPPQRRRDNVPAHPNPQKRYDMKHRGEQAQRNELWRFAGCDLTQIDGISPSTAAIVLTEIGIDLSDFPSEKHFVSWLRLAPHRPISGGKQLSKRRNGTGSNRIAGALRIAAVSLSRSKTALGAYYRRLARRKDGKTAVFATARKLAQLVFRLLRYGQSYIDIGERAFEQRFRQNHINGLRRAADALGYTLTPHTSGG

SEQ ID NO: 285785 - protein, 363 aa, unidentified
MDVHKESFTLCAYTIDAEKGSHFQRTEADYKNVLKYLEFLRTVYGNDANFICGYEAGCLGYTLYHQLTEHDVNCVILAPTTMLEQRSKRRIKTDRRDAEIIGKCLAQHNYSPVHIPTATDEETKEFLRMRDDHKLALKKVKQQILAFCLRHNYRYDGNSHWTAAHIKWLKSLNPEALYKEILDEYLLTYTTLSDKVERLDKRIEELASKDEYRESVKKLCCFIGIKTHTALSVLVEVGDFQRFASAQNFASYLGLVPGEDSSGDGQTRLGITKAGNRHVRMLLTEASQCYARGQIGFKSKELKSRQAGNSPQVIAYADKANERLRRRYYKMVLGKSKKHNVAKTAIARELACFMWGMMTEHIA

SEQ ID NO: 285786 - protein, 363 aa, unidentified
MTYYQGLRYNSLVDLKIMFMKQKYVIGIDISKSKVDCAVIDFDYELKLEKEVFNKEKTLDAFLKTIAKQLQINQEELLVCCENTGIYNRPLEVICTRLGITLWVEHALKIKRASTDMRGKDDKKDALRIAHYAVRYYDKLVPYQEPSDIVKELNVLTKARDTMLSQKVALENQLREAKTHDIFEYELLIRAFKKSISSLYKSIKEIEKQIDLLIQKDEQIDQNKQLITSIPGIGNQGAINLIIATNNFQSFKSAKHLACYAGVVPFKNQSGTIVKKERVSKMANKTIKKLLHLSAMAAIRSDKELKEYYLRKVAEGKNKMSVLNAVRNKLVQRIMAVIIRKQAYLSREDYFYQKRNNFACLLT

SEQ ID NO: 285787 - protein, 334 aa, unidentified
MTAIVTETLLAFDVGARTHEFVHETAGKLEQGQLQNDISAVRSFLARLLKDGRRLRVIMEATGIYFLDLALVAHELGAEVVVINPKAGHHFAKGLGLRSKTDAIDARMLLEFLRRMPLTRWEPPARECLQLRQIGRYLVQLTDESTAAKNRLHALESTEETPRFLREDLRRSIRSLEGRLERIRAQAIELIGRSESLNAAFQALNSMVGMGDKSAVAVLGELCVLPRSLSGRACTSHAGLDVRHHQSGTSVNKPGRISKHGNKYLRRALYMPALSAGTHDPHAAAFKQRLQARGKKGLQINTAIMRKMLTAAWAIVRDPTPYDGARLYATIETP

SEQ ID NO: 285788 - protein, 417 aa, unidentified
MVERCAGLDVHRDNVVATSRVPGQGRRRFEQQTQTFTATLPGLTELAAWLAAAGVTLVGMEATGVYWKTVFQALEGQFECWLLNAHHLRNVPGRKTDVKDSEWICQLVQHGLVRPSFVPPPEIRRLRDLTRLRAAQNNERTRTIQRLEKVLQDAGIKISSVASTSYSKSARAMLEALLSGVSDPDQLAELSKGRMRAKIPQLREALQNRFTIEHHGVMVAQLLAHIDTLDTELQHLSERIELVLAPHAHIIELLSTIPGVQAHAAQVLIAECGLDMSVFPTVGHFASWAGACPGHHQSAGRRKSGRTRPGPKWLTSQLTECARAAVRTKETYLASHFAQLRGRRGEPKAIGAIRHDLLVAYYHIVRDQVPYRDLGPNWQRKRYSVEHRASRLQRQLEALGYTVTLDKTDPAEVEQTA

SEQ ID NO: 285789 - protein, 427 aa, unidentified
MNGIEFNSIDRFRQFKKEIRGSKDHLIVGLDIAKRKHHGFFGDANGRTLLKGLIVENSAEGFRHLLTQVRFYMDREGLKQFVFGLEPTSVYHKPLAEHLIEQGHLVVYATNEAIKKNRSLIDGRWDKNDTKDSANVADLVAQGKCHYYDRPELRLRELRSLLLFRKRLKKQLHSCRVRIRNNLVARYFPELDRFWNNAAAENLAIVRWFLDPGSIRQLSCEQFIVKVTTHNGGLRQQRRLRHIWEAAGQSIGCRPGPAMALEAELVVEMLQSVQAQLSRVERAIQKIAEGFEEYDYLKSIPGFGPYVSAMALAAIGNPHRFENRAQLIRLAGFDLSANRSGEKSKAAVPVISKKGKADLRYALYQAALVASSLTSHFRAYYSRLLDGRQREKGIRTKMLVKIAAKMLVIAWTLMKRKESFNPAHIQA

SEQ ID NO: 285790 - protein, 343 aa, unidentified
MQTITTIGLDIAKSVFQVHGVDAEGKVIIRRQLKRRYVLAFFRKQAPCLVGIEACASSHHWSRELKALGHTVRLMPPAYVKPYVKRQKNDAADAEAICEAVTRANMRFVATKTPEQQSCLMLHRTRHLFIRQQTAVINAIRAHLSEFGIVAPVGRNGVEELLDVVADPSDKRVPEIARACLLALGAQLRKLKEQILEFDRMIRAWHRSSEMSMRLDEAPGIGPVLATALVATVTDPKAFRSGRNFSAWIGLVPKQHSSGGKDRLGSISKQGDRYLRSLFVAGALAVIRYAKIHGTKRRPWLTALLARRPTKVAAIALANKIARMVWAMMVRGERYKQPVALAA

SEQ ID NO: 285791 - protein, 430 aa, unidentified
MKSNTQNAKIEAITEKTLVLGIDVGSEMHYARAFDYRGIEYSKKPFKFSNTEAGFVTFKEWILDLKERHEKDKVIPGMEPTGHYWFNLGKFLQDNEMKPVLVNPHHVKKSKELDDNNPTKNDRKDPKVIAGLVREGRYMIPYLPDGVYADLRTASNIRFQLQAELTRIQNRISRWFNIYFPEYKTVYGKPDAKSGMLILKAAPLPEDILTLGIDGVNQIWRDAKLRAVGKARAKTLIEAAEHSVGSKEGAVSARMEIRMLLEDYESRNTRLQEVMVLIEELVRKIPMAEKLLEIKGVGIRTVSGFLAEVGDISRFNNPKELQKLAGLALVENSSGKHKGETTISRRGRKRLRYLLFEVAMSLVSKNQEFRKLHNYYTTRRLNPLKKMQSLMAIAAKLIRVFYAILTKGVDYDPKKMVSDIKRPAVYLQAA

SEQ ID NO: 285792 - protein, 378 aa, unidentified
MQRLIIYLGIDVDDNSFTCVGVNSDGHEVLGFKTKPSAEALIKKIKSIKNSDILSCYETTYIGFSLARKLIEANLNCSVVAASMIPDIPSDMVKTDRIDAQKLALYFSKGLLTTVRIPDQLDETVSHLTRLRKAIQNQLKDSRLRLQSECRVFGISPIKINRYNKTAKASALMEINQVKYEPYREILIMQVDYIFKQCEQLQNIEKQIENWSEHERYKNRSEALCCLRGIKTLTAMTLISEIGDIHRFAHPNKLVSYLGLDIKEYSSGGREKKYGITKMGSSRLRTAVVESCQILPKSSIARPKLMSRRSMVPLEYIRVAKKHDERIYNKAMRMNMRGLHGNKIKVACARETVGFIWEMLKIVDQETRSPVSNTKEQP

SEQ ID NO: 285793 - protein, 317 aa, unidentified
MPQSERIVGIDVSKRQVEACLRARQERLSQPSTPAGRRAMIAWLRQHDVAVAVMEASGGYERDWAAALRGAGIAVRIVDPKRVRYFARSAGRLAKNDPIDAEMIAWFAETFATAAAPAHDPEREAVDRLMTVRALLVRLESQIGQLGEHRQPPLVERAGRAIAGVIVRQRKRLETAIAARIARQADLAERHRIIQSVPGFGPCCAAGIIAWLPELGQIGGKPATALVGLAPYDDDSGGHHGERHIKGGRREIRDLLYMAALAAIRRNPVIKAHYRQLRARGKKFKVALVACMRKLVVILNTMLMRGQMWNPPAAAVA

SEQ ID NO: 285794 - protein, 393 aa, unidentified
MKSTTEKSNRIIGLDMHPDVFTAAAVERSSADQAKTLWVKDRLATARLEDWAKKSLKEGDLLVLEASGNSFEVASRFHALGYTCLVLESHQASKIKENFCNDDRHSAVKLARVYLSGLAKIVWQPDEKTRELREVFFTHRAAVKDCTRLRNRIRTFLNEHCIRLPKGTPLTQQRGLDRALSLRKWSDLQVELITDSFEQLWNIENRRKHLEELMIKELLKRPKWIRLWRLMGVRHIVAFALMAMIGEVNRFPTAKKLVGYFGLSPRKVQSGNNAKGRGRGIGNIGRGDVRALLTQAAQNAMTQRSSPLHKWGWKLAMKKNRNVAVAAVARKLTVAIWHLLKGHFTPLLELTKHLTTKLLHLATLLGKENLKEAGFQSRNEFVQYHFKNIQLSS

SEQ ID NO: 285795 - protein, 347 aa, unidentified
MNFYNNMHPYYCGIDLHARILYVCIIDQLGEILVHKEISANPQKLLKLLEPYIGNIVVGVECMHCWYWVSDFCQSRSIDFILGHALYMKAIHGGKAKNDRIDSFKIAKLIRGGNFPLAYVYPKEMRATRDLLRRRTKIVRHGATLKAHVSNTTSQYNLPPNNVNLKNVCAREQLKSVFPDPVVQRTVDLDMAILDAYAKELSKVEWFIGQQAKQHNPVHLKLLKTVHGIGAILSLTILYEIGNVNRFESVQNFASYSRLVKCKAESAGKSYGTQGNKIGNAHLKWAFSEAAVLHLRGNDKAKKYLANLQKRMSKAKALSVMAHKLGRCVYFMLKNETVFDENRFLKG

SEQ ID NO: 285796 - protein, 413 aa, unidentified
MDVLHTNCAGLDVHKKTVVATVIISTERGKPIKATRTFATMTGDLLALSDWLMSYQVTHAAMESTGEYWKPIYNVLEDNFEIWLVNAQHIKTVPGRKTDVKDSEWIAELLRYGLVRASFVPPKGQRELRELTRMRSSFVKERASLVNRLQKVLESANIKLASVASDVNGVSGKAILQAMIAGGSTPEQMAELAQGRLRRKRELLSQALKGYVKPHHRFMLSELLLQIDGIDETIAKFDEQIQEYCHPFEEAIILLDTIPGVARQTAEVIVSEIGVDMSRFLTADHLASWAGVAPGNNESAGKRLSGRTRKGNQALVSALTQAAHAASRKKSSCLYAQFHRLAGRRGKKKAIIAVAHSILIIAYHMIKLKVPYHELGSDFFDKRNVQAITIRMVRRLETLGYKVNLEALTPITA

SEQ ID NO: 285797 - protein, 373 aa, unidentified
MKYTKFVGLDVHKDTIAVAVAREGREAAEPLGTIINSPEAIAKLVRKLGPAKNLYFCYEAGPCGYGIYRQLTAAGSTCMVAAPSLIPRKPGEKVKTDRRDAKKLAQLLRSGELTPVWVPDEKQEALRDLVRAREDAQEDIIRKRNQISKFLLRLEKRPPSGVKNWTMKYWQWLNSLAFSQAAQGIVLKEYIHALEEAEAREKRLEEEITELVRYSEQAPIIAAFQALRGVGLITAATVVAEAGDLSRFDSPKQLMSYVGLVPSESSSGGSRYQGRITKSGNAHIRRVIVESAWHYRRQPSIGAGLKKRQEGQSEEIKAISWQAQHRLNLKFRRLSGRGKPSQTAAVAVARELLGFMWAISQEIRQKNNLKKIS

SEQ ID NO: 285798 - protein, 412 aa, unidentified
MEGETVIAGVDTHKDVHVLCLLDGLGRKIWSGSFGADPEGYDRLAEAIGDPGSCMVVGVEGTASYGAGLTRRLVELGYNVVEVLRPKRDKVRPGEGKSDPLDAERAARKAASGRGCSVPKSQDGWVEAVRQPYVARRLAVATSTSCVACAKSMLTTAPSALRERFRGRERPKDLMPLLARGRKAGDALEESVLASLRSVAAVWKEARSQVESLDERIRALLEANAPALLGVEGCGTTTAAALVVAAGDNPGRLKGEAAFSMMCGASPIPASSGKTDRHRLNRGGNRQANWALYEIAIKRMAYDERTRRYVARRTSEGKSRREAVRCLKRYIAREVYHVLMDPNPDGAAPEGPELAKMRKAMRVTQKKAAAELGLSAATLGHLERGKRRSTKLERRYYELLCELKGALPQTAS

SEQ ID NO: 285799 - protein, 366 aa, unidentified
MKQITTFVGIDAHKKDLFVAMLSGQEKAPVTWQLANEPTAVRRLVRKLEREAAGPVHVFYEAGPCGYALQRQLTTARVRCDVIAPALMPRKPGERVKTNRRDARKLAELGRAGLLTVVQPPTPADEAVRDLARARDDAREDLQRCRHRLGKLLVRRGLHYTGRNWTQAHRRWVDSLTWTHAAERAVVDDYLLAIDHTEARLLELDARLAEIAEQEPYREPVGWLRCFRGIDTLTAMLILAELHDFRRFASARALMAFLGLVPGEDSSGEKHRRGRITKMGNALVRRVLVEAGWHYQHRPGVGRALAARRRGQPSRVIAIADKAQQRLCRRFRRMLAEHKPAPKVAVAVARELAGFIWAALQPPVAA

SEQ ID NO: 285800 - protein, 341 aa, unidentified
MKPEMSVLGIAIAQRVFHAVGMDERGKIVLRKRLSRHDLMPLLAKLPPGRIGMEACGGAHDWARRFRAQGHEVKRMAPQFVKPYVKSNKNDSRDAEAIAEAVTRPTRRFVPIKDVDQQDIQALHRVRARLIGERTALINAGHGLMHAYGIVMPKGVSKFRQAVVEKLESEKDKLTALSQEMFWKLVEEFAALEKQLAYYQEKLDTLATTHPECQRLMTIPGIGPLTATALVAAVSDASAFKNGRQFAAWLGLVPRQHSTGGKERLLGISKRGDSSRRKLLMHGARATLRWVGRKTDRRSQWMRQLVERRGHNRTVVAIANKNARIVWALLTSHQAYEPAKG

SEQ ID NO: 285801 - protein, 332 aa, unidentified
MQTVQQIFVGLDVSKDEFLSAHPDKNAGSGWSKAKIINEVAMIKKWLMEVGVANKHFVLEHTGNYSQRLIHCLDELGATFSVVNPAQSRAMSKVLMKTSKTDDQDAQTLSRLGQNLLTKPYQMPPKAKRMRKEAFNALCALQKQERQLRNQLHAVEFLVDPNEAVLEAFNSVLRVVKKQIEHLQAQLRPEVDQVQEKQLVERIKSIKGVGKATAEAVVALFGDLSAFDSAKAFTKFIGLAPSEFTSGKSVRGRSSITKKGNAKIRALLFNCARSAMNYNTFCKALYQRIIAKGKNGKVALTAVMHKLARQIFGVVKSGVDFDPKFTIQKNCV

SEQ ID NO: 285802 - protein, 346 aa, unidentified
MQYYTEQHRHTCGVDLHGRNLYLCVLDPDRQIVLHRRYDCDEEKLLRALAPYREDLVVGVECMFKWYWLADLCDEQGIPFVLGHALEMKAIHGRKSGNDKLDAERIARLLGSGMFPVAYVYPREMRATRDLMRRRSHMVNQRSALINHIQVTNLQYNLPELGRISDPDNREGIIDQFEDPAVRESVQADMSVIDILDVVIARLERTIIKAARGHDRHAFTLLKSVHGIGDVIGLTLLYEIHDINRFDSLGGFLSYCRLIKCEKTSDGKKKGTGGRKQGNHHLKWAFSEAAALFLRGNPEGQKLHSRLLKKHGKAKALGIIAAKLARSVYYMLHRNTPFDMDRFVRT

SEQ ID NO: 285803 - protein, 408 aa, unidentified
MKVLNRRCAGLDVHKDEVVACVRLAMRNKLSHEVRRFATTTRGLLELADWLEASGVTQVAMEATGVYWKPVWHMLEERFQLVLANAAHVHNVPGRKSDVNDATWIADLMAHGLIRASFVPPAPIQELRDLTRTRKQLGREIVQHTQRIQKVLEDANIKLSSLITEVLGASGRRILKALIAGESDAGALAALGGPRLKCSRQELRDALEGRITSHHRFLVGQHLRMIEELEATVTAFDARIEAVLAPFRDAAERLMSLPGISDVAAQVILAEIGTDMSSFQTAGHLLSWAGLTPRLDESAGKRRSTRLKKGAPWLKPVLVQCAFAAARAKNTYLQAQFLRLKARRGPKKAAIAVAASILTAVYHMLRDGTFFRDLGPDHFARYDKTRAAMRLVRRIKDLGYDVEIKAAA

SEQ ID NO: 285804 - protein, 346 aa, unidentified
MKKIFIGIDFSKEKFDATVIKAEGVEERAERKHEVFDNKVSGFRRLLKWVKSVVDEQDTSLWLFCGENTGGYSKALCNYLYGSGYDMWLENAMSIKRSSALQRTKSDKADSGIIAEYAMRNYDQMCLYKPLGKNLERLREVFLYRHNLVKLKASMTTRKGEKKLTQEKSDISRFMAMSSKHLISEFNKKIEECDMRIQKIISEDEDLRRNFEIITSVPGVGTQNAVCLMVYTDNFNRFDFDSRKIACYYGVAPFGRQSGTSVNTPPHVSPFANKLIKALLTQAALASVNFCPQMAIYYHRLVEAGKKKPVAVNNIKNKLLHIITAMVRKGEKYNPDHDYYAALKAA

SEQ ID NO: 285805 - protein, 328 aa, unidentified
MFYLGIDVAKAKLDCCLLLDEASGKRKTKVVKNTQSGITDLLAWVAKQNVSPDALHIVMEATGIYHEQAAMALADAGVMVSIINPAQVKDFGRGLAVRTKTDGVDSVVLARYGALLKPKAWVPPPLEARVLQALLVRREALVQDLHRERNRQEKAGATDTPALIHKSLEESIGFLVRQLAQIQKDIDEHIDKHSDLQKDRALLQSIPAVGPQVGSNLLSVMHNHDFGSAEQLAAYLGLVPVERQSGSSVLGRARLSKAGPARIRAVLYMAAVAGIRYNPHVKAVYERLLARGKSKMSSLGAAMRKLVHLCFGVLKTQQPYQHNYLKNA

SEQ ID NO: 285806 - protein, 322 aa, unidentified
MSQPNQICVGIDVAKGSLDICVGTGKASFTVINSTDGFEQIIKALKSVSVSLILMEATGGLEAPVAYHLQAEGYEIAVVNPRQARDFCRAMGYLAKTDSIDARALAQMADVINNHPERERFILALPDNQRQVLTALVARRRQLVGMLVAERNRLHTTHPAVMKSVECLICALNGELELIDIEIKEHVQKHFIDLSALLRSVKGVGPTTIASLLADVPELGNLTRREICALVGVAPVNRDSGKMRGRRSIFGGRASVRTALYMATLCAVRFNPALKTFYTRLVLAGKPKKVALVASMRKLLTIINAMIKKGEEWDNTFHNLAC

SEQ ID NO: 285807 - protein, 360 aa, unidentified
MLYLAIDQHRKQLTVNLRNEQGDVLLKRQVSTQWPRVRKFLEEVQKESQAEGGFVAILEVCGFNDWLLKLLVEYGCRETIIIQPEKRSKKKTDRRDANTLGEILWLNRERLLTGKNVQGIRRVQPPSQRDAEDRQITAHRKRLGQLRTRTINKIKHVLRKHNLEQECPTKGIDTIKGRKWMVQLALGVIDRLEMDQLLAQWQLWNEQLAKVEAEIKKRQAESKTAAVLATIPGCAAYSSLALACRIGSIERFPRPGSLPNYWGLTPGCRNSGQATDRLGSITKQGSAMARFILGQLVLHVLRRDPWMKAWYGRIKKRRGSKIARVAVMRRLATIIWHMVKHNEPYTIGGPPRRKLKVQAA

SEQ ID NO: 285808 - protein, 346 aa, unidentified
MMIIGCDFHPSWQQVSWLDTETGETGEQKLVHATGDAERFYRQMPVPSLIGMEATGNSQWFMELVEDLGHALWIGDAAQIRASYVRKQKTDKRDAGHIRKLLAEGRFPKLWTPDREQRDHRQLVMHRHKLVQIRSRVKNELQHLSLNKGMQKQNKLWSAAGQKALRELPLKPWAACRREDLLQLLAMLDQQIGKLDAAVQQAAEHNPHAKLLMTQPGVGPVTSLAFVLTLGDVSRFPRGKQVASYLGLIPREHSSGGRQMLGSISKQGNRLMRALLVEAAQTAVRYDPGFRKEYLHRCHQKPKGVAKVAAARKLAVRLYWMLRTQKPYPEIVRIESSPRVPLVGAS

SEQ ID NO: 285809 - protein, 413 aa, unidentified
MDILHTNCAGLDVHKKTVVATVIITKESGNPFKATQTFGTMTGDLLELSDWLMLHGVTHAAMESTGEYWKPIYNILEDNFEVWLVNAQHIKAVPGRKTDVKDSEWIGELMRHGLIRASFVPPKGQRELRELTRMRSTFVKERATLVNRLQKVLESANIKLASVASDVNGVSGRAILQVLITGRSTAEEMAELAQGKLRRKRELLSRSLQGLVKPHHCFVLSELLLQIDGLDETIARFNGQIQEYCHPFEEAVGLLDTIPGVARHTAEVIVAEIGVDMSRFPNANHLASWAGVAPGNNESAGKRLSGKTTKGDRALVSALTQAAHAASRTKNTYLSAQFHRLAGRRGKKRAILAVAHSILIIAYHLIKDRVPYFELGSDFFDKRNVQATTRRMVRRLEQLGYKVNLEALTPVAT

SEQ ID NO: 285810 - protein, 332 aa, unidentified
MMDLQGTIIDEFTFTNNYDGIASLASRLTMDDRVVMESTGSVWTNLYNHLDDAHIPVVLANPLKTKAIASARIKSDEIDARILAHLLRTDLIPESYVPTKEIREVRALIRHRTSIVKIRTMVKNKVHAIVDKNGLEHDELFSDLFGKAGMQWLGTIRLPSLDRLMLDNHLDHLESLKKQIHAVDQEIHARASRDEDVRLLLSMTGVDIFTALLVRSEIGNISRFPEYKKLISWAGLAPSLHQSGSIEYHGSITKQGSKMLRWVMVEAARVAVNHDEKMRAFYARVKYRRGDQKAIVATASKMLKIIWFMLARREPYLSRNQRRYEEKLNTIE

SEQ ID NO: 285811 - protein, 341 aa, unidentified
MGEYIGLDVSLKETAISVRRDGKRIWRGKCPSDPSLIAEVVRKHAPEPKRVVFETGPLSVWFYHALSAEGLPAICIDARHAKAALDMAPNKTDANDADGLAHLAEVGFYREVRVKGYDSMLVRTLVAARSRLVQITTELSNQIRGLMKTFGLVVPRGKGAPFEAEVQRLLAGQEELARIILPVLEAWRSVRTRASGLGRQLLACARQSAACQQLMSIPGVGAITATSFTAAIEDPANFKTSRSVGAWLGLTTRRYQSGEVDYDGHISRRGDAHLRGLLYEAATVILTRTHADSDLRRWGLMLRERIGFKRAAVAVARKLAVIMHAMLKSGEVFNRAVSAPA

SEQ ID NO: 285812 - protein, 377 aa, unidentified
MTQFPESPCNEPSIHAALELSKNSWLLALQVPGRDNPSHHRIKGGDAEGLMAKLEAARGRVAKVTGRMPKVTLCYEAGYDGFWLARFLERHGIVCLVMDPASLRVSRRARRVKTDRIDVESILHTLIAWCRGERQVCSMVVIPSVEEEDLRRCHRERDRLIRERTAHINRIKGLLFGQGIRGINVKARCKTLKPAALVTGDGRPLPERLGREITREIERLAQLQAQIVEIEGERDKAPTPCVATERKRHDLLRLKGLGPALSATLTREVYYRQFANRRQVASYIGITPSPYDSGDGRRSQGISKAGNRLARVAMVEAAWLWLRHQPDSALTRWFHQRTAGQSKRVRCIMIVALARKLAIVLWRYLETGLIPEGAVVK

SEQ ID NO: 285813 - protein, 356 aa, unidentified
MKISRIGMDIAKNVFQLHGVGSFEQIVLKKKLKRADVLAYFRTLAVCQIGMEACGGAHHWARSLIAMGHSVLLMAPQFVKPYVKTNKNDAADAEAICEAMSRPGMRFVPVKTVEQQDIQALHRVRSELVKQRTAKGNQIRGLLAEYGLVVQKRIECLRVALPELLEDADNGLTCEFRALLDGLRLDLVGLDERVGQLDRQIVQMCRASVAAKRLQEIPGIGPVTASALIAAVGDGSGFKRGRDMAAFLGLVPRQHSSGGKEKLLGISKRGDSYLRTLLIHGARSVQRVSVNKTDPSSRWLNAVSARRHKNIAAVALANKTARMAWAVLSKGQAYRVPAQHDERIGPVLPVAANGQH

SEQ ID NO: 285814 - protein, 406 aa, unidentified
MLFVGDDWAEDHHDVEVQDETGRRLAKARLPEGISGIARLHAMVGRFLPEDVDAAEVKIGIETDRGPWVAALVASGYQVYAINPLQSARARQGQDVSGAKSDAGDAHVLADLVRTHCHQLRTVAGDSEQAGAVKVLTRMHQSLIWDRTRLVLRLRSSLREFFPAALEAYKDLASPEVLELLTKAPEPSRAAALTRAQISAALKRAHRRDRDAKTTAIMAALRTEHLTQPPIIAAAYGATVRALAALITTSNEQITALEGPVEACFGRHPDAEIYLSQPGLGPILGARVLAEFGDDPTRYDGARARKNYAGTSPITRASGKKKVVLARYVRNKRLTNALHQQAFSALSGSPGARAYYDALRDRDIGYNAALRQLGNRLVGILHGCLKTHSRYDEVTAWDQHTQRVAA

SEQ ID NO: 285815 - protein, 317 aa, unidentified
MLCAGIDVSKPHLDLALVSTTAKPTRLRFPNTPEGRQALLAALAHHRPTWVALEPTGAYHLPLLQLLAEKGLQVALVNPYHLAAFRRATGERHKTDRQDALLLARYAQVCGESLRAYTLPPKALQELKALVGYREDLAQRERAILNQLEAARWAGSAEVIPLLQRELACVEGLLGEVEARIQALLTALPEAEVLMGLPGVGPQVAAAVLALLPPHLWGRAKAAAAYAGLIPEREESGKSVERSRLSRKGPPLLRRKLFMGALVAVRHDPEMGAFYRRLLSRGKRKKQALVAVAHKLLRRMMGRLREYYAGQSLQGVA

SEQ ID NO: 285816 - protein, 326 aa, unidentified
MTSWIGIDVSKAHLDGVLLNAQGHQHTQVSNDKHAFRTLENFLKKRCPQGGHVCLEATGLYGDAVAEFLFQHSYVVSVVNPARIKAYGDSQLKRNKTDRADAALIADFCRTQPPDPWQPPAPQVKELRALLRHLDDLQAMRQQESNRAQSGEQSLTVLGQLQQHITFLDTQIQALKHQIDDHFDQYPDLKRQRDLLTTIPGIADLTAGRLLGELSERRGFHSARQVAAFVGVTPRQHRSGSSIHGHSRISKQGNAALRAALYMPALAAKRYNPILKAFAQRLHARGHSKQSIVVAVMHKLLHLAFAVLKSGQPFDPLYLDKRLVTP

SEQ ID NO: 285817 - protein, 419 aa, unidentified
MKQIQTKKLKVVNEKTLIATVDVSKDKHTGYCRCSNGAETKPFDFSNNIHGFNEFWECITRMKEAHNMEEIVIGFESTGSYAEPLIHYLRKRPVKLVQVNPMHTKRLKELNGNSPSKTDYKDPKVIADIVELGHALTVVIPEGSAACLRRLIHARERAIQRRTALFNQLQDMVFLIFPEFLQVMKDIKGKTAKYLLRHYPTPESIVGCGLLGLTDTLRRVSRGKLGKDRAEELFKAAKTSIGIKEGQSSILLEIKEMLTIIETTDHFIAKLEAEISYHLKEIPYSRYILSIKGVGEITAAGIIGEVGDFGSFDTIPEIEKLAGLDLYEISSGRHRGRRRISKRGRPLMRKLLFFAAINVVRKGGILHEWYQESLKRGMQKIKALVAVSRKLLRIIFALVRNHSEYVTGYLKPKELKMAA

SEQ ID NO: 285818 - protein, 367 aa, unidentified
MDPLHLQTGLKWAKMEFRTNHLLKRSGSPMKITTIGIDIAKSIFHLFAVNQIGRLVKKNQLKRKQLLSHLAKIEPCLVVMEACGGANYWAREIMALGHEVKLIAPQYVKPYVKGNKNDYNDAEAIAEASQRPNMRFVPIKSIEQQDIQNFHRQRERIKKERTALVNQTRGLLAEYGMVINKGVAAVRRDLPLILEDAENGLNMLSRELFSELLDELRVLDKRFEDCEKRIKALNKDNEICQRLDEILGIGGLTASATYAAVGDGKEFSNGRHYSAWLGLVPGQHSTGGKPALLGISKRGNAYLRTLYIHGARAVLRYSATKQDSFSRWAQAVLARRGHNKACIAVANKIARMAWVIMAKGESYRTPA

SEQ ID NO: 285819 - protein, 480 aa, unidentified
MAKRKLSTFQRLHLDQLNRRQRKQLQQQLHSADPGLQIVHSDAAGIDVGSRSHFVAVPAGRDPQPVREFGSWTADLQRLAAWLQACHIRTVAMQSTGVYWIALQEVLEQAGLEVYLVNARGTKNLPGRKSDVQECQWLLKLHTYGLLRNSFRPPEQIRAIRTIWRLRDRLVRDAGRAIQQMQKALTSMNIQLANTISDLSGVTGLAIIRAILNGQRDPRQLARLRDPRIQATEEEVAASLDGHWREDILFELQQVVEAYDFYQKQMAACDRRLQQYLAALPEAKQPSAVPDGEPSRHPTKKPRHSQSRRKNQPAFPLEAELHRIFGVDLTRIDGINILTAQVILSELGTDLSAFPNEAAFSSWLELAPRRDITGGKVIKQKSRESKNRVANALRMAAEALSHSDSYLGARYRRLRARMEGPKAVKAMARYLACLVYRLLTKGQDYIDRGAAYFEAKRTQRDLLSLHRKAAQMGMRLVPAS

SEQ ID NO: 285820 - protein, 418 aa, unidentified
MKRVIGMDIHRTFAEVVIWEAGQLRPAGRVDMSRAGLEGFGRTLSKEEDEVVIEATGNAMAVVRALEPHVARVIVANPMQVKAIAYAQVKTDKIDAGVLASLRAANFLPEVWLPDTDTERMRRQVARRNQVVRHRTRIKNEVHAILHAHLVPCCPHDLFARVGRDWLGRQTLPDDERAAVARHLRELDRLGEDLDVLDRDIAQAAINDPVVKRLLTITGVNLIVAAGLVAAIGDVRRFASSEKLVSYVGLNPRVRQSGLGLAQHGRISKQGRSHARAMLVEAAWAAAKAPGPLRSFFLRIRARRGHQVAAVAVARKLAVLCWHLLTKEVDYQWARPALVANKIRAMELQAGQPARKGNKRGSTYVYNVKELRDREIDVARHAEQVYEQFVRGWQRRAPTKRRTGAAHEGATMKAARPS

SEQ ID NO: 285821 - protein, 340 aa, unidentified
MVNRTAVGIDIAKNVFQVHYIDQETGEIVNKPVKRAKFLEHFANRAPCLIGMEACGGAHHWARQLTKMGHEVKLMPGEFVKAFNIRNKNDAADARAIWLAVQQPGKPVAVKTEMQQAMLGLHRMRQQLIKFRTMQINNLRGLLTEYGEVMSKGRSKLDNEIPVVLERIAEHLPAVIIDTFREQWNGLAKLDDQIAQIERRMSEWKKEDKSVKAIGEIPGVGLLTATAAVAMMGDPKAFSSGREFAAWVGIVPRQTGSGGKVNLHGISKRGDTYLRTLLIHGARSVLEHAKEPGEWLEQMKKRRPKNVVIVALANKMARTIWAVLAHDRPYRKDYVSVKPA

SEQ ID NO: 285822 - protein, 366 aa, unidentified
MIEAVVERCAGIDVGKKFVLVCVMTGAAKDEPQTKIKKFGTIVSELERLAAWLVDEGCTHAVMESTGSYWKPVFNLLEAHVRVILANAADVQNRRGHKTDPNDSRWLAHLLRHGMIRPSFIPSLPIRELRDLTRRRRQLIGENSRERNRVQKVLEDANVKLGDVLSDVFCVSGRLMLQALLDGELSPDQIAELAKKKARVKIPQIAASISGHRLTDHQRFLIRHALRHLQFLDDEVEALNQEIRRRMEDPALGEAFLLLQSIPGIKQESAASILAEVGADMQQFPTSAQLSSWAGLCPANHESAGVKSRVRTNRGNVWLKTTLTQSAWAATNRKGSRLQLRYYALKARCGNKRAIVALGHTLLRVC

SEQ ID NO: 285823 - protein, 356 aa, unidentified
MTNAIPMDVIIGVDTHKDVHAAAAISGAGVYLATITVPASSNGYGALEAWAKSMGAVQAFGIEGTGSYGAGLSRFLRERGHTVVEVNRPNRQLRYQQGKSDAVDAESAARAVLSGQAVGQPKSGTGTVEMIRHLKIARDTAVKARTQAMQTLKAIIVRSPDALREQLDQVSGKMTLLRRLAALRPGPLTSTLASAKASLRSIARRWLLLDAEIKQHDAHLETLTAARAPELLEAHGMASGTAAEMLLLVGDNPERIHSEAAFAKLCGACPIPASSGKTIRHRLNRGGNRQANAALYRVVIIRMRGHQPTLDYVRRRAAEGKSKSEIIRCLKRYVAREIFGYLCRKPALADEAATSS

SEQ ID NO: 285824 - protein, 388 aa, unidentified
MNVEADKSEPFTAIRTDLGAIFVSLELSRSSWLITSLSPGGGEKMSKHSVPGGDFAGLMERFAQLQEKARLRTGQSFRIIVVQEAGLDGFWIHRALQNEGIESHVVDAASIATPRRRRRAKTDKIDGETLVRVLLAYKRGEPRVCAMVKAPTPGEEDRRHLCRERKALTAERVRHVNRIKGLLFSQGISRYQPLRRDRRERLEELQTGDGRAFPQHLKALVNRELDRLELLLKQIKAVEAARDALLAVGQTAKPAPAAMLLGIRGIGPEFAAILWSEGLFRHFENRRQIAAYAGLAPTPWQSGAVDREQGVSKAGNPRVRTTLIQLAWLWLRNQPRSALSVWFHERVSRNGGRLRKTTIVALARKLLVALWKYVTAGVVIEGVRMKVA

SEQ ID NO: 285825 - protein, 353 aa, unidentified
MDKITRVGVDLAKNVMQIHAVDGAGRVVVRKAIARQRFLSWFANLEPCLVAMEACSAAHYWARKLRALGHDVRLIPPQFVAPYRKGGVHVKNDALDAEATCEAASRPHMRFVPVKSPAQQSVLVLHRMRTGFVEERTALVNRLRGLLAEFGIFLPQGIDQLRKHFVERVEDGSNELAGPARQALMRGWSQWHALDDEIAWLDRQIAEHARHDPQARRCMDVCGVGRLTASAAVATVVDAQQFKNGPQMAAWLGIVPRQKSSGGKQRLGRITRQGDTYLRTLLFQGARSAVLTAHRRNDRLSRWIVQLRARVGYYKTLVAVANKHARILWAVLAKGERFDPSYAPARTGGAAGA

SEQ ID NO: 285826 - protein, 482 aa, unidentified
MKPSQQKPLKEASCHRARVGWQGMNRKQRREMTRKIQAADLSLEVVHPDAAGIDIGNEAHYVAVPPTRDDEPVRRFGCTTAELRDMAGWLKQCRIRTVAMQSTGVYWIAVYDILEAAGLEVYLVNARETKNLLGRKSDGQESQWLMKLHTYGLLRNSFRPPQEIRTMRTYWRQRNDWIRSAGRHIQRVQKALTQMNIQLANVLSEVSGVTGQAIIKAILAGERDPHELARFRDRRVKASADEIARSLEGNWQEDLLFLLQQEQDSYEFCQKQMSACDERLQHFLQRREDRSAGASLPEEKRKERLKKKKTNKPRFDLRAELFRMTGTDLTQIDGIDVRTAATVISEAGWNMSKWRTEDHFVSWLRLCPDNRVSGDKIIGKGRLPITNRLTVAPRIAATTLRPSRTYLGAQFRRLKTRLGAPIAIKAMAAKLARLVYRMLRYGMQFVDQGAEFYQARHRQREINSLKRKATNLGFQIIEAPAA

SEQ ID NO: 285827 - protein, 345 aa, unidentified
MTEVITIGLDLAKSVFQVHGIDASGKPVVRRQFRRRQVLPFFKKLPPCLVGMEACATSHYWAREIAALGHEVRMMPARYVKAYVKRNKNDAADAAAICEAVTRPTMRFVAVKSAEQQSVLMLHRGRELLIRQRTMLVNALRGHMAELGIVAPQGLPRVKGLLVVIADEMDARVPPVARSCLAGLARQLMSLGQEIGQIERAILAWHRSNEASRRLEAIPGIGPITASALVASVTEPSLFKSGRGLAAWIGLVPREDSTGGKTRLGPISKQGDPYLRWLLVVGAMSVIRQARRKDPANMPWLARLIARRPIKVAAVALANKMARMAWVLLLRGEAYRPPAVAPAAR

SEQ ID NO: 285828 - protein, 407 aa, unidentified
MLNAVGIDVAKRKSTVTIRRPGDEIVLPPCDVHHNQAEINELIDYIKDLEGETKVCMEHTGRYYEPIAHWLSSAGIFVSAVNPILIKDFNDDDTFRAPKTDKADAAKIARYTLDRWTRLKQYGHMDETRNQLKTMNRQFGFYMDQKTAMKNNLIALLDETYPGANNFFDSKARKDGCQKWVDFVYTYWHVDCVRGKSFKAFAEHYQNWCKRKGYNFSVRKVKEIYEKSSGLIAMFPKDDNTKMLVRQAVDVLNSTSATVERLRREMDKLASTLPEYPVVLAMDGVGPTLGPQLIAEIGDVTRFTKRGALTAFAGVDPGGDQSGDHERKSNRTSKKGSPHLRKTLFVIMDGILQRSPIDDPVYRFMDKKRSQGKPYHVYMTAGANKFLRIYYGRVKEYLENLEESKES

SEQ ID NO: 285829 - protein, 442 aa, unidentified
MPNRSVNRLSRGDRRRNAKLRDLRSLVRPDLAILAVDLADANQAAVVADHDSVVLGRRMFRCSAWGIDQILDWAIPIAQQAGFAGVVVACEPTGHRWKPVAERARARGLNMVCVQPLLVHRAREAEDFTRDRSDYKDATIIARLTSERRCYRPEVTTPTWARLRHLGQRRVAVLQAATAARQTLRDLLGVGWPSVLDAAAQPLDSLTFRACLAVATDPTPIVAMGYDAFAGAVAAELPRWGGKRRRHQILRAVFAAAQAPGGVAAERVGAAERASFAVADWHRALQQLGEVEGRMVAVLDQLGLTRLVTTITGLSAVGAAAILAETGDPARYDIARTWAKHAGLCPRDNTSGRFQGQTTTSGRGRPGLRTAAWRAIWGLLPHNPIYAARYAHLTGRAHNPLNDGQARAALAAGLLRQLHAVCTRQVAWDPKIAAGEVTATAA

SEQ ID NO: 285830 - protein, 305 aa, unidentified
MMMIDAQRTEPKLEVILGVDTHLDVHVAVAIDHLGRRLGELSVPTTAKGYKRLLCWVEGFGLVRCAGIEGTSSYGAGLARHLKAQGIEVLEVERPKRRQRSSPRNAKSDPLDAKSAARAVLADEASGLPKSGEGSVEMIRALRAARRSAMKARTQAANQLQGLRVTAPEELRHRLRGLSTKELVAVAARFRLGDDPHDVAAATKFALRSVARRYQALSAEIDELDAQLDRLVRQVAPELVSLAGIGTDHAATLLIVAGDNPERLRSEASFASLCGVSPVEASSGKVVRHRLNRGGNREAYPVRCT

SEQ ID NO: 285831 - protein, 442 aa, unidentified
MTGRSQFVSVGVQRRNARLTSLRELVPVDAAIVGIDLADDKQALVIADHDARVLDRRMIRGNVWRAIAALPWAEQVARDAGFTRIVLACEPTGSRWKPLLQHARDSGLELLCVNPMLVARGREGEDYTRERADYRDGAIIARLTSERRCFRPYQPEGPWARLRHLGIHRYQQLERATAARQGLRDLLTCYWPSAFSAADDPMRSLTFRAVLCVSADPEHLTNLERDQLARQANEALTAWGGRRLHHAILQRLHASASQPGGVRAERRAGGERATLTARAWLDASTRQHDAEASMVAVLEELGIAPITRTLPGLSLLGAATILAETGDPSRFTHPRAWVKHAGLCPRANESGNYQGQTRTSGRGRPRLRTAAWRVIWGLLPHNPVYAARYTRLRTRPRNPLNDGQARTALAASLLRQLFVMITTHSAWNPAIAAGKDHLLDAA

SEQ ID NO: 285832 - protein, 398 aa, unidentified
MKTSGLDVHKDKIFCAIYDGKSFSAVKEFSTTTNSIRSMGEYLQSEKVKKVAMESTSTYWVPIWDILYEMGFEQKLVNPLHIKQMPGRKSDVKDAQWIAELLYKNMLRGSLVPSPLIQELRSYTREYRILVQEQTKVVTKMDRLLVMCGIRLSNCISNMNSKSAIRIIEALIGGETNADKLVSLVYANRKNKESGKLKECLSGNMKEHHRIKLMTSKQQYDLFEQQISLYLSKMQKICDEHFSKDIANLRTIPGVSSISAMIIIAETGGDMSTFENSGKFTGWTGLRPRNDETNGKFKSTATTKGNKHLRAIIVQVGWGASRNKGSYFMDKFQKLAMRKSRKKALVAIGRKILVIIWHVLKEKTQYNPKLVHIYDPVKVEHKIKYHEKEIEKAKKLIS

SEQ ID NO: 285833 - protein, 387 aa, unidentified
MPQLNDLSKSLVALEQDATLIAVIEMGQSSWLVAGIVPGVERQPLKKLTTDQDALLQLLHRWRKEANEAGHVIKRITVAYEAGRDGFWLARWLRAHEIEAYVIHPSSVPVSREHRRAKTDRLDTELLKRAFLGWLRGEPKHCSMAAVPTIADEDARRPSRERENLVREVTRLVNRMKANLARLGIRGFRPHLAQAAGQLQTLQTPEGTAVPANTLAELRRDMDRLRFVKQQIKQIEAARVQRLESEPGERRHAMVYLLARVVGIGVESADMLVQEVFSRKLRDRRAVARYAGLTGAPDESGNKRRERGLAKAGNARVRRGMIQLAWTHLLHQKDSVLAQWYRARTADARGRTRKIMIIALARKLLIALWRLVTTGEAPAGLLIRPAA

SEQ ID NO: 285834 - protein, 343 aa, unidentified
MEYFAGIDVSLEQSSVCVVDGTGKIVREAKVASEPEALVGFFRGLETGVTRIGLEAGPLSQWLYAGLTTAGFEVVLLETRHVKAALSAMVIKTDRKDARGIAQLLRMGWFRPVHAKSPAAQEVRALLVARKLLQTKLLDVEFSIRGILRGFGLKIGEVSKGRFAARVRELAAGHAMLERITEPMLRAREALRTEYARLHGEMLAIVKPDPVCRRLMTVPGVGALVAITFKSAVDDPARFARSRVLGAHFGLTPRKYQSGETDVTGAISRVGDAMVRMALYEAAHIMLSRVTRFSSLKRWALDVVRRRGLKRAKVALARKLATVLHRMWVDGTSFRWGKQAASV

SEQ ID NO: 285835 - protein, 404 aa, unidentified
MSENYAVFVGLDVGKSAHHACALAQDGSRLYDKPLVQDEVALRKVFVELQQHGPVLMIVDQPNTIGALPIAVARDCGCEVAYLPGLAMRKAADLYPGRSKTDARDAFIIADTARTMPHTLRAVDHDSEVLSALKMLAGFDDDIARDCTRAKNRLRSVLTQIHPAFERVLVGEILARAIVLDLLIHYGGPTKLAAAGRGRVLKWARNRSRKDPVELIDRIFAALAEQTVTVPGTDAAELVIPQLAANIKALQQQRETIAGQVEGMLDEFPLAEVLISMPGIGIKTASNILLAVGDCSDFASASHLAAYAGIAPVTRRSGTSIKGEFPARSGNKRLKNAMFRSAWIASNCHGPSQAYYQRKRAEGKKHNAAVMCLARRRSNVIYAMLTNREFYREPPAPNDVAAAA

SEQ ID NO: 285836 - protein, 429 aa, unidentified
MNNTQNKKIEQVKETTMIVGIDVGSEKHYFRAFNWRGIELTRKPIAFSNSMEGFNSFYNTIVELMQKSELEEALVGIEPTGHYWFALGQFMGEKDIKFVMVNPHHVHKTKELDDNSPSKNDRKDPRVIAGLVRDGRYFYSYMPTGVYAELRNASNRRFVLVEEQTRAKNRLQKWIAVYFPEYKGIYTHIDAKGGMLVLKKAPTPEEIVRLGVEGIIKIWKDAKLRGNGNKKAMLILAAAMRSIGLKAGLTEARMEIQDLIEDYELQTKRLERVNDLIKGLCQQVRYADKLLEIKGIGITTVAGFIAEVGDITRFDSTKELQKLAGLELVADSSGKHNGKTKISKRGRKRLRYLLFEAAISVVGKNEEFKEIHRYYTTREKNPLKKMQSLIAVACKLIRVFHAILTKGIRYDASKMLKDIRHPGEQLKAA

SEQ ID NO: 285837 - protein, 353 aa, unidentified
MRKTQDFIVEGKRIFVGLEDSKRTWKLCVHCDGMLVHETSLPAEYDNLHSYLKGRYPDCEIQLMYESGFSGFWLHDALMADGIDCVVTPPNKVTQEKVNRVKTDKIDARRLAVNLENNDYVSCHVPDSERREDRQISRTLNQIQRKITSTKNQIRKFLDFHGLNGDMPAGAWSSRHYQSVKQLRLGRSLQVCLDANLKVLENLEAIRVELLAELKELCAKDRYRQAVELKQNCPGVGWLSAIRFTLEWGKMSRFETGKHMASFAGLTSCEYSTGDTVHRGRITGQSNGYVRAWLVQCAWQAIRSDPVLLAKFRDVWTNSGSKKKAIVAVARKLGVRMRAIELTQQRYCIGVIE

SEQ ID NO: 285838 - protein, 331 aa, unidentified
MTMFAGIDVGASSVVLVCRQNGRGSAPETFDQSVAGHAALVRRLCRVAPQCVVLEATGIYYLDLALALQAAGLPVAVINPRSFHHFAKLKLVGSKTDGVDAALLAEYAERMNPALWQAPEPHRLALRDVGRQINRLTAARTQAKNRLHALRARASTLPLLIDDELEGIAVFDRRIQRLTAAATDLLDQAPLLARQCQLIDAATGIAKASAIAILAELCVLPGHLKANQVSRYAGLDVRLWQSGTSVNQRARMSKAGNAYLRAALFMPAMSAVRYDPRAKAFSLALQRRGKKKMQAVGAVMRKYLTGIWACLKTDQPFDSAKLFSEIHFREA

SEQ ID NO: 285839 - protein, 349 aa, unidentified
MLHAGLDLSRNRIDVCVLRDEGELVEEFSSPADIDGLSHLHRRIARHGEPVRAVVESMTGARHVHDTLERFGFDVLIADAQRTKGLAPLCCKTDKIDARVLAVLSERCLVPEIWLPDPAVRAERELARFRLHLVKHRSMLKQRIHSTLINFGQPCPVSDLFGLAGRELLQRLELPPQWRQSLDVSLHLIDELDLQIAEVAKELRATRADHPYVPLLMSAPGIGWVLAFTIAAEIGDIGRFASATKLQGYTGLCPKVVQSGSSDRRGPLTKHGPKYLRWALLEATMHALRHPAYSERYQRTKRRAGNQRGAKVAQVEIARRLTRAIWHMLTNSEPFNAEAPGGAARRLAA

SEQ ID NO: 285840 - protein, 312 aa, unidentified
MTKTICGVDISKKHLDARIVPGEAVARFTNDAAGIAKLAAFCGEHKVELVVMEATGGYERLAFTLLWEAGAACAIANPRSVRQYAEAMGFLEKTDRIDAFIIARFAHSKGLKPTPPSSKIQCRLKGLVVRLRQLTDDLVVNKQRRHQVEDEEIRATFDDIIALIKRQSRRLEGEIASLIDDDPLWAVLDKTFRTVKGVADRTVARIMAELPEIGTYDNKAISKLVGLAPLAHDSGKKNGKRSIRGGRSGVRSILFLVADIARRYDPSLADFHRRLVAAGKPKMVVRVALAHKLLVRLNAKARDARAQYANAT

SEQ ID NO: 285841 - protein, 315 aa, unidentified
MTKPVIGIDVGKAKLDVGVHGDKKVRQWRNDEPGRAELRTWVLQQEASLVVVEASGGYEAAVVSELVSSGQAVALVNPTRVRAFARAEGVLAKTDKIDAQVIARFGATMKPEARARRTEAQAQLNELITRRRQLVEMLTAEKNRRQTASPAMRRHIASHLAWLQDQIDELEHQISQAIEANPGWAETAQRVGSVPGIGPITAATLVADLPELGQLNRQKIAALVGVAPFNHDSGQHRGKRRIFSGRTSVRSVLYMATLSAIRHNPVIKVFYQRLLKAGKLKKVALTACMRKLLVILNTMVKTGQDWHSPSPSPVI

SEQ ID NO: 285842 - protein, 438 aa, unidentified
MRKKKTKASKSVQLQGLPLIHPHAAGIDVGAKEHVVAVPSDRDPQPVRTFHAFTPDLHELAAWLKRCGIQTVALESTGIYWLSLYDVLEEHGFEIRVVNARHVKHVPGRTKTDVLDCQWIQKLHSFGLLNGSFRPEEQIRKLRTYMRLRDNLVAESTQAIHHMQKALFEMNVQLSNVLSDITGESGLRIVDAILAGERDPEQLASLCSTRIKASRQTVAKALHGNWEEALLFCLKTALEIYRFTQDKIQDCDKCVACQLAAFEIRTALPNATGNLRRQLHQVCGVDLTKIPGIKEQSAQIIISEVGLDMSRWNTEKQFSSFLGLCPNNLITGGKILRRNSRKVYNRAADTLRLCAQSLTHSKSALGAKYRRLRARLGAPKAIVAMAHHLARLVYRMLRYGENYVEKGIEHYEHKFRLHRIKWLKKEARSLNFQLVAAQ

SEQ ID NO: 285843 - protein, 370 aa, unidentified
MIVIGTDSHMKTHTCGAVDALTAAALDQLTAPARTAGFGRLLRWARALDPERVWALEDCRHVSGMFERFLIARGERVVRVAPKYMAGARRSSRERGKSDSIDAFSIARAALKEGIESLPAAHLDGDALDIRLLVDHREDLIAARGQDQQRLRWHLHDMWPELEIPSGVLDSDKWLGKISRRLARARPITRVRIARELVRQITTQTKRIGELETELTALVKSYAPQLLAERGCGALTAAKLIGEIAGADRFATDSKLARTSGAAPIPASSGNTTRHRLDRGGNRQLNCALHRLAVNKGNWDPDAAAYLARKQAEGKSRKEALRCLKRHLARRVWKLLRAPVPATTPPPTLLKRTTAQTLATGAPTMMPCLR

SEQ ID NO: 285844 - protein, 402 aa, unidentified
MNCVGIDVSKGKSMIAVMRPFGEVVVSPFEVRHTANELSELAGLLKSLDGETRVVMESTGNYHAPVAWLLHDAGLYVSVVNAMLVHDYGNNSLRRGKTDKKDAVKLANYGLDHWLTLPRYVPEEDTRLMLKTCYRQYQQYSKVQTMLKNNLISLLDTAFPDANRLFTSPPRTDGSEKWVDFVATFWHCECVCGLSKKAFTAKYQKWCRKHGYNFSQDKALDIYASACGRFGVMPKTNTAKLLVEQAISQLQTTSAALAALKQEMQSLAASLPEYPVVMEMFGVGPTLGPQLIAEIGDVRRFHSKKALVAFAGIDAPPYQSGQIDVRSRSISKRGSASLRRTLFLVMGVLLQCAPMDEPVYQFMNKKRSEGKPYRVYMMASANKFLRIYYASVKAYLDSLEHD

SEQ ID NO: 285845 - protein, 426 aa, unidentified
MDTVAGLEPIAFVGVDWASEEHAVCVLGTDGRKSSSYAVAHSRDGFEQLVRRLASLGPVAQVPVAIERPDGRLVDALLEAGHPVVAVSPNAIKAWRESEVLSGAKDDPGDAEVIAEYLRLRAHKLSVLAPFSAETRALRAVVRARDDLVDQRVAAHNQLQACLDAFWPGAKAVFADICSEIALAFLERYPTPASARALGDKRMAAFLTKHGYSGRRPASELLERLRAAPEGIADGPEAEARRDAVLGYVRVIRALNTSIKSLDRSVAAHLGEHPDGEIFASLPRSGRINAAQMLAQWGDCRQAYDRPEAVAALAGVTPVTKKSGKYEAVHFRWACDKRFRRAVTTFADNSRHDSPWAADIYRRAIARGCDHPHAVRVLARAWIRVIWRCWVDRVAYDPAKHTAAARLLANSERATGPAVGTDQQAA

SEQ ID NO: 285846 - protein, 369 aa, unidentified
MDQGTTVVGLDVHKQRIVGAVLPWGSDRVTEKVVLENRPQEIERFVTRVAGKGPVEFVYEAGPCGYEVQRQIAGLGYRCVVVAPGMTPVRPGDRVKTDRRDAEKLARYYRAGELREIRVPSREEEAARDLPRVREDVLKDLLRAKNRLGKFLLRQGRVYAETRTWGVKHRSWLRTQRFEWTPLQQSFEAYLRAVEEAEFRLETLNHQLEELVQQDPYRVPVQYLRCFRGIDSLSALTLVVEAMEFKRFGTARKFMSYTGAVSSENSSANRVRRGSITKAGNAHIRRILVEAAWSYQHPHGESRALAERRKECPREVVYLARKAQDRLSRKFRRMIHRNKRSQVAAVAVARELAGFVWAMAQHFPLPAAA

SEQ ID NO: 285847 - protein, 316 aa, unidentified
MVSSNDGIWIGIDVSKAHVDVAVFGGRQWRETTESTGLLRLTTELVEVGATLAVLEASGGYEVVVAAALAAAGVPVAIVNPRQVRHFGRATGILAKTDRLDARVLARFAAVVQPEPRPLPDAAQVELTELVQRRRQVVDMIAAEKLRRRGASGHVGQQIQAHIRWLETQLDELDHELTELVRSSPLWRDKDDLLRGVPGVGPTLSATLLAELPELGHLNRRQIAALVGVAPLAHDSGTFRGRRSCWAGRASVRRVLYMAALVATRCNPTIKDTYQRLLHAGKPKKVALVACMRKLLVALNAMLAHNTPWHAEVQTP

SEQ ID NO: 285848 - protein, 342 aa, unidentified
MEQYVALDVSLKEISVCIIDNKGEVVFEGKTGAEPAMLVELIRSKAPQVKLVGLETGATSPWLFHTLASAGLPVVCMDARHAHAALSTRPTKSDRSDARGLADMLRMGWYREVHAKSVTSHERRTVLGARHQLVTMRSELDAQIRGILKTFGLILGTGNKDTLIQRAEKLVAGHPVLSGLVAKLADVRRHVTSQIAAIDRDIRHLVHTEPTLKRLISVPGVGPITALAFLSAVDDPSRFKHARDVGPYLGLTPTRYQSGETDRQGRISKCGDTFTRTCLYEAAHVLLTRVHRFSPLKAWGMRLAKRIGGRKARIAVARKIAVILHCIWTDGTEFWWTREKSA

SEQ ID NO: 285849 - protein, 347 aa, unidentified
MLIIGCDLHTRTQQIALLDTETGEVVEKKLEHENGEAKRFYEGLKEPALVGVESTGYALWFAQMLAALGHQLVVGDAAKIRAMEPRKQKHDRRDAEHLLNLLVGGDFPRVWLPSPEERDVRVLVEHRHQLVELRTRAKNGLQAMALSYGLRRRGRLWSKPGQAELKKLPLKEGMARRREDLLRLLKQLDQWVRELDQRIGQEVARREDAQRLMTHPGVGPLTALGTVLVLGPVERFPDGKHVTSYVGLIPQEESSGGRQRFGRLAKQGNRLLRFLLVEAAQTASRYDPGLRRVYRRLAFRKGVASAKVAVARKLAIRLYIMLRDQIDYAEFCRRGSHAGMLGDVALV

SEQ ID NO: 285850 - protein, 370 aa, unidentified
MSQSSTLYIGLDVHQESMAVAYIPEEHGAEVTSLGTIGTRPCDMDHLIRKMPSKAQHLVFVYEAGPCGYWRYRYLTQKGQVCGVIAPSLMPKKAGDRITTDRRDAVQLARLMRSGDLTRVYVPTVEDEAIRDLTRAREDALRDLKAAKFRLKAFLLRQDIRYTGQATWGPAHLRWLAEVVWATPAPPIAFQAYVRAVTEHTARLQRLEQALHDQVKTWRRQPVVEALQALRGVQCIVAVTLVAALGALTRFENPRQLMNDLGLLPSAYSRGERRRQGAMTTAGNTHARRALVEGAWAYRYPAKVSRHLPLRLENQPKIIQDLSWQAQVRLCQRYRQLIARGKHAHVVTVAMARELAGFMWAMAQQVPVTP

SEQ ID NO: 285851 - protein, 424 aa, unidentified
MKVTFQTCCGVDVHKSFLVATIIKTSSGIEPSYQKRRFSTFNNSILEFKKWLLENECLYVCMESTGKYWIPVFNLLEDEINVTIANPKWVKAVKGNKDDTKDSKWIGDLFRLGLVRGSYIPCKKIRILREFTRYRYKLVSCRSSEKNRYQNALTVCNVALDSVVSDIFGKSSTSIIDYLLGQSGTSIDHEVIASKLLKRLKAKEDAVIESIEGYQMTDSQKYRMHLVRAHMDYITAAINDVDSEIESLISSDPDYENAVELLCTIPGVKYDSAITIISEIGIDMSQFCSSKRLCCWAGLTPGSNESAGKKKSVRITRAGVYLKPALVQCAHAAVKSDKSPYYKKKYESLVKRRGKKRAIIAIARMILTAIFQMLTTGETWNPCDLYKIDMPETLLEKQKQKAIKQAQKLLIREGLLPPTEPIAS

SEQ ID NO: 285852 - protein, 451 aa, unidentified
MDSTKATLDIVYPNAAGIDIGSRSHWVAVGQAAEDVKEFGVYSDDQMALCEWLQEKGVTHIAMESTGTYWQNLFSTLIVNGFDVILVNGKQTKNIKGKKTDIKDCQWIQKLHSLGLLSRSFLPDSTTDIIRTYSRHKLNLLSQSSSSIKRMQKYLRLMNMRLDIVVRDIVGETGSKIITDFLSGNKDGKKLAQNRHYNCRKSESEIAKALQYNGREDYSFALKQEWATYNHLQQQLSETDKVLAKLLQDIIDKDNNKKQHIAPTKPFKRKNKNGNKGLNANQVFYQYFEGVDLMAIEGVSESTIMSIISEVGVEGIKKFETAKQFTSWLRLAPNNKISGGKILSHNLPKGSSRLKLALRNAANAIGQLKEGHLVDFFRRINYKKGRATAVSALARKLAVIIYNMVTKGISYNPPQPYLCLDEKRKLGIVKRIRKQIDKFALTNIELGFVTN

SEQ ID NO: 285853 - protein, 426 aa, unidentified
MRFIGLDVHKDFCEVAVVEGDACWSGPRVRSTPEDLEVFAQSLGPKDQVVLEATGGALAIARILEPHVGRVLMANPMAVRAIATAKAKTDRLDARTLAKLLAAGFVPGVWISDERTRLLRRLVSRHAHLVRQRTRAKNEVHAVLQRTLAGRPPVSDLFGKRGRAWLGAQDLPADERQTVEASLRHIDFLDGELRLVDRTMAIQVLCWPEVRWIMTIPGMGAVAAAGVMAAMGDVRRFPTSRHLVGYLGLDARVRQSGSGPARHGRISKQGSAEARHLLVEAAWAAMRTPGPLRAFGERIRARRGANIATVAVARKLAVLCWHVLTREEDYAFGRPSLVREKIRRLELAAGAPNRNGYRNPVRVFATPAQRRLEREVGDQAEKAYRRFVKDFRSSGKKGAGATTGARISAARKGQAARQEQAPDPAL

SEQ ID NO: 285854 - protein, 410 aa, unidentified
MERQVERCCGLDVHRDTVAACVRIGGGPGQRTQQHVQTFRTTAGDLVVLRDWLAAHEVTHVAMESTGVYWKPVYYALESDFTCLLVNAAHIKQLPGRKTDVKDCAWIAQLLEHGLLRGSFVPPAPIRELRDLTRYRKAVIQDRTRVVNRLHKTLEDAGIKLASVASDVLGISGRAMLEALVQGTTDPALLAELARGRLRGKLPALRQALAGRFRGHHAFLIGQLLAHLDYLDEAIGILSGQVETVIAPFADALTRLDSIPGINQRTAEVIIAEIGVDMSAFPSAGHLASWAALCPGNHESAGKHKSGKMRKGNRWLRTALIEAAAGASRVKNSALQARFRRVLRHRGPKKAVVAVAHALLRATNHVLADHAVYRELGADYCDRQHSQRVTRRAIQLLERQGYRVTIEPAA

SEQ ID NO: 285855 - protein, 446 aa, unidentified
MDHANGLSRGDRNRNSRLTRLRTLVPATNAIVAIDLAGEKQMLVVTDHDSRVLARRTFRLPAWHMGAALDWAAEHATAAGFAGATVACEPTGHRWRVIGQLAADRSMPFVCVQPLLVARSRENENYSRDKTDDRDAVLIARLTAELRCYAPEATDEVWARLRHLGARRARHLEETSSLVQQMRDLLECAWPAMLDTAAKQFKAKTWLAALAVVTDRCNGDPARLRRLGLTRFSAAVRREMPRWQAERPCRRIVEAVFAALADTTGVTVQRRGILERVGLVLDDWRDLHRRIDDTEARMVAVLDELNLTELVTSIQGLSAVNAAAILAESGDLRRFATGRALVKHSGLAPAEQTSGKLVGRTRLTGRGRPGLRTAAWRAAWGAMKSNTVYQARLVHLTTREEGKLKPAQARCAIAAALLRQLHAVVTTGRAWNPAVAANGTRMTLAA

SEQ ID NO: 285856 - protein, 353 aa, unidentified
MMNEQGEVIRRDKASTDRASIRRYFQNADPCEETKAVMEACYGWEYFYDEASDLVDELIMAHPLKTRLIAEARIKTDTIDSETLAHLLRADLIPQAYAPDSETRGRKNLLRYRSSLTAMKVRIKNIIHSVLTRNHIEDTGFTSLSDKFGKQGLSYLRSVTLKGEDTAIVNNYLDLLEETERKIKAAEKQIRAVCREDKICTLLQSIPCSSPMARTRMSREDKICTLLQSIPGIGPILAVTIRYEIDDIGRFMSAGKLSSYAGLVPSTYSSGNRTYQGKITKQGNKWLRWAMIEAAQKAPSNDLWLRGFYQRISKHGKKIARVAVARKLLEIIYRVWKEENPYYKKGTVALPFV

SEQ ID NO: 285857 - protein, 359 aa, unidentified
MSKITINVPEITIGMDLGNKKHDICVLNSAGEKIDQTKIENNIVCLEEYFEKYKAYSKVRVAMEVGASSLWISTKLKDMGFNVIIANARKLRMIWTDTNKCDERDAEKIARVARMDPTLLHGIKHRSISAQQMLSVIRAREHFVVARTKCINCVRGLLKSLGATNLPSCASNRFGERMFEYLPDELIPTLGELLEECKDLTDRIDRLDDRILQISEESCPEAIKLQQIPGVGPITALSFVLTIDDPKRFHKSRDLGPFLGLTPKRDQSGECDKQLSITKQGDRYLRSLLVGSAQFILSDRSPDSDLKSYGLRISSRGGKIAKKKAVVAIARKLGILMHRIWISGENYDPLHKKTFKKVS

SEQ ID NO: 285858 - protein, 354 aa, unidentified
MLAELVDAVVGVDTHRDTHQVEIALPNGAPIACTTISNDTSGYAELLAWIVDHAPGPRLAVSIEGTRSYGIGLARAAAAAGLVVLECEQPHRKARRGKGKSDPIDAHLAVLAALRLDADRLPTPRADGDREALRILLGARQELTTASTAQTNRLRALLLGGDDTDRTLARGALTEARLASLARRRPPREASREQAVRHAEIRRLALALREAARALKANRAQLQTIVNDVVPRLIERPGIGPVSAAQAIVSFSHPGRCRNDAAFAALGGVSPLPASSGRTVRHRLNRGGDRALNRALHTIAATRMRSCPTTQAYVARRTAEGKNPREIRRCLKRYIARQLYRTLATAMTPAAETS

SEQ ID NO: 285859 - protein, 441 aa, unidentified
MCDGAVNGFSKPNQRKELLTMKVVYPTCCGVDVHKSFLVATIIKTTSGVQPSYQKKRFSTFNNSILQFKNWLLENDCYDVCMESTGKYWIPVFNLLEDVINVTIANPKWVKAVKGNKDDTKDSKWIGDLFRLGMVRGSFIPCKNIRILREFTRYRSKLVNAKASEKNRFQNALTVCNVALDSVVSDVFGKSATSIINYLIEQSDNSINHEEISNRLLRSLKKKSDSVIESIEGYQMADSQKHRMRLVRAHMDYITSTLNDIDIVVDSLVEPYENAINLLCSIPGVKRDTAITIISEIGTDMAQFSSSKRLCSWAGLTPGSNESAGKKKSVRITRAGVYLKPALVQCAHAAVKSDKSPYYKTKYGRIMKRRGKKRAIIAIARMILTAIYQMLSTGEVWNPCDLYKIDMPQPLVDKQKAKAIKQAYKLLVSEGLIPESLLQAI

SEQ ID NO: 285860 - protein, 362 aa, unidentified
MEFFTGLDVGMDETAICVVDDKGKVVLQTAVVTDPDAIKLALKPYLGRLRRVGHEAGSWSPWLHPELEKLGLPVICLETQHVRAALKAQRNKTDKTDALGLAHLMRTGWFRQAHIKSEACYRLRLLLTHRRNLKRKFVDLENAIRHSLKAFGMRFKGCGRGGFAQAVREAVAGDPLVSELIEAMLNARAALWKEYLKLHEMVVKFVAGHELCRRLMQIPGVGPVAALSFVTAIDDPSRFKRSRDVAAYFGLTSRRWQSGKSIDVQGRISKAGDPDVRRALYEAASALLTRFKRKDKIKTWGLAIAKRTSHRKATVAVARKLAVVMHAMWVDGTFYCGDPATRAADVSARAAAKDKKLLGAHA

SEQ ID NO: 285861 - protein, 307 aa, unidentified
MAAVGIDVGKASLDLAVDGQSEVARYSNTPAGISKVIGRLQRLKATRIVVEATGGYEEPLLEACCDAGLWIARVNPRQARDFARATGELAKTDAIDARLLALMARLFADRLRQYLAPPPWQREMRHWLRRRAQVVVTLQAQKQQAAMAPAAVRKLAARTIAALAREQAAINQAIHALIKQHITPSVRSSKGLGPVFQATVLALLPELGHLDRRQIAKLVGVAPMNRDSGQGAGPRRIRGGRSPVRVALYMATLSAVRWDPVMKAHYQQLRERGKLGKVALVACMRKLLGIVNARRRDELRAEGLTLA

SEQ ID NO: 285862 - protein, 315 aa, unidentified
MTQQQEVFVGIDVSKDSLDVAVSGENQVNQVGNHRKGIARLVAELRRRNPCLIVVEATGGYEQAVVDGLFHAGLPVARVSPQRVHQYGRARGILAKTDRIDAGNLAEYGEHIRPRLYVAKDKDVEHLSALLTRRKQVSEMLQAEKNRLRTACEGVRRSLQTIIACLKEEMQRLDVEVRSFLEEHEELREREQLLRSARSIGPVTAATLLAELPELGKLDRKQIAALVGVAPMNQDSGRRRGYRKTKGGRPDVRRTLYMATLTGVRYNPVIKANYERLLGRGKEKKVAITACMRKFLIILNAMMRDQVPFREVSMA

SEQ ID NO: 285863 - protein, 330 aa, unidentified
MENWNVILGVDVSKLTLDISCAERNLHIKIENQHKGFLLFRKWCKTNSIDLKKTLIVMEFTGGYEYRFMQFCESKLISYTRIPGLEIKNSIGMIRGKNDQVDSFRIGRYGEEKIKRLRPSKPLAHNLLMLRQLLSFRKRLVRERAGLESTLKERKHMYLLNNTDLIVRVMQGKIKANKQYIKEIEEEIMKLINTDEGLLKNYRILTSIKGVGKVNACMTLAYTENFNSFTDARKYAVYVGVIPFERSSGTSVKGRPRVSHLAHKELKQELNQAAKTAMVHDPEIIAYAERKLKNKCYSLVLNNVKFKLILRMFSLVKRGEMYVENYKRAA

SEQ ID NO: 285864 - protein, 317 aa, unidentified
MSKHTTVSAGIDTGKCKLDIALDRCPERLQVDNTDDGHAVLWGWLRQHRVNRVGIEASGGYEQAVVSALRRKGFLVIVFQPVQVRAYAKYRLQLAKNDKIDAALIAACTAEAKKIHPPPDPRLAPFAELLTVIEQLTEDIARLKTRRATSRDEQTRRFWNEEIARLKRLQSQKLKQLVAAIREHRDLADRLELIVSVDGVGLRTAVAILVRMPEIGRITREQAAALVGVAPYDADSGSHIGLRHIEGGRERLRKSLYTAALPAAFNWNPELMAIYKRLTAAGKPHKLALVACARKMIIFVNTVVARGTPWVPRDALI

SEQ ID NO: 285865 - protein, 349 aa, unidentified
MRYIGVDLHKTNFVVCFLNQDESFRLETFPLSKAGISRFTSELSKDDAVAVEVTQNIYYFYDQIKTYVGRIVLVDTYRFAIIAASKKKTDKADAQALARFLKLDHLPEVPVPSEKVRQLRHLLQARETMVGMRTKLKNMGHAALTRNGIALLRSAFASAIGRERLQKRDDLSAADTAILQSALRQIAELDKEVEQLEAEIVRLGKTLAGIKRLLQLHGLNLLSAISLLAEIGDIHLFETSKQLVAYSGLAISIRQSNQTTRQGHITKQGRKRLRTVAIRAVLSMVNRTNTPLMDFYARKKREKGSGKAICATARKLLTIIFVMLKKELDYWYLEDRLYNRKLRQLNAAT

SEQ ID NO: 285866 - protein, 321 aa, unidentified
MTYVGIDVSKATFVVAYSSAKSSETKTFKNTTKGIREFIRTISPEENHCVLEATGNYSMLLVYLLSKAGFTVSMENPLKIKNFARVMLSVVKTDKLDARLIALYGERMQPAPFKLRSESLLLLKQKRTVLRQLKKQLTANRNLEGSLKVLPFIDSKCKKVLEKTIKFLEKQIEEMEEELTSLAEIEYKKQMDLLTSIKGIGATLAAALIIATGGFTYFDNAKQLTRYLGLSPTYQQSGTSVNVKGHINRNGDAYLRSQLYIGAMASLRCNTECKACFDRLRSNGKPGKLAIIAVANKLIRQAFAVVAHEKKYIDGYKSVKP

SEQ ID NO: 285867 - protein, 372 aa, unidentified
MNYNTVYVGMDVHKESFTLCSCKYEDEKASHYQRTPASYKNVLRYLAFLRTIYGEDTRFVCGYEAGCLGYSLYHQLENFNVECVILAPTTMLEQRSKRRIKTDKRDAEIIAKSLAQHNYSPVHIPTETDNQTKEFIRMRDDHKAELKKIKQQILSFCLRQGYQYDGSGNWTAKHVKWLRSLKPAGLYKEILDEYLLTYTILTDKLNRLDQRIEELASEEEYKEPVSKLTCFLGIKTHTALSVIVEVGDFQRFVSARKFAGYLGLVPGQHSSGDDRNGLGITKAGNTHVRRLLVESAQSYTRGKIGYKSRVLRSRQAGNSPQVINYADRANERLRRRYYKMVLKDGKKYNIAKTAIARELACFIWGMMTDNIY

SEQ ID NO: 285868 - protein, 388 aa, unidentified
MEAGDLQGRACLATIYVALELSRSSWLVAIQGSDEGRPSRHKVDAGDAKRILALIEQARRVVARRSGQEAVRVCSCYEAGYEGFWLHRVLVAAGIESRVVDASSLLVDRRARRRKTDRIDVETILRALIRWLRGERDACSMVIVPDADAEDERRLSRERGRLVQERTGHINRIKGLLMTMGIYDFQPTAADRLERLAKLVTGDGRQLPPRLSEEISRELARLAVLEEQIAAVERERDERPAKQDDAAPTDIATPPGRIAQLHKLRAVGRQTAAVLQGEVFFRQFRNRRQIAAYVGLDPSPWASGDTMREQGISKAGNRRARHALVELAWMWLRWQPASELSQWFHKRVGDAKGRLRRTIIVALARKLLIAIWRFLEHGVVPAGAVLRA

SEQ ID NO: 285869 - protein, 368 aa, unidentified
MLADDYEYVIGGDPDRDTIDLAVLDTATGSPRAHIEASADGPGYARMLQWAERYAPGRRVWALEGTGSFAAGLAAALSQAGEDVVEVGGFRRARGAKNDRLDAIRAARNAMARQLQAGPRARGLRDGIRALSVTRQAVLVSRTKAINELKSLVVVAPEHLRADLRGCSLAKQLDRIEAMTAPDGAAVEHRITIVTLQSITARIRFLSGQLAALDPVLDQLIRQHPAGPALLAEPGVGPIVAAQMLVSWSHPGRVRSEAAFASLAGVAPLEASSGLRTRHRLNRGGDRALNRALHTVAITRMRCHPETRAYEAKRTAQGKTHRDIRRCLKRSIARRLYRVMESAARANVPRQVDGGFWGSGELGTVGSA

SEQ ID NO: 285870 - protein, 433 aa, unidentified
MNLNRLQVGIDFSRQRADFCLLFPDGQPLVSHRAFANSRPGYQQARQLLLDSLQRYAFDGLDISGEATSYYWFPFFWQLAHDRELESQHLDLFLLNPRWVHWFKKSLPPDDKADSTDPFYIAERTRTRRPKGPWDPQDDWLPLRFYTRLRFHLAQTLTREKNYYLVHLFLLHNTYRRNQPFSDPFGVTSQQVLGGEQSLDELLHLPIEELAERLDDWSSGTLQDPLETAQQLQQVAQDSFPLQEPLLTPVQHILDLTLQHIRFLENQIEQVEGWIASEIHARHPEALFLESVPGVGLVLAAGIVAEIGNLDRFFETPKWDKKHNRSRQRTLREVEDAVAKLAGLWWPKADSGGFVAEDRRLAKTGNRYLRFYLVQAANGMRRHIPAYTSFYHRKFQEATRHKHKRALILTARKSVGLFVGLLHRKEPYRSQEV

SEQ ID NO: 285871 - protein, 353 aa, unidentified
MNSLTDLREVVDVVIGVDTHVHTHSAAVVDAATGGVLDEITVEATAQGYAELVEFANNHPMLRAWAIEGTGGHGAGLSRHLLEMSEIVIELDRPKRAARRNGAKSDPLDAIRAAREAMARPRLGTPRTGGERQALSVLLAARRSAINASTEAQQQVFSLVIAAPEPIRVRFRGQKLAAMLNTAANLRVHASWDTETTSTVVALRTLARRAHAMLKEARELQKAIVAIIRSWRPDLLEEFGVGPIVAATVLCAWSHPGRIHSEAAFAMLAGVAPIPANSGKVTTRYRLNRYGDRQLNNALHTVVQSRIQYQPATRDYVARRTAEGKTSREIKRCLARYVARDLYRLLENTATAA

SEQ ID NO: 285872 - protein, 331 aa, unidentified
MNKIRLGVDISKETLDFYCDFTEEHFVLKNSHEGLKKLLSWQETHGFERSNLQIVFEYTGHYGHVLETFCVAQEFEYYKIPALAIKKSLGIVRGKNDRIDAQRICIYLKEKGYRLQPSKPTNSNIQRLKIFQSQRALYVRQLAALKNAQKDLVAVMRLPLDDFPVKNNQCVMDCLEGQIKTIDDAIQQLIKEDTELYTNYSLITSVIGVAKVIGIDTLIATDNFTKFKSWREYAAYCGCAPYPNQSGLFMGRNRISHLANNELKAHLSSGAKSAMIHDPELRSYTERKLLEGKSRKCITNSIRCKLISRMFAVVSKKRPFERNYSHYLAVQ

SEQ ID NO: 285873 - protein, 409 aa, unidentified
MNAVGIDVSKGKSMVAAALRPMGEVALLPQVFLHTGVGLEQMAYAILALGEDTRVVMEATRRYHEPVAAALHEYGIYVCVLNPLFIKQSGGGSIRKVKTDKADAMKIAKYVLDNWVDLREYTPMDTIRQQLKLCSCQYNLYMKTVVSLQNNLISLTDKTFPGVNELFSSPERADGHQKWVDFVMTFWHCDCVCRVSEKAFTERYQKWCKRKDYHFNAEKALDLYASSCGHFTTLPKNDNTKLLITTAAQQLLAGKMTLAALRAEMTRLAKQLAEYDTVLAMYGVGETTAAQLMAEIGDVRCFPRRSSIVGFAGVDPGVDDSGKHSAKSVPTTKRGSPHLRKTLYQIICTYLRKSPEDEPVYQLLNKKRTEGKPYFVYMTAAQNKFLRIYYARVKECLETFDTQQDTVQN

SEQ ID NO: 285874 - protein, 350 aa, unidentified
MNKLSALQPSKVVAAGVDTAKSTFSVCGLDSSHRIVLERTLDRARLVDMFAHMEPCTVGLEACSGSHQLARELMALGHTVRIIAAKFVAPHRTSGKNDRNDARAIVDALIHPRTRFVPVKSQEQQALLSVQRARTGFVEERTALVNRIRGLLTEFGVTLPTNIERVRRGARRAAERVPALARQVIEQLHAHLLVLDELIGSYDRQLRELARHSEPATRLMEVLGIGPVTAMTTVAMVGHAREFKNGRQFSAWLGLVPRQYSTGGKTRLGPITRRGDVYLRSLFIQGAKALLAVAARRNDRLTRWALQLRTRRGFGKAAVAVAAKLARIAWAILAKGERFRAQAPVAAAAI

SEQ ID NO: 285875 - protein, 353 aa, unidentified
MEQYIGCDAHRRYSVFVVMDDKGQASKPVRVEHDRGELREYLRRLPAGSKVAIESTGGWYWLVDEIEAAGLKPQLANAYQAKQRMTGRNKTDKFDARGLAMELLTGTLPTVWIPPAELRDLRGLMRTRLALRSCSTQVKNRVSAALNRYGLKKPDEDGDLFTGRGRVHLNGHIQSLPAETREATLHERILVDEIGEHIAALEKRVEQRIGQMKDMRLLKTLPGVGRILGATLLLEIGDVDRFPSAPHLASYAGLVPTVHSSGGKTWHGKVPRSANLFLKWAFIEAANCIVVHQSQLKGRHVVDLYQRLRAAKGHGKAAVAVARHLAEASWWILTKQQPYREPNRAPISSSAHG

SEQ ID NO: 285876 - protein, 410 aa, unidentified
MLKIVYPICCGIDVHKKFVVACIASTNNQGVTTYSRKRFSTYTNGLKQLSEWLSSNSCIHVCMESTGKYWIPVYNILEATCKITLAHPKYVKAIRGKKTDKKDAKWIADLFKHDLVAGSFMPPLPIRQLRDLMRYRFKLINFCSSEKNRMQNCLTVSNIQLANVVSDTFGKSSMKIIDYLLENPYDKDFDFLPFLHGNMLSKADDIRLAIDGFITQEQQQKMNIILQHYNGIEECKSSLESVILSLMEPYAKELSLVLTVPGIKNPFSAIAIISEIGADMSVFPTAKHLCSWAGLTPQNNESAGKKHSVRISRAGVYIKPLLVQCANAIVKSDKHPEIRDRYLSIKKRRGHKRAIIAIARMLLTAIYHILSKNESYNPDLYKKADIIPQTRDITVEQAIALAKSQGYKIV

SEQ ID NO: 285877 - protein, 352 aa, unidentified
MLHLGIDLHQRHLTIVIMNDAGDIVLRRGKVSTSPESVVAFLREVQELAGPAGGYRAIVEECGFTVWLVELLEQFECQTVIIVQPLERSKHKTDKRDAAKLAESLWINRDRISAGKRMRDIRQVMKPSETDRQCRLLTNGLISIRRQRTRVMNISSATVRRFNLIHDCPTKGFNTKKARVWLRELDLPVADRMILDQTLVRWEEFDRQIPVLEAEVDMRAENHPAAMVLRTIPGFGSLTSLAVASRIGPIGRFPRPSSLANMFGLTPTINDSGETTGRIGKISKEGHPNMRFLLGMAVHMLTQKDPEVRKVYRAIRKRRGGKTATVAVMRRLSCTMWHMLQTGEAYRIAGKQ

SEQ ID NO: 285878 - protein, 408 aa, unidentified
MKTLHKRCAGLDVHKAEVVACLRVITNRKVGREVRRFPTTTQGLLALAEWLENAGCTHVAMEATGVYWKPVWHILEGHFVLILANAAHVKNVPGRKSDVNDATWLVDLLAHGLIRSSFVPPPAIQELRDLTRTRRQLTREIVQHVQRIQAVLEEANIKLCSVITDIMGASGRRMLKAMIAGETDAEKLAALGHERLGCTRAELVEVLTGCVREHHRFLLGQHLRTIEQLEDSIAAFDARIEGALSPFHDIVERLKEVPGLAATATETVIAEIGTNMSPFPTAGHLLSWAGFVPRLDESAGKRRSTRIRKGAPWLKPVLVQAAWGAARKKNSYFQAQFLRLKARHGAKKAAIAVAASILTTVYHMLRDGTCYQDLGPEHFTRRNPAKAAARLANRIRNLGYHVEIRAAA

SEQ ID NO: 285879 - protein, 344 aa, unidentified
MEHKFKLIFGIDISKLTLDVTYFHGKKEEYLQVSNDAKGISKLVKIIQELNIPDNEVLVCCENTGSYMDKLAFVMKGLNATFWVVHPVIMKGYRLDLQRVKNDKVDSRKIAEFAMAHQHKAVNYHHPDQKTREMKELYLLRKQLVGLRQRTLNFIASEKDKALPGIMNNLIYEQIILFISDLIGEVEKSIKLLLKSDKTLLSFYKILVSIPGIGPVTAQHILVVTDGFKKICDYKSFACYVGIAPFARSSGTSIHYRPRTSKKADQGLKANMHQGAISVIKQGQIFHSYYQQMIKRGKHHLWIINSIMNMIAKCVFNLIKKMTEFDKEIFINSKKSWHENLVLS

SEQ ID NO: 285880 - protein, 460 aa, unidentified
MSKKRPKGKRAEPAPKVDWKALEIVHPDAAGIDVGGSEHWVAISPDRDPKPVRSFGCFTADLREMAAWLVEKGVRSVAMQSTGVYWMPVFEVLEQHGLEVYLVNAQHTKNVPGRKSDIQECQWLLKLHAFGLLNNSFQPTDEIRVARTLWRHRGNLVAEASSTIQRMQKALIEMNVQLSNVLSDLSGVSGMRIIGAILKGQRDPAQLAALVEPEVKATPEDIAKSLEGNWRDELLFVLKQQVELYRLYQEKIGDCDVQLRRHLESLGSRVDPRTQPLGPKPKGKRGSRNAPEFDLRTELYRITGIDWAQINGIDVLTAQTVMAEAGDDLEDFDSEKHFTSWLGLCPTNETSGGKILKRRTRKVVNRAAVAFRNAASTLLRSDSYLGAQYRRLRTRLGAPKAITAMARKLACLYYRLIKHGQQYVDKGTAYYESRYREQQIRVLTKKAKKLGFQLVIQQTA

SEQ ID NO: 285881 - protein, 430 aa, unidentified
MEKIHENAAGIDIGSTKVFVGTEDGEVRSFETFTPDFKALAEYLKNKDVNTVAMESTGVYWIVLYDILMEAGLDVWLVDGRQTKQVPGRKTDVKDCIWIQQLHSHGLLNRCFVAEGELKELRSYQRLREDHIRSCSMHINHMQKALIEMNIRLPEVLNQVHGKSGMALIEAILSGERDRTTLLALCHESIQKNKKEEVLKALEGHYTEAGLFSLRQSYHAYHFYKKQINECDEQIEQVLQKINKDQHLSEPSKRKPIRHNRPDVENLGGHLLKIFGSKDASILPGITDYTWLQLYSEFGNDLSRWPTEKHFTSWLGLSPGQNNSGKKKKNARKGRPQAGQIFRKIAQSLLTSKKIALGAFGRRIKSRKGPAIAIKAVARKLAAQYWRLMVKGAAYVEQGVEFYQEQILNQKKKWLSKLALELDMEIVQKA

SEQ ID NO: 285882 - protein, 404 aa, unidentified
MWYTGIDWADEHHDALTIDEKGHQIGSIRVEHTPQGFAKLDVFLMQIIGSTPKEQMACIIETTHGLLIVHLLEAGWPVYPVNPRTVDRRRSASGAKTDLIDAYLLAKTGRADFADLRRLTPDSEKVAELKELTRDQDTLIRTQTRLVNQLTACLKAYYPVALELFSKLQQKSTLLFLQAYPTLETARAASLQELQQQLKHTRHPHPADAAASIVELLHHPQLQADVVLTRTKSRLMLALVSQLLPLIEQIADYDKEISTLFLTHEDHAIFESLPPAGQHLAPRLLAEIGDDRQRYQDANSLQALGGTSPVLYQSGMYSKAHRRLGCIKPLRNALHQFAWQSTQSEAWAKDYYQRKRTEGKSHTVAIRALANVWVRIIFAMWTQRECYQTAIFTQAQLQHARRAA

SEQ ID NO: 285883 - protein, 343 aa, unidentified
MVSGVVGGVDTHADVHVAAAVDANGGVLGVESFGADACGYRDLSGWLDGFGPVIRVGVEGTGSYGVGLARHLHANGIVVVEVDRPNRQARRRLGRSDPIDAISAARAALSGAARVTPKLRNGRVEQMRVLLVARRSARAQRIQILNQLRQVVICGPDEVRARFKDRYKTGLVSEAARMRPRKGNDPITYTTNVVIRDLARRIQRLNTEMRNIDEALTGLLDQTAPSLLALYGVGVDTAATLLVTAGDNPDRLHTERSWAHLCGVTPLPAGSGKTSGRVRLNRGGDRQANAALYRIVLTRMASDNQTRNYVRRRRAEGRSTPEIMRCLKRYVARQTFKHLPRAA

SEQ ID NO: 285884 - protein, 344 aa, unidentified
MEAQVSVVGLDIAKSVFQVHGTDFAGKAVIRRRLKREEVEAFFRTLPRSLVALEACPGSHFWARLLRDIGHDVRLIPAQYVRPYVKTNKNDAADAEAICEAVTRPTMRFVPIKEEMQQEVLVIHRVREMLIRQRTQLINSIRGHLAEFGIIAPNRAHNIGVLTKLIEDEDFEELPSVARHALRYLVEQLREVKSKLFRIDQDLMRVVKGSDACRRLMTIPGVGVVTATALVSSMREPSDFKSGRHFAAWLGLVPKQHSTGGKDSLGGISKRGDGYLRRLLIHGSRSIMRWRGRSWTWLAKLRDRRPANVAAVAVANKTARIVWALLRFGGTYGHPGEGATMRTA

SEQ ID NO: 285885 - protein, 357 aa, unidentified
MKIVGCDLHARQQTIAMVDTETGEFTEKTLSHEGNEVRDFYAALEGPVVVGIEATGAMQWFLELLEELGIQCRVGHPAEIRARETRKQKHDRRDAGLIWELLIEDRFPEIWMPSTEERDLRTLLRDRHQWVKMRARLQHTLQAIALNHALRRGHALWSQAGQSALEALPLPPYTSQRRTKLLNLYLQLQKRTQELDKEVETQARQRPQARRLLTHPGVGAVTALATEVFLGDPSRFATANQVASYMGMIPCEHSSGKRPRLGKMTKQGNSLLRYLWTEATMHAVQEDPELKRFYRRKLIQKGMGKARIAAARKLGIRLWIMMRDQIDYEEFCRRGRLRQSGEAHAGMPDFNSGPAQQ

SEQ ID NO: 285886 - protein, 385 aa, unidentified
MLKIVYPICCGMDVHKSFLVACIASTNECGVTTYKSRRFSTFTKDLRLCADWLSANNCKDVCMESTGKYWIPIYNILEASCKIVLAHPKYVKAIRGKKTDKKDAKWIADIFKHDLVSGSFIPPADIRQLRDLVRYRWKLNNFIVGEKNRAQNCLTVSNYKLDDVFSDVFGKAATQITSYLLEHLNEPLSDVSNFRTKGMKATDAEIRDAADGNICAEQAEKYTSQLSLVMSVPGIQTFSAISVIAEIGVDMSVFPSSKHLCSWAGLTPQNNESAGKKKTTRISRAGAYIKPLLVQCALCAIRAKRNPEIRNRYLSIKKRRGHKKAIIAIARMLLTAIYNILKKNEPYNAELSHKVDVPPAHRSVTIEEAIFILQRQGYLITPCTS

SEQ ID NO: 285887 - protein, 417 aa, unidentified
MSEYAALVAIDWADQQHAVCLLDPSTGAREQTIVKHTPAALQEWALGLRQRFAGAPIAVCLEQSRGPLIYALLQYDFLVLYPINPATLAKYRQAFSTARGKDDPTDADYLLDLLEHHRNRLRPWHPDDQKTRTLRLLVEQRRRLINDRTRVSNRLTALLKGYFPQVLYWFEDIRTRLVCDFLERWPQLSVLQQARPTTIDKFLRSHHSTSKATNQRRLAEIKTAIPLTTDAAVMTSSVINVKVLVAQMKTIIAAIAEYDRHLEALCQTHDDYHLFAALPGAGPVHAARLTAALGSDRSRWQTAAELVRFSGIAPIIERSGKQFRIRWRYFCPKFFRQTFHEFAAQSIQDSFWARAYYYQQRAKGKEHHAAVRALAFKWIRIIWKCWHTRTPYNEVIYLESLRKNGSSLLKFAADYQQ

SEQ ID NO: 285888 - protein, 402 aa, unidentified
MNAVGIDVSKGKSMVAIVRPFGEIVSAPFEIKHTASGINSLVELINSVEGESRIVMEHTGRYYEVLAHQLSEANLFVSAINPKLIKDFDNDSLRKVKSDKADSVKIARYALDKWQNLKQYNVMDELRNQLKTMNRQFGFYIKHKTAMKNNLIGILDQTYPGVNTYFDSPARSDGSQKWVDFASTYWHVDCVRKMSLNAFIDHYQNWCKRKKYNFSQSKAEEIYGKAKELVPVLSKDAITKLIIKQAVDQLNSASTTVESLRTLMNETASKLPEYPVVMAMKGVGTSLGPQLIAEIGDVSRFTHKSAITAFAGVDPGVNESGSYEQKSVPTSKRGSSDLRKTLFQVMDVLIKTHPQDDPVYQFLDKKRAQGKPYYVYMTAGANKFLRIYYGRVKEYLSSLPES

SEQ ID NO: 285889 - protein, 457 aa, unidentified
MFREKSDREAAMTNLPVAHPNAAGIDIGATEMYVAVPPDRDTETVRVFETFTEDLHQLVEWLKHCRIDTVAMESTGVFWIPLYQLLEDAGIEVFLVNARHVKNVPGRKKTDVKDCQWLQFLHSVGLLNASFRPAQEICAVRTVLRHQQSLVQAAAMHIQHMQKALTQMNLQLHHVISDITGKTGLAIIDSILAGERDPQQLAKLRNERIKATEEVIAKSLVGDYRPEHIFTLRQSLTAYRHYETLISECDSELNRLVTDFNGPNDPDEPLPKEPRKNRNRSTTESLLARELKRAFRVDLTEVPAINLGTAQTLFAEVGSDFTKFSSASAFASWLSLCPHNDISGGKILASRTKHNQSRAAAALRMAAQSLTRDKSPLGDFFRRMRAKFGAPKAITAAAHKLARIIYHLVTTGQGFDSSRFTADQARYLQRQEAKLRAKARALGFHLVPLQSNLTPAQ

SEQ ID NO: 285890 - protein, 331 aa, unidentified
MNINSQGGATQAAVLLNVGIDVSKQHLDVCWGTEATRVSNDQECWSELTAKLKDRVGLVVLEATGGYERGIVVALQSAGIAVARVNPRQSHDFAKALGVLAKTDRLDARTLRDFADVLARHPDRDRYITPVIDARRELLAALMSRRRQLVDMRVAETNRLERATTPVAVKSIKSVLRLLDRQLKQIDEDIDRTLEQHFKPQKKLLDSVKGVGAVTTLTLLAMLPELGKLGRKQLAKLAGLAPLANDSGMRRGQRQIWGARAQVRSALYMATLSAMRYNPPITTFYQRLIAAGKPKKVAMVACMRKLLTVLNAMLRDNTTWNAVHGLAQNVN

SEQ ID NO: 285891 - protein, 352 aa, unidentified
MKQTKSKTESNLWIGIDFHKKTWRIHFRSESFSGNPFSMEPDADALHHKVNKEYKDYTVEVVYVCGCFGYWAHRKFLSFGWTSFVVNPCDIPRISKQKFTKTDSIDARNLSKLLKAGLLRSVTVPNKKREQLRALFRRRVHTVMYTRSIKVRLKAQLLYFGIKIPAEMDNAAWSKNFKQWVSEIDWEFETGRQMMLSNLKQVEYLHYEPNEISNLLRKYCRENYKKAYDLLRSVPGLGPLTAICFISEVGSIERFKNFKQLACLVGMMPTTYQSSDTKRTQGLTPRALRIMRSYLVEAAWQAVRIDPVLREYYKKHTGKKPNDIIVKVARQLLSRMYGVLRTETEYVIGLVK

SEQ ID NO: 285892 - protein, 352 aa, unidentified
MTYFVGIDIAKFKHDCFIQDHNGVVIRHSFSFRNNQDGFNILLDALNGLDHSQEIKIGLEATGHYGSNIKQFLNSNDYSFMEFNPLLIKRFSQATTLRKTKTDKIDAALISSFLMTVDYKPITHTSYHTSALKSLTRLRESLVKERSLTLVRITNVLDIIFPEFKPLFDNSLKSSTCMYILENYSSPDRISRMNVESYNKMKSKLRKTISYDKFLKIRDAAKSTVGTTDEIYVYELQILLGIYKELDSRISDLENKIIQYYRQFNSHIHTIKGVSELSAAAIYAELNGVTGFRNPDQILAFAGLDCSRIQSGESDKNGRMVKHGSSALRCVLMRCADSFALHNPVVYEYKYP

SEQ ID NO: 285893 - protein, 391 aa, unidentified
MSMYFIGIDISKYKHDCCIISAANQKVVSKVTIKNNKAGFNELLTIIHSLANPADIRIGFESTAHYALNLELFLENSLLTFMEVNPVLISEYKKSKTLRRTKTDSVDCESIARWLMTVEYKPHSKGFYHAYSLKSLTRLRDKLIRQRSFYLVKITNVLDHTFPEFKPFFNERLSKTALYLLENYGSAEKMARMNSASYEKLRSVSRGKFSPQQFLRLKELAVNTVGVNNSIFDVELNSLLSLYKSLVKEIDTIEKEINQLIEEVHPHYMSVPGIGPLSAAVIYSEYGDISNFTNPGQMLAFAGIEPGINESGTESHGGKMVKRGSSQLRYTLINCCLPLIRFDMTFATYYAKKRGEGKPHRVAITHVAKKLIRVIYALESQDIDFNAQELR

SEQ ID NO: 285894 - protein, 361 aa, unidentified
MDGTNSTAAGVTGGVDTHKDLHVAAVVDERDCVLGTRSFPTTRQGYRQMLAGMRTFGQLQRIGIESSGSYGAGLLRYMQAAHIKVMEVTAPDRHDRRRRGKSDDLDAQNAAHAAFAGQRTVTPRSRDGMVESLRVLRVCRKTAVNARRIALQLIQTTIIAAPDGLRDQLRHMTRMQLIRSLAALRPDLSTYRDLEAAYRIGLKSLARRYLELHDEIADLDVMISGIVNELVPDLIARNSVGHNSAAQLLLTAGDNPERLKSEASFAALCGVSPVPASSGKTIRHRLNRGGDRAANSALHIIAIGRLRTDEKTKAYVARRVAEGHSKLEVIRVLKRYIAREVYGIIMRRQKQINMTRPLLDK

SEQ ID NO: 285895 - protein, 449 aa, unidentified
MKKHDLKQRGLPVIHDYAAGIDIGSRFHVVAVPADLAKESVQTFQAFTADLERMANWLVSLGITTVAMESTGVYWIPVYEILEAHGLQVVLANARDARAVPGRKTDVNDAQWIQRLHACGLLRASFHPDREISALRSYLRLRERHLDYAAAHIQHMQKALTHMNLQLHHVVADITGLSGMRIIRAIVAGERSPSSLAALSDKRCKAGVDVIEASLVGNYQPEHVFALTQALSMYDAYQAQLLVCDQQIAQTLIKLSQEKTLPAEPLPKPRHNTRQPNALNFDVRTLLYQLVGVDLTQIHGIGPYLALRLVAECGTDLSRWRTCHHFTSWLTLAPGCRISGGKVLSAHTRKTKNRVTAHLRLAAVTVGRTNTALGAFYRRLAARIGKAKAVTATARKIAILFYNAMRFGMNYQDPGADHYEQKYRERVVKGLHRRAAEFGFTLQPVEGVS

SEQ ID NO: 285896 - protein, 351 aa, unidentified
MKVTTIGLDLAKDVFQVCAADASGKILYNKQLRRSQMAEFFTHLPPCLIGVEACGSAHYWARKLLAMGHQVKLMPPQYVKPYVKTHKNDATDAAAICEAVTRPTMRFVAVKSEEQQALLALHRVRQSFVKDRTAHSNQIRAELAEFGLIVPKGLSALRKRVPALLEDPLLPAAFGQLLQRLLDQVLRLDEQIKVLERDIVLWHRNSELSRRLAQIPGIGPLTASALLCSIGDISYFKNARQLPAWLGLVPRQHSSGGRSTLLGITKRGDCYLRTLLIHGARSAILAAQRKQQAPEHPSWLHRLLGRVHPNIAAVALANKNARVAWALLSKHQDYRVGYDPSRQTLPMAEVA

SEQ ID NO: 285897 - protein, 358 aa, unidentified
MTTVSNKQRWFNTIRLTQDDDLFVGIDAHKKSLHIALWLNDSPAIDFVMPPDSVKLIDILDKLRVALRLVVYEAGPTGYSLARMLQRANVPVSVVAPSKTPRQAAPDSKTDSLDARKLAEYAAKGLLRRIAIPTKHQEAQRQLTRLRQQFVEKQRRIKLQIKSFLLQHGIDQPQGLLHWSCQAIEKLKSIRLSEHLRYCLDMLIEELRFIAEQLKSAEHKIKDAFSEKPICTTVKLLTTHPGVGKTIATQFAAEIFNPKRFSDKTQLAKYIGLAPSVHQSGQTSRNGPILKTGRPQLRCVLIQGAWIWIKKDRDAYRTFCRLIHNSGHKNKAITAMARKLAVHLWMMARDNKPYDSAA

SEQ ID NO: 285898 - protein, 408 aa, unidentified
MKRYYIGVDWGDRLHQVYVGDDAGKKVREMKVPETVEGLAEIGRWLDEQRAEGFELWAAIEKPAGRIVDFLLDHGVEVYPVNPKAVDRVRDRYRMSGSKSDAFDAYVLAEFVRTDQSHLKSLRPSSEKAQELKMLSRDQRRVGRHKSRLLNQLTTTLKEYYARPLEVFGDLETEIALDFLHQYPTPAHLSALKRKEFNRFATQQHHLSKQRCEVLWGKLNQPQLAVPEHVVRAKAQLVEVLIEQLRASIKAVKIYNHRVESFFASSPAAQFAKTLPGGKSGTLVAAIWAELGDAQGRWESSRHLQAEAGAVPVTKASGKSRVVHFRFACNKHLRHTMYWFSFVSVNHSEWAKLYYRGQRDKGHSHHQALRALGAKWLKIIFVMWRDHKPYDENYHLANIARQKMRQAA

SEQ ID NO: 285899 - protein, 364 aa, unidentified
MDVHLRSTTVCALDAETGEAVTRRFRGNPWGEVAEWMSGFPGPSLAAYESGYLGFAPQRELSGLGVDCVVAAVSKVPRSAADLSSKNDRNDAARMAKAILSHDVTPVWVPSPEIEGLRDLAAAHDAATARLAAAKQRLLAFLARRGYVYGGTTPAGNPRKYWTYGFLRWLDGIHPADDGGIRALATLRNEVEAADETREALLAEYRAAVAAGPLSAEVEALQSIRGCGFALAAAFASEVGDFSGFRSGRQVTAYFGLAPSQRSSADSVRLGGISGAGNALVRKLAVEGSWCYAQAGHQPKLMPKGSGVPLEIRMHGRKGSERLLRRREEMIARGMPQAKANAATAAELVRWLWALGTMCREGAE

SEQ ID NO: 285900 - protein, 338 aa, unidentified
MNITTIGLDIAKSIFHLYAVNQVGRYIKKKQLKRHQLLKHLASLESCLVVMEACGGANYWAREIKALGHEVKLISPQYVKPYVKGNKNDYNDAQAIAEAAQRPNMRFVPIKSVEQQDVQNFHRQRERIKKERNALVNQVRGLLAEYGIVINKGVAAVRRDLPRILEDAENGLNALSRELFAELQEELQALDERFVRCDHRIKSMNQGNAVCQRLDGILGIGPITASATYAAVGDGKEFKNGRHYSAWLGLVPGQHSSGGKPVLLGISKRGNRYLRTLYIHGARAVLRHSTSKQDRFSLWAQQVLSRRGYNKACVAVANKIARMAWVIMVKGESYRVPM

SEQ ID NO: 285901 - protein, 337 aa, unidentified
MKLYGGIDLHSTNSYMVLIDEAGRINYKKRLLNDMDVIRKELGEFEGIDSLVVESTYNWYWLGDGLMDEGYKVKLANPNAIKQYDGIKHTNDKTDARWLADLNRLGILNAGYIYPKESRSVRDLLRKRSQLVQHRTTHILSMQTLIERTTAMRLSANQIKQLTEEKLSEYLKDVHIYLAAKSNLLMSKLLDQQIKEVEKVVYNKIKLTQEYKKLCTVDGIGKILSLTIMLETGEISRFAQVGNYSSYCRLVDSERKSNGKKKGENNKKNGNKYLCWAYIEAANFAIRNNEVIKRYYQRKCKKTNRIVAIKTIAHKLARACYYIIRDGVDFDVNKSFT

SEQ ID NO: 285902 - protein, 344 aa, unidentified
MDNHTQYSGFAGVDLAKKVMQIHFVTGDGEITDKQVKRAEFLDFFRNRTKCLIGMEACGASQDWARKLEAMGHEVHLMSPKAVKPFVSGQKNDYNDAIGIYKAMFNGVRRVPVKSTEIRDLQTLRRIRSQVAKDRIKEINHVRGLLAEYGIVMGKSITAFNKGISSALESLKERGDVSPLVAEELQTTVESIKTKIERQKRLDREIEQLARGCKNYENFLKTPGVGPFTAAMLCVLLCDPAIFANGRQFAAYIGLAPRSRGSGGKNFIIGIPSKFNCDSESRAVFVECAQALARYKNKSPWVDGILRRKPKKVAVIAIANKLARQVWAMANKGESFKQMTILTA

SEQ ID NO: 285903 - protein, 339 aa, unidentified
MTELKLIAIDTSKHIFTLHGVNERGDPVLRRELRRAQLEPFFRKLAPTDIVLEACGGSHHWGRMLTALGHRVRLIPAQYVKPFVKRGKNDRIDAAAICEAALRPSMHVVPVKPLEAQAAAMVLTVRETLVKQRTQLINTIRGHAGEYGVIAAKGTAHITALLERIAADPAIPAAAQAMFVVLGRQLDSVSEEIATLDRRLAAQHRADPVSRQLAEVPGVGPLGALTLSLTVDAAQFRSGRHFAAWLGLTPKQNSTGGKPRMGGISRQGNERLRQLLVLGATAVIRQARPGSRLASAWLMGLLQRRPKKLVAVALANKMARVVWAMMTRGEAYRPTAAAA

SEQ ID NO: 285904 - protein, 388 aa, unidentified
MIYVGIDIAKTNHYASIVNYSTGEVLESPFLVTNNKQGFDLLYSKIKDFNKEKVLIGLESTAHYGNNLIFYFHEKQFKLGIINPIQTATLRKTRIRKVKNDKVDSTLICEALSLGYYNLLSDYDIKLLEIKSLCRFHKDLKDKASEAKIQLKTYVDQLFPELNSFFKDNLDIKTAHELLKLYQSPEDISKVNLTKLSNLLIKSSRGKYDKSRAIELKILASNSVGINNYALSIQIKMTIELIELLESQIKDIEKQVSNFIKKSDNVITSIPGIGDMTAAIIISEIGDINRFNNPSQVLAFAGLDPSVKQSGNFNASSTRMSKRGSSILRYALILAANNVQLNTKTFNDYYNSKRLQGKLHYNALGHCAGKLVRNIFYMLKHNVKFNLD

SEQ ID NO: 285905 - protein, 366 aa, unidentified
MIVIGADTHKATHALAAVDAGTGRARASREIKAEEPGHLAAVRWARGLDDDRVWAIEDCRHVSRRLEQALLAAGERVVRVPPHRMGASRKGEREPGKSDEIDALAVARAVVKDGVEQFPVAYLDEHAMEIRLLFDHRADLVAERTRIINRLRWHLLEMCPELERSCKRGSLSKSRSLDRVERGLRKLPLSARVRVAREQVRELRKLSREIDALHCELSVLVSAHRPQLLAELGCGALTAAILIGHTAGNERFRSEASFALQAGTAPIPCSSGQRVQHRLNRGGDRHLNHALHIIAITRAQHDPATKEYLNRKEAEGKTPKGALRALKRHLARRFHRLLSEPAADQQRAAVDPNSNGLAPSPMACIT

SEQ ID NO: 285906 - protein, 375 aa, unidentified
MNKIIRIGMDTSKSVFQLHGVDAAEQPVLRKKLRRRDVLAFFAKLEPTRIGMEACGGAHYWGRALRALGHEVVLLPPQYVKPYVQRNKNDAADADAICEAMSRPRMRFVLVKSAAQEAVQMLMGMRVRLVGCRTQLTNAIRGHAAEFGVVAAKGLDKIEPLLARIAADPTVPDLAKDLFALQDQEYARLKAEIRQIEAKLMAWHRNNELSRRLAEIPAIGPIGACLLAIKVTDPQAFRSGRDLAAWIGLTPKDHSTAGKRRLGVITRAGDETMRWVLVAGATAVIQQVCKGRGNPSPWLLDLVRRKPPKLAAVALANKAARIAWKLMISGERYDPAAAIQTRERRRAPHNGGCAQRRSRVPCPTTGGTVHATLEA

SEQ ID NO: 285907 - protein, 435 aa, unidentified
MPFCGLDIHKKEVQAVILNDDGKVILTQRFLATRSVIEAFARKHLTKNDRVALEATTNTWPIAAILGPFVKEVVVSNPLRTKVIAQTKIKTDKVDAKVLAQLLRVDFLPSVWIPDAETRSMRQRSTERTMFVNDRTRIKNRIHSIFHQRLLEVPTGELFSTKNLAWLRNPPASLDAEGRAALTRQLSLFDSVQREVEAVTDSCAEKAYDNPQIKLLMTLPGFDFCAAGSLLAALGDITRFPSADKAAAYLGLAPSTYQSGDKCYHGRITKQGRSHARWMLTEAAQAAASHPGPLGAFFRKLAKRRNNRNLAITATARKLVTIAWHMLKNNEPYRYAQPRTIDDKLARLRVRATGQKRQSGMKKGEKRSAQYGTGERTRAVPSLDQVYEREGLPPIQPLTAGEQRMVAEHGVGKHAKEIRTARRVPRSSKSSKPKQ

SEQ ID NO: 285908 - protein, 408 aa, unidentified
MTVVGIDVSKGKSMVAAMKPGGELVAAPYEVRHSDIELSHLALDVLCMEPDTRVVMEATGRYHEPVAALLHSEGIFVSILNPLLIKQSGAGSLRKVKSDPKDALKIAKYGLDNWSTLREYTPMEAIRQQLKLCARQCDLYNKNIVMLTNNLISLSDKTFPGVNELFSSPEKADGHLKWVDFYRSFWHCDCINRMSPDAFEERYKKWCKRKDYHFSTDAADALYAASCGSYTTLPRDNNAKLLVTVAADQLIALRENQSKLEAEMLNLCKQLPEYETVMAMYGVGKSTGPHLMAELGDVRRFPHRSSIVAFAGVDPGVVGSGKMQLSSVTTSKRGSPQLRKALFQVVSTYVKCKPENEAVYQFYAKKRDEGKPFFVCTTAAANKFLRIYYARVKECLNATESATQVEEG

SEQ ID NO: 285909 - protein, 339 aa, unidentified
MGEVSTIGVDIAKSVFQIHGVDAGGTVVIRRRVGRARVLEFFADLPPCLVGMEACATAHQWARELKKLGHDTRLMPPTYVKAYVKRGKNDAADAAAICEAVTRPSMRFVPIKNVEQQSVLMLHRTRDLLIRQRTQLINALRAHLAELGLVAAKGREGVHQLVTVVTECGGERLPSNARFACQAIVTQLHAVQIEISGLDKRITQTHRVNADSKRLDTIPGFGVILSTAVVATMTDPKAFKTGREFAAWIGLVPRQNSTGGKDRLGSISKQGDRYLRRLLVVAATSVINSARARPYKYPWVIELLGRRPTKVVAVALANKMARIAWAVLAKGEPYRAPTC

SEQ ID NO: 285910 - protein, 448 aa, unidentified
MNIETKEHGNYNLLRITSAKRNILTGGVKAMHKKNNNRQVEKRQRITNNTLIVGMDIGCEFNAMCLMNKEGTVLDRYPKIYNSRKGFDYFNDIIEKTKKKYGFTDVLIGMEPTGNYWRKITFFAMGKGHEVRFIRTTALKHQRELDEASSAKNDMRDAYTIANIVREGKYIDTIIEDGIFRQLRTLAHVRERICRSNTSSKHALKGVLEDYFPELKNIFWSMKARGLWALLEQCPFPEDVLSIGIDRLTELIAKSTKRSSNEKARKIYEAARQSVGLKNIGEADRYQVVSYLSDIKHSELQLKEIELQMKAILEHIPLAKYILSIPGVGVVTCATLLGEIGNPYNFQNPKQIIKYAGYDPKEHDSGLKTGRRIISKKGRWLLRKYLYFMAMRVVHRSPFFKEYYDNKQKTMKKKEALCAVAIKLIKVIFALLRDKRMFTEESRLKLAA

SEQ ID NO: 285911 - protein, 357 aa, unidentified
MGKSIRNLSTVTRVGLDLAKRVFQVHAVDAKGEIVVARKLARNQLIPFFAELPSCVVAMEACSSAHHWGRALIELGHEVRLIPPAHVKPYVRRNKNDQVDAAAIYEAMSRPGQRFVPVRSIDNQAELMRHRARELLAGQRTAALNALRGHLAEIGLIAPQGAQHAYGLKRVAADGFNENGEIVVPDCVRGALRSLVGQIDALDEAIGAIDRELAASVKADETAKRLMTIPGVGPVTASAIMATIQNASAFASGREFAAFLGLTPRQNSTGGKTRLGRITKMGDRYLRKLLVVGACATLRHRRGHSDALRLWASGMLERKTVKYKFNLTAVALANKVARIVFVLMTRGGQYDDRPVAA

SEQ ID NO: 285912 - protein, 342 aa, unidentified
MYYIGLDVHKKTISYCVKEVSGQIHSEGTVPATRPDLDTWMKTVPQPWSAAMEATIFTGWIYDHLLPHAVELKVAHPLMLRAIAVAKKKNDRIDAGKIADCLRCNFLPECYMASTAIRERRRTLRYRNLLVRQAVQLKNKISGLLLETGVSYNKQKLHKVGYFQELLRTNQEITGRLRPLLKQCRENLDRLQKTESALVRGLSKDPLLTKRVERLKTIPAVGPITALTWVLEIGDVKRFPSLKQAISYCGLCGDEKSSADITKRTPLTKQRNKHLQTVLVEAAKMAPRRSSDLAMVYEKETLKGNKNRATLAVARQMVAYLLAIDRGEREFVSLENHRNAAA

SEQ ID NO: 285913 - protein, 384 aa, unidentified
MRNDQAYTGSDDGLVLAVSLELAAAKWKVALHDGRREKPAVHTVAQPQAAARLQAVLDLIEVHKEKWSLPTDVRIVVSYEAGQEAFWICRALNSRHIDCYVVDPASIPVERHQRRAKTDRLDVIKLVINLRAWLRGERDRMHVVHAPSPHDEASRQLMRERGQLQKEILQHQDRMRKLLATLGCWDPVDHRAFADRLERDEVRCHDGTPLPRELRERLLRECERLALVEQQLAALEKTRQMDVPAPARQRCDALARLQGIGEVGAARLALELFWREFNNRREVGACVGLVPQPYDSGESQVDQGISKQGNRRVRALLIEIAWNWLRYQPNSVLTQWFNQRTQGTGPNRRARRIAIVAVARRLTIALWRYLRDGEIPKGAQLKST

SEQ ID NO: 285914 - protein, 386 aa, unidentified
MQKLNDLSRSLTALEPDGTLIAVIEMSLSSWLVAGIVPGIERQPLKKLAVDESALLKLLHRWREEAEKAGRRIERIAVAFEAGRDGFWLARWLKARGIEAYVIHASSVAVSREHRRAKTDRLDTELLKRSFLGWLRGERDHCKMVEIPTMKDEDAKRPNREHDSLIGERSRIVNRMKAALVRLGIRGFNPKLKRATTRLDNLRTPEGEPIPPNALAELRRDMERRRLVNNQIRQIEEERLERIEKTPCDGPHVMVRLLARVMGVGIETADMLVHEVLSRNLRDRRAIARYAGLTGSPDESGRKRRQKGLARSGNVRVRRGMIQLAWRFLLHQKNSALTRWFRSRTENARRTRKPMIVALARKLLIALWRLVREGIVPDGVVLRAVQ

SEQ ID NO: 285915 - protein, 323 aa, unidentified
MIYIGLDISKYSIDVCELNGDSAKSYQLDNSPAGYNELINRLNNLSDKIHVCCEYTGIYYYAIANALYQANITISVVNAYSIKSYARLTLSRTKTDKQDAKLIAQYCKINQPEPWQPPKEQAQMLKNLTRRLEQLTKLRTMELNRQKVAETCVSESIEIILSALNQEINRIEQQLQNYISQSAELNNQQQRLTTIIGIGKKTANVLLSVLCEIERFPSYNHLVSYLGLSPIIVESGSSVRSKSRISKMGDKFVRKSLYLPALTACKRSKLFKPWFEYHQSRGKHPKQIYVMMMRKLVIYAYHVIKHDTYFDPSKIQFHKNNII

SEQ ID NO: 285916 - protein, 310 aa, unidentified
MNQPLVYLGADVSKATIECRLLDQRFSITNDGAGFAQFAKRIAPHGALHVVCEATGVYHRAFVAALHQQAVPVSILNPRQVRDFARSRGLLAKTDDLDAGVLSDFGTANTPTADVPKSLGLERLSALLAQRDHLVTLQAEEKTRRHQITDPWLRRQTERILGFFAREIVKLETQLRALRDAEPELRRKAERLDEAAGVDWRGALALLGYLPELGTFNRGAIAKLAGLAPLNHDSGQYRGQRHIAGGRARVRRQLYLSTLTAVRKNSLFKTFYRNLRAKGKPAKVALIAVARKLLVLLNSALKNPHLSLAN

SEQ ID NO: 285917 - protein, 412 aa, unidentified
MEVLHPHCAGLDVHKDTVVACVRHMGDGAVKREARTFKTTTKDLMALSEWLSAEGCMHVAMEATGIYWKPVWHILADGEFKLVLANAAHVKNVPGRKTDVNDATWLADLMAHGLIRGSFVPDQPTQEMRNFLRIRKQFVRERSSHVQRIQKTLEDANIKLDSVITDIIGLSGRRMIEALIAGETDPFALAALAHRRIKASQAELEAALRGRVTDHHRFMLRLLLQHIDAIDAAIGQIDQEVDAHVEPFRTAIKILSSIPGISDLSAEVIVAEIGIDMNRFPTEGHLISWAGLCPRNDESAGKRRSTRMRKGAPWLKTTLIQCAWAAARTKGSYLQAQFQRLRSRRGAKKAIGAVAASVLTAAYHMLKNGTLYEDLGAHHFDSRAKGKQVLRLVSRIQNLGFAVQITPIGAAA

SEQ ID NO: 285918 - protein, 402 aa, unidentified
MPNIEIGVDSMVKENFIYVGIDLHKETHTAVMIDCYNQKLGEITFPNRPADFPKLVAKVKKCNTDGKTIVFGLENAYGYGRPLAVWLIDKGYFVKDVNTAISHRQAKHRGAMYRKSDSDDAEAIALATLNMLDKLPDACPNDAYWSLGQLVHRRDNIMKQRTRLVNQLHEQLCIAYPSYKSFFNDISRPTALYFWEHYPSRKYLRGKSVEDLRAELVPVSHNKCSTKTCEKILDAIAGDKVKNNAYQDARDMVTLSIVSDLQHYDSQLAEVDKMLEQMYKMLGCTLTTIPGVNVITAVKILAEIGDIKRFSNANKLAQFAGIAPLHLSSSGKGKDVATKQGNRRLQATIYFLAIQMVQLSSKGTPRNPVVRAYYEKRKAEGKTSQQALICISRRLISIIYGM

SEQ ID NO: 285919 - protein, 362 aa, unidentified
MAQVRSWAGLDVHRASVLAATMDRDTGEMRMRRLPGSTEEVVAFCAGLPGPTRVAYEAGPTGFGLARALAAAGVQCVIAAPGKIERPSSDRVKTDERDAQRLLRLLMIDALHAVRVPSIEEEALRDLVRAREDIRGDLMRARHRMSKLLLRHDVRFDGTAAAWTTHHRAWLAKVDLGDRGAQVTLIDYLGAIDALIVRRDTLETAIDELIPDSPWADTIGRLRCLRGIDTLSAVGLCAEIGDWARFPRAGHVMSYLGLVPSEDSTGQTRRQGSITKTGSGHGRRLLVEAAWHYRRAPAKGQALKRRQAGQPAHVIAISWQAQQRLHRTWRRLDAERGKRRTIVAVAVARELAGFCWATANAD

SEQ ID NO: 285920 - protein, 353 aa, unidentified
MRVASPPVAPLKYVVGIDIAKDTFVACFGRIDPSQSLSFGKEITFANTAVGFAALLVWTAKQQVVAAPQWFVVEATGVYYEELAYFLADHAQALSVLLPNKVKHFAQSTEQKSKTDQLDARLLCRLGLERALPAWQPPTPALRQLRVLSRERQSLTQQTVRLKAQRHAYQHSYQPDARTLDRLATRVQLLSQQLKAIGQDLAALLAAEPELARKLAHLTSVPGIGLTTAMVVVAETSGFELMENERQLASYAGLDVVQRQSGLSAGATRISGRGNVRLRTALYLPAVSSLRFNPQQKAFYDRLRARQPSGKPGVIAVMRKLLLLCYSLWKNDCAYDPHYHPAHCLEREVAPTS

SEQ ID NO: 285921 - protein, 388 aa, unidentified
MEPASIHPTAVRTDLGAIFVSLELSRSTWLITSLSPGSGEKMSKYVVAGGNVAELLDRFEQLQHKARLRTGTLFPIVTIQEAGLDGFWIHRVLEANGIESHVVDAASIATSRRRRRAKTDKIDGEALTRALLAFKRGEPRVCAMVRAPDPEDEDRRRICRERKILIAERVRHVNRMKGLLFAQGVSGYQPLRKDRRQRLEELQTGDGRELPKHLKAQINRELDRLELLLEQIAAVESERNSLLSTYEQPAVEATSPAAMLLSLKGVGAEFAAVLWTEALSRRFDNRRQIAAYAGLTPTPWMSGTIDHEQGVSKAGNPRLRTTMIQLSWLWLRNQPASALSRWFVDRVQSNGGRLKKATIVALARKLLIALWKFVTAGVVIEGAVMKTI

SEQ ID NO: 285922 - protein, 343 aa, unidentified
MYFAGLDVSLRSCAVCIVDHKGTVLHERDLPCEIEEIAGYLTTLPVSIERIGFESGTLSQHLFYGLKAEGFDVVCMEARQVSAALSAMRNKTDRNDARGIAQVLRTGWFSPVHMKSREAHGVRALLSTRKALLSKTIDLANEVRGLLKIFGIRLPKTVKHGSFDGVVRPMIEMDEALAHAMLPLLDARLVLYQHFLELDRRVKRAASQDDVCMRMMTVPGIGPIAALTFKAAVDDPARFKRSRTVAAHFGLTPRRYQSGEHDNPGRISKAGDRDVRATLYAAANALLMRTMAGSQIKSWGMRLMRTKGRRRAVVAVARKLAVLLHRMWADGTEFRPEKVEAMA

SEQ ID NO: 285923 - protein, 449 aa, unidentified
MSRPQVIDDQEHERVHERVAAIDVAKDTGMVCTRTPHPARPGARQATVWTVKARMNAIRALGRQLHKDGIEVVTLESTSDYWRIWFFVLEACGLAVQLVHAAQAKNLPGRPKTDKLDAMWLARLTELGLLRASFVPPKAIRDLRDYTRARTRLVQERTRCWQRLEKLLEGALVKVSAVASKLTTVSAQDMIKAMIAGERDPHQLAGLARGRMRAKHDDLVQALDGMFDDHHGELAGLLLDQIAFLGERIAQLTSRAAELTAAMPAAWGVDPDGTTGPAAGTGPGAAVLNAVARLAEIPGISENLARSVIAETGLDMTRFPTAGHLVSWAGLCPSARQSGARTRAGHKGHGDTWLRGSLGQAATGTAGTATFLGERYHRIARRRGKAKAQVAVARSILVIIWHLLTDPAARYTELGYGYYQARTDTDRKIRNHIRQIQALGFTVTLTKAG

SEQ ID NO: 285924 - protein, 406 aa, unidentified
MNQTTCITIDVSQNKSYLQGFIAPNTPLSKARVMKHSKQGFQFIVTLIDLVKVKSKTQDQPLIIFEYTGIYHKTLEKFLILNELKYHIVAPLRAAKARNKEIREQKTDARDCLSLSKLFYENNLGMFYTENETYSNLRKLSRYYDTNMKHIVKIKVNFREILAIIYPNYKSLFDSPYSAESFVFLKNFSHPDILLEKSKDDVIKLLCDKWDHKVEWTLSKIQKIYSYVNNIVSGCNKDDPDSKMLLSYIEQLEYYFKEIDSLILQMVKLTSSLPMYNLIHSLPGIKDILTVRFIAELGDISRFTCYKQIVAYAGIDPMIRQSGDKDGLHLKMSKKGNKRFRTILHLMVNSMIKSNREDNAIKDKYRKRTQQVNPLLPKVASMACANQLVRIIFYMHKTSSEYDYIK

SEQ ID NO: 285925 - protein, 355 aa, unidentified
MNDTKYIGLDVHRESISIAVMNSAGKIVLECIVETKASSILQFISGLRGELHVTLEEGTWAAWLYDLLKPHVTRLVVCDPRKNASMKQGNKSDKIDARRLAELLRLDHLSPVYHGEHGLRSVKELVRSYLTITKDLGRVMSRVKAIYRSWAIPCSGKQVYAPRHRGQWLGKISERGVRRRAEFYYQQLDALRSLRREVRRELLEESKKHTAWKRLCQIPSIGPIRAAVLLGILQTPHRFRTKRQLWTFSGLGIETYSSADHRYVEGQLQRSKKPVSIRGLNENCNHDLKNLLKAAAVTASSKPGPFQEFYAALLAKGIRPEMARLTLARKIATIVLIVWKKEVCFDAQHLKPQTA

SEQ ID NO: 285926 - protein, 337 aa, unidentified
MDTIGLDLHKRESQLCVLTEAGEIVERRIVTSRERFTAVPGVRAPARVLVEASTESEWVAQHLEGLAHEVIVADPNFVPMYATRRRGVKTDRRDARTLAEACRLGAYRAVHRASAAQRHVRAQLAVRDALIRTRTRYVSVVKALARRDGLRLPSGEPVHTEAKLAALPLSAALVAELAPLRAVLDPLNAQIADADARLGALAAGDPVVARLRTAPGIGPVTAVAFVATLDDVTRFASAHQLEAYLGLTPREYSSGEHQHRGRISKTGNPRLRGLLVEAGWRLLRSNDAAAAPLRALAERIAARRGLSIAAVALARRLAGILFAMWRDGVDYRVRAAA

SEQ ID NO: 285927 - protein, 325 aa, unidentified
MTKLSAARDRVTKDTGQTPAVTLCYEAGYDGFWLARYLEQRGVTCQVMEPASLQVNRRARRVKTDRIDVESILHTLVAWCRGERHVCSMVVIPSVEEEDLRRCHRERDRLIGERTAHINRIKGLLFGQGIRGINVKSRYKTLTPSELVTGDGRPLPERLGREITREIERLAQVQAQIVAVEREHPVTSCAATERKRHDLLRLKGLGPSLSSTLTREVYYRQFNNRWQVANYIGIAPSAYDSGDGHRSQGISKAGNRLARVAMVEAAWLWLRHQPDSALSQWFHDRTQGQKGRIRRIMIVALARKLAIALWRYLETGLIPEGAVVK

SEQ ID NO: 285928 - protein, 408 aa, unidentified
MFCGIDWGESRHDVAIIDQSGNVLGRAKITDDAAGFTELLTLLAEAGDCEDKQIPVAIEKDHGLLVSALRSTGRAIFPLNPLAASRYRARHQVSGAKSDATDAVLLANILRTDLAAHRPLPADTELAQAIRVLARAQQDMAWTRQRIGNQIRSLLKEFYPAALDAFAALARGGLAHPEARMILAVAPTPAKAARLTRARLRTLLAKAGRQRRINTEADRLFEALRGNYLRHPSVVEDAMGIQLTALLTHFDAVCQASDDLEVAAREHFERHPAATVINSFPGMGTLLGARVLAEIGDDRARFAAARGLKAFAGSAPVTRASGKKTVVTYRRIKNNRLAAVGTIWALSALSVSPGAKRHYDARRARGDWNRQAQRHLFNKFLGQLHHCLQTGVTYDETHAFPTPLGLAA

SEQ ID NO: 285929 - protein, 350 aa, unidentified
MSQKTDAVVASTIGIDTGKNTLHLIGLDDQGTIVLREKLSRSRIVSRLANVPRCLIGIEAGMGTHYVARELIALGHDVRQVPPVYARPFRQTHKNDFRDAYAIAEAVRRPSTRCVPVKTDDQLDLRALHRVRSRLISERTAVINQIRGFLLERGIPVRQGLRFLRQQLPEILAKRIDVLSPRMIRIIEDLSGDWRHLDERIEHVTKEIEVLAYGTESCRHLMTVPGIGPIIASAMVAAIGNGVAFAKGRDFAAWLGLVPKQMSTGDRTILGRISKRGNRYLRMLFMQGARVILRPANWTKHSFGPWLTAAAKRLHPNVLATALANKLARIAWTILTERRSYETRVIADAA

SEQ ID NO: 285930 - protein, 410 aa, unidentified
MKMAGIDVHKKDLMVVVVDTSVPEEKPVRRRFVTLPSELQRFRIWLQEQGVEEAVMESTAQYWRSVWLELEPHMSLHLAQAFSNRAPRGRKHDFKDAERLVRRLMADELILSFVPKGEQRIWRSLTRMKVQLTRDRVRLQNQMECLLEEMRIKLSIVVSNLLGASGLRILHALAQGETDPKRLAELGDERLHCREEQLVDALTGRVQPMHRGMLALQLQRLQLIDQQMAQLNSMIAQAMKSHQDAVIRLAEVPGLGVDSAQQIIAEVGAQASTFSSAAELTAWVGTCPGKEESAEQNHSSRSAKGNKYLRRVLNQAAHAAVAKKGSYFQVVFRRLLPRLGYKSAIWAIAHRLCRVVWKILHEGVRYIEQGREVGPREKKQRAQMLARALRKLGYEVTITPINQLAPKPAI

SEQ ID NO: 285931 - protein, 380 aa, unidentified
MPDVSSTAPAVVNCWVVFDVHKFSLVAGVLPAAGGAPEVCRLENSERAVRRFVAKLADPAGVAVAYEAGPCGYDLYRLLTSIGVACDVIAPSLVPVRAGDRVKTDRRDAKKLVRLYRAGELSFVAPPSREFEGLRDLVRCRDDLRCARTAARHRIAKQLLRQGRIFRDGQKSWTRQHVAWVRRQRLDDPNSQRALGHMLAQLDGLDAQLAAIDHELERIAQTEPWSDPVSWLCSFRGIGLLTALGLLAEIGDFRRFAHPRELMSYLGLTPSEYSSGDRQHRGHIAKTGNRHARRLLVEAAWHYQHPPRRSQRARALEPHVPRAVTARAWQAQIRLHHRHRALTQQGKRSTVANVAVARELAGFVWAVMTRQPMREEAAAA

SEQ ID NO: 285932 - protein, 442 aa, unidentified
MRPGGTNDSSPAIYRRVRDHMRPAASRRDARSLDISRKWAPEKSRGLACGPKGQKSIDDMSRQQTALAVKLSARMNNKTITGNGISQASLVNYVNRVLNLGLDVHYRQVTVAMQEDGGRIKAGGKMGHADFLNWVRKKLEEGWKIYSCYEAGASGYWLHRELVKLGVKNLVVVPKAMGRGGQKQKTDKRDAGELCDSLDRYQRGQKKALSVVAVPTAEQEEKRALIRYHRQMMKDRGRCEARGKGLLCAQGIEVRGRWWQGDTWLTLTSDPRLKDWMKEQLVGWRSKILSTDEEQRALRQRIAALAPAILPKGVGAYSAAVLHYELRGFDHFKNRRQVGSITGLCPGVHLSDGRGKEGSINRCGIGIVRWTLVEMVWRLMIWQPQYPPVRRLAAGLVKSKRAKKRLVVQAARRLAIDLWRLSTGQTTPEKLGLVMQSNPPAN

SEQ ID NO: 285933 - protein, 396 aa, unidentified
MNGPIISFDVSKGSSHMQGFLDHGKPAGKATVIRHDLEDFAKLDALRGGIREETGSDPAAVYEFTGVYSHTLERYLDSIGMRRYGISPLESAKVRKAMIRPTKNDSLDCRTIAEVYYLRPLREGRNDDEIHVSLRDMGRFYHYLLEVKIVEKGRYHRCLDDVWPCFDKVIEPDSPKSLAIISHYGHPSKIRSKEQVKNFLMKLPRHGRVSTDELAEKIAAYAKTHVSGASPDSYKVKEVKMMSARVKGIINESERVMDSMISKAENLPEFALLKTIPGIADVTATRLIAEIGDINAYPKADSLIAYAGLDPAVMQSGQMTGEHMHITKKGNPHLRATLYVAVINMIMSKAENMITRYVLKKKNSGPSYKAAVIAGCSKLLRLIHAMLRNGTCYSDK

SEQ ID NO: 285934 - protein, 343 aa, unidentified
MTHYVGLDVSQKLTAICVVDDSGHRQWRGQCTSDPEPIERTVRRHGGDDARIGIETGPMTPWLVHELRGRGLAVTCLDARHARAALKMQINKTDQNDAEGLAQIMRTGWYRSVHVKSFASHRARALLGARAQLVGMTTRLSNHIRGVLKTFGMLPGAGRGLAFDRRVETLLADRAEVAPIVRPMLAAWRQLRQQTAAFDKAVRVLVKSNPICRHLMGVPGIGVLSVLAYVSMVEDPARFGRSRSVGAHLGLTPKQYQSGEIDRSGRISKCGDILARTLMYEAAVVLMTRVRRALGLKDWAQAIARRSGVGKARVALARKLAVILHSMWRSGEPFRWSEQPAAT

SEQ ID NO: 285935 - protein, 351 aa, unidentified
MKYYTTTTEYNCGIDLHADQMYVCILDPTGQVLVHRNVKGNDFGHFLKLAAAYRHDLTVVCECTFNWYWLADACFAAGIKFVLAHALYLAHIHGGKNKNDRVDSEKLAHLLRTNLIPPAYVYPAERRPMRALLRQRLSYVWRRAEVLAHVSMKQSAEGLVPAAKSGHNRDVWEERILAQYANPLHQFGVECDMEVVRAYDRQIDRLDLEVLRQAKKHLGRDYHLLQTVPGVGQVLGLTILFEMDAVARFPTAKDFLSYCRLVKGSVASAGKVKGLTGGRMGNAYLRWAFGEAAVLAKRSHPLLKPYAERLVAKHGKFRGNAILAAKMARAVYHMLQSGTGFDAERVIATSI

SEQ ID NO: 285936 - protein, 412 aa, unidentified
MNPVVGLDISKGESQVQAFLDKGKPYRKSFSIKHTLDGLYSLLEFLREIEKLADGKQPSVILESTGQYHMPVIQFLEEQQYVYIIVNPLISHRARSTNLRKVKTDAIDAYHLCELYYKEELEPYKKRGIQLLNLRNLTRQQETVSSTAAQTKLQLQSILDQVFPEYRGVFGNLYSKISLQILSIFPTSKEVLSVSESELTNKIAKLCTTRSEKWAKEKAIKLREAALRNPFQNNLYQSHIFNLRMFINIVLQYQEHLSKLAAEIDALAKEIEEYKIIQSIPGVGEKIAATIISEIGEIERFNHPKKLVAFAGIDPSVYSSGRFTASINRITKRGSSRLRQALFMAVQCGIRDARKQKTSDEIIPRNKKLREFYDKKREEGKPFRVAIIACANKLLHWIYALLKRKEVFQNAV

SEQ ID NO: 285937 - protein, 420 aa, unidentified
MPNIEIGVDFMVKENFIYVGIDLHKETHTAVMIDCYNQKLGEITFPNRPADFPKLVTKVKKCNTDAKEVVYGLENAYGYGRPLAVWLIDKGYFVKDVNTAISHRQAKHRGAMYRKSDSDDAEAIALATLNMLDKLPDACPNDAYWSLGQLVHRRDNIMKQRTRLVNQLHEQLCIAYPSYKQFFNDISRPTALYFWEHYPSRKYLKGKSVEDLRTELVPVSHNRCSTKNCEKILDAVASDKVKNNAYQDARDMVTLSIVSDLQHYDSQLAEVDKMLEQMYKMLGCTLTTIPGVNVITAVKILAEIGDIKRFSNANKLAQFAGIAPLHLSSSGRGKDVATKQGNRRLQATIYFLAIQMVQVSSKGTPRNSVVRAYYEKRKAEGKTSQQALICISRRLISIIYGMLKHGTEYRMPVVESAGEK

SEQ ID NO: 285938 - protein, 312 aa, unidentified
MEKLSCGGIDVSKDRLDVVVLPEGWFFSVSNDTAGWAELVARLRPLGVSAIGLEPSGGYERGIIRALLAAGLSVRRINPNKLRQFARARGVLAKNDRLDARLIAEYVAIMPTRVVQRDDAVERLAEIVTMRRQLCDEHVAVENQAAHLEDAMLRRLSKRRLIRLEADIRLLDKRLAEMVATNAAFAQLYELLTSMPGVGPVLAFTLIALLPELGKMSRKQIAALVGLAPYDFDSGKLRGHRSIYGGRMPIRNVLYMAALSASRYNPALKTFSNRLSDADKKSKVIIVAVMRKMITTLNAMLRDNTAWQPQSA

SEQ ID NO: 285939 - protein, 358 aa, unidentified
MADKVTEAAVVGGVDTHKDLHVAAVVDQNNKVLGTQYFATTRQGYRQMLAWMTSFGALKRIGVECTSTYGSGLLRYLQNAGLEVLEVTAPDRMERRKRGKSDTIDAECAAHAAFSGIRTLTPKTRNVMNESLRVLKTCRKTAISARRVALQIIHSNIISAPDELREQLRNMTRMQLIRTLGSWRPDASEYRNVTNVYRISLKSLARRYLELHDEIADLDVMIAAIVDELAPELIKRNAIGYESASQLLITAGDNPQRLRSESGFAALCGVSPVPVSSGKTSRYRLNRGGDRAANSALHIIAIGRLRTDDKTKEYVARRVAEGHTKMEAIRCLKRYISREVYTLLRNQNKQVNSIPIMA

SEQ ID NO: 285940 - protein, 360 aa, unidentified
MTESTPIVAFDQHAASVMAAVLLPGERTPVLHPLPPDLPAIHRFLARVGAAEIRCCYEAGPCGFDLQRSLQAQGIACDVIAPALIPRRVGNRVKTDRRDAAQLAVLYRAGALTAIHIPTEQEEAVRDLLRCREDICTDLLRAKHRLSKFLLRHGRRCPDGRAWSKRYFAWLTVQRWPLAALEQTFTSYRRAIDDLVARLRAVDADLQAALTVPPLAPRVARLRCFRGIDDLTALTIAVELGDATRFPTARQVMGFTGLVPSEYSSGATQKRGGITKTGNAHLRRVLVEAAWHYRHRPAISPRVRVRQGGAPPVAIRCAWNAQHRLHARYRRLLARGKSPQLAVTAVARELAAFVWAALTQ

SEQ ID NO: 285941 - protein, 375 aa, unidentified
MKEKVRFLGMDVHAETIAVAIAEPDGEVRSLGTIANRAESIRKLVKKLGPSEQLKACYEAGPTGYVLYWQLAELGVACEVIAPTLAPMKAGDRVKTDRRDAERLARSYRSGDLTPVWVPNEGSEALRDLVRAREAAKQDQLRARHRLSKFLLRSGQRPAQGVKAWTQSYMAWVRQLRFPQIAQEFTRLDYLHEVEHMGERVKRLEQAIVEAVKLASPELQEVIKGLQALRGVAQISSVTIAAELGNITRFQGARQLMGYSGAVPSEDSSGQRTRRGSITKTGNAHLRRIAIEAAWSYRLRPGIGPALRKRQEGVPEEIKEIAWKAQHRLHKRYLKLSAAGKDQRKIVTAVGRELLGFIWAIGVKAEAAVRQPIAA

SEQ ID NO: 285942 - protein, 338 aa, unidentified
MKLYAGVDLHSNNSYLGIINKKEKEIFKKKLPNDLEEIVTALIPYQKDLEGIAVESTFNWYWLVDGLKDNGYRVHLANPSAIKQYEGLKHSDDARDAFHLAQLLRLGILREGYIYPKEERPVRDLLRKRLQLVQQKTSHILSFKNLVSRNLGFQMPSNEIKKLTEDDVEGMFKEEHLALAGKANIATMHFLKGRITEIEKAVLKRAKLRDEYSNLLTVPGIGKILALTIMYETGEITRFQEVGNYVSYCRCVASKRISNGKSKGEGNRKNGNKYLSWAYVEAANYAIRGYPYVRKYYQKKMARTNKIVAIKAISHKLARASYYVIKDQEVFNPNKAFG

SEQ ID NO: 285943 - protein, 375 aa, unidentified
MIYVGIDMAKKKFDYCIIDSELSVIKRGILINNIYGFSEFLRIIKKYKNIKLGIESTGIYHVNLYTYLINNNCNIILLNPMETKLLKSSRIRKNKTDKIDAEAIAKYIIIRKNNIITMEKDTENTYTNLREYVYTYVRINRKIAMAKNQLIRDLDLLYPGLTEIVNTDSKYFIEIINNIEKIIENNYKIKYISESKYSEIRNILINSNTNNNAVKYDIDINIETLELLNKQLMKTKSIIEDEYNSIDSKIKTIPGIGTITGSIILSSIGDINKFDSVLKLRAYSGMDPVVKQSGDYNITSKISKRGNPLIRYALYLSTIPAIKFNPVIKRYYTRKKNDGMKGNKLLIACSNKLLNIIYSVLKNNKDFEEPLDNIN

SEQ ID NO: 285944 - protein, 387 aa, unidentified
MAKQNDLSRCLVTLEQDATVIAVIEMGQSSWLVAGIVPGLERNPLKKLSPDPDALLQLLYRWQKEAVQAGRAIKRIVVAYEAGRDGFWLARWLRAREIEAYVIHPSSVPVSREHRRAKTDRLDTELLKRAFLGWLRGEPKHCSMAAIPTVADEDTKRPGRERQSLVGERTRIINRVKANLARLGIRGFRANLAQASSRLEALRTPEGIAVPANTRAELQRDMDRLRFVKQQIKEIETTRAKRLAGAPNEQRHAMVRLLAQVVGVGIETADMLVQEVFSRNIRDRRALARYAGLTGAPDESGKKRRERGLAKAGNARVRRGMIELAWGHLLHQKASALTEWYRKRTSDTRGGTRKTMIVALARKLLIALWRLVTTGETPAGLLLRPAV

SEQ ID NO: 285945 - protein, 416 aa, unidentified
MSHKIAGIDVHKKVLMVVVIDATAPEEKPERRRFATMPSDLRCLANWLRGLDVKKAVMESTAQYWRPVWLEMEPHMLLHLAQAFSNRAPRGRKYDFRDAERLVRRLIADELILSFVPNGEQRIWRNLTRSRTQLVRDRVRLQSQMECLLEEMRIKLSSVVSDFLGASGLRILHALAKGETDPRQLAALRDERLKCTEEQLVDALTGSSQPMHREMLALQLEHLQLIDRQMEKLSCMIAAAMKPHQHAVKRLAEVPGFGVDSAQQMISEVGVEASTFASAAELTSWVGTCPGKDESAGENHNSRSAKGNRYLRRVLNQAAHAAVRKDGSHFQTVFRRLLPRLGYQSAIWAIAHRLCRMVWKILHEGVHYFEQGSEPDPAARKRRAKDLARALRRLGYDVVISPLNPVIQDGMQVLEN

SEQ ID NO: 285946 - protein, 318 aa, unidentified
MPESIVVGIDIAKKTFDAAIGVAGHTETFSNDDAGHDALLAQLAQRPVELVVMEATGGLERDLACALDAAGFAVAIINPRQARSFARAMGYLAKTDRIDAKALAELAQVISRHAERERFITPLPSPDQQALQALVARRRQLVAMHVAEHQRLSVCHAAAQKSIEAIILAIRAQIDDVEAELARHIQTHHADLAKRLESVRGVGPATVASLIADLPELGHLSRRQISALVGVAPFNRDSGQMRGKRAVFGGRGQIRRHLYMAALAAIRFNEVIKCFYNRLVAVGKPKKVAIVACMRKLLTILNAMVRTGKSWDGSYHLA

SEQ ID NO: 285947 - protein, 341 aa, unidentified
MADYSYFCGIDLAKNHFSLHAVDQNGKVILHKSVTRSKLLTTIANMPLMRIGVEACGGAHYWARTLNKLGHDARIMAVKYVIPYRTKGKNDLNDAVAICEAIQRPSTRFVPVKSPEQQAILSVHRMREHRVRERTALMNRMRALLSEFGLIIPVGRSSLMKHVPLILEDAENELPHLARTVIADAYHHLGELNQRIADTEQVFDSFTKVSTNVQRVMKVRGIGPQTATAILSSIGNGSQFDKNRDFSAWLGLVPKQYSTGGKPRLGRITKHGDKYLRTLLVHGAKTVIANLGDKQDKLSQWCRGVLERRGMNRAIVALAVKNARIIWSLLHNQTEYENYAA

SEQ ID NO: 285948 - protein, 340 aa, unidentified
MTELYAGIDLHSSNNVIVINDKEGNQVYRKRLRNQLGSVEKALEPFQEDICGIVVESTYNWYWLVDGLMDLGYIVHLANTGAIQKYSGLKHVDDNTDAGWLADMLRLGILPEGYIYPKGERGIRDLLRKRAHLVNQRTSNLLSMKNVVTRNTGSSPRSSALKIISDETIETMFSDVNVALSLKAGAQIVRALTEQITLIEKTALKQVRLRDAYQNLVTVPGIGPVLALTIMLETGDIGRFASDGHYASYCRCVGSAHFSNGKKKGSGNRKNGNRYLGWAFAEAAAFAMRYNQQIQRYYQRRKDSGKHMMSARAAIAHKLANACYYMLRDNTVFDVNKAFR

SEQ ID NO: 285949 - protein, 365 aa, unidentified
MDKQNYTTIGMDVSDKKTQICVMARTGATPKVVMETAIPTTKDGLAKFLATQDKSSPVAFETGTHCRWMHEVAEGMGFKVYVANPCRLRMVTESKTKNDANDARMLARIALADPGLLHPVKLRSAEHQKMINLHEMRSYLVRQRTGAIVQMRSIAKSMGFRIAKSSTAHFHKLDAKSWPREFRDIAWPMLKNIEQLAVTIKTYDKQIRELAEKPTFKAQVDRLMEIHGVGIAVATCFVAVTGGDMGRFGKPRDVGPWLGLVPKQDQSGDIDRQCHITKAGSPLMRRMLVESAQLIMRDSMADTDLKAKGLRICARGAKIAKRKAVAAVARSLAVLMVAMLKKPDAPYTPLSERCGNELLAMRTTA

SEQ ID NO: 285950 - protein, 304 aa, unidentified
MNGIGIDVSKRQLDVGTTDGETLQVWNNRSGFSELDVWLKKRPVSQIVLEATGGYERPVLDFLHAAGHPVVRANALRARRLAQGMGQMAKTDRLDAYALAQMAALVKLPAYQPLEPWQQKMREFVRARRQAMHALTIARQQQEMVGDRELRRLLQANITRLQTLVERLGKQIAEQVAQQPQLAVLKPMKGVGPGLQAVLASYLPELGRISGKAIASLVGVAPMSHDSGTMRGKRSIHGGRAEIRQVLYMASMSAMRHEPRLRDFYQSLRARGKEGKVAIVAVMRKMLVILNARVRDAENGLVPA

SEQ ID NO: 285951 - protein, 339 aa, unidentified
MPKFTVGLDIAKSVFQVHAIDRSDQVVIQRKLRRNSVLKFFAGLAPSVVGIEACHSSHYWGRELIKLGHTVRLLPTQYVKPFVVGGKNDANDAAAICMAVFRRDIHTVPVKSAEQQSLQSLHRMREKAIQERTAKSNQIRSMFSEEGHIFPAGLPSLRKGIITLMDDGEAELTPILKRLGQMYLEQMTVLKVWLDELDAMIDDNFKNNEICQRLATIPGIGPVIATAMVGLVGDPAQFKNGRRFAAWLGLTPRQHSSGGKTRLSGITKRGDGYMRKLLVQGARAVIYNVHRKTDARAEWIKALLARRPANIVAIALANKIARIAWAVFMRGEKFISATS

SEQ ID NO: 285952 - protein, 357 aa, unidentified
MEGNQESSDRRIVGGVDTHKDLHVAAVVDEVDRVLASQCFATTRHGYKQMLAWMRTFGSLQRVGIEATGSYGAGLLRYMQKAGVEVLEVTTPDKHDRRKRGKNDDLDAQNAAHAGKRTVTPKSRDGMIESLRVLKACRKTAVAARRVALQMIQNTIVCAPDELRETLRKMTRMQLIRTLAAWRPDLTDYRNVASAYRITLKSLGRRYLELHDEIADLDTMIVAIVDELAPALVARNSIGHETAAQLLLTAGDNVQRLRSEASFAALCGVSPVPASSGKTTRHRLSRGGDRAANSALHIIAIGRLRTDPRTQAYVAKRITEGHSKLEAIRCLKRYIAREVFSLIKQRSQERHPAPTAA

SEQ ID NO: 285953 - protein, 333 aa, unidentified
MGFEPEPSKEGSWMMAQNGLVVAGIDVAKGKVDACIRALSQRRTFESTAEGRRQLISWLRKHKATKVVMEASGGYEREWAKALREKEMAVRIVDPKRVRHFAQSAGRLAKNDAIDADTIAWFAETFGEAPGQAYDAEREKLLQIVNARRGLLETETMLANQGEHSVPDVVRKMQARLLKKIALEVAKLDAAIAAMIKATPHFAKLAEIIESVPGLGEGASAGLIAGMPELGQVSNKVAAALLGVAPYDDDSGKRRGERQIKGGRRRIRNLFYMPCMGAATRHNPVLKAFYDRLIAKGKLKKVAIVACMRKLIVILNIMIARGEKWDAKRYAVG

SEQ ID NO: 285954 - protein, 413 aa, unidentified
MRLFVGDDWAEDHHDVELMDAGGRRLAKARLPEGVAGIARLHAMIGEQLGEDADEDDAGQVAIGIETDRGPWVAALIAAGYTVFAVNPLQASRYRERHGVSGAKSDAADAHVLADMVRTDSHQLRPVAGDSALAAAVKVVTRTHKTLIWERTRCTQRLRHALRDYFPAALEAFEDRDAADTLELLARAPEPASAAKLTTAQISAALKRARRRGVAAKAERIQAVLRAAHLGQPDVVAAAYAASVRALTAVLITLNEQIKTLHGQVEAYFGQHPDAEIIASQPGLGGVLGARVLAESGDDPTRYASAKARKNYAGTSPITRASGKKKTVLARHVHNDRLIDALMSQAFTALRVSPGARAYYDLQRARGSGHNPALRQLANRLTGILHGCLKTRTLYDEATAWPQHPTATEKTAA

SEQ ID NO: 285955 - protein, 349 aa, unidentified
MNVYHYIGFDVHKKWIVYCVKTKDGRIVEEGNIPAAKPAVQGWAQQRSETWMGGLEATLFAGWIYDELKPYAAELKVGHPAMLKAIAASKKKNDRVDARKIADMLRCDLLPECYMAPGWIRELRRMLRYRNLVVSQAVRLKNRIAGLLMEEGVSYDAQRLHGKRYFAQLLDSLETPASVLALLRLSRASLELFLTIERRLIAELERNPRLRARVELLQTIRGVGVILALTWALEIAEVRRFGSIRQAMSYCGLTSAERESGGKRYRGPISKQRNPHLQTILIEAAKLAPRWNPELAALHERELARGNRNRATLAVARKLVAYLMAVDRSGQPFQPRASATESGVAAIAG

SEQ ID NO: 285956 - protein, 469 aa, unidentified
MQEKKYTRKHSNNKHKGTDVSDGTLVLHPNAAGIDIHPTTIFIAVPPGRDEKTVRRFSTFTSDLLEAIEWMKHCQVDTVAMESTGVYWIPLYQLLSDHGIQVYLVNARHVKNVPGRKTDVSDAQWLQYLHSVGLLRGSFRPPQEICALRSIARHKESLIKIGSVHIQHMQKALDQMNLHLHHVIDDIVGVTGLAIIEAILSGERNLNQLADLRHPRIKSSKSVIKKALKGDYRFEHLFVLRQSLHSWKQIQKQIAECDLEMESLTKQRQAESNPQPVALTPHPRRKISKNQPKGEWQNLLAQEFGVDLTAVPGIHTATVQTLYTELGSDWSAFPSAAEFSSWLKLCPNHGLSNGKIVHRQTKRAHKRLRVALRMAALSLHRDQSPLGDEYRRRRSQLGPTGAITALAHKLARILWHLVTYKTPYDSSVFFEAIEKHKQRYKKNLIRRIESMGYRVFENPTAPPLALEVP

SEQ ID NO: 285957 - protein, 453 aa, unidentified
MAKKAKKLHTKKGVELKIVNPNAAGIDIADTEMQVCVPVDRDGDNNRRFGSFTRDLNEICEWLVDCGINTAAMEATGIYWIPLFFKLKESGIDVILVNAHEVKNISEKKTDEADAEWLMLLHSYGLLKASYQPDNEARQVRNLARHRGNILKASGKEVQHMQKAMEQMNIKLSNVLSDIVGKSGRAIIDAILKGERCPEVLAQLADGRCKRSKEDIALSLEGTWDEDHLFELKQAYDLYNYLQTQMTECDHKIEELLMSYAAVVDTDMSGLVKCNKAICKKNAVDFDVERYGYAIWEINPMTIPGMSAGSVLQLIGELGHNFVDKFDTPEKFCKWCNIVPNNRISGGKLISSRVPKRKNPVGQVFRLCANSLKDAKNPLGFYFRRIRSRGGHMQAIVATAHKIARIFYVMVKNKCTYDETKVGLDEQELLRKKIERTQRALDKLNARLSAAIC

SEQ ID NO: 285958 - protein, 398 aa, unidentified
MDLPVYYELKTNNGNRDYRIQIGGHYMNYNTVYVGMDVHKESFNLCSCKYEDEKASHYQRTPASYKNVLRYLAFLRTIYGEDTRFVCGYEAGCLGYSLYHQLENFNVECVILAPTTMLEQRSKRRIKTDKRDAEIIARSLAQHNYSPVHIPTETDNQTKEFIRMRDDHKAELKKIKQQILSFCLRQGYQYDGSGNWTAKHVKWLRSLKPAGLYKEILDEYLLTYTILTDKLNRLDQRIEELASKEEYTESVSKLTCFLGIKTHTALSVIVEVGDFQRFVSARKFAGYLGLVPGQHSSGDDRNGLGITKAGNTHVRRLLVESAQSYTRGKIGYKSRVLRSRQAGNSPQVINYADRANERLRRRYYKMVLKDGKKYNIAKTAIARELACFIWGMMTDNIY

SEQ ID NO: 285959 - protein, 326 aa, unidentified
MTASSSSDNIFIGIDVGGASLDVAWHRGGRAHYANRPDAISELVQRLGAGPQLTRIAVEPTGGYEKPLVKALRQAGLPVEIVHTSRFAAYRTLIGQNAKSDTSDARLLAAYAASPDEIRGRKPDHVELEENPVREALHECASRRDQLKQMIHAESCRLATTRLAEIRQAIEQHLDMLRAEDKSLQQRMQTLLRQSADLIAAQRLLTTIKGIGVTSAMTLIAMVPELGRVDNKAAAALVGVAPFVRQSGTMTAPARIRGGRAAVRHILYMAAVAASRHNKILRPFYERLIADGKPVKVALIAVLRRLVVFANAVLRSGQPWKGASLT

SEQ ID NO: 285960 - protein, 342 aa, unidentified
MEHTTIAVDLAKSVFQVAVSHQPGRIDEERRLSRDRFLEFFAQRPPATVLLEACGSAHYWARQLQPFGHAVRLLAPHDVRPYVRRNKTDRTDAKGLLEAHRNEEIHPVPVKSIAHQAIASLHCLRSTWLTTRTSRLNTIRGLLREFGLFIPVGAHHVVPAVRTLLAEPTTVPMLLHTTLAAACDEIDVLEANMRAVERQLAALAADMADVMRLQTVPGVGLITATALVALVTDIRRFPSGRHFASFLGLTPKEDSTGPRRRLGAISKQGDVYLRMLMTHGARSLLWHAKAANQPTSLQRWAMQTEQRRGHNVAAVAVANKLARVVWAVWAHERPFATDAHGA

SEQ ID NO: 285961 - protein, 343 aa, unidentified
MKHTTISLDLAKIVIQVCHIDRQGEILFNKPMSPEKTEQFLGQAKPCVVAMEGCGSFHHWARLAQKHGHTVKGMSPKHVKPFISKQKTDANDAIGIAIASSQISMPLCQVKTVEQQSLQSLQVSRKWFDKTITSLGNHMRALCYEFGATIAKSKVALRHRILALLDDEDIALPHAIKRILGVLWEQYTTLSEQKNTLTKQIEVAAADSPQCQQLMKIEGIGSIGAVGLVSSLGDGRGFKNGRHASVYIGATPKQFSSGGKVVMLGINKHGGDKALRSVLYQGAMSVISRLPDVAQTNKQQWLIELVRRVGLKRACVALINKNIRTAWALLFHQTDYQVQAINP

SEQ ID NO: 285962 - protein, 400 aa, unidentified
MDRIEQGWVGIDAGKGHHHVVLIDRDGRQLLSRRVDNDELALTGLIETVRDRVMEPTWAIDLADGAAALVIGLLLHRDQPVFYLPGIAVNRASAGYRGEGKTDAKDAAIIADQARMRRDLRRFQVLDEDIAELRLMTAYRADLAADRTRCINRLRSLLLGVFPALERVLDFTCHGPLVLISGFQTPTAIRRLGATRLLRWLERRGVRRPGRLATAAAEAAGQQTIQLPGEAAAASLVARLAQTILELDRQLADVDRKVAASFHTQQDAAIITSLTGIGDVLGAQFLAAVGGSLSGFASADHLAGYAGLAPTPRDSGYRTGNLHRPQRYNRQLQRVFYTSAMISIQRSPASRAFYDGKRAQGKRHTQAVLALARRRVNVLWAMLRDHQPYQERRQPFILAA

SEQ ID NO: 285963 - protein, 405 aa, unidentified
MLNAVGIDVSKSKSTVAVLRPAGEVVRKPFNVSHSVKGLSELISYVKSLDGETRVVMETTGHYHEPVLKAFLDAGIFVSAVNPSLIKHHDSDENPLRKVKSDSADAKKIAKYTLDKWEYLRQHSAMDTTRAKLKTLNTQFHFFMQQKVSLKNNLISLLDLTYPGANSLFDSPVRSDGSEKWVDYVHSFWHVDCVRKIGLKAFTERYQNFCKHHSYNFQPGKPEELFVAAKELVAVVPKDSVYKQLILSNIEQLNTVSKQIEEFRHTMNELASTLPEYATVMSMYGVGPTYGPQLMAEIGDISRFDHRSAITAFAGVDPGVDQSGAVNHESNRASKHGAPRLRKTLFQIMTTLLQLAPADDPVYLFMMKKKSEGKPYQVYMTAGANKFLRIYYGKVKESLASRSAE

SEQ ID NO: 285964 - protein, 339 aa, unidentified
MNEISTVGLDIGKKVFQVHGVDCSGAVVVRRELRRRQLRAWFSRLPPCLVGLEACATAHYWARELSKLGHDVRLIPPAYAKAYVRRNKNDPADAAAICEAVGRPSMRFVAIKTEQQQAAVGIHRVRDLLMKQHTMLRNQLRGLMAEFGVVAAKGQRGLNELLAILADPEDQRIPNPLREGLTAIAETLRGIDRKLAAIDRQIVAAGRQNAAYRHLITAPGYGPILSSAMAAFVTDPAVFRRASDFAASLGIVPRQEGTGGKVWLGPISKRGNGYLRRLLVNGATALLNSKRAKQDPWLAKLLATKPRKLVAVALANKMARIGWALMTRQQDYRNMPATT

SEQ ID NO: 285965 - protein, 471 aa, unidentified
MAAGKGKADGTGVPGRGGDGAEVAEDSTQVVEYAAAIDVAKGSGMVCTRVPGSRPDRRRQKVWRVEARFNEVTALMDHLRAEGIQRLVLESTSDYWRIWYYLAEAAGLEVWLVNARDVKHLPGRGKSDTADCVWLCKLNERGMLRRSFVPPQPVRDLRALTRTRARLAQDQARHQARVEKILEDALLKISVVISDLFGASGRRFLDALVAGERSPAALAALGDKRLRATRAQLAEALTGRFRDIHATEIAVHLRLIDAINAEIGLLDERIEQQLALVPGTAPACAACGLAGGGHAPGCADGDVEVLGLAGRLGEITGIGAVNGRAVIAELGTDPSQFPTPGHAAGWARLTPRSQQSGETAKPGRTGKGNRYIRGALGQAAMTAARTDTRLGAMYRRIARKRGKQKAIVAVSRVICEIAWILICDPSARYTELGPDYYHPLSAARQTQAKIREIERLNPGKKVILADAGAAA

SEQ ID NO: 285966 - protein, 466 aa, unidentified
MTPFYLGIDVSKGYADFVILNQQKRLVMENFQLDDTFQGHSQLYEILERFLAGHPKASLYAAVESTGGFENNWHQALIGFQASLPIQTARLNPKGVMHNSKADLKRNKTDKISAQSVAEYLVSHPEKVRYQQEDSLAGLRKQWSFIQMLTKQCTQFLNQLHSLMYTANPELLSFCRDGIPGWVVKLLLQYPTSKRLAKARATTVSKIPYVTLERAQELIAAAKKSVASSVDDVSAQLVIATAKQILHLKETITAQTDLMAAQCDVPEVRLLKTFVGIGDTLAIGLMIELESIARFKTAKKLSSFWGVHPVYKISGDGSGSFKMSKQGRAQPRRLLYLAALTAIKHNPVIKPLYEYHVQQGRERMDAIGICMHKILRIIYGMLKNNTAFDPKIDEINRKRELRVKKTGPLKDKNRRFQSYDTGAPVSRRQNKKRMEREQSQSVSNTECGISAPVPMASILADVLAKV

SEQ ID NO: 285967 - protein, 387 aa, unidentified
MIYIGIDIAKNSHFASAVNSDGEVLIKPFSFENSRDGFNLFLNKFKDFSVDDCLVGLESTGHYGDNLICFLFPKGFQIGMINAIQTNSLRNSNIRKTKNDKIDTFLISKCLILGDYTLIQEKDISTIKLRTLCRFRFDVIQSQTRLKTQLTTCLDLLFPELHIFFKGNLHLKTSYALLEKYSSPQEISKTRIDTLTKLLASASRGKYSYDDAINLKNIAKSSIGVDNPAISIQIKCLIKQLNLLKEQIGSIDKNIKEIMDELNSPILSIPGIGYTLGAIILSEIGDIKRFSNPTKLLAYAGLDPSVRQSGNFNAKTTRISKRGSKHLRYAIHRASFVIVYNNDVFYEYYTTKRLKGKSHNNALGHVCNKLVRVIFKLLTENIPFNLS

SEQ ID NO: 285968 - protein, 367 aa, unidentified
MKKNSISRKQSPKRKQNRMQSPITIGMDLGDKTSRYCVLNENGEVELAAAVATTRKAMMEKFKGLPKCRIAIEVGTHSPWVSRLLSELGQEVIVANARQVKVIGSSSRKTDKVDAEMLARLARADLQLLRPIRHRSEKAQADLMTIRIRAALVEARTALINSLRGIAKGMGERVPACAADYLGLDQLEALPEKLKETLKPLMEEVETLTAKIKACEAKIEQIARKDYPETILLQQVSGVGTLIALTFVLTVDDKDRFQRSREVGCYVGLRPKRSESGESAPQLGITKEGDRYLRTLLVQGSHYILSRKGPDTDLKRWGLKLAASGGPRAKKRAIVAVARKLAILLHRLWTTGEVYEPLRNAQLLKVA

SEQ ID NO: 285969 - protein, 341 aa, unidentified
MDITIVGLDLAKNIFQVHGINSAGDVIVRRRLRRAQVQTFFAGLKPCLIGMEACGTAHFWARELVALGHEVKIIPPSYVKAYVRRGKNDAADAAAICEAVTRPNMRFVPIKSEDQQAALMLHKARELLVRQQTMLVNALRAHMAELGMIAPLGRSKVEDIITVIEDGEDASIPALAKAALKPLVSQLRANEEATATLDGEIKAWHKDNAASQRLATIPGIGFLTASAIAATVPDPSFFRSGREFSAWLGLVPRQNSTGGKDRLGRISKQGNPYIRRLLVIGATSMLRYARARTAPGADWVNSLLERRPARLVTVAMANKTARIAWALLSKGETYRAPAATA

SEQ ID NO: 285970 - protein, 409 aa, unidentified
MRYYIGIDWADGEDMVWVVNEAGEKVVSRRIAHTVAARSEWARWLRERQAEGSELWAAIERPHGRIVDFLLEHGVVVYAINPKSLDRARDRFRVGSSKSDPFDAQVLALFLRSDHAQLRPLRPSSEAAQELQGMTRDYRRQVHLQTRLLNQLTATLKENYPRALELCADLTAQWAPAFLAQYPTPAAAAALTEAEWQAFARAHRLSPARTAALWQTLQQPQLPLPAHVVRIKARLLQALLRELAPTFATVAEYRHAIDDFFATMPMGEIARSLPVGKSGTTVPTIWAELGDHGDRWDSFRQLQGYAGSVPETARSGKGGHLLIKFRFACNPVLRDALHQLALLSLPHSLWARTYYDRYRARNHTHHEALRALGAKWLKIIFVMWKRHVPYSETHHLATMAQQHLRQPAA
